United States Patent Application Publication US 2019/0348154 A1 - sequence listing, part 141

SEQ ID NO: 531788 - DNA, 2418 bp, Stenotrophomonas maltophilia
atgctacgcgaatggctatacacgctgcgcttgctgggcaagacccctggcttctcgatgttgaccattttcgtgttcgccgccggcttcggactgacggtgtacatgtacgtgctgatcaagatgttcgcctacggcgacctgcccttcccttcggcggatcgcgtggtggccatcgatagcgtggtcaatggcatggaggccgagagtggtgccatctcctactacgactaccgctcgtacgccgaaaaccaggacagttttgacgtcttcttccccagtcgggccgaagacgtcatcttgacccagaagggctttgcccagcgcgtcaacggcagctacgtcagcgagggcatgtttgccctgaccggcgaaaagccgttcctgggacgcgccctgagcgccaatgacctgcaccagggcgccgcaccggtcgcgttgatctcccaccgcctgtggatgcgggagttcgacggcagcccggacgctgtcggccgcacggtcggcctgaacaacaagccgaccaccattatcggcgtgatgcccgaaggcttcaggttcccgctggttgccgacctgtggatgccatttgtggatccaggcgcgctcaagccaggcgacaagcccaacgtgcagatctacggccgcctgaaagaaggcgtgagctttgcccaagccaaccgttcgctggacgtgatcgcccgcgagctggcccaggccagtccgcagaccaaccagggtcacggcgtcaaagtgtggcccttcgcgcaggtgatcatggccaactcgatgagcatgatcggcgtgatgatcatcgcaaccgccttcattctcctgctggtatgcgccaacgtagcgaacctgctgctcgcgcgctccggcgagcgccagaaggaactggccatccgcgctgcgctgggtgcgccgcgcacgcgcctgatccgccagatgctgatggagtcgctgtcgctcgcattgggcggcggactgctgggcctgttctgcgccggctgggcgatggaatggtcacgcgaccagatcgaaagcatgggcgaagaggttccgttctggtggaacttcggcctcagctggggcaccgtgggatttgccgcggtattggtgcttggtgttggcctgctggtcggcctgctgcccgccctgcgcgccagcagtggcgatctggccggattcctgcgcgacggcacccgtggtgcgctggggcgtcggttgacccgcttcacgcgcgcgatggtgggccttgaaatcctgctttgtgcaacgttgcttatctcctccggggtgctggtccgcagcatgtacctgagcatcaacgccgactttggcgcacccacccagggcgtgttgttcggcaatctcaacctgaacaaggaccaccatattgaatcggccgccagcacggcgcgactggccgagcaggtgcgcagtgagctggccagccgtaccgatccggaagcggacgcgatcatcatcaccacatcgttgccgggcatgtctgccgcggcgcggacgccggttctctccgaccagatggatcccggtgaacggcagttgccacgcaccatcgtggtaagcagcttgccgggctacttcgcggccaccaagatccgcctgctggagggacgtgaacccggcaatggcgacagcgcacacagcctgaacgtggcggtggtgaacgaaagcttcgcccagcgcttctggcccaatggttctgctgtcggccgtcgcttcaagctggacccgcaggatcccgcgtcgccgtggttgaccgtggtgggagtcagcgaacaggtgctccacggcccgccgttcgaggagacgcgccgcaagcccgcggtgtaccggcccctggcccagagccaggccaagaacctgatcgtcgccgtgcgttcacccaccgcgctgagcccgcaactgctggccgacagcgtggcggcagtggacagcgacctgccggtatggggcatccagacgcttgaagagcagatccgcaggagcagcagcggcatgcgcttcatcagcgacctgttcctggccttcgcgttgcttgcattgttgttggcaggcagtggcatctatgccattacctcacgttcggtcgtcctgcgtacgcatgagatcggagtacgccgggcgctgggtgcgaacgcgcgggacatcttcaaactactgttctcggaaagcggaaagcagctcgccgttggcggcggaatcgggctgttgatcggcgcgggactggtctacatgctctccaccgtgctctacaatttcaacagggaggcgcccttcctattcgccacggttatcgctattctcggcttggtggtcgggttggccacgctgttgccggcccgcaaagcggtagggataccgccgaacagagcactgcatcacgagtaa

SEQ ID NO: 531789 - DNA, 759 bp, Stenotrophomonas maltophilia
atgcaagagcccgtcatcctcctcaatcgcatcagcaagacgttcctgaccgacgaagtcgaaacgcaagccctgtccgacatcaacctgacggtcgcgcgtggcgagtacgtatccatctgcggtccgtcgggctgtggcaagtccacgctgcttgccctgctgggtctgctcgacgttcccagcgccggcgagtacacgctgaacgggcgccccgcgcagagcctttccgccaccgagcaggctcaagtgcgcaatcttgaaatcgggttcatcttccagtccttcaatctgatctccgacctcaccgtcgcggagaacgtggagttgccgcttacctaccgcaagggcgtggacgcggccgagcgccgcaggcgcgccgccgacgcgctggaaaagcttggtatgtcccatcgtgccaagcactatccctcgcagctctccggcggccagcagcagcgcattgccatcgcacgggcgctggtgacctcaccttccctgttgctcgccgacgagccgaccggcaacctggactctcgcaatgccgaagtggtcatgcagatactcaaggacctccacgaggaaggccggacaatctgcatcgtcacccacgatcccgagctggccaacgcggcctcgcgcaaggtcatcctgttcgatggacgcattgtcagcgacacgagcctgtcgcaggccgaggcagtggtcaatgccgagacgcgaacctacgcgcccctgaccgcccaccagactccctga

SEQ ID NO: 531790 - DNA, 1263 bp, Stenotrophomonas maltophilia
atggacaaggctagagaaaggaagcaacgcaaccgctggctctccaaaccggcgctcgccgcctatggcgtggtttgcctcgggttgctctcctatgcgacggtatcctttggcggcgcaggatatggcgtgtcgcgcaataccgtgatcatcagcaccgttgaacagggcaagctggatgtccgcgtgcatggcaacggcgtactccggcccgcctcggaatcctgggaagccagtcgcgtcgctggccacatagaagcgatccacgcccgtgcggggaccgtggtcaaggcaggcgatctgatcgcacagctctccaacccggaactgctgcaggccgccgaccagttgcgcagcgaaattgacgcacagatcgccgaacgcacggcgctggtagagaagctgggcagtgagctgctggaccatcggatcgtgctgctcaagacgcgcggcgatctggaggcagccagcttccagtacgaccgcgagacccggttgatccagagccacggtgacctgatctcggcactggattacaaccgcagcaaggtcaacgtcaggcagctgcaggaatcggcgaaactggaagggagccgcattgcgaacttccagaagaaggtccaggcggagctgtcggccaaggacgcccagatcgccagacttcgccagcagctcgagcgggccgaggtggacgtcgccgccctacaggtgcgcgcgcccatctccggaatcatccaggaatccgcgttgaccgctggacagcaggtgaccgtgggccagaacctggcgcggatcatcgacccggcatccctgtatgccgagcttcatatccccgaactgcaggcacgcgacctggcgctggggcagcaggccagtatcgacacacgcaacgggctggtcgatggactggtcacccgtatcgatccggcggtcaccagcggcatcgtcaaggtggatgtgaagctgacctcggcgccgccgaagggagcgcggcccgacctgagcatcgaaggcagcgtcgccacggactcgatcgcctccacccggttcgtacgccgacctgcgttcgtgcgggcaggccagaccgcgtacgtgtaccgtctggtcggggatgatcgggccgaacgcgtaaaagtggatttcgggccaagttctgcaagccacgtggccattgcccgcgggctagatgtgaaagatcggatcatcacaagcgacactacgccctggggcgaccccgagcgcgtgaccctcaaaggacaataa

SEQ ID NO: 531791 - DNA, 216 bp, Stenotrophomonas maltophilia
atggaacgtgaagtcgtggatcaacagcagtacaaggttgtggtgaatcatgaagagcagtactccatctggccggcggagcgcgagaacgcaccgggctggagcgatgccggcaagtgcggcagcaaggacgactgcctgcagcatattgaagaggtgtgggtggatatgcgcccgctgagccttcgccagaagatggccgccgccgcgacctga

SEQ ID NO: 531792 - DNA, 768 bp, Stenotrophomonas maltophilia
atgatggatgatccttggctgtttgtaccccggcggcgaccgcatgcggcgctgcgcttgatctgcctcccgttcgcaggcggcgccgcgtcggccttccgcacctgggccgacgcacttcccgagtctgtggaagtcagggccatccagttgcccgggcgcgaaggacggtttgcagaacccgcgatgcgccagctgccgcagctgctgcaggcggtggccggtgcgttgcggcccatcacttcgtgcccctacgccgtgtttggacacagcatgggaagcatcctggcgttcgagctggtacggctgttgcgtcgccagggacagtcgatgccacgtcacctgttcgtgtccggacgtcgcgcgccgcatcttccgctcggacgacggcccttccatgatcttccggaaatggacctggttgcggagattcgccgattcgacggcgacgcacacggattgctcgacagcgcagagatgcgcgccctgctgctgcctgctgtacgagccgatttcgcgctgcacgacagctacgcctatcgtgatgaggcaccgcttgatgttccgatgactgcctttggtggcatggcggatgccacgaccagcgaggacgatctgcacgcatggcaagagcactgtctcctgccgatgtccgttcagatgtatgccggtgggcacttcttcatcgaatcgcagcgcaagcacctgctccaggcgatctcagcgcaactgcatctgtcgacccccgaccaggcgttggcaggatga

SEQ ID NO: 531793 - DNA, 651 bp, Stenotrophomonas maltophilia
atgccgccctccgcagcaaccgtatccgttgccgtcacaatcccgcgggccggggccggcggcggagcgttctgctggaggtgcgcggcgatcgaggacaggcgcccgtcaccgaagaagacccgcattggaacatcggacgcgccgagtgcggccagatcatgctgcacaccagccaatgacagggaatccatgcccagatcggcgatgctgcactccggggcgatgccggcaacgtcgatgcgggcgtggcgcgcaacgctgtcaatcaagtgccgcaaccacccctctgtggcgggaacagccaccgcctcggaggacggccccgccgtccagcgagccagtacgtccagttcgccggacgcgaacaggtcacgtgcacggccgcgctggatcttgccactggaagtcttcggaagcgacgccgggcggatcaggaccaggccgtgtgccgccaccccgaactcctgtaacaacgcctggcgcatgccagcaaatacggcctcggcatcgaggccccgcatgcgggtgcgctcgacctcctggaccataaccaggcgctcttcgccatcgatctccattgcgaaggctgcgccaccactgggcttgagcgctggtacggcagactgcaccgcagcctccagatcctga

SEQ ID NO: 531794 - DNA, 1638 bp, Stenotrophomonas maltophilia
atggctgcgcagctgggccaccagcttggccgccagcaacgagtggccgcccaggtcgaagaagcgctcgttgatgcctacgctgtccaggcccagcacgctgcaccatgccgcggccaacgcccgctcgcgcggtgtcgacgctgccacctgcgcctcgcgctcaagctcgatggccggcagggcgcggcgatcgatcttgccgttggcgctcaggggcatggccgacaacacgcagatatgcgtgggcaccatgtagttgggcagcagtccggtcaatgccattcgcagcgccgacgcctgcagcatgcttccacacacaaaggcgacaagcactggctccgtgccgtccgcgcggacgatggcagccgcctcacggacgcccggctgcgccagcagatgcgcctccacctcacccagctcgatacggaaaccgcgcagcttgacctggttatcgatccggcccagatactccaccgcaccgtcactgcgctggcgtgcaaggtcgccggaacgatacaggcgcgcgccaggcgcgccgtagggcgcaggcacgaagctggccgccgtcaatccagggctgcccagatatccgcgtgccaggcccgtaccaccgatatacagctcaccggctacccccactggaacgggctgcatccagcggtccagcacgtacaactgaacattggcgatcggatggccaatgggaatccggctggcatccggttccgcaccgcacggccagtaactgacgtcgacggcggcttcggttgggccatacaggttgtgcagcgctacccctgggtaggcctgcgcaaaacggcgaaccagcggcgccggcagctcttcgccgctgcagtagacctggcgcagggacgggacatcctgggccccaacctccaggaacgcctgcagcatcgacggcacgaaatgcaggtgagtgactccctgctcgcgcatcagtgcacccagcgcctccgcgtcccgatggataccgggtgcggcgaccaccagggtagccccctggatcaacggccagaagaactcccagaccgacacgtcgaaggtgaagggagttttctgcagtacccggtccgagcactgcagtccgtacgcctgctgcatccacaggatgcggttgcggatggccccatgagtgttgaccacccctttcggccgcccggtcgaaccggaggtatagatgaggtaggcactgttgtcgtcagccagtgtcaccggcgccggggccgacattgtcgccgcatcgggcgccagggccacgcacaacgtcgcgatgccgtgcaccgccgccgattcctgcagcccgttctgcacaagcagaacggcgaccccggcggcgtcgacgatggcctgccgcctcgccgctggcagctcgggatccaccggcacataggcggcgccagccttgagcgtgcccagcagcgcgatcaccatctccaaggatcgctcaaggaagatgcccaccctgtcctccgggccgacaccgtgcgcctggagttgaaccgcgacgcgatcactggcaagccgcaacgcctctcggctcatcgttgcatcgccaatctgcagcgcgaccgcctctggagcgtccaacgcctgcgcgtcgatcagctcatgtag

SEQ ID NO: 531795 - DNA, 402 bp, Stenotrophomonas maltophilia
atgtggggggataccgaagccttctatcgcttcctcgatgcaaaccggcacctggacccctacggctggtccgacatccaggctgacgttgcgaaattggcgccctcagtcatcgcttccgagtccttcgatcaccaggattgcgaatggtatttcgtcgaacgcattgccgatgaattcgaggatatcgacggcaactacgccggcacggatcggccggaccgacggccggaccgagtcgccgccggcaagcgggtgcctgtagccggctggtggtacacgcccgcgcaaggtggccggcgcttcttcaagcaaggcgatgtgttccccgccatcaacagcgactggggtgacaccttctggatctgggcgccagaccagacgccgccggcgttgggttga

SEQ ID NO: 531796 - DNA, 1095 bp, Stenotrophomonas maltophilia
atggaattgacgccctggcacaagcgccaagccgccctcatccatcatttcacctcggtggattatctgaagggattgttgccgcagatcgacagcctgctcgcgctgaccgaccagatgctcaatgagcgctcgcatctggatacagctggcagagccttggcaggctggagctcgcagaatacggcctctcacttctcgacgtacgccttcccggcactcatggactttcgtgaaggcgtcatcaaggacatagtactgcgctcaatcgagcagtacagtgtcgctggcgagcaccaatgtgctcgcatgctggaggagtacgcctaccagatggcctgggcgacgccggaacaagagaagctcttccgggagacagcagaaagagcgtttgactatgctcgccaactatcgcggatcgttgctcgcccgtcgaccatggatgattttgtccactggcatctctggaacgatagcgtcatcaatacccaccgagtgcccagattccgcgtccgaaccgacattgtcgtgcaaaccaatcaaactcctccgcgcactggcatctacgtcgcaaaagacaaccccatggcttcacttcagtttgcctggacagggggatacggagaactatgcccagccatggcgctcaatgatattggaagagcggtcttgaagcaggttgggcgcgatggactatgggaagatgcagcagcgctgtatcgcttcctcgacgcgaaccggcatcttgacccctatggttggtctgacgtccaagccgcactggcggaactggcagcgtcaacgatcgccgtttcggcattcgatctagaagattgcgagtggcattttgttgaaccgatacccggcgcattcgaggacatcgacggaagctacaccggcaccgatcagccggatctccggccagaccgagtcgcagcaggaaagcgggcgcctgtggccggctggtggtactcgcctgcacaaggcagcaggcgcatcttcaagcaaggcgatgtgttccccgccatcaacagcgactggggtgacacgttctggatcttggccgcagaccaggcgccgccgccaatgcgctga

SEQ ID NO: 531797 - DNA, 285 bp, Stenotrophomonas maltophilia
gtgagcgactgggaagagcacgccaaccacagcctgcagtcactggccgacgcccaccagcgcggccagatcgacgtgcaggagtaccgctctcgtcgccgtcgggtactgcagggcgtgcgtgagcgctgcctgcagacccagcggcatcggcctccgggcgctgccgcagtggtttcaccgggtccgacgaacggtcgtacccggcgtgcgctggttctcattttgtgtgtcatgctgacgatggggttgttgctgtgcatctatgtcttggcagttggctga

SEQ ID NO: 531798 - DNA, 627 bp, Stenotrophomonas maltophilia
atgatgccgatctggcacggttccgctgtggcagctgaatgctcgcccgcgccgtcggtggttggattccacggcaagttgccggggatcggcgatttcgcgcgccgtcgactgtccgatgcgctcgtgcaggcctgggatgcgcacgccagccagcaactggcccgtcatccgcaactggccgaggcgcagggtgacggctggtgcttcgccttcgccgccggactctgcggcgtgcagggctgggcgggtgtggcagcgccgtcgcgtgaccgggtcggtcgggccttccccttgctgctggcattgccgttggcggcagatgacccggtgcaggccccgcagcttccctccgcgcgctggctcgatgcgctgctggcattgcaggtgcaggtgacgcagggcgggatgcacctgccggatatgctggacaacgcctgtcacgacctgccaccggcgtggccggggcaggtcggcccggtggcgtggcaggcgtgctgggcacagcgtggcagcctgtggtggcgcgacgcgcgcccaccgtgcgtgctgccgggcctgcctgccgacgatttactgttgcgcgctgtccatgcctcatgcgcccccgggcagcacacgccatga

SEQ ID NO: 531799 - DNA, 513 bp, Stenotrophomonas maltophilia
atgatcatgagagtcaggcgggcgcccgatcgggcagagcagaggctgagtgagtacgaggtaggcacggccaccgcttcatgtgtattcccgggtatccagcagtgcttcgccatcgccgggcgactgcccaccagcatgctgtgtacccatgtcagcccgggtgccagtgcggaggagatcgagctggcattcctgcacatgaggaacatggacgggcaatacgtaagtgcctggtatgtcgtggggccatgccaggagcacttcagcgccgccggcgcacagtggcgcaacgttgcggacatcaagcggtcattcaaggaaaacatcggcaggatcaaagccgaacactggctcatcgatgtgggatcgaagcgtgccaggttcagctggggcatcgatgtcgaggcaacaatgcgtgctggatcgttgaagctcgatttccagtatcggcaggcgttctcgcgcgcagactggacaaccctgcgtggccgcaaccgggtgcgcttctag

SEQ ID NO: 531800 - DNA, 723 bp, Stenotrophomonas maltophilia
atgaaggtcatgttctggaacacccagaggctgggcaaggggtcgcagggaaagccgacaatggttggctccgtgatcgcgcacgccattgatgatctaaaggtggatatatgtctcttctgtgagatcaccagcgacatcacgattgatgatgtgactgtgagcaagcagctggcagtcaccaagcgggacaggagcaaaagtagtgcacagcttggatacggctgtgtgatctccgatggtagtcagggcgatctcatcgaattccagatcccaggctacagggaggtcattggccacaacatcagctatcgaggaggagatgccttcaccaagcagagcaaacgaaaggttgcggagtgcggcgaggtagggagcattccactgttcatgtatcacgccaatgcgagctacaagtcgacaaaactggtgcagtggattgtcaatgcactggacgaaagctacacacgattcctgctggtcggtgatttcaactgttcgccacaggcgcttggaaatgccatcggcattgaccacatcaagatcgcagagggtggggcgacacataacgtgaagtcggatggagggcctctcaccacattggactacgcggttggaaaagggatcaatccgacggtgagtgtattgaacaagacggagttcttcgaacaggcaggtctcagcgaaatgcctgatcatcttcccatcatcgtggaattctga

SEQ ID NO: 531801 - DNA, 324 bp, Stenotrophomonas maltophilia
atggcgagcttcgagttcacggcaaaccagtcgtttctgcatgcttctggccatcccatcaccatcccaaagagtcagctcgcccatgatgagttgctctctctcaggcttgatcacaagcatgtcttagttacgctccctcatggtgagcgatttgaggccgagatccatcatggcaatgcgggatatggtgagtattatcaaattcgctttaatggtggcagccgcagccttcccggctacatcaagctcaatgaccaactgattgtcctgctagagaaagctgccggccgtagtcacgcaacgctggagtatcaggtgtga

SEQ ID NO: 531802 - DNA, 669 bp, Stenotrophomonas maltophilia
atgacggatctcacgcacagcaagaaggtaaccgtgtcccttgaggagctggcaagtgattcgcagcagttaaagcgcatcatgatcgaactggtttctcctcccgggagccctatgttccccttggatttcctagccttcgcggctacgaagcgccatgccagtactaccagtgcatttgtgtctgccatcaattcttggaacatggtcgtcgcaagatcacttctgagaattcatatcgacacttcgctgagattttccgcagcgtggcacgttgaagacccccatgagttctccatggaggttctaaggggcgggcggatagacaagttgaagactaggtccggggatcgtcttacggatgcgcatctggtgaagctccacacggacaagcatccttggcttcccaatgtctacgagcatctttgcgggtacgtgcacttctccggctcccatatcacagattcaatcaatgatttgagtggcgggggccggacaattgagttcttgatctccgatcaagaccgaaaatttccagacttcagttggcttgaggtgacggaatgcttccgagaagcaacgggaatccttgagacctatttgcgtggttggggtgcaaccaagcgattgtcaccggatcagcttaaatcactacgaagagatacctaa

SEQ ID NO: 531803 - DNA, 363 bp, Stenotrophomonas maltophilia
atggaagctgatactagggcgtgtgtcgcttacgtagcactgcggctaatttcaggaaaacagtcaagttcggtgtacgactactctcaaggtaggtacatcagtatcggaggtgccatatccgagtcaaacgtcaaggtttatgactacagtcgttctgcgcattttgggggcaatggccacgatggccgcttcaagctctacgactacggccactcgcaccacctgagccttgaggtcagtgggaatcagtacaaaggttatgactatggagctggcagccatttcagcggcaaagtcaatggttactcaacagcgctgtacgactacggcaatggcgcatatttcaattattcggtgtaa

SEQ ID NO: 531804 - DNA, 3831 bp, Stenotrophomonas maltophilia
atgcagttcatcgtcgacggacctgatatcccggacgcgctcctgcaggcgcacgaagaaggtcgtgtggtgttcttctgtggcgcgggaatttcctaccctgctggcctgccaggtttcaaggggctggtagaaaagatctaccgcctgaacggtacggctctctcggacattgagcgcgaggcctttgatcgaggtcagttcgacgcaaccctcgatttgctcgagagacgcttgcctggccagcgtctggccgttcgtcgagcattggcagaggcactcaagccagagcttcgccgcaaaggagcaatcgatacacaagcggcgctgctacgtcttgcgcgcggtcgcgatggcgcagtccgtttggtcactacaaactttgaccgcatatttcacgcagctgccaagcgcacaggtcagacgttccaaacctacgccgcgccgatgctgccaattccgaagaacagccgttgggacgggctcgtctacctacatggcttgctgcctgaaaggacggacgccactgcattgaaccggctggtggtcaccagcggcgatttcggtctggcttacctcacggagcgctgggccgcgcggttcgtaagcgagctgttccgcaactacgtggtgtgcttcgtgggctacagcatcaacgatccggtgctgcgttacatgatggatgcactggcagccgatcggatgctgggcgaagttacgccgcaagcttgggcgctgggcgattgcaaacccggtgaggagcgccgggcaaccatagagtgggaggccaagggcgtaacgcccatcctttactccacctctgccggaagctacccccattcggcactgcaccataccttgcgcgcctgggctgatacctatcgcgatggtgttcaagggaaagaagccatcatcgtcaaacatgcttttgcacgtcctcaggacagcactcggcaggacgacttcgtcgggcgcactttgtgggcactatcggataagtccggtctaccggcaaagcgttttgcggagctcaatccggccccgccactagactggcttctggagccactgtcggacgagcgctttacgttcatcgatctaccgcgcttccgtgttccgcctcaggcagaagtaaatagcaagctgcgattcagtctgattcgccggcccgcggcgtatgaccgcgccccttccatgttgctggtgagtggcggtgtgagtaatagtgattgggacgaagtgatgttccagctcgcacgctggttggtgcgacatctcgatgatccgaggctgatcatttggattgccgagcgcggggggcagttgcatgaccgctggaagtggttgatcgagcaccagctcgatctcgttgcaaggctggagcgcgatggcaatacctctgaactcgacgaaattcgcttgcaatcacccaaagctgttcccggtttgttgacccgcaccttgtggcgactcctgcttagtggacggttgaagtcacattggcgcaatggcgatctgtaccgatggaaaggtcgtctaaagcgtgaggggttgaccactaccatgcgcctagaattgcgagatttgcttgcgccgaaggtggtattgaagaagccgtttcgttggggcgaggacgattcgagtgacagccaggaactcacgcgcatcaaacaactggttgactgggagctagtgctgagcgcagatcacgtgcactcgaccttgcgcgatctttccgacgagtcatggaagtctgtgttgccggttttgctcgaggatatccagcaacttctacgtgacgcattggacttgtcgagagagttgggcgaggcggacgaccgcagcgaccgctcatactgggatttgccgtccatcacgccgcactggcagaaccgtggtttccacgactgggtaagcctgatcgaactactgcgcgatgcgtggctgatggtccgctcaagcgatagcgcgcgcgcgcgccgctacgccgagggctggttcgagttgccatacccaacgttcaagaggttggctcttttcgccgcaagcgaagaagactgcgtccagcccgagcaatgggtggactggttgctggcaaacgacacttggtggctgtggtcgcctaacacggggcgcgaagtatttaggctactcgttctgcggggcaggcacttagagggggagctgcaggggcgtctggaaagcgcgatcttggccggtccaccgcgtgaaatgtaccgcgacgacttggaagcggggcgctggcaagagttggcggctcggtccatctggctacacttggctaaactgagttcatcgggacttattttgggtgtgccagcggcggagcgtttggctgaaatatccgtttcttatccgcaatggcggttggccaccaacgagcgtgacgagttctcacattggatgagcggcaccggtgaccctgactaccaagagacccgggacgtcgacattgcgccccggaagcggcaggaactagtgcagtggctagcaaagccaatacccgagcggcggcctttctacgaagatacgtggcgtgacgtctgccgtacgcgcttcttccacagcttgttcgcccttggcgatctagcaagagaagatgtgtggccagctgagcgatggcgcgacgcgcttcagacttgggccgaggatgagacggtcgcgcgatcttggcattacgccgcgccgatagtagtgacaatgcctgatgccgtgtttcaggaaactagccgcgccatcacgtggtggttggaggctgcctctaagtccatcagttgccatgaagacatcctacttagcatctgccggcgcgtcttggcgcttccgctggatgaagatttaggctctcgcctcatacgtgatggagtggaggtgtataaccccgtcggcgctgcaatcaatcatcccgtcggacaggctacgcaggccttgatcaacctgtggttcaaagatgctccaagtgacaatgatctgcttgcagtgaacatcaagccgatctttacccttctgtgcgacgtggaggtagatcgattccgccacggtcgagttctgcttgggtcacggctcattgcaatctttcgagttgatcgaccctggaccgaacagtacctcctgccgctgttcagctgggagaatcccgctgaagcgcaggctctgtgggaaggttttctttggtcgccacgcttgtatcaaccgttgttgatggccttcaagtcgcagttcctggatagcgcaaatcactacctcgatttgggagagcatcggcggcagtttgcgaccttcttgacatacgccgcgttggggccagtcgatggatacaccgctgaagagttccgatctgcgtttggcgcgctcccacaagaaggcttggaagaatgcgcccaagcgctattgcaagcacttgaaggcgcagccgatcagcgtgaagactactggaagaaccgtgtgcaacctttctggcatgaagtctggccaaaatctcgcgacattgctacgccgcgcattgccgattcattgacccgtctggtgattgctgcccgcggcgaatttccggcagccgtaggtgcagtgcaggattggctacagccggtcgagcacccggactatatcctgtaccttttgcacgagtcgggcctgtgcagagccttcgcggacgttgcattgaccctgctgaatgccgtgatttgcgatccacaaggggtgccggtcgagctaagtcagtgcttagatgagattgcagaggctgtgacagagcttgagcaggatgcacgttacctgcggcttcgcgaaatcacgcgcagacgcggttaa

SEQ ID NO: 531805 - DNA, 339 bp, Stenotrophomonas maltophilia
atgagtttggctagtctctttgctgagaaggtaagtggtgatttcgtcaatggcgctattgcattgcgtcttggaaattttgaggtgcttctgatagcgcggttgtattgcagtacggagatggccatctgcgacaagtcgctgagctttctcaaactcagatattgccgtgaaagccctgccgccaactggaggcatcaatggaaactcaggttcgaggttgaggaggtaatcagggacgggaatcttttgtgctcggattgcttggggtggaaagttcagagtgcagatatttgtcatggcgatcagatcatcaatctcgcgtacgagcctttctaa

SEQ ID NO: 531806 - DNA, 261 bp, Stenotrophomonas maltophilia
atgaagcgcggacgatctacaggcaacaagaccagagcccagctcgcccggctcgacgccataaaggacatcgggtgcatcgtggcctgcagccttgggatccggttcggcgataagcctgtgccggccgaggagcaccacctgaccgttggcgggaagcacggccagaagcggcgctggcatgacttcaccatcggcctgaacccgtggtcgcagcgcggcgagctgttgggcggaatgtccgctgcccggtgcgagtaa

SEQ ID NO: 531807 - DNA, 468 bp, Stenotrophomonas maltophilia
atgctgatctggagggcggccggaaccgagggcggcgccatcgacgccgtgctgggcggcgtgaccctggcacccgctgctgtaggcgtgttcgtcgacacacgggtgcatcggattggcagggagcgctttcgcgcgatctatcaggtgttcgattcaaatgcctcaaacccgatggggcgctgtggcgcggggcgcgagatcgatctgttcgtctacgaattgaccccgccgaagcccattgaacgcggcaggattctgatcagcagctgcctggaatcggtgttcctcgccagccagaattcgggaagcccagacagtgactccgacttttcctccgtgatctggcaggacgacgggttcactatcgaagggtggggtatcggatccggagccaatgcgtcgaggcactacatcctccgaaatggccacttcgttccgactcattcgggcgaggggaatcgctga

SEQ ID NO: 531808 - DNA, 411 bp, Stenotrophomonas maltophilia
atggaaaggaagacggtgcggtacaggctgcttgcgtgtgcggcgatgggcctggtggtggtgtccaccagcggttgcgtgaccgagtgggtgccgcgcgcgaacgcggcggattacagctactcgaccgattactgcgctacggagtcgaacgggcagtggccggtgaagaatgaagtggccacgcgaaccgtgtatgtggagaagctggagaagtgcagggaagatgacaaaagcaagtgcgacgtggatggaaagtacaaccgggtgcagcagccggaaatcgagagctacgtgatggatgtcaaccagagcagtcgccgtggcgcgtacacaagttgcatgtggtactggggctggtcggaacaggaacgctggctgtggcagccgaaagcggagacatcgcattga

SEQ ID NO: 531809 - DNA, 378 bp, Stenotrophomonas maltophilia
atggcgatgggaatgtgcatgcggatggccgttgctgcggggcttgcgctgttgaccggcggttgtgcgaccgaatgggtccgcttcagtgatcatgccgatccgctggatgagtcacggtggcgctgcagggcacaggccaacgagaagtggccggagaagatagacgttgtcgagagcaccgagtacgtcgaagtgctgacggtctgcaagcagggcgagacctgcgatgtggacggcaagtacaagaagatgctgatgcccaggaccgaacgccacaccgtggacgtcaacgccaaggagaattacgagcacttcatgggctgcatggggggcgcaggctggatacagaaaaccctctggtttggccgcagatga

SEQ ID NO: 531810 - DNA, 1041 bp, Stenotrophomonas maltophilia
atgcttcgcactctgcagaccgcgctgttggcactcgtcgtggccccggccgcctacgctgccacacctgagcccaaggccggggtcgaattcgagcacaacgactggtcgctggcctgtgacaacacccgcacctgccgcgcggctgggtacagcccgcaagctgcaggcaacctgcacagtctgatgctggaacgcgcaggtggcccgggcacgaaggtgctcgcgcggctgcgcaatggcgaggacggtgtaagcccgacgccaaccggagcgctgcgcctgcgcctgaacggcaaggacctaggcccggtgcgcgacactggcgacggggacaaagagttgttgcagcaggcacagaccgatgcactggtcgccgcactgccccgccaggcacgcatagagatcatcgacggccagggcaaggcctggccgatctctgacagcggcgcagcggcggtaatgttgaaaatggacgaagcacagggccggctgggcacgccgggtgcgctggtgcggcgtggcaacaaggccgaagcgagcgtgcctgcggcattgccggtgccggtgatcatgcgcggcaagctggtggcaccgcgcgcctcggacgtggcgctggccgcggttcctgcgctgcgcaaggcaatgattgccacactgcccaagcctgacgaatgctcaggcatgagagacgactccgatgcgcgcatcgagattgaacgcctggatgcacagcatgtgctcgccatggccagctgcttcgtggggccctacaacatgagcaacggctactgggtgatacgagacaaagcaccgcaccaggcaacgtttgtcaccgacctggccgaagattttgagcgagacgacgctacgctgcggggccgtttccgaggacgtggtgttggcgattgcatctccgccaacgattgggtctgggatggcgaacgattcgtgaagagcagcgatttcactacaggccagtgtcgcaatgtgctcggtggtcattggacgctgccaaccgtggttagcacggtgaaatga

SEQ ID NO: 531811 - DNA, 324 bp, Stenotrophomonas maltophilia
atgtcccaccgtgacccgctgcgccagactcacgttcccctgccgggggaatcccgtgccaagcacgacctggccgatgccgaggaccggggcgccggtatggagacgccacacgaagatgcgcttccggcggtgcaccatcctgaacaggccgcgcaagaccgcaaggacggcggcgaccgccatcgcggcggccaggaaagcccgctcaagcgccgcgagcgcaaacaacacgccagcgacaaccaggacgaggcactggaggaaacctttccggccagcgacccgacctcgccgttcgtgccggccaaggcccccgattga

SEQ ID NO: 531812 - DNA, 1104 bp, Stenotrophomonas maltophilia
atgtcccgcgcggcggtactggctggcttggcaatcctgctggcgatggtcgtggcggccattgccggatggacagcgcctgcacgtgcgggtgtggccgcgctgcgccggagcagcacgctgcggacgttgggcgccgacgagcgcgcggcactggcaccggtgcgcgcgctgaccggctgtgcccatgacgatcaggtaaagcggctgcgcggggtattcactgccggcgcgtgctggaacacctttccggtcggcgacggtctgctgggtggcattcccgtgctggtgccaagacaggcatggccctacctctcggaagacaatgaagccgaggtggtgctgggcgaacgcgaggccgtcgtggtgcgtctcaatggcttcaccctcgctgctgcgcgaccggatgccgcccccagccgcgtctggggcgagcgcagggagacgccggaagaagtcgcgcttcgacgtggtcccggcctgcgcgcttccccgctggtgattgccgcactggcgctatgggccaccaccggcgtccccggcctgctcgccatgccgctgctcgtcgtcgccggtcttgcggcctggctgggcctgcctcgccgcaacaggcctgcgacggcgcagcgcgtgctgcaggtccgcgggcgcctgcgcgcttaccagcgtactgcccaaacatcccgggtgtggctgctgggcaatgaccggcgcgtgcagcttccggaagaatgggagcacgtcgcaggattctccagtgggcgctcgatgttgctggaggtgcgcgccggtgatggagcggtactgggtgcgggcacggcatggtgcctggccagcgaccggcggcgctatccgcccacgggcgggttctggcatctggcctggctgggcctgctgctgtgcgtgctggtgttgggcgccaccgcaatgccgctgccgcagcgcctggacccgggctgggcggctgcccatggctggcaagtgctggcagtgctggcgctggtctggcacgcggtacgcgttgtgctctgcgtaatgcagttcctccgccgccgtcatgcacttgacgcggacatcgcgcaacgccccgagccgtggcactga

SEQ ID NO: 531813 - DNA, 1809 bp, Stenotrophomonas maltophilia
atgaacgcctccactgtgaacctgtggattgcgctggtactcactctggcagtggccatcgccagcgtgcgccagctacgtgcacgtacgtcgccccccggccgtcggtggagggtaatcgcgctgcaggtcatcgccaccacgctgctgtatttgtgcctggggccgcccacccgccagcagcccgtcgccggcttggtcgtgcttggaatcgatgccgacaaggctggcgtcttgccgcccgccgtgggcccgctgctgctgttgccggaggccaccgatgtggccggtgcgcagcgcgtgccggacctagcgaccgcgctgcgccagcatccggccgccacgctaagcctggtcggtgccggcctggtcgcgcgtgatcgcgacgcgacgttgccgccggatgtacgttggcaggccgcacccgcaccgcgtggctggatcgcactgcagccgccggccgacgtcgcgccgggcgcgcgtttcgatgtacgtgcccaggcgaacggcgtggcgcacgcgaaggcggaactgctggatccggccgacggcgtggtcgatcgcaccgatgttgccgacgacggacgcgtgcagctcagcggtgtcgcccgtgccgaaggccgcagcgtgttcaagctgcgcctgctcgacgctgaaggccatgtggtggacagcgtgccggtaccacagcagaccgtgccggcgtcgcctgtgcggctgctggtccgtgccagcgcgcccggaccggaactgaagtacctgcgccgctgggccacggacgcgggcctgcgcgtgcaggttcaggccgataccggggcaggtctcagcgtcggcgatggtgtggttccgcttgatgccgcatcgctcgcgcgcagcgatctactgctgctggacgagcgcagcctggcggcgttgagcgccgctcagttcgccgccgtgcagcaggcgctgcgcgaggggctcggcgtcctggtacgtactgcgggtgcacccgcagccagtgcgcgccagcgcctgcgcgatctgggcctgccgttgctgggcgatggcagcagccacaccctggtccttccaggtgacggcgaagccgccctcctggccgcgcgacgtggtccgctcgccgctggcacgctgccgaccggctacggcgaggaggccgaccgcagctcgcacagtgcgccattacctgctctggaagcgctggcgctgcaggtgcagggcggcaatgccctgctgcaggatcgcgacggcaaggccgttggcgactggcgcgctgccggcaagggccgcatcggcctgctgccactgaccgacagctggcgctgggtgctggccggccgcgacgaccgtcatggtgagctctggagcggtgtggtcgccacgctggcgcgcgcgcagcgcagcgctgatgcgctgtggtcgccgcagccgatcagctgggcaggcgagcggcaggcattgtgcggcgcgcaggcaccgctgcgggcgttcaatgcgcgtggcgacgacgtaccgctcgttgtcgacggcacgacgttgcccctgcgctgcgccggctggtggcctcgcgacgcagggtggcagcgcctgcagcacggtgacagcatcgtctggcgctacgcgttcgatccgaaggaggcacctgcactgcatcggcaggcgatgatcgatgcaacctcgcaggcgctggcatccagcacatcgaagaacacatcggtgatgcagtccgtgccggggtcgcgctggccctggtggctggccttcgtgctgtgcgcatcactgctgtggtggctggaacggcggcgctga

SEQ ID NO: 531814 - DNA, 573 bp, Stenotrophomonas maltophilia
atggacggttcaagggatcaagtggtgcgtgactcgtttgagattgttatggaggctatcccctggaatcacatgtccacgatgctggaatcgatcgggtgcatggctgagtccgtttcgcaggctgaggtgcatggcgacccggtagcgattggcgactggcttgccggaaatttcgatgagttcgcgtgcagttcgtgcctggtccaggtgatcaatgacttcaggttgggatctgccgtccatattcccacgttgctgattcgcgtcttcaggttcgacgggctggcaagcatcgatctttcattcgatatggattggtcgaatgctggcgtggccatgcccatgctccatcggcatttcctgaaattgaagctgttgattggcgcgcgcgctgtgtatggaggaatggagcccgctcaggatctggatacccgattcttcactgatgatgagcgcggtcctcttgggatctccgctgcctgcttcaagacatcgatccagggcgacggcaatgccaagctgacccacactcaagacgacatcagcgtgctgcagcgcgtgaaggtttga

SEQ ID NO: 531815 - DNA, 180 bp, Stenotrophomonas maltophilia
atgagcatttcgctgtttctcgaggttgaagtcggtgccaaccttgagaccgtgctacacgcactggattgggcccagcccgagtattcagatggcgcgaatggtctgcacgggaatgttccagcgtccagcgcaggctaccggttcggcctcctcgaaccgacgcaggcccaggtgtag

SEQ ID NO: 531816 - DNA, 1719 bp, Stenotrophomonas maltophilia
atggccgccatgcagatcacacgtaccctggttgtccttgctgtgctgcttgcggccgtggctgcgtggctggtcgtttcgaagccccccgtcggggtggtgttcgtgcagggggcgcagatggcacctgcgggcgccgggacatccaccgccgtgccggcgcggccaccacaggacctggactggcgcccgttggaccagcaggtgctggcgcagtggcgcggcccatactggctgcgctggcaggtgccggcgccaacgggcgccggcgatcctggccgcacgctgcggctgtcactgcgcgcagccagccaactgtactggaacggcaccccgtggatcagcaacggcgtcgtagggcgcaccgctgctgaagaacaaccaggacgcatcgacctcgtccacgtgctcccccctgcttccggcaaggccagcgacgaactggtggtgcttgcatcaagccagcggcagcacgtcgccctgcatggtgccgatgcgatggtgctggtggcacccgctgcggtgctgtacggccagatcatcctgccgtggctgattgcggccttcgccatcggcgctttggcggcagcgtgcctgtatttcctggcggtgctgcgtggccagacgcgcgcacccggcgcgcggctgctgctggcactgggcacggtggggctggcactgcctgcgatggaagcctggcgttccctgctgggttatgactacccgtggcatgtcccgcgactggttgcattgctggcgttgcacgtagcagcggcggcactgctgccggcctatctggcgcggcgtttccaggtaatggtgccgcgtgccgcctgcttcgcctatctgtcagtgatcgtggtgctcgccctcttcctgcccggctttgacgcgcgctcggccgcagtgctgttgctgagcctgctcgcctcggtgtggctgctgctgcgcgcgcgcggcgacaccgaggatcgcgggccgatcctggccctgctgctggccggcctgatggccttgctggtcgcccgaggcgcgttccttgatggcccctacttcctgctgctggccgtgttgatggtgttcctgctgctgcgtcacgcggcgcagctgcaggcactggaccggcacaacgcatggctgcgcgaagaacgcgcgcggctctcattgcagttgctgcagcggggcatccagccgcattggctgatgaacacccttacaagcctgcaggaactgatcgaacaggcacggcagcgagcgagccggctggtggaatcgctggccgatcagttcgatcgcctgcgcgacagcagcaaccggcagagcattccgctgcaggatgagctggccctgtgccgcagccatctggacatcgttggtcaggcgctgggccagccgatggtcctggacgtggatggcgcggatgcagcattgtcgctaccgccaggcatcctgcatgcgcaggtggagaacgcactgacccatgccgggacgatggcgtgcgcgcagcacccgttccacctgcgggtgcagcgggaggatgcccgctgggtgctggaactgcgcagtgcacgtggctcctcctcgcatcgtggccgcggcaccggcacgcgttacatcgaagccagcctggctgccgcaagccccggcggctggagtttcgtgcagggcatcgacggcaaccagtggtgcgggaggatcgaactgacatgcgcatcctga

SEQ ID NO: 531817 - DNA, 1512 bp, Stenotrophomonas maltophilia
atgagccgtagcgcctgcacattctccaacagcgtccctccccgccggaccgccaaggccgcgacgctggctacgctctgcctgctgttcgccgcggcctgcccggcgcaggccaggccggcggcactggtgttcgagccctacacgctgcagaccaaggcacatggcgccatcccggccgagatggccgtgctggaggtgccgcgccggcacagcgagccggatggaccgcgcatgcagctgaaggtggtacgcctgcgtgcgaccggaggcgatggccgcagcgctccggtggtctacctggccggtggccccggcggctccggtatcgataccgcacgcggcccacgctggccggtattcgaccaggtccggcgcgagaccgatgtgctgctgctcgaccagcgcggtgccggcctgtcggaaccgccgccggactgtccgcatgaaacccgcttcgacgacgcgcaacccctgctgcgcgattccgcactggccgcattgcaggcgacggccgcgaaatgcgtggcgttctggcgccaggccggcgtcgatctcggcgcctacaccaccgccgagagtgccgacgatctggatgacctgcgccgcgcgctgggcgtgcagaagatcagcctgtggggcatgagttatggcacccacctggccctggccacggtgcgcaggcacggcgaagggctgcagcgcgtggtgctgatgggtaccgaagggcctgacgataccctcaagctgccactggccagcgacgccgtgctgcaggagctggccgtactcgcccgcaaggatggcttcgacgacctgtccggatcggtgacgcgtgtgctgcaggcgctgcgcgaacacccccgtcagggccgcagccgcatgaacgacggaaagcaggtgaccatcggcctgtacgatgcgcagatcgcgatcgccaacatgctggggcagcgcatcacccagcaatggctgccgctggtgctgcgggaagcggagcgtggcaactacgatccgctggccgatctggtgctgatcgggcgcggccagttcgcgcagtacccggccatggggctggcgatggatgtggcgtccgggcagagcccgcaacgcagggcactggctgaagcacaggcccggcagagcctgttcggcgatggactgaacttcccgttcccggccattggcgatggcctgggcctggttgatctgggtgaacacttccgcgggtcgctgcgcagcgacgtgccggtactgttcatcagcggcacgctggatgggcgcacgccaccggccaacgccgaggtgctgcggccgggcttcagcaatggccgctcgctgttggtgcgcaacgccagccatcaccacgagctgtggacggggaacccggccattgcccgcagcatcgttgccttcctcaccggtcaagccgtggaagacgccgtgctggaggtgccgccgcccgtgttcgccacccgcgacagcgacctgctgggcggcggcggacgctga

SEQ ID NO: 531818 - DNA, 684 bp, Stenotrophomonas maltophilia
atgaagattcgagatgcagggatggcaatgatggtcgggttgctggtggcctgcgggcaagcgccggagaaggccgtcgaaacggcgcctgtggttgcgtccgacgcacctgctggaacaccggccgcgacgaccaccgtggtcgagagtgaaccgtccatcgagaacggagtggatccgtcggtgtgggacaacgagggcgagccggaaagcgagccgccgccgccgcagaaggccgagctgacctgtgcggacaatccgttggccacgtatttctttaccctggtcggcggcaacagcgtggacgactgcggccgcaaggacccgaaggtgctggccgcgttcaacgcgctgatgaaggacacggcggcggccgaatcgtccgacaaggacatcccctcgctgcgcgtgcgcctgctcagtggccccagcgcaccgggccagccgcatcagctgcagggcgagagctggtggttctacaccgcctgccaggcccacgactgccccggcaccgcgctggcgatgctgtactcacccgatcagtcgaagatggtcggccgcctcaccgcgcgctgccgggtgtggtggctgggcgagcccacggccgaacaacgcgagcagatcgaacagctccgcccgctggatgatgccgcattgaaggaagacagcgcgctctgcgaatga

SEQ ID NO: 531819 - DNA, 342 bp, Stenotrophomonas maltophilia
atggccctgttgattgtcctcctcaggccgttgtgggcgccctttgccgcctataccgaagcgggctacctcgacagggggagcctgaccaacttcgcgatcatgggggcacacatcctccccgcgctcttcatcggtgaagtgatcctgcatcgattcgggtcgctgacgcttgccaatccaaactggccgttgcgcctctcggttgcagaccgaaagctcatgcgcaggtacggtatatcaagcaatggtgagtacttcgccgttgacgagcttcacttcgattcactgcaacgtgccgttgagcatgctcgtgcgaacgaacgtcaacgggaggggtga

SEQ ID NO: 531820 - DNA, 1026 bp, Stenotrophomonas maltophilia
atgaaagaggcccacatccagggagccgccgtggggctgatcgtcggcggcaggctggtctatgcgcaggggttcggctacgccgaccacgccggcaaggtgcgggtgacgccagacacggtatttgtcgcagcatcgctgtccaaacccattgccagttgggtcacgatgcgcctcgcccaacaagggcgtttccaccttgatgacatcgtcgccgatgccgtagtgccctggccgttggccaacgggccgtacgaccaccgcaggatcacctaccgccatctgctctcacacacggctggaaccagtctgggcggttatcaaggttggctggatttcaaggaactgcccacgcttgagcagtcactggcgggcagaaccaacggacgcggtgctgtcgagctcatcgcgcctgccggcagcaggttccagtactccggcggcggctacaccctgttgcagctggccatcgagcggaagacccggcatcggtaccaggatctggcgcatgagctggtattcgaaccgctgggcatgacccgcagcagcgtggcgatgacgccgacggtgctgcggaatgctgccgaagggcacggtgacgacggtgccccggtgccaatgcgctattacgtcgagcaggcaccgtcaacgttgaccaccacggttcgggacttttcccgctggatgatcgcgggcatgcggggcacggcgggcgtgcatccggttcagcaatcagcgcttgcgcaactccattcgcctgcgcagctgagcacgccgcgagctgcggacgaagcggtttacggcctcggccatttcatcgagcacctgcccgacggcagtctcgccgtcggtcatgacgggcgcaatcaggcgggcttccgtgccaggttcctgatgcggcctgcgtcggcggacggcatcgtgttcttcagcaactcccgcacgggcctggcgctggaccgcatcgtctgcctgtggggcgctgatgcggcaaaggctgatcctgcagaggagtgccgccagtga

SEQ ID NO: 531821 - DNA, 1071 bp, Stenotrophomonas maltophilia
atgaagagactggcgtgcctgcttctgctgctcacgatgtcgatgcttccccacggcgcgaatgcggccccttccgcagtaggggtcaatgcagccgcgctggatgacttcttcgatcaggtagagaaaagcaatgcgggcgtcggcagcctgtccatcttcaggaacgggcagcaggtctacaacagaagtttcgggcagaggcacctgccgcccaccgtgtacgacgccgacacccgctacccgattgcctccgtgaccaagatggtcaccgccatcctggcgttcaagctgattgaagaggggcggttgagcctggacgatcacctctcggacttcttccccgacatgccgtcggcgcagcagatcaccgtcggccatctgctggcgcataccagtggcctgggcaacttcgcgataaaggatggcgcagtctgggtggtggacgaggtgagccaggcgcggattctcgacgagatacgaaagcagggcactgcgttcaagccaggtgcgcgcgtggcctactccaactctgcctacctgctgctgcggatgatcctggagcagcgttatggcgtggattaccagcacatcgtcgaacagcagattgcgcaaccgctcgggttgcagcactttgctgcggcgccgtcgcacgtcgacaataccttcaagtcccatgcatacgcagggcagtggaacgagatcaaggacatcgcgtatgccaacgtgatcggtgtgggcgacatcgccagcaccacgcacgatctgaacgtgctgatcaacgcgctgttccacaaccaactgctgcgcggggaaaccgtcgaccagatgatgccggttgccggcgcaggctggggaaaaggactggccgagttcccgttcggagagcggcgcttcctgggccacggtggcgacgtactgggctcccattcgcgggtcatctacaaccccgttgatgatctggcgatcgcatacgccaccaatggcgaacgcattccgacatccgatttcctgcagatcatcgtcggcatcgtctacgggggcagcttcacactgccggcgctgaaatag

SEQ ID NO: 531822 - DNA, 327 bp, Stenotrophomonas maltophilia
atgctgatccccctctccgcgtatgtgcagcaggccgacggcagcaccgtgcaggtggtggtactggacgcaggcgtgcatgcggcgcttcaggcgctcggctttgagggcgtgctgcccaccctgcgtgctgaagtgggcgacgacctcggcaaagcccgcctgttcgccgcgctgcgtgatctcggtgtagcgttctcggccggccgcgagtggagcccggccgaggtgtttgcctggcttcgcgaccgcggcctgctcgagggtgcgtatctgcgcatcgcctggacccatccacagcagtacgacgtctgcagcgacccgtga

SEQ ID NO: 531823 - DNA, 471 bp, Stenotrophomonas maltophilia
atggcaatgttcatcaagtccttccgtggtgtgccggaaggcgagatctatcccgtccagttcgttgccggtgacgaatgcccgcccgaactggaggccggcgcactctctgtcggtgcgctcagcctgatggctgacacaccgcccccgttcctactgggatccagtgttcagccggagagcttcgatctttccgacggcagtgccctgtcgttgggcgacgtggttggccgtgcgcatgctgcctctgggctgtcggtggaggactggaacgcgctcgaggacagcgcacgcgaggcgctgatcgccgagaccgtcgacaagctgtccggcgaggacgacaagggccaggtcgctgccgaagacaaaccagccttgatggcgcagcttgaagctgcgggtatcccgttcgacaagcgctggggtcctgaaaagctggccgcggcgctggccgacggcaagaaggagtga

SEQ ID NO: 531824 - DNA, 480 bp, Stenotrophomonas maltophilia
atgcccctgttgacgcctgagcagtgccgtgcccaatgcagggtcgatggggattacgccgatacagagctggcggcgctgctcgcatcggccgaggacgccgcggcggcatacctgaatcggtcgctatttgccgaccaggccgccctggaaggggccttggattccttcccggctgaggcggcggcagcggcctcagcctactcggtggcgatggtcgcggccgattctgagcctgacgccgccaaggccgaggcaatgcgctctgtggcgaagcaacgcaaggcgtctgccgatttgcttctctcgcggaatctggctggaatggtcgccaacccgagtgtggttgccgccatccggctgaccttggcccacctgtgggagagccccagcgctgtggtgatcggcgccaccgccattgagctgccgcttggcgtgaagccgctactgcggccctatcggcgggtgatgactccatga

SEQ ID NO: 531825 - DNA, 342 bp, Stenotrophomonas maltophilia
atgagcgcaaagaacctaagactcaagcttttcaagccaacgaaggctcgcgacgactacggcgaagaggtagagatcttcgtcgaagttgccgaggtctgggcagcggatgagccgctgtccctgcggagcaccactgccgtgctcggggtggagtccggtgcactgaacgccccggacctgcggtggatgacggtacgcatcaatcgggagatcgagcccggttggcgtgtagcgcgaaccactgggcgcgacgtgggaaagcagatgttggtgatggcggtgcgggcggcaaagtcaccgctggatatgcacctgatagcgaggcttcaacatgggtga

SEQ ID NO: 531826 - DNA, 3564 bp, Stenotrophomonas maltophilia
gtgacctcgactgccgcgaccatcgacgtacagctgcgggcgaacaccgcggcctaccgtgccgagatggtgaactccgcgcggaccaccacgcagcagcttggcctgatccgtaaggaggcctcacagacagctgtttccattgccaatctcaatagggctgccgttggattccttgggtttgaggccgttaagagtggtgtttcggcgctgctgaacgcccagaagtccatccagcagatccactacggtctgatgggcgctactggctccgcccaggcggccgataaggcgtatgcgttcgtcgcgcagaccgcaaaagagcttggtctaaatctggaagaagcaggcaagagcttcaccagcatgtcggccgccgccacggcgaacggcattgcgatgaaagatcaacaggatctgttccgccagctgtctcgctcggccacggtgatgcacctgaccagtgagcagatggggcgcgctaccacggcgctggggcagtccttcagcaaaggaaagttccaggccgaggagctacggcagcagctgggcgaggctatcccgggcatcgtcccgcgcttcatgcaggccgtcgccaaaatgaacgaagggacggcactggctgggaagtccttcgacaagttgctgcaggacggtgacctgaacgtccagaagtacctcccagcgatgatccaagcattggaagcatccggcaccggcgcggaagcggcggctaaagggctgagcgccgaactgaatcgactttccacggcttggttcgacctcaaggtcaaggcaagcggtggtgtgttcagcgacgcggcgatctcgtcggttcgcttcatggccgaaaatttggagaacgtggccggtgccgcgaccttggccgcaggcgtgatcgcaggccgcctcgtaggcgttggcgcgggcaaggcatacagcgcggtcgcggcaccggtatctgagcgagtggcggcctctgggcaggcatcggagctggccaacgtagcccgggagcgagcgaaggaagcggctgcccaggtcgagcaggcccgtcagtcggtgcgcctcactaccgcgtggaaggcgcaagctgctgctgcgcaggacaccgcgcgtgggcaacttgcgatggcctccgctgcccacgaggcagctcagcggaccatggagcatcagcaaggtgccgctacgctttccgcgaacttgcgagcccagcaggaagcgcaggcggccgctgtagtcgctcagcggaacttggcacgggcgcaggcggaatacaacgcagccactgcatctggcacgcgggctgatgcagctgcgaccgcagccaaggggcggttgatccttgcccaggaagcggccgccgtcgctaccaacggcctcgctgctgcgcgcgggagggaggcagccgcagcatctgcatcgtcgctgggcggcatagctgcgagtggcttgcgcagcgcgggcagcggcttgctcgctctggctggtggcccgtggggcgctgccgtgttggcaatcggcgcgatgggatacgccttcgtagacatgcagcgcaaggcggaagaggcgcggaaagagtttcaggcgcaagtgaagtcgctggacctgctgtcttactcgataggagacgtgaccgagcgattcaagaagatggacggcggggtatccctgactcagttcgtaggggagtggaattcgaccggaaaagagatccgcaaggctgatgcggatcttgcgaacctacagaagcgcctgaagcagtatcaggatgcatcaatggtcgagggtcagtggggcttctattcgcccaagatcaaggaaactcagcagcagattgctgatctgcaatccgagctgggccccactcagtccaagttctcagaaatggactctgtcctgcggtcgcgcctgacacctgagctttacaaggccgctcaagcagccgcagcccttggcaatgaaaaactggaagaattcttggcggcactcccggaggcgtcgcgtcgggctgtagcgacggccgatgcaatacggggaatgctctccagcctgagcacggatgcgtggaaagatcaggttgaatggatcaagaaatcgaagggtgaatatacggcgtggatggccgagcaaggcaagatcatcaatgacaatggcggtgtgcaggctctgacgccgcaggagcgtgctgccttcaatgctgaggccgcacggaagaaggcacactttgagcgcatgaagcagctcgaagatgagaagaagtccagcgctgcgaccacccgcgcgggcatcgccgacggcaaagcccaggaaaaccaatacgtctcgatcaccgatcggatcaagcggcagatcgctctcgataaggagcagatgggactgactgacgacatgacggcggcgcagaagctgcaggtcgtcatcacgaacgagatggcctcggccaagagcaagttgagcgcggaagagcagaagcgtgtcaaagcgttgctcgatgaagcggttgcccaaggcaaggctctggcggcgcaggagtcggccaagaaggccgcacaggacatgctgcggctccagaaggagctgaacgaggccgccgtcacccagaagcaggccaatgcgatcgacctggccggcatcggcaccggaagcgagcagatggagcgcatgcgtcgccagctgcagctcaaggaagagtacgaccgccggctgtctgcgctcaatgaccgcaatgcgagtgccaacaatggtgcggggtacagcacggagcagtatgcgcagcagttggctgagctggacaagtaccacaaggaggcattgcaacgggaggcgcagtaccaagcggatcgtcagagttcgatcaccaactggtcgttaggcgcctaccgcgccttcgaggactatcgctctcaggcggccaacgcggcagagctgagcaaccaagcattcaccaatgccttccagggaatggaagatgcgctggtgaacttcgcaatgaccggcaagctaagtttcagccagctggccaactcgatcatcacggacctggccagaatcgccgccaagcaagccacgtcatccctgttcaatgccgcattcaacgccttcgccggtccggtcggcgcggtccaacgcgaacgcattccctggcttggattcgacagcggcggcttcaccggccacggcgggcggctggaaccggccggcatcgtgcacaagggcgagggcgtgctcaatcaggacgacatgcgggccctggggggggcatcggcgttccacgccctgcgcgcggcactgaggcgtggctacgacgccgggggcatcggtgggcaggttcctgcccgcgtcgcgctgagcggccggcagggtggccacggtgggccagtggttgagatccacaactacagcggcagcaaggttcaacagcgcgaggaattgcagacgctgccggatggatcggagatcaggaagctgatcgtccagatcggcaacgaggagctcgatggcggttcgtggggccgggtcggccaggcccgctacggctggcaggacgcgatgggctga

SEQ ID NO: 531827 - DNA, 5100 bp, Stenotrophomonas maltophilia
atgggcctgatgcacgcgcctaccgatgccggccgtctgatcatcaccccgcatccggtaatgttggatggccagcgcaacctgcaggccgacctgcgcccgggcgagagcctctatgccttccttgcgcgccatgtggaaggtctggacgggcaggcgtggctggtcaccatcggcggccgcccggttgagcggcacctgtggagcaacgtgtatccgaagcacggccaggtgatcgagatccggggcgtggtcggcaagagcgcaatccggctggtggcccaggtcgcgctggcctacttcaccctcggtggcgcggcgattgccggcttcagcatcggcacgtccacggtgctggggacgacgcttgcgcgtgtggcggtctacgcggccggcagcctgctgatcaacaaggtgctgggcccgaagctgcccgctgctgctgcagcgacgccggccgacaccctcttctcgatctcggcaccacgcaaccggatgcgtgcctatgagccgctgtcgttcgtgctcggcacggtgcggatcgcgccggatgtggccagcaagccctacatgaactatgagggcgatgagcagtacctgtcgctggtgctgacgccgggtctcaacgtggcccgtgtggacgagctgtacaacggcgatgccctgctgagcagctatgagggggtgcaggtctggcacagcggcttccccggcatgccggacgaggccattccgctgtacagcaactctggcagcgtcgacggcggtgtgatcctggacaccagcagcgatcccaagcacacgcccagcaattgggttcagcgcaccagctccgcgggtgcgatccggctgcaggtgaacatcgatttccgcatcttcgatgcggacaagaagggccgcgactacgagaaccgcgaacagatccagatccagtatcgggcggtgggcgagagcggatggcgcgcgttcggcaactacaccgtggccggtcggacgcagaagtcccgccgtgcgacctatggcctcgatgttccgcccggtcagtacgaaatccgagtgcggactgcgggtctgaacaccgacgggagtagtgcgcaggccaccttcagctggaccaacctcgtcagtgtgctgcccgacacggccagttatgacggcatcccgcgcatcggcatccgcatgaaggcatccgggcagctcaacggcagccccgacgagttgcgctgcgtggcgcattccttcccgatcccggtgtggaagggcgatgccatcggctgggtcaccgaagaaagcagcaacccgggcgcacagatcctggcttacgctcgcggcatcaagtcgccggcgggcgttcggattgccggcatgggcttgcccgacagccagatcgacgtggaggcgctcaaggccttcatgctgcactgcgcggccaatggcttcacttacgactatcaggtggccgagaagcgaaaccaccagactgtgatggacgcgatcgcactggccggcttcggccagatcgcatggccgaagggccgtctggccgtggtgtgggccgccgatgagcagccgctgtcgggcgtggtcaacatggccacgatcaagaaggggcagttccaggtcgagtacacgctggccaacggcgccgacggcatcgagtacagctacctggaccgtgccacgtgggaggcaaagaccctgcgcgtgccagcgcccggtgtgaccaccatgctcaacccggcacaggtgaccggcgagggcgtcaccagcgaggcgcatgccgcgatgctggcccggtggcatctggcgcagagcctgtaccagtacaagtcgatcagctacagcaccgatatcgagcatctggcctacggccgcatgtcggtgctcgcgctgcagcacgacctgacgcaatggggcttcggcggccaggtcctgtctgcatcgatggggccggggcgagtcgtgacgctacagcttgacgtaccggtgcctgcccccgcacagggcagcgcctacatcggcctgcgcatcccgggcgagcgggtgtaccgtgtgctgcgggtgcgcccgttcacaggagaaagcgaccagctgcagctggccgacccgtggccgaccgatgccgagctgcctggcaacagcgacagtaacccggcatgggacacgatctggatctacgacttcaagcagacgccgggctaccgcgtgcgcgtggtgggcatccaaccggagaacgatctcaagggcgccgcggtcgacgtggtggccgagggcccggaatactggcactacgtgaagaccggcgagtacatcccgccggagaacggctcccagctcggcacccggccagtggccagcaacctgcggatcaccgagcgccaggtggtacagggcgacacggtgttttccgagctgcaggcctcgttcgatatcaccgggccggtgggcgagatccgcgtgctgtcggacctggaccagaattcggagctggagcaggtcgcctcgaccaccacacgctcggccacctggcgtattccgcgcgcaggcgtatacccgatcaccgtgcggccctacagcccggacgggcaggctggcgtggcggtgacggtgacctatgccacgcacggtgcggacgtgccgccggtgctggttgacctgttcgacgtggaagagcgcagcggaggcgtgcggctgtacacctggggctggttgggcgacacgactaggtcggcggactttgccggcgtcgagatccgttacatgccggggaaagacatgagcccggactggaatgcgatgacgccggtaggcgagacgggctaccacacggcgccgttcgaagcggttatccccgagtcgggcgattggacgttcgcctgccgcagcgtgaacacctcgggcgagctctccaccggcatgcgcgtggtggtcaagacgctggggaacaacctcggcgagcagatgcaggagacctgggaagaggcggagcgggccaaccagcgggtggggcaggagatcctcgatcgactggccggcgatctggctgcgatcaacgaggccgtgggcaaggcacgtcagtacaccgacgagcaggttgccgcgctcaacggcatcctggaggacattgtaggcgccgacgaatgggcggccggcacgacctacccagccggcgacttcgtgcgccgcgctgggacgctgtatcggtcgctggccgaaaacgtggacgtggagccgggcactgacccggcggtgtgggaggccatcggagattacacctcggtgggcgatgcgctggcggcggccatcagcatgtccaccaagaacgccagcgacattgaagctgaggccagtcgcgtggatgcggtggttgcgcggatgccagcgggtgctggcacgctggccacatctgcacaggtggccagcgagcagcaggcacgcgccgatgctgactcggccctgggccagcgtctcgacaacaccagtgcagcgctggacggcaaggcgagcacggccagcgtgaatgcagtcgagcgggctagcgttgctcgcgacgaggcactgggcgagcggatcaacacgacgaatgcggccttggaaggaaaggcctcgtccgacgccctgcagcagctgcgcagcgaggtgatcgagctggacggggttgttgatgccaacagccagctgatcaaccaggtgcgtgcatcgcagtccggtggcgtgaattcgctgcgcaatgctgacttcggtatgggcacgtccggctggcagttcgcggtcaatccctggcaggcggctttgcagaagaacttcgcagggcttgactggacacctgtcggtggcgcccaagccggcttcagcgtcgggggaacgcccggcggtggtgttgcgttggaccatgatgcgaggccagtggtgatcgctggagagaactggatcgcgtcggcatatctggcaagtcaccgatgctattcgtacctgcagctgattgcactcgatgtgacaggacgcgtgatcgatttcgtcagttcgccggtgtcgcgggcgtttggcggcaagttgctcgggcagtggggccgagtgcatgtgcgatttccaaatggcctgcccgaaggcaccgtcaccgtgtttctgcgctggtggaccgaaggcgtgaacggcgaatcgcccttctcatggatcacgcagcccatgcttgaaaaggcggctcctgggcagacagggccgtcatcctggtccgtgagtgctgccggcatggccgaagcgaaccaggcgctgtcggtgcgggcgacgacgctggaaaacggtcaaagccagctgcaggcgtcctatacctgggcgctggacgtcaacggtcgggccatcggcatgacgtcggtcaacaacggcaccatcggtcagatcaacttcgttgctgatcggctcggcatcgttgatccgaacaacaccggtagtacgacgttcgaaggtggccgctgggttacccggtccggggcctacatgatggtgcacggcaagccgttcggtgtgtccagcgacctaatgatgtggatcggtgtgggctccaacccggccaatgccagcaaggcgaacggcctgttctgggtggacaaccagggcaacggctacttcggtggcagcctgtcggcgggcgtgctcaagaacgccgtgcagaccacctcgaccagcggcaacgccgagatcatcaacgggccgttctctaccctggggcgcgccaagaacgtcgtggtcagctacgacatgaccaagaccgacacggcgcacacgggccggtggaccggcgtctccgggccggtgaacgccaccatcgcgatttaccggcgggtgggtaatggcgcagagcagttcatcacgaacctcaacgtcacgggcaactatgaggtgctgaacgagcagggtggcccatcgcagctgatctcgcgaatggggggctcgcacaccttcaccgacaacaccccgggcaccgagcagttcacctaccgagccatcatcgtcacccgcaacgtggccacgggcacgccgagcggcggcgcggtcggtgtggctatcaatcagacgctgggcatcatttctgtggagcaatga

SEQ ID NO: 531828 - DNA, 363 bp, Stenotrophomonas maltophilia
atgtcaccgattctttccgagagcaacaacaaccgggttgagatgttggcgacccggatcgaggttcagtgggatttccgaaacaacgatggcccggtgctgttcaacttcgaccgggtggattgggacccggtcgcgaaccacgtgaacagccgggagtacgaccgcaccatcccggcgcggatccagaccttggtcgatcgcgagtacaccatcatccacccggtgactggcgagcaggaggtggtgcctggctggaagctcatggcgctgatcaaggccgcgacggaccgggtatgggaggcggcgacctcgcccgcagcggtggtgacagcgccgctgggggatggtggggccacgtag

SEQ ID NO: 531829 - DNA, 258 bp, Stenotrophomonas maltophilia
atgcggacagcgccccaatcgaccagtccccaccgggcatggcccaggctgcgaggcaccggccagccgatcctctatcaagcgctcgtagcgctctccctggtgatggccgcaggcgccatgctctttctccccgagcagctgaaaggcatcgccatgatcgacggcgccgtctacgtggcggtgatggcgaggattctgcaggcgcagagtcagcaccgggccttcgagcgcctgctatcccctcgcgatcgatag

SEQ ID NO: 531830 - DNA, 315 bp, Stenotrophomonas maltophilia
atggcgcgtgcacgaaggaagatgttggaggcctatatcaatggactgcgcatgatggcgtggggtcccgtcgcgctggtggcactggtggcactggtggcctgcgggcccggcagtgatccggtgcagaccgtcgagcgcgatgccaacgtggaggctgttccggcacggccggtattgccggagggtgggccgcccctgatgtggtggagctgcgccgtgctgacgagggggggcgtgaaggtccgcgaagcggatcctgcagccgggcagggcgctgcaacggcgcccgcccgaaccgagccgccgcactga

SEQ ID NO: 531831 - DNA, 468 bp, Stenotrophomonas maltophilia
atgaagcgcgaattcgtaaccgcatccatcgacaagctgctgtcggagttcaagggcaacgactccggcaacgcccccgtgctgctgatgctcggcaccttcaagttcagcctcaacaccgccgtgttcgatgagatccagcagagcagcgagtatcgctgggcagcgcaggaacgcgtgggccaggtcgcggcgctgcagtacaccggacccggcaacgccagcatcacgctgccgggcgtgctgaacccggagttccgtggccagggcaacgagatctcgcaactgcgcaggctcgccgcacaaggccggccgcagcggctgttgaccggccgcggcggcaatctggggctgtgggtgatcgacaagatcgatgccacctccaagcatttcacgcctgaaggcggcgcacgccagcagaccttctcccttaccctgcggaagcacagcgatggcacgaacgtatag

SEQ ID NO: 531832 - DNA, 2106 bp, Stenotrophomonas maltophilia
atgcgcttgaaaatcaccgatgccggcttcgccaagctggtcaatccgccgaacaccggcaccaacgccgtcctgatcacgcagattggtttgacatccactgccttcactccatcggcggggcttaccgcactgccaggtgaaatcaaacgcgtcgccagcttcggcggtcaggcggtgggcgatgacaccgtgcacgtcaccatccgcgacgacagcgcaacggcctacacgctgcgcgggttcggcctgtacctggccgacggcacgttgttcgccacgtatggccaagccgatccgatcatggagaaatcggccgcctcgatgctgctgctggctaccgatacgcgcttcaccgaggtggacactgcactgatccagttcggtgacgccggcttcctctatccgcccgccaccaccgaggtcgtgggtgtggtcgaactggccaccgccacagaggcggaagacgccacggacacacaacgcgcggtcactccgcggggcctgcgcgcatataccgacaagcgcttcggcgccagcgccccgaccgcactggcgaagacgctgctgtcggctgcgagcaccacggcagcccgcaccgcgctggagctgaagagtgctgcgctgaaggacaccgggcatggcaacggactggacgccgacactttggacggcaagcacgcctccgagttcgccctggccggtgacttcgccacggtgggccacaagcatgtgattgctgatgtgaccgggctgcaggaggcgatcaacgacaaggccaacctgtcgcgcaatgacttccgcgaccagcagttcattggcggcacatacccgcttcttggcttcggcaagtacggtgcggaaaccgcgtacatcggggcctgggagggcaggtcggtctggaggtcatggaacgctggccggaccgccgcaggcgaactgaccatcgcacacaatgacgtgccacgctggaacggctcggcgatgtggcatgccggcaatttcgcgcccgatacaaaaatggacaagaccggcggaaccttcaccggacacgtcggtgtgaatggaaactcacttcgttcctatggttggaacggtgttgccaatgacggcgtactcgtgctcggcgacaccaactcgtacatcttcaagaacggatcgaatttcactttcgccaatgcggcaggtggatacaccgccatgctcaacgccggtggcactgtctggaccagcggcaacttcgatccaagcaagaaactcagcaccaccggcggagacttgaccggtccgcttcggatgcgaggcaatgccgcaggtcgtatcgcactctatgacgacaacctggatgtcgccaacatcgagatcggtgccggcctcaacaccggtgctgaccgcaatggctttctggtcaaccgaaacgcgaacggctcgcttgcactgcttggaggcaacggaaaagcgaaggtaaccgtggatggcggcgtagggtacaccgtgctttcctccccaccgctcggaaccggattgtggaacagccagactgccctgcactgcgtgattccgcacggcggtaatgcagacggcatgaaggcaacgctgctacggagcgtaaatggtgcaaatggctggtcctcggcgcgatggcgcctgtaccgtgaggtagacgctacgacccagggctacatcgactttcacggtgacaacaccgacggcgaccgcgtcttcacattcgcgggctatgggcagtctttctggctttcgaagacaggtgtcgtggaagctcccgcgggattcaaccgcccttcgtctcgcaagttgaagtcggaccatccgttgaccccactgagctacggcctggcggaaatcgaaaagattgaaacctatttcggccagtacaactcggatttcgtgaacgacgagcgacgccgactcttcatgattgcagagcagctctccgaaatcgtacccgaagcagtctttgagaatgccgtcgattaccgcggtgaaaaagtgccttcgatccaggagtcgcagctgattcccgtgctggttcgtgccatccaggaactggcggaggagatcaggtcgctcaagggagggtactga

SEQ ID NO: 531833 - DNA, 555 bp, Stenotrophomonas maltophilia
atggcgaccgacccctctcctccaccgctggatgcattgcttgccaccatcgcagcggccatccatgcgcgcttcccgcacttcgcaaccgtcgagttccatcgggaggccagcaccgaaggcatggcgacgcccgcgtgcctgctggcgatgacccgctgcgaccgcagcaaggacaacgccgacggcagtgggcagatgcaggccctgctgcgcttcgaggcacgtgttgttctggccgcggacgcgcccggcgtggcactgcagctgcgcagcactgccgtcgacctcgccacctggctgcaccagctcggccgctttcccggcgtgctcagcggcgcgatcgacgtgatcgccgcattgcccgaagacaccgccacggcgctgccagggctgcgcagctggatcgtcgaatggtcgctgccgatggcactgggcagcaacccctgggaagacagcggcggcgtggtgccgcgcgccagtttcagcttcgcgcccgagatcggccgtgcgcatgagccgcgctaccagcccctgccggagcacgcgccatga

SEQ ID NO: 531834 - DNA, 552 bp, Stenotrophomonas maltophilia
atgattcccgcctccctcgactgcggccatcgcatgatcgccgacactttggccgcgttccgtgccggccccgccctgggccgcacaccgctacggccggcctcccaggcacgcggcccgctctacatcggcatcgccggcggcaagcatgcgggcaaggacaccctggccaatggactggcctcggcactggcgttgccctgcgacggcttttccaccccactgcgggcgctggcaggactcatcccgcagcacctgatgcagaccaccggcaccggatcggggcgtgatcgcatcctccccgagctgcgggtgcgctcgttgttcgcacgcctgcctgcaggcggactggtgccggatgtgcgcttggccgatgaagcccgcgcgatccgccgccgtggcggtgtcgtcatccgcgtcaggcgtccgggccatgacaccgaacagcccttgccaggccatctggtcgatatcgaagtagacaatgacggcacgccggccgacctggtgcgcaggacgctggaccagctgctgtcgcgcggcgtgatctga

SEQ ID NO: 531835 - DNA, 633 bp, Stenotrophomonas maltophilia
atgagaattagtcgcggaattctccgtggccccctggctgcggtcaagcagggggttatcggccgggctgcgcccggcacccgccgaggcaacgtcaacgtcaacgtcaaaagcgggctatccgtgggttggcggggtgggtccggttgcggggggcgctgcaagtacgtccatgtaagctcggtcgccgcatccatgcggctcacgcccccgcaaccggacccaccccgccttcgacagattcccgcgacctgccgtagatccacgccatgcgtggatgcttttcgttcaattgtcgaaatgtttgatttcgatggagattcatccccaacgcagcgggaatctgtcggaggtggggtggtgtggctgtgcaggaccgttggcgccatggatggcgccatcgagcccccatggacgggtttacggcgtgtcctgcacagccacaccgccccgccatcccacggaaagcccgcttttgctgttgaggttgccggccagcggccggcactaccgcgggtgcagggtgcaaccctgccgaaccctcacttcacccagccgtcgatctcgccgtgggcgaacggacccagcttcgccttgaccatccgcccccgcgcatcgaacagcacgctgtag

SEQ ID NO: 531836 - DNA, 354 bp, Stenotrophomonas maltophilia
atgcttgacgcgatgatcgaatcggccaaggtcatccagcctgatttcgcatgtaccgatgtcaatgcaagatcgcctgaaggcgaattgatctgctaccagttggacaggcgcctgtatgggcatcgggaattcttcggctggattggattcgttccagctcgggttgaccacgcacagcttccggatgcgcatgctgtgcatgccgtcgacggcctgggcaccgtgatcgtctcggtgccgggcgtatttgatccctgcgatgacgcgcaggtggagcgcattcatcggctcgaaagggatctggccagctacaacctgttgccggtgaccgatcctcacttcaagggctga

SEQ ID NO: 531837 - DNA, 213 bp, Stenotrophomonas maltophilia
atgggattaatgactcacatgtgcgtgacgttcaccgccgagggtgcgtttctacgcggcaaccagcccaccatggtggccgatgcatgcgcgacgcggcccatccgaaggggcgtggtgaatgtgtcggccgaggtgctgcatgagggcgcgttggcgacgattgccgatctgtacgccgtcgtggtgcgctcgggcacatcgttgcaataa

SEQ ID NO: 531838 - DNA, 390 bp, Stenotrophomonas maltophilia
atgaactcctcgaccacgctgcgccagctcaacggactggaccccacaccggccacgttagacggtgccaccttgatcctcgtggactaccagaacacctacacgcgcggcgtcatggaactggccggctggcagccggcgctggcttcggcatctgaactgttgacccgggcgcgcgccgccggcaccaacagcatccatgtcgttcacgatggtggagagggctcgccctacgacctcgccgccaagatcggcagattcatcccgccgtcgcgccgctgtccaacgagcccgtggtcgtcaagacggcgccccatgcattcgtcggcaccgatttgggcgagcgcgttgaggcggccggtaacaaacaggtcatcgtcatgggattaa

SEQ ID NO: 531839 - DNA, 990 bp, Stenotrophomonas maltophilia
atggcaaacatcaagcgcctcatcgtcatggtgctgttcgagcacgtctatctgctggacgtgaccggtccggccgaggtgttctcacttcttcagcgcgagatggacgagccgacgggctacgaggtggtgttggcggctgcgacgcttgcgcccgtcatgacttcggccggtgtgcgtgtactgcccgatacgacattcgccgacctcgccccccgtaggatcgacaccctcgtggtgccgggcgcggtcgaggtcgatgcgcagcgacgcgtgcgcgccgtcgtagcgccttcggtggtggtatctgtgagggcgcttgcaggccatacccgacgcctcgcgtccgtgtgcgtgggcgcgcatgtcctggctgcggcaggcctgctcgaaggccgtcgtgtcaccacacattggtccaccgcgcaacaactcgctgacgagcacccggaggtcaaggtggatgccgacccgatcttcatccgcgaccgtgatgtctggaccggcgccggcctgaccgcctgtctggacctggcgttggctttggtcgccgatgacttcggcgagcggttggcgctgcgcgtggcgcgccaactggtgatgttcctaaagcgcccgagtgggcaaagccaattcagtgcctcgctggaaccggcgtccaagacccggcgcatggatgcgctgcgccactacatcatgcgctgcatcggtaagcccatgagcatcgcggaactggccgaacaggcacatgtaagcgatcggcaactgacccgcatcttcaagacggaattgaacatgacgccggccgcttacattgaatcggtgcgcgtggagatggcgcgcaatcggttggaaaccaccgacgaaccgcttgaacggattgccacaacctgcggcttcaataccactgacgcgctcaaccgcgcattccgcaggaccctgggcaccacgccggccgagtaccgcagccggttcaggacagtgtgctga

SEQ ID NO: 531840 - DNA, 636 bp, Stenotrophomonas maltophilia
atgcccaccgtcatcagccaacctccccatctcaggcttgcgatagcgccaggcgtaacgtcatcgaggctttcggacctgcttgcgctccaacgcgccgaagagccagaggtcaccatagcgctccttgaggtcagaggtgacgagattcttgcgggactgaaggatggccattacgacgcagcgatgtcgcttcaaggagcgaccgattcggctctccatacacaacccttgtggatcgagcacatggcagttgctatgccgttgcgatcctctttgatggatcacgccaagctcgcgatcgccgatttgctggatcaccctgtcttccgctggcaggcagagagttgccctttgctggatcagcggttgtcttcacttcctgcggtgaggcagcagagcacgcagtacgtggcttccttcgagatgctggcgctcaaggtcgccgcaggctatggcgtgggaatctctacgcaatcgcgcatcgagcgcgctcacggatggggactcagtatgcgatcgctcgccgacggcccctacgaggtcgtgacgtacctccagcggccctacgtacaagccactccggcgaccgagcggttcgagcgcagagcgctgcaggttgcagttacgatctga

SEQ ID NO: 531841 - DNA, 228 bp, Stenotrophomonas maltophilia
atggcgtttgggcaggccgtacgcgcagcgcgtgtcgctcaagcaatcgctcaagacgagttcgcagccctggcaggcatttcgcgctcgcacatgggcaagatcgagcgtggcgagcatgtacccacgctccccctcatacttaaaatttccatggcgctcaagatcagtgcggccgaattgatcgcggcaacggaaagcaatcttcgcaatccaaccgaggcctga

SEQ ID NO: 531842 - DNA, 891 bp, Stenotrophomonas maltophilia
atggaattgcgacaccttcgttgttttgtagccctagcagaagagttgcatttcacccgagcggcggagcgcctgcatatcgagcaacccccgctgtcccgagccatcaaggaacttgaggatgagttaggagtggtgctcttcgatcgaaatcgacgtggaactctgctgacctccgcgggcgtcgcctttctgcaggacgttcgcagattgtttaccgtattggaacaagcacgggagaacgtcaaagcggtagcagcgggctcacaagggagcctgcgcatcgccgtatccgacggcgcgattgatcctcggctgtcggcgttcctggcccattgtcgcgaggaagagccggagatcgagattcgcctgtccgaagtgcccttggccgagcaagtgcgaggactccgatcaggcgacttcaccatcggatttgcgcacgctgccgatgtgggcgaaggcatcgtggccgaaacaatctggcaggatccattggtggtcgcgatgcctcctaggcacccgctgttgtcgcacaagaagattcccctgcacgaactcgcctgccatcctctggtgctgtgcaacccacaggtatgcgaaggctactgccgtgaactggcccggctcttgcggccgctggaacgtgaacccaacgtcgctgagcaggtgtcttcgctcgacatgatgctcaccttggttggcgcaggctatggtgtcggcttcacaaccgcggccaggatcgcagtcagccagcgtcctgatgtcgtagtccgtcccctggccgttgattcggcggtgatcaccacctatctgcttcggcccgatagcgacgacttgccggaggcgctggagcgatttatcgtgcgcctgcgcgaacactcgggtgactga

SEQ ID NO: 531843 - DNA, 426 bp, Stenotrophomonas maltophilia
atggagcatgagatgaatgaagtgaaaagcagagggaagtacaccctggagttcaagcaggaggccgtcaggcaggtgaagggtggacgggcagcgtcggtggtggccaagacgctgaggatgcccaaggccagtctgacgaactgggtcagggccgatgccaaaggccagttggggatgtccgcagaaggtaaacccgtggcgatggtgacccccgagcagggggagatcgctcggctgcgagcggaactggcacgggtaaagatggagcgcgacatcgcaaaaaaagccgccttggattcaacccgtcgctgcaacggctcgctgaagtctactggcaggagtttcatagtccagcgtttttcgaggcctcatgttcaaacgcatggagatcgcgtccaggtcttcctggctgtagaccgatag

SEQ ID NO: 531844 - DNA, 1161 bp, Stenotrophomonas maltophilia
atggcgagattgggacgtcccggactgtcggatgcgcagaggcgcgagttgtgggagcgctggaaggcaggggattccatcagcgacatcggtcgtgcgttgttcaagtaccctgggtctgtgcatggggttctcgcgctaggcggaggcatctatagaccagcgcggaaacgggcagcctcggcgttgacagcagatgatcgtgagcaggtctctcgcggcttggcggcggggcactcttgcaggcagatcgccgcggaacttggtcgttcgccttcaacgatcagccgagaggtacatcgcaatggtggtgccgcgcgatatcgtgcggctgtggccgatgagcgagcctgggagcaagcacgccgcaccaaaccttgtgcgttggcactgaatcctgagctgaccagccttgtggcccagaagttggcacttcagtggtctccacagcaaatcgctggatggctgcgacgagaacacccggatactgcctgcatgcaggtgtcgcacgagacgatctatcgcagtctcttcgtacaggcgcgcggcgtgctgaagaaggagctgatggcgcatcttcgtactcgtcgctcaatgcggcgagcgcgagcaggcctgggcaaggagtctcctcgtgggcagatcactgacgccgtatccatccacagccgtcccgcgcagatcgaagaccgggcggttcctggtcattgggaaggtgacttggtcacgggagcaaagaatagccacattgcgacgctggtggagcgtcattcacgtttcgcgctactggtccaggtcgatggcaaggacacggccagcgtggtgcaggctttgacgcgtgaagtcaagcgactcccaggaggcttgatgaaatcattgacctgggatcggggcatggagctggccctgcaccgaacgttctccatggccactgaagtcgatgtgttcttctgcgatccacgaagcccgtggcagcgaggaacgaacgagaacaccaatgggttggtgcgtcagtaccttcccaagggtgcggacctatcggtctacagccaggaagacctggacgcgatctccatgcgtttgaacatgaggcctcgaaaaacgctggactatgaaactcctgccagtagacttcagcgagccgttgcagcgacgggttga

SEQ ID NO: 531845 - DNA, 1935 bp, Stenotrophomonas maltophilia; identical to SEQ ID NO: 346163

SEQ ID NO: 531846 - DNA, 435 bp, Stenotrophomonas maltophilia
atgaacctccagatcggagaacttgccaaacgcactgcctgtccggtggtgacgatccgctattacgagcgagaggggctgctgccgcaggctcgccgcagccaggggaacttccgcttgtatggagaggcgcatgtggagcgcttgcaattcatacttcgctgccgttcgctggacatgccattgagcgacgtgcgaactttgctgagctaccgggatcggcctgcgcaggattgcggtgaagtcaaccttcttctcgatgagcgcatccgggaggtgaaatcacggattgaagcgctgcgcgagctggaacaccagctggccgatttgcgcgatgcatgttccggtgccagacctgtcgaagcgtgcggaattctgcaagggctgtcgggatgcgcatgtgatgcgcaggaagcaactgctcccgtcaagtga

SEQ ID NO: 531847 - DNA, 2400 bp, Stenotrophomonas maltophilia; identical to SEQ ID NO: 346165

SEQ ID NO: 531848 - DNA, 1095 bp, Stenotrophomonas maltophilia
atgaactggaaagccattctttacgattggggtggcttgaatagcgctctgtttcagctcgtctacgaggccacgccgccgattttgataccgctggcctggatcttcagcaacgtcctgggcaactactggactgcgcccctagtgatgctcggactgtgggcatggtcaagatcaacggcagcagccgatcacgccttggcaattcggcggcagcttcttcaattcgtgatcggcttcggcatcgcgatcgcaatagcctccatcttgaaattttggctcgattttccgcgaccggcagcggtatttggccatttgaatcacgtgcttggcacagtggaggagcactatagcctgccgagcggtcattccacttacgccgcacttgttgccggggcgttgtggccgctgacaggtgtacgccaccgattggcgttagttgcttatgtcgttctggtcggctggtcgcgcattgctgcgggcatgcactttcccgccgacgtgctggccggctggggcatcgcctccggcagccttgcgcttgctggttcgctgttgacgatgctggcgagtgcctggaggctgacgaggctgcgggcaatcggaatctggtacggcttggctgccgcagtgctatttggcgatcaggtcgcaaaggccgccgtctcgctttttttcggctatggcgatcaagtcgctgtaacccctttcttcaatctcgtccacttgaagaacaacggcgccgcattcagcctgctggctggtgctggtagctgggcgcgtttcggttttgccgcgcttgcgctgggagtctcaatctggctgatccgcctattgcgtcaaggagtatctaaatgggaaggcgtgggttatagcctgatcttaggtggcgcgctgggtaacgcagttgaccgcctgttgcgaggggctgtagtcgatttcctcgatttccattggcacggagcgcattggcccgctttcaatttggctgacgttgcaatatcccttggcgcgatctgcttgctttcggccaccatgcaccaaggaaaacgggatgtcgccgtaagcggacaaattcctatgaaaactccatag

SEQ ID NO: 531849 - DNA, 1884 bp, Stenotrophomonas maltophilia
atgctttctctgttccagcgaaaacggcccgcggtcgctgccgctccgacgccaccatcggtcaccgacctcccgaaagggttgatgcggcccgagtcggccgcatcgctgctggccaccccgcgccggcagaagctgctggagcacatctggcagcgcacgtcgctctcacgtaagcagttcgccaccttgtaccgggcgcccctggagcgctacgccgagctggtccaggccttcccggcctccgaggcgcatcaccatgcctacccgggcggcatgctggaccacggcctggaaatcgtcgcctacagcctgaaactgcggcagtcccatctgctgccgattggcgccagtcccgaagaccaggcggcgcagtctgaagcctggactgccgcggtcgcctatgccgcgctgctgcacgacatcggcaagatcgccgtcgatctgcacgtcgaactggccgacggctcgctgtggcacccctggcacggcccgctgcaccagccataccgcttccgctaccgcgacgatcgggaatatcggcttcacagcgccgcgacaggtttgctctaccgccaactcctcgaccgtgatgccctggactggctcagtggctatcccgacctgtggggaccgctgctctacgtcctggccggccagtacgagcacgccggcgtgctgggcgaacttgtcgtgcaggccgaccgggcttcggtggcccaggaactgggcggcgatccggcccgcgccatggctgcgcccaagcacgcgctgcagcgcaagctgctcgacgggttgcgctacctgctcaaggaacagttgaaactgaaccagccggaagcctccgatggctggctcaccgaggatgccctgtggctggtgagcaagacagtctcggacaagctgcgtgcgcacctgctgtctcagggtatcgacggcattccagcgaacaacaccgcggtgttcaacgtcctgcaggatcacggcatgttgcagccgacgtccgacggcaaggcggtctggcgcgcgactgtgaccagcacgactggctggtcccactcgttcaccttgttgcgtctaacgcccacgctgatctgggagccgcgtgagcggccggcaccgttccccggcacggtggcgatcgacgtggcgcccacggacaaagaggctgacgtgttcaccaccatttcgacggccggcccgctggccgccccggaaggccaagaagatccaccaggggaaggaggtcgttcatcttcagctccttcgtccaagttccaaaccttgccggacgtgatggaagacatgctttcgatggtgggtatcggcgacttacccgcgatcgggcaggacgcggcagtgctctcagagcaggtgcctgccgcacgtcccgaaataccaaccttgcccgcgtcactgccgtcgtcgcctgcgccagcgccctcgatagcgcatccatccggggagcacttcatggcgtggctgaaacagggcatcttgtcccgccgactcatcatcaacgacgcaaaagcgctcgtgcatacggtgagcggcacgacctacctggtcagtcccggggtcttccagcgctatgcgcaagagcacccgcaagtcggcgcgcaggctaagcaggagagccagcaagactggcagtggatacaaaagcgcttcgagaggctgcaactgcatcgcaagcagccgaacggcctgaatatctggacctgtaaagtcaccgggcctagaaagtcccgtcacctgcacggataccttttggaagattcaagcctgcttttcttagaaacgccgccgaataatccctacttatccctgttgtgtgagaccacaggaagcggacttcatgaaagcaatgagggtcaacattga

SEQ ID NO: 531850 - DNA, 726 bp, Stenotrophomonas maltophilia
atgaagccctcgatcttgctcaccctgttcctgctggccgcagcgcagttgcccgtctgggcgcagcagcccgccacggcccagtcccgcaatgcccagagccaggagcgtcccgtgatcggccgcatcctggacgaccgcgtggcgagcgactggggactgcaaccgcaggagtgggcgcgctaccgcgaactgatggaggggccgctgggcatctactcgcccaacctggacccgctttccgcgctgggcgtcgaggctcgctccgatgaagagcggcgccgctacgccgaaatgcaggtgaaagccgaggcaaggcgcgtcgagaagttgcttgcctaccagcgcgcctacgacgaagcgtggcagcgcctgaaccccggcatgcagcgagtgaacctccccgatgatctgccgaccgccgcaggcgtgcgcggcagtagccgcacggcggtgttcgtcaaggacggctgcgcggcctgcgggcaactcgtgcagcgcctgcaatcctcgggcgccgagttcgacctctacatggtcggcagccgccaggacgatgcgcgcatccgcgactgggccaagcgcgcgaacgtcgatccggcgcgcgtgcgcgccggcagcatcacgctcaaccacgacggcggccgctggctgtcgctgggcctgcccggcgatctgcccgccgccgtgcgcgaagtgaatggccaatggcagcgccagccgtag

SEQ ID NO: 531851 - DNA, 636 bp, Stenotrophomonas maltophilia; identical to SEQ ID NO: 328383

SEQ ID NO: 531852 - DNA, 567 bp, Stenotrophomonas maltophilia; identical to SEQ ID NO: 328384

SEQ ID NO: 531853 - DNA, 279 bp, Stenotrophomonas maltophilia; identical to SEQ ID NO: 333668

SEQ ID NO: 531854 - DNA, 1611 bp, Stenotrophomonas maltophilia
atgcacccgaaactttgcgcaccgccacgcaacacgccgctgctctacggcagcgtctgcagcggcatcgaggccgtgagcctcgcttggcaaccgctcggcctcgaagccgcgtggttcgccgagatcgagccgttcccgagcgccgtgctcgcccaccgtaaccccctcgtgcccaacctgggcgacatgaccacgatcgcccgccaggtccgcgccggcaccgtgcccgcgccagacctcctggtcggcggcacgccgtgccagtcgttcagcgtggccggcgcccgccgtggcctggctgacccgcgcggcgccctgacccttgcctatgtggagcttgcaaatgccatcgaccaaacccgccgccaagaccgccgcccgccggcaacgctcgtctgggaaaacgtccccggcgtcctcagcgactgcagcaacgccttcggacacttcctgggcgcactggccggcgaaagccgtgcgctcgaaccgccagggcaaaaatgggcgcacgcaggttgtgtgtctggaccccggcgccgcatcgcctggcgcttgctcgatgctcaatatttcggcgtcgcccaacggcgccgtcgcgtgtttcttgtggcaagtggtggaggtggcgtcgatcccgccgaggtactttttgagcgcccaggcctgcgcggggattcttcgccgggcttcgcgccgtggcaagacgctgccggcgctgctggatcgggcgctgcggcagcaggctggtactcgggatatgcaggactgaagcagccctacggcaaggccacagtgacgttcggattcggcgggggcaacaccgcaggacccatcgacgtcgcggcctgcctgaccgcggcgcccggcccgaagaacgacttcgaggtcgagaccttcgtggcgcagtccatcgcgggcagcatcagccacacgctcagcaccgccaacggcggcaagggctgcagcgaggacggcaccggcaagggtgtgccgatcattgccttcaccgcacagggctgcggggcggatgcgacgacgaaccatgcaccgacgctgcgtgccggcagacatcgcctcagccacgcgaacgccggcgtggtgccggccatcgcgttcgcgcagaactcgcgcggcgagctgcggctggaatccggccacggccagcttgccgggacgctctccacgggtggcggcaagccgggccaaggccggccgatggtgatcggcgtggcgctgcgcggtcgcaccgaaggcctggccgctgaactgggcgatggcgtctcgaccgcgctgcgcaccagcagcggcggtgccgacaagccccatgtgctggcaccggacttcgaggcacatttccgctacgactggaataaccccggtccgggcgactggtcgcagtggcgggtgcgtcggctgatgccggtcgaatgcgagcggcttcaaggcatgcccgacgactacacgctggtgccgtaccgcggcaggccctccgccgacgcgccgcgctacaaggcgatcggcaactccatggccgtgccgtgcgtcgcgtggctgggccagcggctggtgcagtgcctgcacaagacgggatcgagcgcttcggattga

SEQ ID NO: 531855 - DNA, 2940 bp, Stenotrophomonas maltophilia
atgcccgccttcgccctgcgcttcgtcggccaagaggccttgccgcctcgcctgagtgagtttgatcgggagcagttcttttcgctcacgtcggcggacgtggcggccctccgggagcagttccgcagcgaccgccgcctgcccgccgcgctgatgctcatgttcatgcgcgtggccggccgaccgctcgacggtttcaacgtgctgccccgaaacctcctccggcacaccgcccaggtcctggccgtgtcgccgccgtccatcgccagcctgcggtcgatctacaagcgccggcagaccctcttcaagcaccagctctgggccaagacctatctcggcctgcgcgaacttgcaatcgacgacgaagtcgcgctgaccgcggccctgctggcccaagcagccgacgcctcccacgccgatgacctggtccagtcggccagccactggctgttcacgcggcgcatcctgatcccaggagcgcgccgcctgcaggactgggcccgagatgcattcgccgcggtggaggcgcagatcctcagcgcggtgaatgccgccgtaccaccggcagcggcgcagaaggttgtcgacgccgcatacagcacgcggccgggcaccgacacgacgtgcctggagtggctcaagacgccgtccaagcgtcacggcccgagcacccttgcggagaccatcgacaaggtccgctacctgaaagagctcggtgcccacgactggaacctgaatgccgtgtcgctggcaaagcagcaggcctatgcccgtcaggtccaggccaggcgccccgtgaagacgcgggagatcaagccatcgcgccagctgatcgagttggtgtgcttcctgcgggtgacgctgctcgaactcaccgatgtcgccctcttgcaaaccagccggcgcagccagcaactgttccgcgaggcggcggacaaggcgcaatcaaaccgtatccggggcacgacaggcctgatccagcaggcggccaaggcgcgatccgtcctgtacgacgaaacgaagacctggcaggcgagagtcctggaagccagagaactgctcgccgagctcggcgaagccgccagcggcagcttcgtgtccttggttcgcaaggccttggcggaagacagccagcgcgtgcgcgcttgcctgggagcgctgaaagatctggacctcggtggccgccccggcgatccgggcttcgaacagtggaagtcctggacggatctgcagcgcaagggtgtgaccgagctgaaggagggcgtaccgctgccagatgttggcacagcctggcacggcctggtccgcgatctggacccccgctcagggtttcgggcgtttgaggcctgcacgatgatgtcgctgcgcaagagccttcgccgaggcagtgtctggctggaccactcgctgagttttcgggagcgagaccagatgctcatcccgccggcggattgggtcttgcaacgggacgagcaggttgagttgctgggcatgcccaagtcggcggccgaattcctggagcccctgctggccaacttgatggccgctatgtctgcggtggcagaggcccagcggcgcggcaaggtcgagatcggcgccgacggcatgctccacctgcctgcgatcacggcactgccggatcaaggcgagccggtgcgcacacgcgagaccatctacaacttgattggcagcgtacagtttccggacatgctgttggaggtggatgccgccaccgggtacagcgaagcgctgctcggccaccgcgcgcagtccaccggcgaactcgtggccctgtacggcgcgttgctggcgcacggtaccgatgcggacgccaagggcgtggcgtcgatgatccctggtctggagcccacacaagtcactgtggccatgcgcgccttggaaggaagtggccgcctgcgccgcgccaacgagcgcgtggccgagttccagagccggatccccatcgcggcactgtggggcaacggggacaaggcatcagccgacatgatgtcgctggacgtttcgcgccacctgtggaacgcccgtgtggacccacgccggcgcacctacgccgcaggcctctacacccatgtgcgcgaccgctggggcatcgtctacgaccaacccatcgtgctcaacgaacgacaggccggcgtcgccatcgagggcatcgagcagcacaacagcgcggcggatcggattcggatctcgctgctggcggtcgacacgcacggctacacgaatccggcgatggccatctccaagctgctgggatttgacttgtgcccccgcctgcgggacctggccgaacgaaagctctacctgcctcgtggattcaccgtgcccgatggcttggaagtcgtcaccgttcggcgcgtgtctttggccgccatcgagcgcggttgggatgaattgcttcgcctggcggcgtcaatccgctcgggacgtgtctccgccacgctggcattgcagcgcttcgggtcggctgcccagggggatccactgcaccgggcggcggagcacctgggccggctgctgcgaacggtgttcctgtgcgactacatcgccatcgaggacttccgccgcgagatccataccttgctgaaccgtggcgagtcggtgcatcagctgcagcgcgccgtgtactcaggcaaggtggcgcccgaacgcggccggcggcgggacgagatgaaggcgatctccggctcacacgccctgctgacgaacatcgtgctggcctggaacactgcccgtatgcacgaggtggtcgagaggctcaagcgagacgggatcccagtcgaggactactggctgcgccgcatcggcccggcgcacttctcgcacatcaatttccgcggcacgatgagattcggcatcgagaagttcgcggcggcgctgatccaacgcgtgccgggccaggcaactcggtctgcttcgtga

SEQ ID NO: 531856 - DNA, 237 bp, Stenotrophomonas maltophilia
atgagtttcgccttgcccgagtcgatgcgcgagtacatcgacaaccgggtcgccgccggcaactatggcaacaccagcgagtacatccgcgacttggtccggcgcgaccaggaagagcaggccaagaagcggcttcgcgacctcatcgaagaagggctggcatccgggcccggccggcgtcgcaccaaggcggacgagaaggaactgctggcgatcgctcgcggcgagatcgattga

SEQ ID NO: 531857 - DNA, 327 bp, Stenotrophomonas maltophilia
ttgaagccggcggttctgcgcccgcaggcgctgcgcgaccagcagggcgaagtccgctactaccgcaaggagggtggcacccgcgtggcggtgaaggtggccaaggccaccaacgccgcgcttgaccagatcgaactcgaccctggcatcggctcaccgacgctcggaaagcttcttggcattccagggcttcggacctggcgggtcgcaaagttcccgctgctgtggtgctacttcgaacgcggagatgacctggatgtcgtccggctgctgggcgagcgccaggacctcgcagcgatcttgggcgatgagttcgcttcgaactaa

SEQ ID NO: 531858 - DNA, 324 bp, Stenotrophomonas maltophilia
atgagcaagtcgaacaagttctcacccgaggtgcgtgagcgggcggtgaggatggtgcaggaacaccggggggagtacccgtcgctgtgggcggccatcgagtccatcgcgccgaagattggatgcgtgccgcagacgctgtacgaatgggtcaaacgcgtcgaggtcgacactggcgtgcgtgaaggcatcacgaccagtgaggcccagcggatgaaggagctggagcgcgaggtcaaggagctgcgccgggccaacgagatattgaagctggccagcgcgtttttcgcccaggcggagctcgaccgccggctcaaatcctga

SEQ ID NO: 531859 - DNA, 726 bp, Stenotrophomonas maltophilia
atgcaggtctacggcgccgacaaggtgtggcggcaactgactcgcgaaggcgtgaccgtggcccgctgcacggtcgagcgattgatgcgccgcctgggcctgcgcggcgtgatgcgcggcaaggtcgtgcgcaccacgattggcgatgccagggcgccatgtccgctggaccgagtgaatcggcagttccgtgccgagcggccgaaccagttgtgggtcagcgatttcacgtacgtctcgacctggcagggctggctgtacgtggccttcgtcatcgatgtgtttgccaggcgcatcgtcggctggcgagtgagcagttcgatgcgaacggacttcgtactcgacgcgctggagcaggctttatatgcccggccgccggagcgcgatggaagccttgtttgtcattcggacagagggtcgcagtacgtcagcattcgctacaccgaacgactggcagaagccggcatcgagccgtctgtgggcagcaagggcgacagctatgacaacgccctagccgagaccatcaacggcctgtacaaggccgagctgattcaccgccgagcgccatggaaaaccaaggaggccgtggagttcgcaacgctcgaatgggtgtcgtggttcaaccaccatagcctgctcgatcccatcgggtatatcccgcctgcagaggctgaggcaaactactaccggcaactcgccagtcagaacaccgaggtggtggcctga

SEQ ID NO: 531860 - DNA, 1059 bp, Stenotrophomonas maltophilia
atgcaggccgaggtccgagaactcaaatcgctggtgaaaggcgtcacgtggacggctgctggtggaatttcggccttcgatttttcgatagcgggccaatattgcgttgcactaaaaataggtctgtcggaaaacgacaaagcagatttgcttggcgccggcgatggtcccatcgagttggtagagttcggcagcgcggttggccttttcttgatcgagcaattgaacctcagctctcgtttactgtcgacggaatgggtagaagagcacatcgcctttccggcaagccaaggcgacggagtggacttcgcggtacttcgtgatgcactcgaagagttctcggtctttaggattagagatgagcaggctgttcgtccatcaaagcctggcgtgagcaggcatgttgccaactacatcctcacccatcataggcctctgacctccgccgctggcctcagccagagaacgatcgagtgcatccgtgagatcttcttgcaagaacggttgcacctgttcgacgtcaacctgttcacggcgctttcgagccctattccgcgtcacgccttcttggagttgtatcgcacgctcgaattcgtgttcgtgctcccgcgggtgaacgctctggccgttgcgcttgggctgaacaacgccgaaagcgaattggacttgattgagttggcacgcgcctgctattcgcagcttcgctggaaacgggtcgagcgagattcgttggagcagctgttcggcgagtactcgcagcactacttggtggcctttcaaagcttggctgcgcagtgcaaaccgttccagtcgctggccacggcgctaggttcaggcgaacctgaaaaggtccgtgctgcgttgaccaagttcggggagaagttctacgccctccgcaatcaagttgttcatcaactgtggagggaggacgaagccgactgcgacgccgacgactggacggcccttgcggaattcaccatcggctgcgtcaagtttttctatgaaagctacttgagcggtccggccagaacccgcgctgaggctgatctccaaaattga

SEQ ID NO: 531861 - DNA, 1389 bp, Stenotrophomonas maltophilia
atgccgcggccgcagcccctcatcggcgacgccgtcgagcgctggctacccgtgcggctcgtggacgtactgcacgcggcgggcattcgcacgctggccgacctgaccctgcgcgtgcccaggcgccggcgctggtgggccggcatcgcggggctcgggccggccggcgcccgccacatcgaggcattctttgcccaacatcctgcgctcaccgaacgcgctcgcgcgctgatcacagtgaaccaggcgcaggaactgatcccctgggagcgactggtcgtccccgacgacgtcgatggctcacggggtaccttccgagcgccgcaagccagctgtgcgctcgacgccagcaacgattaccaggccgtgaacgcctggctgtcgctgcacgagtcggcggcgacccagcgggcctaccgcaaggaagccgaacggctgatcctgtgggcgatcgtcgagcgagggcgggccctttcatcgctgaccaccgaggacgccattgcctaccgcgccttcctgcgtcacccgggccctcgcgcgcgctgggtcggcgcaccacagccgcggttgtcgcccgcgtggcgccccttcgcgggagagctctcggcgcgctccgcggcttacgcgctgtcggtactcaacgccctgtaccgctggctcatcgagcagcgctacgtgctggccaaccctttcgccggcgtcaaggtgcgagggagccggccggcgcagctcgacacgtcacacgcgttcaccgagcacgagtggaagctcctccgggtcgtcgccgacggcctggaatggtcctacggctggagcgagccggcagcgcagcggctgcgtttcatgctggacttcgcatacgccacgggcctgcgaatcagcgaactcgtgggcgcacgactcggcgcggtcgactcggacgcacacggcgacacgtggatcggggtcgtcggcaagggacacaaggccggcaaggtcgtgctcccgccgctggcccgggccgcccttgatcgctacctcgttcaacgggggctgcccgtgacgccttcgaagtggcgtccatcgaccccgctgattggcagccttggagaggatggaagtgggatctcctcgtggcggctatggcgagtgatgaagcggttcttcgccacggcggccgaagtcgtggaggaagccaccccggcccttgccgagaagttgcgcctggccacgccgcactggacgaggcacacgcatgccacccacctgctcgaaggcggcgccgagctgaccacggtgcgcgacaacctgcggcacgcctcgctcgccacgacctcgatgtacctgcacaccgacgatgcccgacgggccaagcaggtggctgatcggttcgcggtgccgcgttcgtag

SEQ ID NO: 531862 - DNA, 585 bp, Stenotrophomonas maltophilia
atgcagccaatcacctgcgacgcctgccgtcagcccgcgctcagccacgatgtcgtgaactacgggtcgacggagggcggctaccggcagctttgcggccgatgcttcaacgaggccgccgccagccgcctcggtctgcatgggtttgagcacgtggtcttcgagcccgtgcgcatgatcgacgggcgtggcgtcgagcacgagttccggtttcgcacccgactgttcgggcccggtatggcgatcgacgcgttcgagctgcgcgatggctgcccggccgggtatcggtttcaggtgatcggcgagcctgacgacgaccctctggagttgctgggcaagctcattggcaagatgcgccgggccctggctctcacgcatcttgaggacaccgaccacgggccgcaggtgaacgatcgcctgatcctgcgcggcaccgtcgacagcgatcccgacgaggaccaccgagtgccgatggtcgtcatcgatggtcgcgagatctcctgggacgaactcggccgcatggtggcggccttcgagggctggcagttcaagctggagtttcgcgaccgaagcgacgaggtctga

SEQ ID NO: 531863 - DNA, 930 bp, Stenotrophomonas maltophilia
atgccagtcaccaagcgtcccaatggaagctatcaggttaccgttggattcggcggaagaacgtatcgaaaaacgtctcggcattggacgcgtagcgccgcgcgcgagttcgaagccgcgtggctccagcagctccaaggcattgcgtctggtaagcagccggaacgaaagataacggacgccatcgaccggtggcaggttgaacacctaccccggctgcgatctgagaagaagaccaactcgcatgtgcgggcgctctacccttacgtgaaaggacggaagctttccgaggttgcgcaggtatgggctgagatcaaggcggcggagatcggaaaggctccggccacggtcaaccacaaggggcgcatcctgcggcagatcagccggatggcatggcgcgagtggggttggctggagcggcctgctgccattggcctattgccggagaagccccgcgagacgttcctgacgctcgatcaggtcgaggcactggcgaaggcttgccccaacgctgcggcgggcgactatgtgcggctggcggcctacacgggcatccgtcgtggacacctgcttcgcctgacggcccacgacgtgcgcggcgggttcatccatctggaccgcaccagcaagacgcggacgctacagctggtgccgctgcacccgaaggtgacaggaatcgcggcgcggcttccattggccgcctcagacgatcaggtccgggattcgtgggccaaggcgcgtgaggcgtgcggcctgcagcacgtccgctggcacgacctccgacacacctgcgcgtcgtggctcgtccaggctggcgtgcccctgcacacggtgtcggaggtgcttgggcacagctccatggcaatgacccggcgctatgctcacctgtcgccggaacacctgtcagacgccatcaaaaagatggcctga

SEQ ID NO: 531864 - DNA, 330 bp, Stenotrophomonas maltophilia
atggacgttgaacagagggcgcgggagctgatgaggtcggagtacatgcttagcctaagtggcgccggccctaagcagaggcatatgtacgaatgcgccatccgcgcaatcatcgtcgccctcacgccacccgagggcgatatgggaaatcccacttcggtcccggatgggttcgtgctagttccgctggtgccgacacataagatgcttgaggcggcacatgcgccaaaggggtacaccatggacggatacgcgaatctacacgacacgtccgacaagtatgccgccatgctcgccgctcgcccggaggtggcggatgggcgcggctga

SEQ ID NO: 531865 - DNA, 144 bp, Stenotrophomonas maltophilia
atgagatggcgtgatcgagactggaatagcgggtggagatttgcgttctggccgatgttggtaggccacgattggatgtggctggagtggtactggatggagcgcaaggtcatcgatccgaaggagaccgacgatggacgttga

SEQ ID NO: 531866 - DNA, 627 bp, Stenotrophomonas maltophilia
atgaacaagcccgcgcgaatggaagtcgtgaagaagatgcttgtaagcgcagctttggtcgggctggcactgtttgcgctggcaggcttagtgctcaagttcatggacttcaggatcgatcctccaccgcccggtcccccgaagcaacgcatcctcgactctgtctctggtcgtgacatcactgatgcgcccccagagatgcatctgatgatcggcatcgccaactattctgacgaagggctaggaaaggtcttcatcaatgatacttgggggggcggtatgcaaccacgcgccagcagcaacggacgaatctgctgcgtgacgctccctcgcatttggcatccaggactgaaagtatcagtggcttatcgcacgagtagtatgttcctgaatgatccctacagctacgcagaaagggatgtggtagtgcctcgctatgagccattcgttgggggatttatctatttcatgtactttcccgacgatcacgtgcgggttgttgctacgccatacgagccagggtattcagagttcgcgtacgacattgactttgcaaattccgagcgtgacccggcaaaggttcgcgcatttcttaaggtgacggcaggcggcaggaggggcgaatga

SEQ ID NO: 531867 - DNA, 2145 bp, Stenotrophomonas maltophilia
atgcggagcaggattttctcgcatgggttgagtcgagacggcatctcgatgatctttcgtcagtatttttgtgcagcagcagtaggtatcgcactactgctgctgcagacatggcagatcgccgagaatttcggacttaacggcggtggcgtaaagaacaacgtcatgcagctgcagattgcagcgcagattgagtctgatccttcgacagttgcggccattgcgggcttcgtgttgtttgcgctcatgagccacttgctgctcgcccttggtgcggtcgccgtgtatagagggggctgtagagcgatcgcgccggcaagactggattcactggcaatgtgccttggctttctggctttggtgatggtctcagccattctggccaatcaatggctgttccccatgtccgacgccttttcattcatggatctggttctggtccaagccttctcgcccgcattgattgtgttgctggttctgctgtgtggagggatggcactggcatcggtcatcacgttcgtacgcgaaaaccgacggctctcatctttcctgctcccactgttggcgattgcaacgagtggcacgctgctgtggcagttccttccagcggtaaaagcaggtgcttcagcgcgaagcgatcccgacatcatcatactgggcatagattcacttcgtcctgatttcgttcctgcctacgggcagtttccagctcgattgacacccgccattgatcgcgctctggagcaggcagtgatcctccgggacgccaagactcctgtggcacgtacattcgtttcatattcaagcattcttaccgggaaaaatcctgtcaatagcggagttcggttcaatctccaccctaggactgaattcaatcgtgacaatacagttgcctggagcctcagggagcgcgggtaccagacgttgttcgcgatggatgagtccaggttcgcaaacttcgacgatagttttgggtttgatgtagtcgttggcccgaccgctggtgcgctggattttgtcgtgggcggcagttttgatttgtttgccactaatctgattctttcgattcttccagtaacggatatgttgagtccggtcaaggggaatcgcgcggcttatcgcaactacaggttgaacgatcatccgcgacgcgtgagcagtcagctgcgcgagctttcatccgagaagccattgttcatggtgggtcatttgtgtctgccccattggccctatctgccaagtgacgtgcacggtgatgatttaccaggctggattcagggagtcgaaggctacgcggatgcccccgctcagtacctgcgcgcgctgcagggagttgaccggcaattccagactatctggaatgagcttgaagcgcaggggcgactcgccaacgcagtggtgatcgtgctgtccgaccatggcgaagactttgcaatggagcgggaccggcttgccgcaacggatcccaatcggtcagatttcaaattcttcggccacggaaattttgctctttccaaggcgcagaatcatgtggtgatggctattcagcgatatcgagatgggcgtccggtctggccgtcgcgcatgatggaaggctccgcctccactatagatgtcgcgccgacgttgctggatttgttgggcgctaaggcagatcattttgaaggggagtcctggaggcaggcccttgatcaaggggggcatctgcgcaaggaccgaattcgattcttcgagaatggaatccggtccgctggggtggaacgagcgcagatcgacgagaaggcggtcgccggcgaaatgtcctatctgtaccgaatcacatcggatatgcgttttgaggttcggcctgaacttcttcccgtcaagttggcggagaagcagcgaggggccacgcgagggagtgttggcgtgatgactgatccagtaactggaatcgacgatcaggcgatggagccttgctggcaggtggttgactatgctgccgggacgatgggatgtaccggctacccgtctactgttcccggcatcagtgagctgcaggatgcagtctgtcagcactttcggggcgacatgggattcgaagcggcctggtgccatcgtccaatgacagatgcgaagtccgggaggatcgtcagcgaaggatag

SEQ ID NO: 531868 - DNA, 636 bp, Stenotrophomonas maltophilia
atgcgcaagatcctgatcgtggccgccctgctggccgccgccccgttctcggcttcggccgacgccctgagctacacctatgtggaaggcggctggacgcagttgaagctggacaatggcagcggttccaagcccaagctggacggcgcctacgtccgtggttcggtggcgattgccgagcaggtgcacctgtttggcggctacaccgccgtgaccaaaacctacacctgggactattacggcctcaacgggcgcgtgaagcagaagctggagacgcctgagctgggtatcggctaccacatgccgtggaccgaccgcgtcgacttcaccgccgatgccgcctggttgcgcatgaacgaagacttcaagctgtcctacgacggcaagagcgccggccgcctgaaggaacacaccaacctgggccgcgtcaccgtgggcctgcgcggcaagccttcgccgaaaaccgaagcgtgggtcaagaccggctatatggacggtggcaacgacttcaagggcacctgggtgggcaccctgggcggccagatcaacttcaccaagacctggggtctggtgggcgagatctccggctaccgtgacgtcacccagtactcggccggcgtgcgcgccagcttctga

SEQ ID NO: 531869 - DNA, 372 bp, Stenotrophomonas maltophilia
atgcacaagatgatgactcctctgacccgctatgcgcagttcagcggtcgcgccagccgcagtgaattctggtggttccagttgttcatcgcaattctctcgctcccgctgtatgtgctgagcttcattgcgggttacacccagtcgggcacgctgacgctggtttcgacgggtttgagcgtggtgatgtggctggcggtgatcgtgccgctgattgcagtgacagtgcgccgcctgcatgacactgaccgctccggttggtggtatctgctgatgctggtgccggtggtgggcctggtggtgctggtgttcatgctgctgccgggcacgccgggcgacaaccgtttcggcgcgccggttccgcacgtgtaa

SEQ ID NO: 531870 - DNA, 402 bp, Stenotrophomonas maltophilia
atgagcgccaatcgctacccgttcctgttcgccaccctgggcgatcttgccaaccagctaccggccgagattgccgagccgctggaaaccaccctcgccgccaatcctgccgccaacggcattaccttgctggattgcctgcaacgcatccgcgaagtggaggcggccgatggccagcccctgcagcggaaagggcgttcctccggccagtgcatggcgctggcacgcatcaaccgggccaacgccgggctgacggtgctgttggaactgctgcacgccagcgagcgcgtgcgcgtggatggcgaagaagcgcagcaggtgggcaacgacgtgcgcgagggcctgctgctggcgtgccgtgggctgtcggagtatgtggatacgcaggtctacgcggcctga

SEQ ID NO: 531871 - DNA, 792 bp, Stenotrophomonas maltophilia
atgcagaacgcaggcacaatcgcccgcgaaggccaggcaagaagcacgcgttacaaggccctgatcgcaccgtcagcacagggccgcacggatgaaaccggcgcatatccccgttttgaagaaggaaaggcccttctggccggactgaagcgccctttggcgcagcgcatgcctgtggcctaccagcggacgttcgttgaaggttacattccgaatgaaagcctgcttctgccggcctcgcttctgagcgatctggaatcagccgcacgcatgaatggacagcagccggcaggcacgtatgcacgcaacgtgatggaacccctgctgatcgatctgtcctggtcatcctcgcgtttggaaggcaatcgctattcgctgctggagaccaaggaactatttgaaagcggaacccgaaccggcgatctggacgcggtcatgctgctcaaccacaaggcggccgttgagtttctgatcaacgaggtgccgatgtctggcctgacagagccggtggtgcgcaacctgcatgccacgctgatgagagatctgctggccgacgccagcgcgctgggcaacatccgctcaaaaatggtccagatcaaggacacaagctacatcccagaacaggcacccggtgtgctgcaggagatgttcagccggatcgtcgccaaggcgaagcagatcaacaatccatcgaggcagcgttcttcctgtgggtcaacattgcctacctgcagccgtttgaagatggcaacaagcgcaccagccgcttggcggcgaacattccgctgttga

SEQ ID NO: 531872 - DNA, 411 bp, Stenotrophomonas maltophilia
atgtacaactttgcgccgctatcgttcctggatgtggatgcccatgactatgcctacgccatgatgggggtctatgagcaatgtgatgtcgcgctggctgtggatgttttcgacgctgcatacacacgctccatccagaagtatcgtatccagttggcagcggcaacggcacctgatcccatccgccttcgtcttcgaggggccatcaatgatgtgatcgggctgatcgttcgggatggctggtcgctgccacaaacgctggaagcgttgagtctggaatctggtgatgttgctgctctaagaggctatgtggagcaggagctggagcacttgggcgagcataactactcgcgcttccacgtcaccatgcggcaggtacaagagtggattgctgctggaagaaaacactga

SEQ ID NO: 531873 - DNA, 264 bp, Stenotrophomonas maltophilia
atgacgggaagctgtgcgcccgttctggagattcccccaatgcccatcgcatttcctcttagtcaccctttggctacggccctgaacacggcaaatgctcttgcgcctgctgcccacgcccagcaggtggtggccgatggtgaccttcaacaaccacctgcgggcgaataccgcaccaccgagccggtgttgcccggtgaccccgcgggctacgtgttctacgcgctcaacggcggccgcatcgaaatgcgacaaacgctataa

SEQ ID NO: 531874 - DNA, 723 bp, Stenotrophomonas maltophilia
atgaagattcgtgcaatgacgtggatgaccgcgctgctggctggtgcactggcgctgcccgcatcggcggcggtgacgctgcagggcacgcgcattgtgcatgacgcagcgaagggccgcgacgtgaccgtgcgcgctaccaacggtaacgacaaggccgccatggtgcaggtctggattgatgatggcgacagccatgcgcgccccgaaagcgtgcgcaccccgttccggctgaccccggccgacccgcgcctgctgcaggcgcaccagggccaggcgtaccgcgtgacctacgcgccgcgaccgtcggaagcgccgctgccgaccgatcgcgaatcggtgttctatttcaacctactggatattccgcccaagcccaccgacgcatccggcaagaacctgctgcagtttgcggtgcgcacgcgggtgaagctgttccaccgtcctgccggtttgcccggcaagccaggtgatgcagccaggcaactgcaatggcgtgcgcagggcggagcgttgcaggtgagcaacccgagtgcgtaccacgtgacgctgagcacgctgacccttgcggatggtcgcaaggtggagggcagcatgattgcgcctggcgcagacatccggctgccgttgccgacgggtgcggcgatgccgtcgtcggtggcgttccagtggcttgatgattacggcaccccacgtgatgccggggccgccgtcgcccgttga

SEQ ID NO: 531875 - DNA, 516 bp, Stenotrophomonas maltophilia
atgtcgaaccgaatgaacctgatcgccgccggtgcgcttgcactggccatttcccccactgcattcgccgaaaagctggagatcaccggcgagctgatgaccagcacctgcgtagtcgatgccaccggcggtaccgtgaccgtgccgatgggcaaggtggatgtagcctcggtcaatgccgcagatcgcgccggcatgaagaacttcagcatcctgctggactgcaccggctccggcgcaccgcagaaagtgggcgtgcgcttcggcggcaccccggatggcagcaccggcaacctggcattggatgccgcttccaccgcaaacaacgtaggtgttgcgctgtacgacgctagcggcaaccaacagaagctgggtgaggacccgctgcagtgggtggacattccggccgccggcacgggccagctggactacagcgcctggtattcgtcgccgggccgcaacgccactgccggcacagccaacgccacgggcgatttcgtcgtgctctacgactga

SEQ ID NO: 531876 - DNA, 2541 bp, Stenotrophomonas maltophilia
atgaagaagcccgtacttgcttccaaccattcatcggcaccggccgcacgtgcgttgggcttggccattgccgccgcgctgtcgctgtggatggtcggccccgcgcgtgccagcgacgctgaacgcctggaattcagcgcgggctttctgattggcggaaagtcgatcgacctgcagcggtacgtgcagggcaatcccatgggaccgggcgtttacccgctggacgtggtggtgaacggccagtttcacgaaaagcgcgatatcaccttcgtggccgatgcttcggcgcagggcgccacgccctgcctgccggccgggctggtgcgccagctgggcttgaagcagacctacctggatgcgctgggtgatgacgacgacggttgtgtcgcgctggccgatctggtgccaggtgccaccgtggaactggacaacagcgatctgcagttgcgggtgaacgtgccgcaggcggcacaggcacgcgatgcacgcggctacgtggcgccggcccagcgcgaccacggcatcacggccgcgttcttcgattacaacatcaaccacaaccgcagcgccggccagaacgcgagctatctgggcctgaacaccggcgtgaacctgggcgcatggcgcctgcgccatcggtcgtccttcagccagggcagcttcggcacgcgccacgatgtcatcagcagctacgcgcagcgcgatctgcccgcgtggaacagccagttgctgctggggcagggcaacaccggcggcgaactgttcgagtcgctctcgttcaccggtgtgcgcgtggccagtgacgaacgcatgctgccggattcgctgcgcggcttcgcgccggtggtgcagggcattgccgaaggcaatgccgtagtgaccatccgccagaacggcaacatcatccatgaagtgagcgtggcgcctggcccgttctccattgaagatctgtacccgaccagcttcggtggcgacctgcaggttaccgtgaccgaggcagacggtcgccagcagaacttcaccgtcaacttttctgccgtgccgcaggccctgcgaccgggggcaagtcgtttcagtgccaccgccggcgaactgcgcgatgcccgcggcgtgcgcgaatcaccgcgctttgccgaaggcacctacgcgcgcggcatcagcaatcacttcaccgcgctgggcggcctgcagattgccgaagacttccagtccgcgctgttcggtggtgccatcaacacgccgctgggcgcgttcggtgccgacgtcacccactcgcgcgggcgcctgaccaacggcgagcagatcaccggcaacagcttccgggtgaactaccagcgctacgtggccgccaccggtaccaactttggcctggccgcgcatcgctacagcacacgcggctacctttcgctcaatgacttcgcgcaggcgcgtgcggatgactggggctacagcagccgcgcccgccagcgcttccaggtgaatttctcccagcgcatcggcgatcgcagcacgctgtcgctcagtggtgggcatgtgcgctactgggatggtgccgcatcccagaacgatctgcagctgcgcttccagagcaccgtcggtcgcgccaactacagcctgtcggcggtgcgctatcggcagggcgatggccgccaggacacccgctattcggccaccttcagcattccgctgggcaaggcgcccagcgcaccccgcctgagcacgcagctggcccagtcggcccgcggcgagcaggggcagcttggggtaagcggcacgctgggtgcagaccagcagctcaactacaacctgtccgccagcacggccagcgaaggtgcgggcagcgccagcgcttacgcgtcctatcgcggtggacacggcacggtcaccgccggctacaaccgctcgggcgactacagcgccttcaatgccagcgccaccggcagtgtggtggtgcaccgtgatggcatcaacttcggtgcgccggtgggcgatggttttgccctggtgcaggccgacggtgcgcagggtgcgcgtatcggctatggcagcgatgtgcgcatcggccgcagcggctatgccctgctgccgcatgtgagcccctaccgctggaaccagatcgagctggatccctccagcctgtcgatggacgtggaactgctgcagacctcgcagcgggtggcgcccaccgcaggcagcatcgtgcgcgtggccttcaacgcctcgcgccagcgcacgctgttcatcgatgccaccgatgcgctgggccagccgctgccgtttgccgcacgcatcgaagatgagagtggccgcagcgttggtgcggtcgggcagggcggcgtgatccagctgcgcggtgcgcccgagcagggtcagctgatcgtggaccccgatggcccgcagcgctgccacctggaatacaccacccccgatgcgccggatgcctacgggctgtcctggagccaggcggtgtgcacgccattgccgccgtccagcgccgggccgcaggccgccttgaatgcagccgatgccgccaccttctga

SEQ ID NO: 531877 - DNA, 510 bp, Stenotrophomonas maltophilia
atgaacctgttcaaccgaattgccctttgcagcgctctgctggccgccgccccggtggccctggccgatcaggccaccctcaccatcactgggcgcgtgttgcccggcacctgcacgctcaccgccgcaccgatcgctctggacgcggtgatggccagcgatttgaccccgggcaccgacgcccagatcaaggccggtgcgctggagttcaccggctgcgtcggggtcaacaaggccgtgctgtccttcgacggtaccgccgccgatggcgattccgagcgctggaagaacaccgccgccaccgaccccgccggcggcgtgtcgatttcgctgctgtcgggcaccacgggcaacaactacctgaaggatggcgacacgggcatcgatgtgccggtcactggcgccaacgcgcgttacgacctgcgcgcggcgtaccacgcaccgaccggtgcggcgctgagcgccggcgaagtgtccaccgagatcgtggttaccgccgcctacgagtga

SEQ ID NO: 531878 - DNA, 996 bp, Stenotrophomonas maltophilia
atgatgttcatcgacaagcagaacacaacaccgcgccgtggccatcggtggcacgcctgcgccatggcgctgctggccgctctgggcctggctgacgcagcgcaggcctgcgtgaaggaatggcacagcccccgcgccgagcacaaggtcatcaatagctatccgacggatcgcgagcgccatatgggccagttggcctgggtattccaattcgacgattgtgcgcagggcgattccttcgatgtggatgtcaggatggagatgcccgggatgacgtacgtgggtgaaatcacctataggggaattacctatcctgcgtttgaggccaaccccgaagcaccgttgatgatcttcctgttccagcaggttgtcggattcacggagctgccgatgcggccgggggacacctatgcatacccggtgagcatcaattcggctagccccaccacccaggcaaccttcaactttcgtcctcagtacttctcgcgcgggggacgtatgcgctcctacgtcggtagtggtcggttggtctggaatgtcgccaagcatccgcacctggcgggtgagcacatcctggagcacagctttacgttccccgcagtgacctgcccgctgcaggacaccgccgaaaccctgcaggacgtgcagacggcggagctctccgtgcccggttccactgccaaggaaaagctggtggccatccgcatggattgtggtgccgaggcgccgcgcgcgcggatgacgctgagtgatgccggtgatgccagcaacaccggcagccagctgacccccacggccgactcggatgctgaaggcgtgcgcgtgcagttgctgcgcaacggcaccgaggtgcagttcggccagacctgggatttagaaccgggcgtgggtggcgtgcacgatcaccagttcaccgcgcgctacatccgcactgacgagccgctgttgccgggcgcgatcaagggcgaagccattctaaacgtggactactggtga

SEQ ID NO: 531879 - DNA, 669 bp, Stenotrophomonas maltophilia
atgggaatacgcctgcctacctgggtctggatcggcgcggtcgcgctctcgtgcgtggccggcatggtcaacgtggtcggttttctgggtttcgagcaccaggcggtcagccacatgaccggcagcaccagccagctgggcatggcgctggcccagggcgactggcgtgcggtcgggcatctgtggggcctgctgatcgccttctctctgggcgcgatgctcagcggcctgctgatccaggacagcgccctgcagctggggcgtcgttacggcgttgcgctggcgctggaatcggcgctgctgctggtggccattccgctgtttgaacggcaccagatctggggcgcgctggccgccgccatggcctgcggcctgcagaatgcgatggccaccaccttcagcggcgcagtggtgcgcaccacccatctcagcggcatgttcaccgatctcggcatcggcctgggccacctgctgcgcggcctgccgctgcaggttcgccggttgaccctcagcgggctgatcatcagcggattccttgccggcggcatcatcggcgcctggctgttcgtgcgctggcagtacgacgccctgctcgccccggccctgctgaccggcctgaccgggctgggctatgtgctgtaccagcagtgggcacgctggcggcattga

SEQ ID NO: 531880 - DNA, 300 bp, Stenotrophomonas maltophilia
atgaacaacgtgatgggaatggccctcggcggaatgcgtgcggcccagcagggcgtgcaggtggccgcggataacgtggccaacctggcgacccccgatgcccagcgccggcagctgcagcgtgcagcggacgggcagggcggggtggaggcggcagtgaccacgaccggcaccgattccggcgcgctgctgggtgacctgctggcggcccgggccgaagtgatcgcgttcgccgccaacgcctcggcgatccgccgccaggaccagatgctgggctcgctgctggatcgggaagcctga

SEQ ID NO: 531881 - DNA, 306 bp, Stenotrophomonas maltophilia
atgtacttcgccgtcctgaccaacttcgcgcagattcagagctccaccgcccttgccgtcggcatcatgatcggcctggccgcgctgggcgccggtctgggtctggccatcatggctggtaagttcctggagtcggccgcccgccagccggaactgatcccggtcctgcaggtccgcatgttcatcaccgccggcctgatcgacgccgcgttcatcatctcggtcgccgtcggcctgctgctggccttcgccaacccgctgtcggctaccttcgctggcgccgtcaccaaggctctggccggctga

SEQ ID NO: 531882 - DNA, 471 bp, Stenotrophomonas maltophilia
gtgacctggtgcagttgggcggccacggccctgtgcgtcgggatcatgattgcggcacaggcgcagtggttggtgccacccgtcccctcgcctatcgcgtttcagcgcatctccaacgatcgcttctcacagctgcgccgccaagcaatccggttcgtggaggttcggccagggcacggcttccagttcgtggagcggcatgaacacgcctctttcgagattcattgcaggggcgtgcccgtgttgtggctggagaagcggcagcagcatgtgctgttgcaggtctcgctggatgcgaagcagcgggcgcccgctgttgcgctgttacttgcactgcttcaagggcagttgcaacccgtggactatctggagcaagtgctggcgggcgtgccggagcctgttctgatggatcgggtgttgcagatgctggctgatgagatgcctgatggggtgcgatgtggcatgccgtag

SEQ ID NO: 531883 - DNA, 1026 bp, Stenotrophomonas maltophilia
atgcccatgtacgtcatgctcgagaaaagcagcgatattgtcagcgcgcagcgtcagttgcaggccatgctaaaagcgcaatccgatggcacagtggttaaggcattggggtatgaagtcggtacacgtccggtgtattcgttccaaggccaatggtggtactggaccagcgagggcagcaagagtgggcatcagggtgcgcgtcgattcaattggttcggcgcctatgatgagggcgcgggggtgaagatcgctgtagaaatgaacatcgccttcttgtccgccgctaaggcgccaggccgccgccggccaaatgcgttctttgccaaggacatttgcagcggccaaatctatctcttccatacaggcgttttcggtggaagcaggcgggggatcagtcgccccggctttctcgcacacagtgggctgaagcctgaagcagtgttgcgagccaaaggaaagcagattcacggaattatggtgatgccacttcaggggcggtccgcgagccgagcctgctttaactatgtactggcggcgacagaatacaaagccgcggaacgtgccggcgaactagaaagcgctcgattcaagaaacaggtctcacgttggaaggactacttcatcgaggcgggaggaagccgcaagtaccgtgtcggcggcatggttgaatatatctcccggcactgggaagtagtccatgccctgaagctctggcgcgaaaagcaaggcttcatcaaggggcataagctcgtgaaggatcgctttgtcgatctcgcggttgccaacggggaggtgctgatcgaggcttacgaagtgaagacatcctgcgaccggactgacatctattgcgctattgggcagctgatggtgcatagctctgcgaaggatgcctgtaagcgcatcttggttcttcccatccatgcaaagccgttcgatgggctggcctccatactggatacacttggtatcgccctgatccggtatcgctttgagagtgattcggtgagtcttctgttgaagtag

SEQ ID NO: 531884 - DNA, 750 bp, Stenotrophomonas maltophilia
atggagcgcatgacgttgtgcgatgtcgcattcctgcgcagtccctcgtcacaatgctggtggcctctggagggggtggatcagcattctgtgcggttcgctgcggacgtctataagggcgaatacttcgcccagttgggtatccactgggccgaagagttgcgcaacgccaccgacaagcgtcgtgccgagttcctggccggtcgctactgcgctgcactgctgctgtccggtcgtggcttgccggcacatgtgcccattggacgccatcgctgtccggtgtggccggccggcgttgtcggggcgatcagtcataccgtcactttggcagtggcggtgatcgcagacgagacgaagttcgccgggctcggcatcgacatagaatcggtcatgccgactgaagttgcggccgagctctgcgcccaggtgctcaatcctgccgaacgcgcgtggctggaacatccctggctatccccggcggagatcaccacgttggtgttctccgccaaggaaagcctgttcaaggccctgtatccctctgtcaacgaatacttcggctttgatgccgcgactatgacggccctggacgtgcagcgaggcgcgcttcgcttgcgcttggagacaacacttggcggtggacgctggttggcgggagctgaattcgatgttctgttcgttcggttcgcgaagcgcgagatcgcgacgctggccgcgctgccgcaacttccgccccgcagcggcgaccgttga

SEQ ID NO: 531885 - DNA, 1980 bp, Stenotrophomonas maltophilia
atgaaaaaggttgaacttcaaccgcgtggccgtcgcgcttgtacctggctgggtttgatcgcgtgcctccttctgtcctgggcgtatccttcggtcgcatcacaggctgcaccgattgagttcgatgaacctggctgcccgttcaaggcaagttcttggtatgacagtcgattcatgcgatgcggctacctgacggtcctgcaggcgaacgaaccagaacccattcgcattcccgtgctaaggctttcaaacctggacggccggcagcgcgaaagggcgacggtgttcctgaacggaggcccgggggggcgcggcattaccgaactcgaagcctggcgccaacatccgttgctccaggtgagcgacttgattctgttcgatccccgcggggtagggcattcaacgccccgaatgtgtcccgaactgggggcgcacatcatggatgcgctggcggccgacatgactcagcagcaggaagccgcgtggcgtagaggcaaggtgaaagaatgcatcgctgggctgcctgcttcggcacgcgatggccgcttctcgtccgatcaaacggtcgatgacctggatgccatccgcgccgcccttggctacgcatcactgaacatactcgcggtttcgtacggcacccgcatcgcccaggcctatgccgccagataccccgacaccacgggcagcttggtacttgattcaccgattcccgcgctcggctcctattacaaagacataccgcgaacgctggatgcagccattgaaaacgtgttccggcagtgcgagcagcagacggcatgcgctagccgctatccagacctgcgctcggactaccagatcctcatggcccgcgtcgaacgctcgcccatcgtgatcaacattcccgcgaagtacaaccatccagccacgacgttccacctcaatgcccgcgacctgcgccttctaatccaccagttgctgtatggcaaggaattcatcgccgcagttcccatgctcatccaccggctggctcgccagaatgacgttgaggcattgccgttgctgctcgacattggcatcggcatgcgaatcaacagcctggatttcgccgtctattacttgaccctggctcccacagagcaggcgcccatggttgcttcggccgagcacaggggactggcgttcttcgataccgacccctccctgttcgcgctcgcccgtgaagcaggggtcgtcgctcccgccgatcacgcaccggccgcgaagcgcgcgcagaccctggtcctgagcgggggcatggatccaattgcatcgccacagtatggcgaccgcatcgaagaagaaggcgccggcaaacgagtcttgttttctggcgcggggcacggcgtgagtgccgctgtgccgtgcacgggcaagttgattgcagggttcatcgcgaatcccaaggccgcactgccgggcggttgcccagggcagggaaatcagatgggattcatcaccaatgtggcgctcacgtcaggcatacgcgatatcgcccaacaggtcaccttccagcggagcttcgttgccgtgatgccactggcgatcagcctggccctgtatgcggcaaccatcgtggttctggccttgtcagtggccatgcgcttccgcgcccgtcgcgcgtcaggcccccatcggtcgggaacacgatcgcccatcgtcgtccacctggccctcggactcggcctgataaccgcatggacattggcgctttaccagatggtgaccggcccagtacccgccatcgtggtcttcggggtgccgcccctcaccggtatcctgctaacgcttgcattccttgccgtggcctgcggactggcgctagcgctgtaccggtacggtgtacagggccggttccgtcggctgggctggctggacggcattctcctgtccgccgtaatgctaggcaacgccgtgctgttgggtttcctgctgcgcaatggcttggcatggctcatctga

SEQ ID NO: 531886 - DNA, 1374 bp, Stenotrophomonas maltophilia
atgagcaacacaaccgtcacacctcaaccggccgcacggctgtgggaccaccctgcattccttatggtctgggtgggccagtttgcctcggccatcggcgcccagctcacagccttctcgttgagtatctgggtgttccaaggaactgggtcggtaggccatttcggtctggtggtcgccgcacagatgctgccggcggtgctgctggcttccaccgccggcgtactcgccgatcgtttcaatcgtcggcgcatcatgctgttctgcaaggccacggctatggtcgtggccgctgcgacgttcgggctgctggaggcggacatcctgacgccgttgacggtgggctttgccacagcggttgcctcatccttcgctacggttcatcagatcgcatacgcgtcgtccgttccacaattggttccacgccagctctaccagaaggccaatgggctggtacagatgagcatccacgtcagcgccgtggtagttccgctgctggctgtggtgctgctggagtggctgggcctggggcgtatcatcctgattgaaggcgcttgcgccctagtggcggtgggaacactgctatttgcaagattcggcgagccaccggcccgcaacgcgaggcaggatccagagaaaaaggggctgaaggcgcactttgcgcagcagacattcggcctgcgctatgtgttcagcgatcccgggctgtccatgctgatgctgtacctggcgctggcaagcttcatcaacggtttcgtctacgtcctattccgaccgttgatgctcaccctttcagacgtaggcacattgggcacgatagtgaccatcgcgggagcgggcggtctggccggaacaatctatatcagcttcttttcccgactccgtgatcgcgtcactgcgcttctacgcttcacactcatctcaggcatattcatgacgttgtgtggcgccacccagtccattcccgtcatagccttgtcggcgttcggcttctcatttgcactgccaggagccatcgtctcggtacaggtcctgctgcaggaacgggttcccaacgaggttcgagggcgcgtatttgcggcccgcgcactgctcggcggcggcagcatgctgctggcggtgttactgtcgccaccccttgccgagctgctgttcgaaccggaaatgctcgatggcggcgtactcgccggctggttcggccagtggttcggccaaggaccggggcggggcatagcgctactgtttgttctggccggcacctcgatggtcgtggtgtcgctcgccgcggcaagaagtgctgcgctgcgcggtgtagcacgggagcaagaggcgccggcgacatcggtccccgccgccgacgtggaggccagctga

SEQ ID NO: 531887 - DNA, 948 bp, Stenotrophomonas maltophilia
atgaacctgcacaccagctttccatcggtcgatgccaaacacgcagaacttcctgttcatgtggatctatccgcctgcacatcgatccaggacgttcgcgacgctgcacagccccatatcgccacgcacctgcacacgatcggcggcgtcctgctgcgcacccaggcaatcgattccatccaagcctttgaggcgctggtggccgccttttcgaacgacctgatgacctatgacttcggctcgacgccgcgcagccaattgagcggaaaggtctacacctcgaccgagtacccccccgaacacaccatcgccatgcacaacgagatggcctacacaacgcgatggccaagcctgatctggttctactgcgaccaggcaccggagcaggggggggagacgcccgttgccgacagtcgggcgatctaccgtcggatcgacccggcgatccgccagcgattcgagcgggatggcctgctgtacgtgcgcaattacagcgcagagctggacgtcccgtggcagaagacgttcaacaccgagcgccattcagacgtggaggcctactgccgccggatgggcatcgaattcgagtggcgcggccagcagctcagaacctggcaaaggtgccaggcgtccctccggcacccgctcaccgacgaacaggtgtggttcaaccaggcgcatgtcttccacgtctcaaaccttgaggagccctatcgcgaagcgatgcgcgcgatgttctccgaagctgagctgccgcgaaatgtcctgtttggtgacggcagcccaattgaagacgcgatgctcgacgagatccgttacgtcatcgaagatgaaaagcggctgttctcctggcgcaaaggtgacgtactgatgctcgacaacgtcctgacggcacacggacgtgaaaggttccagggtgcgcggcgtattgcggtggccatggcatga

SEQ ID NO: 531888 - DNA, 1230 bp, Stenotrophomonas maltophilia
atgctgcagggtgccgacctgcgcaggcagcttgcacgcgagctgcctggctacatggtgcccacccaggtcatcgtgctggaggcgctgccgctgaccgccaacggcaagatcgaccgccgcgccctgccggtcgggaacacgaacgctgtcagtacctacctggcgccgcgcaacgaaagagagaaacagatcgcagccatatggagcgacgtgctggcgatagacgcgcccagcgtggacgtctcattcttcgaccttggcggccattcgctgctggccaacaggctggtcgcggcactcaagcgggagctcgcgcaagacctgcgtgtccgccacatcttcgatgcacccacgatcgaatcgctggcactgctgatcggcggccagaagcacacgcccgcaggcatggtgccgatgcagcagcacggcagtgggacaccgttgttcctgatccatccggttggcggcgacgtcctttgctacctgccgctggtcagggccgcaggcctccagtgcgcggtccatgccatccagcgcgacgaactggccagtggcacccccgcgcgctatgaggacctgcgtgccctggccggccgatacctcgcccgcatccgcaacattcagccgcttggaccatatcgcatcgccggctggtcaatgggcggggtgatcgccgcgcacattgcagacctgctgcaggcctgcggacagcaggtcgagtatctgggcatcatcgacagcttcctgcgcacgccagccgagatcgcggacgctgccctggccgatgacggcacaccggaggaagccttccagcacatggtgcagaaactaagcgccgacgcagaactgcgagcacatttcgaccagtccatgcacctggaccgcctgcattccgtgctggatcccgaggagctgcagcgcctgcgtgcgatcaccgccgccggtgtcgtagccgcgcgccgaagcccttctgtcggtctacccgtcaatgcccactactactgtgcagccatacccgccgggccacacctggatggaaagctcgatcggcacgcgcaggcgggaggaaaccccgcacgggtgcggatgctggagggagaccatcattcgatcatggagcccccccagatacacgcgcttgcggcagccatagcagccgatatcgccaacggcagccccacccaaaccgcaacggacgcagatcgcgccgtcatggagacactttga

SEQ ID NO: 531889 - DNA, 2118 bp, Stenotrophomonas maltophilia
atgttcgacttccagcacgatccagtagatgccacggcattgcctggcctgacgacctcgccgctgtccacgcgcgaaggcgtggccaagttcgacctgctgctggcactggtggacggaccggccgggatctccgggaacctgatctacgcatccgatcttttcgatgacggcaccatcaagcagttctggcgacactatctggcgctgctggaacaggttgcacgcgatgcgaacacgtgcgtggccgacctggccacgctcgacccgcatgacgtgcactgcttgcacacgttcaacctcaccgacgccgctttcccccaggccacgatccacgagctgttccaggcccaggccgcccgcacacccgacgcggtggccgtgcacgacggtaccgagccgttgacctaccgggcattggatgaggcatccacggggctggcccagcacctgcgcgcactcggggttggcaccgaagaccgggtcggcatctgcctgccacgcgacgcccagctgctggtggcattgctggccgtgctcaaggccggcgcggcctatgtgccgctggatccacagtaccccgatgtgcgcatcggccacatcctggacagcgcacagcccagcgtactgctgaccgtcagcaccgagtgcgcacgcctggcgccgttggccggcagccagacccagctgcttgccctggatgccgttaggccgcaccacaacagcgtaacggcactgcccacgacgctgccggggcagctggcctatgtgatctacacctccggctccaccggcctgcccaagggcgtggccatcacccacgccaatgccgtggcgatgctggactgggcccgcagcacctatcccgatccggtcctgcgccacaccctggcggccacctcgatctgctttgatctgtcggtctacgaactgttcctgcccctgcttaccggtaacagcgtcgtgctggtccgcgacgctctggccctgaccgagcaggcgcccccggtagcggtcagtctgatcaacaccgtgccctcggcgatggaggccctgctggccgcccatgccgtgcccgccagcgtgcgtgtggtcaacctggcaggtgaggcgctgggccgtgggctggtcgaacggctgtatgcgctcggacacgtggaagcggtgtacaacctgtacggtccttcggaggacaccacgtactccaccggcaccctcgtcgatcgaggcggcgcggaccggcccagcatcggccgtccgctcagcaacacgcgtgcgtacgtgctcgacgaggccctgcgcccggtgccggtcggcgtgcgcggtgagctctacctcaccggtgccggcctgtcacgcggctaccagggccgagcggcactgaccgccgagcgctacctgcccaatccctttgccggcacgccgggcgaacggttgtaccgcaccggcgacatcgtgcgctatctcgccgatggacggctggactacctgggccgcgccgaccaccaggtcaagctgcgcggtttccgcatcgagctgggcgaagtggaagcggcgctggcgcgccagcccggcgtgcgcgaggtggtggcggtggtacagggccagggcagcagccagcatctgctggcctacgccagcggcgacatgctgcagggtgccgacctgcgcaggcagcttgcacgcgagctgcctgcctacatggtgcccacccaggtcatcgtgctgcaggcgctgccgctgaccgccaacggcaagatcgatcgccgcgccctgccggaccttgtgcgggatgcggggaccactgaagagcgggagctgctgactgcaacccagcagcgcctggcgatgatctggggtgaactgctgggttcgcaggacatcgggcgcaacgctggattcttcgatgccggtggcaactcgctgcgtgctacccagctcagcgtgcgcattgccgaggcgtttgacgtgcgggtaggggtgcgcgacatattcctgcatccgcagctggtggcgctggccgagcatatcgacgcactggtgtggatgcaggcatcgccgccagcaagcaacgctggactggaacaggaaacgcatatggagatgggcctgctatga

SEQ ID NO: 531890 - DNA, 327 bp, Stenotrophomonas maltophilia
atggatctgcccatcaggcgcgatgccgttgaccagaaagtcgtggaattctgggctctgcaccagttcagcaaaggctgtcatgccctgcgccatatctgcggcgagcgtacgcagttgttcaaattgtcgatcgatgtcggtgcaagcgtgcctgagcgcatcctgggccttgacgcattcatcgatagtccggatgtcgtactgctcgaagaagtggtggacgagcgtgttcctgagattcaccagcgcgcgcagatccgcttgcagggccgcatgggattcccctggcagactgatccctatgtgcaggccagaaaggcttga

SEQ ID NO: 531891 - DNA, 504 bp, Stenotrophomonas maltophilia
atgaagaagcacggccttgccgctgcaacgatgtgcatcgcggtgatcggcgcggtgtggcccggttggcatgagcctgcgtgcgatcaggtctgggcttaccagaagctgcagccggctgactaccggctgctgtacagcgacgcgctcggcttcgtgaccgcgaaagcggatgagggcttcgagctgcacgcgcgccctgccagcgcgacctcgttcgagatccgatgcaagggcatgctggtgatggacgttgagaacgcaccggcgcgcgtgttgatccgcatgcccggcgatgcacagttgcgggcgccggatatcgagcggctgcgcatgagcttcgagcgctggctgcttgtccagcagatcgaagggcggttgctgatggagcgtgctgggccgccgtgggtagaggcgcgctttgggcgcttgggtggggtggtgcctgatgagcaacggtgtgcgttcgagagcccacgccaccgctggccgggctcttcctga

SEQ ID NO: 531892 - DNA, 1407 bp, Stenotrophomonas maltophilia
atggattcggaagtgctggccaatgcgttcgactacgtgcgcgagcatcagacaccgatccatagcctgaccatcattcgcaatggttatgtcgtggtggacgcctatttctggccattccagagagggcagtaccacgatgtcgcgtcggtgacgaagagtgtcacaaccaccctggcaggcatcgccatcggcaagcacgcactgaaactgcaccagcccctgacgtcggtctttgccgctcaggacatcgcgaatctggacgagcgaaagaagcgcttgaccgtcgagcatctgatgacgatgacctccgggctggactgcgacgccagccagggcgaaatcactctctcgcggatgaggcagagcagtgattggggccgcttcatgctggatctgccgatgcgcgatgaacccgggagccgcttcgagtactgctccggcggcatgcacctgctgtctgcagcgatcacgaaggcgacgggccagagtgcgttcgacttcgcccgtcgcgagctgtttggcccgcttggcatcaatcatgcggcctggccgatggacaaccatggggtttcgtatggttggggcgatctgcaccttgaacccctggacatggcgaagctgggctacctgtggttgaacgatggccgatgggaagaccggcaactcgtcccgaccgcctggatgcgtgctgccgttcggccgcaagcgcggccggaaggtggcgacgaaaagtacgggtatggcctgtggctgcagccggacaggaagccgtcgctgttcgaggcgaatggtcgcggtggccaacgcatcagcgtgagcccggagaagaatatcgtggtcgtgtttaccggcggagagtttgaacccggcgacatcggcaccttcattcttgctgcgctcaagtcggatcggcccttgccggagaatccggcggctgcggccgcattgtctgctgcggtgaacgatgcggcacgcccactaccgtcgctgtcattgatgccgccgctggcgaaaacggtctcgggcaagcggtacgcgctcgccgaaaatccgcttggcttgaatgcgctcacgcttacgttctcgggagctgaagctgcacagctccagttcgaactgaagagccgcaacgaaccctccaggccgatcgggttggatggaacaccgcgcgtgtcgcccgatggcaattttggtttgcctgtagcagtaagcggccgctgggagagcaacagcacctttgtcttcgactacaacgagatcggaaacatcaacgcgtaccggttccggctgacgttctcgggcgatgacgttgatgtgggcgtgagcgagcgatcgcgggtgatacaaggtgtgcgaatccacggaaccacggcgggccgggcagtctctggacaggtgcactga

SEQ ID NO: 531893 - DNA, 360 bp, Stenotrophomonas maltophilia
ttggatgctgttatcactgaagatcagtacagtgcactggcaagattcgttgcggcgatttccgcaagggacggccggactctctcagagcagctttctgtttcggaagacatcgtcgatgagatcttcgaaaaggtcagcgactactacgacgatggcgtggttctcacagtcccctcgccgggagtagcagccattcctggcggctcccgaatgcttgtggaggcttatcagaccaattacgggagcgttatcgtcgactgcgtgatgtttgccgacggagttcctggcgaagcgatccttcatgtcgagttcgtggatgactccgatcgtctccactatcgatacatcggctcgtga

SEQ ID NO: 531894 - DNA, 351 bp, Stenotrophomonas maltophilia
gtggacgctgcgatcaacagccatcagtacagcgaactgacggatttcattggcgcactctccacgcgggatcgcgatgcactacaaacgcggtttcagctttctgccttggtcatcaatgaaatgttcgaactgatcgacagctactacgcagccggcacgctgctcactgcacctcgccaggatgacagcgatgccctctggatcgtagtggacccacgcgttgaagatccggatcccagtgtgtggagcgttgaatgcaggatgttcgccgatggcaaagaaggggaagccgtcctgcatctcgagttccatgcaggtgtgcttgtgtaccgctacatcggatcctga

SEQ ID NO: 531895 - DNA, 1128 bp, Stenotrophomonas maltophilia
atgacgccaccggatctgctgaaactggcggcaggcgccgcgattctcggcctggccgcattgtccaccggcgtatgcgtcggccgcacggggcgtggcaatccgctgctcactgcgttcttcgcctgttttgctgccgccagtctgtccgggctggtgctgctgggtggccaggcctggcttccgcccgatgccgttcgctggctgcgcgtgatcgaagtgccgttggtctacctgctgggaccgctcctgtatggccatgcgcgcgcgctgctggctcctgtaccggaatctgcgccggcattgcgggccggccatctgttgccggccgtcctcgcgttcgtcatctccctgtgcaacgccctcacccccttcgaggcgacgccactgggcagcgccctgttccagctcagcttccacggttggctgctgcagggggcgccgtacctgctcgccacagcgtggctgtcaatccgcaggtccacgaacacgcatggatcggccatgcagcgtagtgggctgcgcggaatggtggtggtgatggccggttgctggctggccagcacgatgaaccggtggccgccggacgccgccccgctgctggccagcatcgggctgagcctgctgaccaccgccggcatgtacctgctggcctgctgcgtcgtgcgccagcatctgcgcgccccgatggcgaccgcagcaccgggcacgagtgacgtcatccccgtccccatcgaggattccaccgttgcacgctacgaacgttcgggcatcgacgcgacccattgcgcggccatcgccagcgcactgacagcattgatgcaggaccagcgcctgcatgaagccgctgggctcaacctgcagcacctggccgagcgcagcggctggtcgccgaaccaggtctcgcaggccctcaaccagggcctgggccagagtttctccgagttcgtgaacggtttccgcattgccgctgcaagggccagcctctccgatccgtgcgacccacgcagcgtgctggacatcggccttgccgccggcttcggcagcaagtcgaccttcaacagtgcgttcaagcgcgccaccgggcagacacccagcgagtaccgacgccgcacctcgtccggctga

SEQ ID NO: 531896 - DNA, 1878 bp, Stenotrophomonas maltophilia
atggcgttagaagaggcggtgtggtacaccgccggcgcccagggcggccagttcggcgaagacacgcgcagcgactggctgctggtgcgcggcttcaatccggcccgctacctcgatggcctggccgtggtggaaggcacctggaccggcgaatcgcgcctggagccctatggcctggagcgcatcgacgtgctgaagggcccggcctcggtcaactacggcgcgatgccgccgggcggcctgatcaatttcgtcagcaagcggccgcacgccaacccgctgcaggaagtggaactgcaggttggcaactacggcctgaagcaggccgccttcgacatcggcggtgcgctcaatgacagcggcagcgtgctgtaccggctggtcggcctggcccgcaacagcgacaacgtgatcgaccacgtccatgacgatcgctactacctcgccccctcgctgacctggacgccggacgatgccaactcgctgaccgtgctggcgcgctaccagaagaacgacacggtcgaaaccggcggcttcctgccttaccagggcacggtggtgcccggcgccaacggccgctatatctcccgccacttcttcagcggcgagccgggtgtgaacgactacaccaaggaaagcgccgcgctcggctatgagttccgccacgatttcggcgatggcaccgcgttcaaccagaacgcgcgctacagctgggccgaagtggacgccagccgcggcagcctgggcctgttcgggctggtgtcgccggacagcaccgagctggtgcgctactactacccgcgcctggacaagtccgaaagcgtggccatcgacaacaacctgaccttccgcttccgcagcggccgtgccgagcacacggtgctggcggggctggactaccgtcgcgcgcgcaacgattacgcctcggcgttcctgttcggcgcgcccggcatcgatgcctacaacccggtatatggcgcgccggtgcaggtgcccgactacacctcgcgccaggtgcagacgcagagcacgctgggcctgtacctgcaggaccagatccgcatcgaccgctggctggtcacgctggccggccgccaggactgggtcggtaccgataccgagcagcgcatcggcaccgccagccgcgcccaccagagcgatgacaggttctccggccgggtgggcgtgaactacctgttcgacaatggcgtgagcccctacgtaagctggtcgcagtcgttccagaccaccatcggcaccgactacgcggggcgtgcgttcgtgccgaccaccggcgagcagttcgaggccggcgtgaagtaccagcccgagggtggccgcctgctgctgactgccgcggcgtaccagatcgagcaggacaacacgctcaccgtcgacccgcagcacaccctgttctcgatccagcagggccagacccgcgtgcgcggtgccgagctggaagggcgctggaacatcggccagggcctgagcgtgtacggcagctacacccgcctcgacgccaaggtccggcgcagcaccgatgccgcctcggtaggcaagcgggtggcgctggtgccgaaggaaagcgcgtcgctgggcgccgactacaccttcaccgccggcgcgctgagcgggttcggcttcggtgcgggcgtgcgctacaacggcggcatctacggcgacatctacaacgactggtacacgccgtcgttcaccctcatcgatgccagcgtgcattacgaccgcggcccgtggcgcctgcaggtcaatgccgccaacgccgccgacaagaagtacgtgtcggcctgcaacagcgcgacctggtgctactacggctacccgcgtaccgtcaccgccagcctgcgctaccaatggtga

SEQ ID NO: 531897 - DNA, 456 bp, Stenotrophomonas maltophilia
atggcgaccacgcccgaatgccgcagcacatcgcccggctcaactcaacgcggattttcactcatcgaactgatggttgtagtagccatcattggcatccttgccatgatcgcattgccgcagtaccagaagttcgcgaccaaggcgaaattcactgctgcactggcagagattgcaccgggcaaggcaggcttcgaagtccttctcacagaggggggcgtctcgccaggcatccattactcagaaattggcatccgcctttacaccaagcgctgcgccagaatagatatcaacctggacccgtccgattactcccgtgcagagatcagttgcgcgctgatgtatggcgatcaggactcagaaagactgtcactcaatcgtgatagcgatggagcgtggagctgcaccagcaacgtcgccgacaagagcctgctgcccaacgaatgcaagacctga

SEQ ID NO: 531898 - DNA, 465 bp, Stenotrophomonas maltophilia
atgaacaccgcattcgtcccagcaccgcgcgcaggcatgcgcgcctcccggcaaaagggcttctcccttgttgaactcatggtggtggtggcgatcatcggcatcctggcgatgatcgcgttgccgcagtaccagaaattctcgaccaagtcgaaagtcgctgcggcgctggccgagctggcaagcggcaagattggcgttgaagcactgctggctgaaggttcggacttcaagaatgtggacgcagtagcactgggaatgccggggtattccaccaagaggtgctcgagcttcgatgtcagtgtgaatgacactggcgagggcagcctcacctgcaatctgacggacgacgccaattacggcaagagccagaccctgagcctggaacgagacctggagggccgctggacatgctcaagttcgatctatgagcagacggttttgccggaagcctgcaaggcctag

SEQ ID NO: 531899 - DNA, 963 bp, Stenotrophomonas maltophilia
atggaaggacagccactcgattctccgaccgggagagtcgccgccgagttcggctactacccaaggccctgcgacctagacacagaccgtttttcggtccgaacgctcaccaccctccaagaatccatggcggcggttacggaagatccctgcaccgtaaaagactggatctatccgggggcacaacgtcatcgcgacgtgtttagcgggaagacccgcttgatgccctatgccgcccgggtctttggattgcccaaaactcacgtcctgacccttcatcaaagcaccaatcctctcgaccttgagttcgtggtgtggtgccttgccttcttcctgggcatgcccctgacgacgaccgaggccggctttctcgatgcggcgccgaccaagcccggcaagctcgtggacttcgttctgactggcccgggcgatgagtccgaagccatcggattggcgttggactttctcaatgccgagcccgccgattcaagggctcccaagcgggtggcggccgtcatccatgcattgttcctttcgcactatcctcagagccttccctttgagcggttccagtacctctacatggcactggatgggtgcttccagctcatttcagccaagggaggggcaaagccccctcgaacccacggcgagcgcattcagtggatgtgcgcggcgttcaacatgccggtccccgattgggccaggcacgccacggcggcgccgtcgtcgctttcggtggttcgcaacaacgccttccacgaggggctcttctttggcgagccgcttggattctcgatctatggcggcaatcagctggcagcagatcctggcaacacgccgctccagatgcaggcattagtcagccgtctcttggtcgccattcttgggaagccacacgcaagctacgtcaagtcccccgtcaacgagcgtcagcaccacagactcaacctccgtgagtga

SEQ ID NO: 531900 - DNA, 1878 bp, Stenotrophomonas maltophilia
atgccgtcgaaagcagaagaacgcgctccagccgcaccgtccgaagcaatcaagagttccgggaacgagatgacggatcgcaacgttcacgtcaaagaatacctgcgctactacctctcgctgcccactccgccggggttcgccgtacttctggatggtccctggggaatcggcaagaccttcgtcatcaagaaattcctggacacgctggacaaggaggcgacgccgtacatctatgtcagtctctacggcatccgatcagttgacgacatcgacgacgccatccttcaaggcatgtatcccgtgctggcgaacaagggcgttgaactgggaggccgggcgctcaagtcgatcgggaaatacttcaacgtggagctggatctgaaagcgaaggacttcctcaacaagtccaaggccaacgtctacgtgtttgacgatctggagcgatctgagatgcccatcaatacggtgatgggttacatcaacgtgttcgtggagcacgaggggcgcaaggtcatccttatcgcgaatgagaacgagatcgacgataagccgaagtacaagcgagttcgcgagaagctcgttggcaaggtattcgaagttcagtcgtccctcgaggaggcactgcaaggattcttcgtcgcggtcaaggacaaggccgcgaaacatttcatctcctccggtgcttccatcatctcggaggtctaccaccagtctgagatgaacaacctgagagttttgcagcaaaccatcctggacttcgaacgactctacatcgtcttggaggagaggcatcggaagaacgacgaggcgatgagcaccctgctggctctcctgtttgcgctctcattcgaggtcaaggcaggacgacttgccgcggacgacatgaagaatcgccggacccatatcatgtcttcgtacatacggaacaagcaggaaggctatgttcccccaaagattgtcgccgttaacgatcgatatccacgtgcgcgggttgacgcagaccttttctcggacgataccttgatcgacctgatcgtgagaggcatcgttgaccagcagaagatccgcgatgagctggatggaagctctttgttctttagggctgagcaggaggccgcctggcggaccgtgtggaactatcatgagcgcacggaagaggagttcaatgcagcccttgccgagatgacgcgggcatttgccgcgcatgaatacacggcccttggcgagattcggcatgttttcggcatccagcttcggttgtcggcgatcggtgtgacgacggccaatcgcgcacaagtcgttgccgacgcaagggcctatatagactacctgtacgaccagggattgctggagcccattgaacggcagcacgaccgtttcgatatcagtttcgatagctatggtggcttgggctacatggaagcctcctcagcagagttcagggggctctctgagtacttgaaccagaaacgccatgcggctgcggtcgatcgccgacccgccattgccaaagatcttctcacgttgatggtggacgcgcccggccagttcctccgccggatctgcttgaccaatcacgaggacaatgagttttacgacattccggttctggtcgccctggacgtgcgtaaattcgtggacgccttcctcagccttcatccagaaaaacagcgaacggtgatgctggcgctcaaaatgcgctatcaagacggcatgatcgaccgttatctggcgagcgaacggccttgggcgacagaggtcagggaccagctgcgggcagcgagtgctgcaatgtctccggtttcaaaggatcgattgcaaggggtagtcgcgtacggtcttgatgaagcgctctcggccgcggaatactcgtag

SEQ ID NO: 531901 - DNA, 603 bp, Stenotrophomonas maltophilia
atgaatgccctggtacgaaatgaggccattgtctttgtgagcgcgacggtggccgagctcagtccgcaacatctaaccagaatcatgagcgatgccgctcggttcaatcgggaagcgggcgtgaatggcgttacgctctttgacggagcgcgctttctatcttatttggagggaacaacggacaatctctctgccgccttccttcgcgcatcagcctccaccagccatacggagctggtgatactcgccgatggccgaatcgggccatgccggttgcctcattggcccatgcgctgcctgcaggtcgctccggaggaactcaagaagatcgcccgttctgactggtacaacttcgaccagcgtcaaggtgatcggacctctacggcgaatccgtcgacgcggcagccctcattccgctcatgctcgaagccttcatggacggggatcacggattccggcgaggaaaacaggcctcgccctgacggccctacgagtattccgcggccgagagcgcttcatcaagaccgtacgcgactaccccttgcaatcgatcctttgaaaccggagacattgcagcactcgctgcccgcagctggtccctga

SEQ ID NO: 531902 - DNA, 2694 bp, Stenotrophomonas maltophilia
atggaagagtacgaaccgttggattcgcgacagatcaaccggattgaagcggttcatcgcggctatctctatcagcacctctatgccgctggctgcttgctcctcgccggtgcaagtggcgtgcgtgccgtcactgtcgagatggatgaggatgtcgagattgcctacgagagtggagaccgtctttacatccaaatcaagacgcgcttggcgccactgattccgagcgacatcaatactgccctgaagcgatttgaagagatcgatgctgagcatcagtccggccgaaggacgggctcggctgcctttgcgatcgttgccaatgtcgcggcaggcccatcgctgcaggcccttgtggacggcggtggtcttgcgatgggggcaacgttgttgacgccctcggcaccgacgccttcggtgacggggcttcctccggcatggggaaacctggccgaggcagcgcgctggtgtgcggcacgggccaaggtcctaccgctggcaacgcttgagcctgacacgttggtgtggaagctggctggacaagtgatgctggcggcgaccgggcaggtgccgggccacgcgttcctggtcgacgatctgccggagctctttgagcagctcgccatccagctgcagaagtttccctcgccaccggaggtgtatcgtcccctggcaaacgagcctccgttggacagcgccaagcgcgtgcggatcatcagtggcctgtccggatcgggcaagaccgcttgggcggcgcaagccgcgatgcatcgagggggcgcatgcgcctattatgatgtgggcgatgttccagggccggccattgccgcaagcttggtgcgggagctcgcggcacaatgggcggcgccggcggaaggagggttgcgccgggtgctgttgcccggaaccaccgggacagacgcattgcgtgccttggatcgatttcttggtgggcaggacacgcaagcgctggtcgtcctggacaatgtccatcgagtgcccgcagcagggcttcgagctatgctagacgccactgagcacctgcagtttgtgctactggcccagccttctgtggcgatcagcgagctggaggcgatgctggggctgactgtggaattgctagagggctggagtcttgacgaggctgcggcagaggcccacgcacaaggggtggaagcctctgccgaaacgctggggcggttggagaagctgaccggggggttgcccctttacatccgatcggcgttccagctgagtacctcacagtacagcggccacgtggcggctctgtgttccgccgtggaggcccataccaatctggtggagacagcacaggaggtgatcctgagccggtcgttcgcggcgttgtcggccgaggcgcaggattgtgttgccgtcctgagcgtgagcgactctccaatgagtcaatccgaagccgaggggtggttgcaaggcgtctttggaacgcctgccagatcgtttgcggcggtgctgcgtgagcttcgtccgctgggaatcgtccggctgtacggcgcgcagcggctgcagattcacgatgcttatcggattctgggaaagcgccgcctctcgacctattcggcgcagcaggagcgcctggtctatagcaaattgaaggatctgatcttccgctcgctggagcccgagaatgcgcatcggttgccgttgctcatcagcacgctggtggtactgggggactatgacacgctgatcgacgtggccacggaggagtggtttcacgagttcggagtggatgccggtatttgggcagctctcgaagccgttgttggtgatgagagtgtcgatgcccgacagcgattctacgcactcgatggggtggtttttgcgcagatgagaaagggtaggtacgacggtgttgaccaacgcctggatgctatggatgctctcatcgccgagcatggtctgggggcgcgcgaggcgctgtttgttggattaaaacgactggcgttggcgtccgataatggcgacgatgatgcggttcagagggccatagactgcgccaatcggctgatgccgaaggatccccagtatcagcgggtcctgcgctatagcattgcgcgtgccatgctcaaaattggacggcgggttgaggcacatgctctagcgaataccctggttcgtgagtacctgcaacacttagggctgaccgaatcggggattgtcgggaagcgggatactgagatccgtctcatgctcaggtcgtctcccacgatgaatgatgacctacggcatctggccgatacatatgacgtacttgctcgatccgccaaaaggcgaggaatgcatacgttacaagccagattgcaggcgctcaagttctatgccatggccaatgcgatcgggtcctttctcaagataggtcaggatctggcagaagagttcgtcaattgcggtcggcccgagctggctcgcgagctgatggaggcggacctgcttccgctcatccaggagcgtcggatgctggaccacgtagttcaggtgcggggtcggtacgcattggtgctcagtcactgtggagaacacgaggccgctctcgaggagcttgaacgccttgacgcgtatcgcgcagggcttgcggtagagcagtgtgaggagttggacgctcatcaccgggacatcgttcggcggagacttcatcaatcgcgttctcattga

SEQ ID NO: 531903 - DNA, 390 bp, Stenotrophomonas maltophilia
atgtacgacgaggactatcgttggcgggacaagcgtggccgacagatcacctttgaaattggagaggatatcactgcattcgtgggggggaggcaagtcggcgccattgagtttggcgacatggacgggtcgccttatttgcgccacatggacgtcgatgaagcatatcgtcgcgcaggcattgcaacggaaatgatgcggctggcggtggaagtgcacgggccgagcttcgggcgccccagttttttggcgatcggcggcttgggaaaggatagttccgagtactttacgatggacggcgccgccttcttcaaatactgcgttgacgaggagatcgtcaaagacaccccggacttcgacgagcgtccgtttgatgaggatgacgtgtaa

SEQ ID NO: 531904 - DNA, 588 bp, Stenotrophomonas maltophilia
atgcgcggacatagccaacaggctccatggttgcgcgattcgaacctaatcgctcgacgcattgcaacgatacgccatgtgtgttgcgccagcccctcattcctcgatcgccacggacgcccccattcgccggaagatttggcggcgctgccaggtatccgctacagcaatgtggaagaaagccgccagtggagctttgcgggaggacgctcccccaccgtgaagtcccagctctacttggctaatggtgatgcggttcgtgaagcgggcattgcaggcctgggggtcatcgtactgccgaccttcatcgtccacgaggcggtcaggcgaggcgagctggagatcatcctgcgtgactatatgcgccccccccatgggcatgtacgccgtgcccccccgtccaagaaggtgtcggcaaggatgcgcgccttcattgactttctagtggagtcctttggcgacgatccgttctgggatcgagacatcctgaccgatgctgagatcagtcgattctcgctggaagagcggactaaggagcggggctgggcgggggctatcgcccccccctcagcaacagcggccacatag

SEQ ID NO: 531905 - DNA, 642 bp, Stenotrophomonas maltophilia
atggacgcgaggaatgatgctgtcggcagcctgcaggactacttcgtgtttcatgtgatgatggagtgcaaggggcgatggcgcggcgtccatctcgacaacctcgagcggctgctgacgccgggacacttgagcttgcgtctgcgcggcgatggtttcccgccgctgcgcgagatgcctcggctggtgtacgacgcacaggcgggcgatccgccgcgtgacctggaaggcggcttttccggctactggctggtgtcccaacggctgcgtcaggtcctgctggaggtggatccgcaggcgtgtgtctttgtcgagtgcgactaccgaatggccggcggatcaccgggtccgcgacggttcctctgcgatgtcgtgcaggagcgcgatgctctcgatgagcaggcgtccacgctggagatcgagactgggccgcagttttccagtggtcggttctatgacgtagtcggtgggagtcggctggtgttccgaccggagagactggccggtgcgcatttgtttctcacgccacattcctattttgtgttttgcgatcggatactccgggatgcgatcgcccacgcgggcatggatgtggagcgtggccgcgatggattgggcttccttgatgtgtgcgatctgtga

SEQ ID NO: 531906 - DNA, 498 bp, Stenotrophomonas maltophilia
gtgtctctgacgagcgtgcaagctattgatgtacagatccagcaattggaggcgcgcaagcgtctggtgcagtcgcgcgatgccgaggtcaacgcagcgctagggatcctgcagaagtatgccccggtgctaaccccgagccagcaccgccggatgctccagttggctggcgagagcagcgtccccgtatcgccaggcccgagtggcaggcggccccatccgagcaagggcaagatcttgggcaagcaggccccgcgctatcggctgcccaccggagaaacctggtctgggcgtggccatacccctcacgcattcagcgcgtgggctgcgacagttgacggcaaggcgtggttgaaggcgcatccggatgagaaattcccgccggtgggcaagccgtcggtggcgccggatggaagcgcgaaggtccccgacagacggatccagagcaagaaaatgccggcgaagaagggcccgagcaagaagcggcgggccaaatag

SEQ ID NO: 531907 - DNA, 1191 bp, Stenotrophomonas maltophilia
atgagcagccagatcccggacaaggtgatggatccgcgggcgaggaaggcgctgctacgcctgctgaaggcggccaacaaacaccacgctggtacggcggtgcggcgccccgccctggccgctgccgccctgtccgaataccacgcactgcgtggcctgaaggccatggaggacttcgaagcggagatggccacggcgcaagcgatgggtgccatcacagtgcaccgccctcggcgggatcgccagggtctcattgagcgcattgagttggtagacatcgtcaaactggccagccacttgggtgaggtgccctatgcggtgcaggtccaagccgcaagacaagccctggacacctacctgagccggtacccggtcctgaccgacgtgctgtccacctgggacaagttcaaaaccgttcgtggcagcggacctgacgtcgtccaccgctgggtcatggcctgtgacgtcatcgcgtattgcaccgcagaagtggcacggggtgccacggaaacggccgtcagggacgccagcgctcgtctgttcagggatagcaaacgcatcgaggccttgatcccctacctcgatgtcttgctcaccggcagcaccgacgaggaggcacgccctgaagcagaggtcttgcaagagttgggcctctatcgtgaaccgcagccagtgcgcctggccggcaacatcgtggtccgtcgggagcgaggtgcctttcttctcgaccggccttacaccgcattgccccctaccacggtgctcggccttggcgacgcgcctagccaagtgctgaccatcgagaaccaaaccaccttccatggatgggcgcgccagcacagcgaatctgatgtgctgtgcctctacaccgccggtatgccgtcgccggcgtggcgggccatgtacctgcggctgttgactgacctgcccccgtccacgcccgtgttgcactggggagacttggacgaaggcggctttcggatcgccgcgttcctaagccgatgcgtatcagaggccgggcatgtccttttgccttggcggatgcgtccgggcgatattccagagcccctgcgccgcagcgcccgcccgcgcaccgtggaccgcatggtcaagtacgccagggaagccggctggaatgagcttgccctggaactctcccaggccaagctcgtcgccgaacaggaaggatga

SEQ ID NO: 531908 - DNA, 3444 bp, Stenotrophomonas maltophilia
atgaagaagttgatccggatccgtgtggtgcagttcttcctgtacgagatgcgcgacgttgaggtcagtctgacctgcggaatctttggcgccaacggtagcggaaagtcctcactattggatgcggtccagattgttatgctgggtgccaatgaaagtcgtggcaacgccggcgtcgcattcaatgcgcaggcggatgaatccaatcacaacagccgcaacatccgcagctactgtcttggccagtatggtgattcgccggacgcgcgcgtccgcaacagtgccaatacctatatcaccctggtctggcaggacacgcagactcaggagatcgtttccaccggagtgtgcatctacgccagcgctgatcgcgagaagcccgatgttctgggtcgctatgttcttccagccgagattgcattctacgatcatctcgaacacgtcaacggcgtagctcaacctcgcccctgggcaagcttccggcagatgctgttgcagcgtgctcaaggtgaggaggtcctgttccacgattcggagcggttcttgaaggcgatgttgttccggttgcggggcacccgcggtgctccgcgcctggatgcctatcgtcaggccttccgcttcggactgcggatgaaatttgacaggagcgtggacgacatcgtccgccagcaggtcctggagatccgaccgacgaacatcaagcgcttcaaggaggtcctgcacaccttccaggaaatggcagccttggtgcgcagcgtgcaagccaagctggacgaggcccaggcgatcgaggcggattttgtggatgcccatcgccgctacagccacgcggtgtcgctcgcggcgttagcccaggcggcggcgctggaggtcgctatcgaggaggtgacaaccgccgaagaggctgaagaacgtgctctggccacgcttgtcactgccaacgcacggcgtgacgatgcaactcgtcaggtggaaacggcagaccagcgcgtacgcgcgtgtaccgccaaccgggaccggcatgcatctcaccaggatgcggcgctgctgcgcgaaagcctcatcagtgtgcagcaacgtctcagcgagcatacgtcgggactgcatcgcagcatccgggcaattgccagggccattgatgttcagatccccggcaagcccgtagccgacagcgctgccgtcacagccccggcgtaccgggatctccatgccctgctggagggggacgtgatcggccagcgcgatgcgctggaatcgacccttcgcaaggcgctgcgcgcagcccagcggttgagcaacgaggtaatcgaggagatgcatgccgtcgggcgtgcgcagtcggcggccgaggccgagctagccagcgtgcgggaaaaccaggagcgcatcgccaaaggaaagcctccactcgaggggaccgctgcagcgctcaaacgtgcgttggccgttgcaggaatcgaagccatcccggtatgcgatctggtgcgcgtggatacgccggactggcaaccagcgatcgaatcctatctggggacctcgaacatgcaggccttgctggtcgatgaagccgatgagcgcaaggcgttccgcgtttcacgccatgccagcatctatgaggcaaaggtcgtgatgcccagcaagttctccagccgccctagtcctaagcccgggacagtagctgaactcatcagcggcaacaatgctgccgcggtcaactatctgcgatcgaaatttggcgacacccgccaggctgaaacggaggaggagtgctttgcccaccggtttgcgatgacccgcgacggcatgttgctagccgatggggagatggtgcgcaaacggccgacggatccggccctgttcaagatcggccccacctccacggcaacgcgtagctccatcgccgagcgtgcccgccagctccaggcagagattgaagaactcaaggaacgctacacgaaactcaagaccctgctgaacaacctgggtcccttcgtcggaggggagcaggacaaggttggcgacatcctcgagattgtcgagcgggtggtcaaggaaatccgggatgaggccgatctgacgcggaggctgcgagcgctggatacggaggaataccgccggctggtccaggcgctggaagaggccgaggctgccctgactgaggcgcgaagccagctgttggtggctgctcaagccgtgggcgccgctgagacggctcatcagcagaggcgtgaggatacccaaaggaagcggaccctggcggtggcccagcaagcagtcgccgaggccgcgcaggcccaggagggctatgacgccgattacgccagcagccaatgggagaggcttctgtcccgtcaaggcttgtcctatcgtgagatggttagcgactacaacggacgcagcaagggcgcaaaagaagactcccagcggaaagcaaccagtgccatgcagaagctgtcggcgtttctggtccgacacaacgaggtcatgccagccgatccgcaggacgactggcgtagcgctcgccgctggctggaagcacgcgtgttggttttgaccgagaccggactacgcgaaaacaaggcgcgcatggaggacgcattgagcgcggccaaaagcactttccgcaacgacgtcgcggtggccttgcatgagcatctggagtggttgagcgacaccctccatcggatgaatgaggccttgcgacgtgcgccgatgtttaccaataacgagcgctaccagtttcgtgcgcatgaacgctccgcctacgcctcgctactgaagttcatcaaggacgtggctcagtacggcccatcggaggacctgctgggcgggacgggagagctccccaaagaattcgaagaactgatgcgtgagaagaccgtggtcggcgcggctgccgtgagatcacccctggacgactaccgcgagttctttgacttcgacatcgaggtgttgcgcgaagaagcctccagccgttctacccggcacatcggatggctcagcaagcgggtcggctctggctcaggaggcgaacatcgcgcgccgctctatgtgatcgccggtgcagcgctgtcgtcagcgtaccggctggagcgcggcgacggctccggcctgcggctactggtcatcgacgaagcgttcatcaagatggacccgcgcaacattgtcgcaaccatgcgctacttcgaggaactgggtttacaggtcttcatggccagcacgggagatgcgctggggagtctgacggcttttctcgatcggtactacgacatcatgcgcgatgccgaaagcaacatcgtgatgctggaggggcatgatgtgtctgccgagacgcgagagatgttccgcgcagatttgcctgaattcaatccggagctgatcgaagcggagatccgaaggcaataccggcctcaacacgtctcgatagaaggaccctctgcatga

SEQ ID NO: 531909 - DNA, 660 bp, Stenotrophomonas maltophilia
gtgagtttctggacaaatgcggtagaagccacccggcaggcggtcacggaagatgagtttgaggcggccgcaaaccgactgatcaccgagcaggtgctctacgccgccgatcgcggaagcaaggtggcctatgggctcatccgcgattttgagcgtgaattcaagcgcgccttggacccattgggctacacggtacgggtcaacagccagctgcgctacgcctgtgcaatccccaagcacgtgaagacctcgccggtcacggtcgaacagacgctactcgctctggtgctacgcaagatcttcgatgaggagacgcgctcggggcaccatgacgaaaacggtgaggtagcctgcgatctggtcacgctggagatgaagtacaagcagaccacgggcggacgcgagctgcccgccggcggcaaactcgtctcgttaatgcaatggatgcggcgctggggaatcgcccgggtgtcagaggaagaggtggaccggttcggacaggtggccgatcaaccttacgtggtcattatccgcccgggcattgctgaagtcctcggcgaagcggcactggcgcgcatcgcgctgttcagcaatccggataccgaggtggtagagaccgacccgaccaccaccgccatggaagaaggcggtgccgcatga

SEQ ID NO: 531910 - DNA, 1494 bp, Stenotrophomonas maltophilia
atggctatctatgacctgaccgatcagatcttcctggagaagatcgccgagcgctatccgcccctcttcaagcgcctgcccgatcgattgttcgcaccgctggcatctgccaatcgccagcagtactggtcgctgctgtgcgtactacacgccaagcgcttcggacccgaagccccgctgccgcccagcagtggctttctgacgcgcgagatcacggccgacatctccgaagagctccagtaccaagattggactccagagggcgacgatgtaacaccggccacgccgctggctatccgggccatcatggtcttcaatcgtctgcgcgacgcgggttggcttcgggtagaccgggtcggtgtacgggagatggtgacgatggcccccgccgtcgcccactttatgagccgtctggtcgaattcgcgcataccggtcccgagttcgtctccggcaagatccgcagcatcgaagcaaacctgaagctgctctttgacgacgcgaccgatggctcctccctgcaggaggcggcgcggcaatcccgtgccctcctcgagcatgtacgcattgccggtaccaatgtccgcgacctgatgctggagcttggccgtgtcgacgctaccggggagttcgtgcgccgcttctttgacgactatgtcgaacgcatgttcatcggtgactacaaggagctgcgcacacgcgagcacccattggcgcggcgccaggagatcctgcgcctggtggcccatgtccagcagacaccggccatgcgtgcccgactgatgcagtggtacctggagaagcaggcgggccgcgatccgacccgcgccgaggcgctcttcgagcgagacatcgagaaggtggaggaccttcgtcgcattgatgagtatctggaccgacttgacgatgagattcgccgcgccaacaaactagcgctggcctatctggactaccggctgcgggccacccggcccctggacgagctgatccatcaagccatcgatgccgtcatcaagcacggcagccaggccactgcgctgaccccatttgcacccggcgactgcctggcgggcgagcgcctggcctcgccccggctggagaccaagcgccccccgcccagcggattgcgccaacaagtcatgtccccggagcaggcagcgcgcgcgcgtctggccctgatggcccgagaccgccgaaccatgtcattgcccaagctggcggcctttgtccgtctccagttgggcgaggccgatacggtggccagcgccacgcttcggatcgacagcattgaggcggtccgtgcattgcaaacgctgtgcacgatctccactgccaatgcgtcaaccagcaagctgctgcgggcaaacgcccgtgccatgagtagcggatttgccacgatccggctggagggtgagcaggatgagcatcagggcatctctcacctgcccttcgtgatcgcaaggacgaccataccggcgaagggaggagatgcgtga

SEQ ID NO: 531911 - DNA, 267 bp, Stenotrophomonas maltophilia
atgaagtacatctgcctcagccttggtctgctgtcactcgtcacgggcttagccagcgctcgttactggctccgatccagtcaggtcaaggtcgatcccggatgggccgtggagccgggggacgctccggtctcacaggccggctggacgggggctctgttggacgctggcttaaaggctgccaggatcaacaaggtggccgccatcctggccgcgctgtccgtggccagtggcggcatcgccaacttcatcagtttgctccgctaa

SEQ ID NO: 531912 - DNA, 1068 bp, Stenotrophomonas maltophilia
atgcgcgccaatgcgctttacttcccgaacatctccgtaccgaactcccagtggacagcgaaagcgctgctctactgggacacgctggcggccatcgtgccgaccgagcagcttcggcaccctgagcgaatgacccgtttcatgcgagaactgctctccgagggtcttgtccgtccgatcgctccggaccagtacctgaacctggacggggatttcgctgacggcttcatggaactggtccaattccaacacgggcgacgcttcgtcgagcaacgaaaaggcccgatgatcgagacggtcgacgccgagaagattggactggtccacggcgaaaaactggggcgccttggaaggctcctcgtgaatgcggggctcgcagcgaaacgggagaagtactggtacgccgtcgagagcaccaccgccgacctctacatgacctaccttgtgacgtttctgggaacccttcccgagctggatgcggcgccggtgacgaatgagcggagtttcgcccggctcctgcaacctgatatggggaagatgcctgcatccctgccacatcgtgaccaagtgcgcgacgacgtcctgcgcgtcctgctgcccaggccccaaagtccactcagaatcgacaagttgctccgtttcaagtgccagcatggtgacctgctccggcgctttcgaacgatgatcgaaccggagttcaccagaattgctcgactccccgccgaggatcgcgctgaagcgacagccgcgtttcatcagcagtgccaacagaaggtcgccgagatcgatgaggccgtgcgcctttcgttcggtagcctggtctacggcgaactcattccgctcgtcggtgtggggcttggggtctatgcggcaacgcagaacccgacagcggcggcgtgggcatccaccggtgcgggtgtggccgaaaggctctacaggctggtgagtaccatccgcggtccacagaccatccgtaatgatccgctggcatacgttgctcacgcgcaacgaaccttcgggcgggaacaggctctccacaaccgctacgaaaacctttggcggtcatag

SEQ ID NO: 531913 - DNA, 486 bp, Stenotrophomonas maltophilia
atggccaagatcaagctcaccaagagtgcggtggaagccgcgcagccacaagcacagtcgttcgagctgcgcgacacgctcatacccggcttcctgtgtaaggttaccccagttgggcgccgcgtattcatgctccagtatcgaacgaatgccggcgagcgccgtaagcccgccttgggccagttcggggaattgacggtcgagcaagcccggatggtggcgcaggactggctggccgaggtccgacggggcggcgaggcatcggtgtacccgcgcgaggtcgtcaaggcggccctgatggtgaatgcgacggcgatggtcgtggcgcacaatcaccccagcagacatccggaaccgagcgaggcggatcgggcactcaccgagcgcctcaagtgggcgctggccctggtcgatatacgcctcctcgatcacatcgtcgtcggtggcacggaaacggtgtccttcgccgaacgtggccttctctga

SEQ ID NO: 531914 - DNA, 1083 bp, Stenotrophomonas maltophilia
atgagcctcaacaagacaaccctcaacaccggcctcgtgctgggcgtgctggccctggcgatcggcagctggctgctgctgcgcgacgggcgttaccagcgcaccgacaacgcctacgtcaatgcggatttcaccgtggtcgcaccgaaggtggccggcttcgtcagcagcgtcgaggtggacgacaaccaacccgtgaaggccggcgacgtgctggcccgcatcgacgaccgcgactaccaggtggccttgcaggcagcgcgtgccgacctggccaacgcccgtgcacagctggccaatgcacaggccgcgctggcccagcagggctcgctgatcgaacaggccagggccagtgtcgatgtcagccgctccgaactgaccctggccagcgccgaccagcagcgctaccgcgaactggcccgcgacggcgccggcaccgtgcagaacgcgcagcaggcgcagtcgaagcaggcggtggccagtgcgcacctgcagcagggccaggccgcgctgtcgaccgcacgccagcgcaccgacatcctgaccgccggtgtgcaggccgcgcaggccgcggtacaacgcgccgaagccgcgcaggcgcgcgccgaactggatctgtcgcacaccgtgctgcgcgcaccgatcgacggcatggtcggccgccgtgcggtgcgcgcgggtgcctacctgaccccgggcacgccggtggccgccgtggtgccgttgaagcgcgcgttcgtggtcgccaacttccaggaaacgcagatgacccgcatgcaggccggccaacaggtcgaactgaaggtggacgtgttcccgggcaagtcgctgcgcgggcacatcgacagcatcgcgccggccaccggcgtgaccttcgccgccgtcgcaccggagaacgccaccggcaacttcaccaaggtggtgcagcgcattccggtcaagatcgtgctggaacccggccagccactgctggaacagctgcgtgccggcatgtcggtggaagccagtgttgacctgggcagccgcgtgcgcgtgcagagcgcgcagcgcgtgcaggaccgcacgggcggggagggcgcatga

SEQ ID NO: 531915 - DNA, 204 bp, Stenotrophomonas maltophilia
atgaccaccgacaacgtgaccctggccgacgatgtattggccgagctggccgaggcatgcgaagacatgcgcgttgcctccgaagaatgcgatatcggcgaaggcctcgcctatgcagttccgttccacatgtggggggagttccttgcaaagctggacgctgcggagcagcacctcgctcgcgtcaaaggagaatcagcatga

SEQ ID NO: 531916 - DNA, 711 bp, Stenotrophomonas maltophilia
atgagcaccgccgccaaaggcatcaccgaactgcacaacaacgatctccagttcgtcgttacccgtatcccgaaggacatccgctcgctgctgaaggacgccaacgtctgcataggcggtggcttcatccgcgagaccatcgctggccagaaggcaaacgacgtcgacttgttcggcagcagcgtcgaaacgctgaagctggcagcgaagctgctgaacgagaagcgcgaaggccggctgatcgaaaccgacaacgccctgaccctggtcacggccaatcgcatgccagtccagttcatcacccgatggctcttcgcggaaccgcgcgaggtcatcgcgtcatttgacttcaccgtctgccaggccgttgtgtggttcgaccaggcgactgagaagtggaagtcggcgatcggcgaggacttctatcgcgacttggcagcgcgccggctgagctacacgcatccacagcgcaacgaggatgccggcggctccctccttcgcgtccgcaagttcctcgcgcgcggctactcgatccaggccctgagccttgccggcgtggtggcacgtctcgccagcgctgtggaatgggacaaggtccggggcaacgaaacccaggccacgctggtgatgaccgggctgctgagggaagtcgatccgctgctggtcgtcgatggcatcgacgtcgttgacgagcatgaggtggtcgaatga

SEQ ID NO: 531917 - DNA, 237 bp, Stenotrophomonas maltophilia
atgaagctggtgctgatcaccctttccactgcactagtcctgtcgctgggcttgaacgcgtacgccctctatcgcattggcgaagtggaggccagcgtgccgaccaaggtggaggatctggatgattggtaccccagccacatggagcagttggaaatggcgaaggagaagattgacgcactcgaggagcaagtggacgatctcgaaaccaaggtccgcaacctgccgaactactga

SEQ ID NO: 531918 - DNA, 354 bp, Stenotrophomonas maltophilia
atggcactgagcgaagagcggttgaaggaactggctagccgtatggcaaaggcgatgggtaccgaaacacccacgccacggccgcatctgcgccttgtgacgctttccacgcccgccagacaactggacgacctgaccagggaatcccattgccgcatgattcgccacctgcggcgccgctggggctactcaatgcagctgatcatcgaccaagctacgtttggcctggccggaatcgagcaactcgacgacgagcagctgatccagcttcatcgcgatctcgagcgcgcccaggactgcatccacgatggtgttacgttcgaagatgcaggacttcttcgttcccacttctga

SEQ ID NO: 531919 - DNA, 492 bp, Stenotrophomonas maltophilia
atggacgccagcacagccagaaccgaaaacatgcgccgcttggtcgccgaggccggtggtccggcggactgggcgaggaaatacggcggcagccgctggcagcagccacaggtcagccagtggatttcggagacttcgccaaagggcatcggcgggcggcttgcccgcgacctggaactggcaatgggcatgagccgcggcgagctcgacagcccgccttcccggcagtctcagccagtgggaatcgacatcgatacccttcgctcagctcaccggctgctgcaactggtggctgagatcaggggggaaccacctgtcccagaaatcaacgtcactgccttggccgttgcatatgagacggtccgcgcagaggccgcgtctctggacgacagcaacgtcctcgacttcatgcgggcctttgtggcccggttggacaaggcaaagggagatggcgatggcactgagcgaagagcggttgaaggaactggctag

SEQ ID NO: 531920 - DNA, 321 bp, Stenotrophomonas maltophilia
atgaccgaaacggtgttgaccggccataaccaaaacggtaatgtgccgagcatgaacctgaccaactacgcggtatccaagggtggaaccgggacgcttaagtgcccggttctggaatcggtggccaaaaaggcaggctgcagcgcgggcacgttgtatcagatcgcgctcgggaacaagcagcccagcgccaagctggcgaacgagatccatagggccacgcgcgggcgcgtccagcgcggcgagctgcggccggacgtcttcggcgctcccccggccactgctgccaatgaagcaccgcagagcgaggcggctgcctga

SEQ ID NO: 531921 - DNA, 552 bp, Stenotrophomonas maltophilia
atggcatcctcagttcaaaagcttacggatcgcctccagcgcggccttcgcgtgttcatccgcacgcgcgacatgctcggtaaattcatcgaacttctcgcgttcaacgaaattgtcagtactgaccaactgcattgcttcccagcagcggccgattgcgcgaagaagacttgtgcccgccgcacccaactctggcagaagacttgcctggtcaatgagtccctgcggaatttgagggaatcgaacctggatcaggtcgtgatatctctgagcattggcgatgtaccactgcacgtgttcaatcctggaggaaagggcacgcacgtccgctataaccgcagccgctcgacccgtcgcctgcgcctccgccgtctctgcgcgaagctttgcagctttgcggtgttgccaccatgggacggcaaccgctgcgccgataccgacaaccgaaaagacggcctgaacccaagccgcttgcacttcaggtttcagcgcacaccacccaatcaactcgcaatccatgcaaccccctatcttgtgtggggtgaagcatga

SEQ ID NO: 531922 - DNA, 288 bp, Stenotrophomonas maltophilia
atgctgccccacccgaggggtgaagaggcttcgatttccgatgcgatgttcaatatcgacttggggctcgacgggttccaggttcccgacgacttcaacgaagatgccgctggccagctggcagaactgcgtcggatgatggtgagggatggcctggaagatccggagggcgtcggcctgtataccgtgctggcgcgtacctgggacgtcgacgagcggcatcgcttctcccacctggtggacgaattggcgtggtggttcagcgagtacgaccgcccgcatgcttga

SEQ ID NO: 531923 - DNA, 690 bp, Stenotrophomonas maltophilia
atgagtgacaccaccaccgagaccagcacacaaaattctggcgcaggcggagctacgaccaccgcaaccgatacgcagcaggttcccaacggcagcgcgccgtcggctaccgatggcggtggtgacggtggtgacgcgacgggtggcaatggccagccgaacaagggcgaaggcggcggcgatgccggcaagcccgaggacggtaagaccagcgcagcaccggagcagtacggccagttcaacctgccggaagggttcaccctggaaggcgatcgactgggcgcggccacgcagttcttcaagaccaagggctggacgcaggagcaggcccaggaggccgtcgacctgtacacccagatggccgggcaggatgcggcggcgatgcagcaggccatggaagcccagcgcctgcagcagatcgagcagtggggaacggaaaccaagcagcagctgggcgccaagtacgatgaaaccatcggcctggccaccactgcggtgaaggccatcaacgaccccgagctgaccaaggcgttcaacgagcagggctggggcaaccacccggccatggtcaacgcgttcgccttcatgggccgattcctgcgcgacagcaagatcgacggcctgggcggcaccaccgcgtctggtccgagcgcttccagcgacccgaaatcgatcctctacggcggctga

SEQ ID NO: 531924 - DNA, 1530 bp, Stenotrophomonas maltophilia
atgaccatttccgccaacgaccgacgcaagacctacgtggggaacggcgtcgcgaccgccttcaacggtccgcgggcattcctcgcaaatcacattcaggttttcaccggtacccatccggtgtacgccttggtgccgccttctcagtacacggttgccggtctgcgcgccaacgcgaccacgatcaccttcagtaccgcaccagcgttgaatctggacatcctgatcctgcgcactgtcccgatggaccagccggccgacatcaccaaccagggcgcgttcctgccggagatccacgaggacgccttcgactaccgagtgatgcagcttcaacagctgctcgacaacggcatgcagctggtgcaggacccagacacgggtgagttcgtctgggacgccaagggcaatcgcatcaccaacgtagccgacgcgaaggtcgcaggggacgcagtgaacctgcgtacgatgatggagctgatcgaagagatacagaacggcggtggctcggtcggggtctccccaaagttctgggcattcgtgggggatggagaagtgaccgatttcccgctccctgggtcggacgtactcgacccgctgttctacgacactgcggttgaggcgactgtcggggctggcgactatctagtcgccaagccgggggactatcagattctcccaccggtcgatgggtcagctcctgcaattcgcttcgccacaccgctcgcagatggcgtgcgcggcttcaccgtgctgcgcggctacgcgcgcccttggatcggtgaaccgccgatctacacggttgcaccccagatcatcagcgtgacaggcaacaccacggtcgatggcagcatgcataacactttgatcgtggccaattcggcgacgccgatcaccatcacgatccgggagaacaccggaagcacctcggactggaaaggcggcgagttcttctccgtcatgcagctgggtacggggcaggtcaccctggcgattgccggaggggcaggccaactgaatgtcccagctaacttccaggcaaagacgcgcgtgcagcggtcgatcatctctgcaacctgcctcgcgcccgatgccgatacctgggtcgttgctggggacatgctgcgagtggctacaacgccggacctgcagtgcttcagcctggtcgacaggtcggtgctgatcggtactaacatcgcggccggttcgcgcaaggacgcattcttcctgccctacggcttgctgttggaccccatcgcgaacggtggcctctacgctacgctggaaacagcccaggccactggcgtggtgctgaccgtcgacgtcaaccgcaatgggaccagtatcctgtcgacgaagctgacattcgataacaacgagcgcagcacgctgacagcggccactcctcctgtgctggaagcgggaggcaacatcttggccaagggcgacgaaatcaccatcgatgttgaccaggtcggcacggccgcggcgaaggggctgcgagtgtacctggttgggcagagggctggctga

SEQ ID NO: 531925 - DNA, 471 bp, Stenotrophomonas maltophilia
atgaccgcacgcatctatgaccgcccggacctcgaccagttcaaggctctgctgccgctgatggtgctgggtagcttcccgtcggcgacgccttcgcaggcctacgagggccgcctgcagatcctcaacggggtcggcgactgctttgttcggcaaatcgacggagccaagctgccggaaggccaccggttgtacgtcgaccaggccacgaggcaggtcgtgctggcatggccggcctaccagcccggcgctgcgcccatcgacaaccccggcttcgagtcaggcccggttggctgggacagtggtgccgggtgggttatcgccaccgagaaccccccccgaaggctcctgggcggcaggcttcaacaacaccaacggcgaatcgatcatctccaaccgggcgcgctactcggtgtatcccgggcaggtgaccaatgcgaaatgcaaggttcgtcagggtgcgtcctctga

SEQ ID NO: 531926 - DNA, 2664 bp, Stenotrophomonas maltophilia
atgtcggccagcaagaatcgggtctacgattcgaacgtgactgggcacgccccaagcaatgctgaaaccgtgaacattgccggtaacggtattcgctttcgcgagaacaagattctctttgttgactcgttcgagtgggatcattccgtggctgcggccggcatcaattacgaaactagcctttgcattactctgctggtgagcgattcggccggccggtcggttcagtggtccgggtgtatccaagttggcaaccccgcaagtgggatctccgccgctgtccggcactggtggaacatggacgaggaaagctcggtgtcggcattggccgatcagacgggcaatgcagcgctgaccctgttgaacaagggcaatgcggtgttccggggcgccacgatccgcgcaggtggatcagcttcgattgcgttcaccgggaatgcggccgcatcttcctcctacttccctggttggatcacgcagaccgacgactatgctgtggctgcgtgggttcgcctcgcggccggcacagcatcggagcggcggacgatcatcggcgatgccccggcgatcgacggtgctggctcgatgcccatcaactaccgcgtgaacgtgaacgtagcgcccgggggccaggctgaagccttctgggagtacggtgacggcattgacgaggcggtgatctgctccggagagatcgccgccgcggaacccgtgttgatgatcgtcagccgcagtgcgtcgagcggccaggtgatctgccacatcaacggcgtcagggtagcgagccctgcattcgccaatccaccacagggcggcggcgatccaaccaagcggctgactgtcggcaatgtccagtcgctggaccagccgttccagggctatctgcaggatgtggccgtgttcgaccgccccttgactgacgtggaggcggcttggctgtacaacagcggagccggtcggagctatcaggaggtgacctcgggccacgaaacgcccaccgagcgggtgaagatcactatccccgcgcaggtcgaagctatggccggcttcccgctctacgtcgacctgtccctcttgccgagcgaagtgtggaacggcctggcccaccgcgacggccgtgacattcggatcaaaaccgcggccggcctggacgttccgttccacctggtgcgcgtagaccctggtgcgcgcgcgggctctctgttcattcgggcagatctgagcgccacgctgccgacggagctttacttggtctacggcgatccggccttgggagccgtggctgcaggcgcccccaacggttcaaatgccgtatgggcggactatcaccgcgtgtacctgttccatatcctggaatcagacgcgactggcgtgggcgtggacgcattgcggcaggcgcgcgtgaagctgttcgaaaagatcgctgagaagaccggccttaccgagcatcagggtctctgctgggatgggagccactattacgttgtggacaccaatgccatccacaagtacgacgccagctggaacttggtggtcagcaacagcaaccccatcggggacattggaaacggcaccaaccactgcggcgatccggacgtgtatgacggcgtcctgtacgtgccggctgagaactacaccagcgtgtctgtgttctccaaccagcgaattgcacgtttcaggaccagcgatctgacgctgatcgactcggtagacgtgtcggcgcagggcgatgaggtctcaacagtggctgtcgacgcggagcggaacaccctgtggaccacccgatatagcgactcatcccagcaccgtatcaacggttacaacctacagaccttggcctatacgggctccagctcgggctcgcctggcgcgatgcgcgtccagggcatgcagcggtggcgtggaaagtggttcgtcaacggtgacacggcggattacaccttccggatccccgagaacttggggagcgctcttcgtgtttggaccgacattccggatggcgcaacgacgcgggccggaaactacgagggcctgggagccaccgacgacgagctgctggtgctgcgggacgaggggaccagcaccacggtgcacaccatccgcccgttgtcggttgaggctggtggcggctttgaggcgatcagcagcccagacggcgctggctggatgcgggcgactgggttgaccaatcaagccaccttcacaatgggcgcgacgatcatcggcaaggccttcgacgtgaccaatcaggcgctgctgtccttcaccgccgagaccacggcgaacacgagtcgagtgaccctcggctaccgggggacgacaggcaagctcggggtttgggatacccccaacgcatggcttgaatccatcagcagcccagccgcggggacgaaggtaagggtgcacacccgatacattgggaccacctcgcgctcgctgttcgtgaacggtgtgcgagaggcgcatgcggcgccgatcaccaccgcccccgccggtaaggcctcgctctatatgggtgcggaagatcagagcattgccgagccgttcgccggcaggatgggattcgtttacctgcgcgccagcgcgctatcggatgcctggatcgcggccgagtgcgccaacctggccagcccggggagcttctacactgtgagcccggcctga

SEQ ID NO: 531927 - DNA, 1029 bp, Stenotrophomonas maltophilia
atgcgatataaccctgcgctggacgggctgcgagccgtcgctgtaatcctggtgctggccttccatgcgcggttgttcggtggattcggcggcttcttcggcgtggacgtcttcttcgtcctgtccggctacctgatcacgcgcatcctcgccgagcagcacgccgcgaccggttcgttgcgggtcagcgccttctacctgcgtcgcctccgccggctctacccagcccttctgctgctactggccgtgtatctggtcgccgcgccatgggccttcccgagtcgcgacaaccacctgcgggacgctgtcgttgccggcctctatctctcggactacggtttcgccttctggcgagtgccgtggtacctacagcacacctggagcctgtcagtcgaggaacacttttaccttgtgtggccgatcgtgctgctggcggtgttccgcctgccgaggcgttggtgggcggccactgtactgctgctggcggtagccgccacgctctggcgttggcacgtagtgctcaacgacgacgcatggttccagccttactaccgattcgacacacgcctctcgggaatcctgttgggcgccgctgcagggttggccagaccgaccctaccgaggtgggccccatatctcggggcaaccctgctgattgctgctatgtcacaggcagtcgtcaagaacccggccgcgctgatgggttggatggcgatggctgaggttggcgccctgttgctggtgctgggcgcgcagaacgtgccggggctctcatggttcccgctggtctggattggtcgcctgtcctatgggatctacctgtggcactacccgatcatgtattggctccgcgggcaggacattgccggttggcgcagcatgctcatcgggggcgccgcggcagtcctttgcgcggcggtgtcctactacacggttgaacgcctggcccggtcaggccgggctcacagtgtagaagctccccgggctggccaggttggcgcactcggccgcgatccaggcatccgatag

SEQ ID NO: 531928 - DNA, 180 bp, Stenotrophomonas maltophilia
atggctgaaggagcgctttccacgcgctcctcagtcaatgcttggctagccgccagcccggacgacgcgatggcgatgctgctggccagcgagacgccggcaatggaggcctaccgcgtcagccgcgcggtgaatacgccacggaacaaccgcgaggatctgctgcaggcggttgcctga

SEQ ID NO: 531929 - DNA, 558 bp, Stenotrophomonas maltophilia
atgcaaaaatctcagagcttctcagttgagtatgcaggacgcgccaatgttctgagcacaccgtgtgacgtgatggaggcattcgatcccaagtctccccccgccactccggtgacacctgccacagtaacggccatttgggacaccggagcgacggccactgcgattacgcagaacgtggttgatcgtctaggcttggttgcgacagggatgacgaaggtcaacaccgcagccggcgagagcgtcactagtacgtatctgatcaacatcaggctgccgaatcgtgttgggttcgcgggattgcaggtcacctgttgcgtccttactccgggcgtagacgtgctgattggcatggatatcattggaagcggcgactttgcagtaagttgccacggaggccaaacgatgatgagcttccgcactcctgcttccaagcgcattgattttgtggcggagcatcataatgatgatcgcagagagcagtttaaggctcacgcccaatcactcataaagaatcgacctgactctaagcgcaaaaacaagaagaagaagaaatag

SEQ ID NO: 531930 - DNA, 249 bp, Stenotrophomonas maltophilia
atgtccgccgacctgcgtaacgcttttgactacttcctcaataatcaagaggaactagtagagaagtacgccggaaaatttgttgttatcacgaacgatcgtcaagtccttggcgcgttcagcagtccgcttgaggcatccgaagctgcgcaaaagaaggtccatttaggggaattcttggtgcagaaggttcaatctggcaccgacggctttacacagacattctattctcgcgtggccttccactaa

SEQ ID NO: 531931 - DNA, 624 bp, Stenotrophomonas maltophilia
atgcgcaagacgctcctggcaaccagcctgttgcttgcagtaccagtgctggcgtctgccagcgacgagctcagctacacctacgtagagggtggctggaaccgactgaagcttgacgccggcaacgccggcgacttcaccacggatggtggttacgtccggggttcgttcgcggtcgcaccacagttccatgtgatcgctggcgcatcgcgcgtcagcggcagccaccacgcgggcgatgcgcgggtaaagaccactgtggacgttccctatctcggcctggggtaccacacgccgatcagtgagaatctggacttcaccagtgagttcgcctggaaccatcgttgggcgaagtcggaccatcgcgtcgcggatgagcggtcccgccagacttcccggttcaaccaagtgctggggatggtgggtgtgcgcggcagattcaccgagaacctcgagggctggctgaaaggcggctatgccaatggagacaacggccaggacgcccgctggtatggcgtggcgggtgggcagctgaacatcaccgacacctggggtgttgtactggaaggccagtttgacaaggacacgtccgagtacagggcgggcgtacgcgcaagcttctag

SEQ ID NO: 531932 - DNA, 759 bp, Stenotrophomonas maltophilia
atgcaggatgcgcagtggtggtatgccaacagcaagcagagcgaagggccggtcgatcttgccgggctgcgccgcctgcagcaggacgggacggtgacggcgcgtacgctgttgtggcgggagggaatgccgtcgtggcgaccgctggccgaactcgaccctgcggtggccgcggccgggccggtcgcccaaccgcctgagcctataggagtcgcgacgaccgccgccgatccatccgatccctaccgcgcgcccacaacggccgccatggccacgccagccgcagggctggagggtgacatggcactgtatgccgccgtggtcggcggcaacttcccgatctatcgccagcgctggcggctggatcagggcatcgccacgggcagcggcacctggcactggccggcgttcctgctgggcctggtctggatgatgtaccgcaggatgtatcgcctcgcagcgatgtgggcgggcctgctgctgctgatcagcgtgatcgagacgctgctggatgtgcctgatggcctgtcgctggtcatcactgtcgcgctcagcatcactaccggtgccttcggcaacacctggtacctggcacattgccagcgcctgattgcccgggcccgtgcggagagccgtggcgacgagacgcggttgcacagtgagctgagcgcgcgcggtggcaccagcgtggtcgccaccgtgattgccctcgtcatcgcggcggtgctgagtaccgtcggtgccggattggccgggtag

SEQ ID NO: 531933 - DNA, 513 bp, Stenotrophomonas maltophilia
gtgagccaggacctgcccgtgctgtggtctccggcccagcaggcctggctgcaggccatgggctacaccgtctaccacgacggccagctggccaccgagctggatgccgcgctgcagctgagcgtggccgaagccgaggcggcggccgcgccgccgacgcagccggcgcgggcgagcgcagcatctgctgtggatgagcaccgcgccgaggccgtgctgccgtcccgtctggaacgcccggcgccgtcacggcgtgatcctccggtccccgcacctgataccgcgccggcacccgcccattcgctgccggtcggcaatgcccggcagccggtggtgcgcctgccggatcgcctgcagatcgcgctgctgcgcgcgtccggctgcaatcccaatgatccggcgacgcaggcgctgatggacagttggcccctggaccggctgcgccgcgacccggccgccaagcgcgcgttgtggccgcagctgcgtgccctgcgcaagcggggcgcgccgtga

SEQ ID NO: 531934 - DNA, 963 bp, Stenotrophomonas maltophilia
atgacctcgtccgtttccatcgccgtctgcacgtacaacggcgagcgcttcctgcaggagcagctggacagcctgctggcgcaggcgcgccatccggatcagctcgtgatccgcgacgatgcatcctccgacggtacccaggcgttgctgcgtgcgttcgtgcctcgcgcggaggcgctgggcatcgcggtggacctgcaggtgaattcgcgcaacgtcggctatcggcagaacttcgatggcgcgctccgcgcctgtagcggcgacctcgtcttcctgtgcgaccaggatgacgtctggtatccggacaagctgcaacgtttctgcgccgaattcgatgcccgccctgatctgctggcgctgcacagcgatgcacagttgattgacgaggaagggaagccgttgcatcaactgctgtttgctgcccttcgctacacgcctgcggatcgtgcgcggatgcatgccggcgatggattccagctgatgctcaagcggaacctgatgaccggcgcggcaatggcattccgccgttcgatcctgaccgacgccctgcctctgccggacaaggactgggtgcatgacgcctggatcggaaccctggccgccatgcgagggcgcattgacagcctccctgaagcacttatcggctatcgcctgcacagcaacaaccagctgggcctgggcggaaacgcccgtgggccgcgcgcggctcaacgccggcgacagctggaagccgaacggctgcagtcggcattgctgctggcgcgagggcgagccctgggcttgcccgagccgttgttggccctggtcgagcgcaagaatcagcatgcgtcggtaaggacctcgctccccgcctcacgcctgcgcaggctgccggtggtgatgggcgaactgtggtgcggaaactaccatcgcttcggccgcggcattctgtcggcgggtatcgatctggtccgcgcctga

SEQ ID NO: 531935 - DNA, 582 bp, Stenotrophomonas maltophilia
atggatctccacctgaccgacgccagcgtgcattggcatcgccgctggctggatcgcgacacggccgacgtgctgcaccggaccttgcgtgaggacttgccttgggaggttcaccgcatccgcatgtttgggcgcacggtcgattcaccgcggctgagctgctggatgggtgaacctgatgcacgctaccgctattcgggtaccgacttcattccggcaccttggcatgcggcactgctgccgctgcgtgaccgcttggcaggcttttgtgccgcacccttcaacagtgtcctgctcaatcgctatcgcgacggcgaggacggcatgggctggcatagcgacaatgaaccggagctgggtccggtcccgctgatagcctccctgagtgttggtgccgagcggcgtttcctgcttcggcgtcgcgacgatcatgcgcgcagggcggaagtgctgctcgggcatggcgacctgctgatcatgggaggcgcgacccagcgcaactaccagcacgcattgccgaagacacagcgagcggtgggcgagcgcatcaacctgacgtttcgctggatccggccgcactga

SEQ ID NO: 531936 - DNA, 1368 bp, Stenotrophomonas maltophilia
atgagcagagcgcttgcagggtccgcagtgcggagtgggttgtctccgtttaccgtggctgcaggcgtggcgttgatcacactgctggtacgccttctctacgtccagttcttcagtacgccaatgcccttctgggaccagtgggacggagagggggccaccgccctgcaaccctggttgcatgggacgctgcaatggagcacgttgctgcaactgcacaacgagcatcgcatactgcccacgcgactgtttgcactactgtcgtactttctgacagggcagtggaacaatgtctatgaagcacgcatcggcgccgtggtggcctgtttcatacccgcgatgctggtctggtacgccctgcgtgacgctggcccggtgaatgggcgcaagctgctggtcgtgttcgcgttgctgatgtcggtcctgccgttctcctgggagaacttcctggtcggcttccagagccagttctatgtcctgatcctgtccagcatcgtggctgttggactggttgcacgccaccatcagagcattcctgcgctgttggcggcgatagcgctgagtctattggcggcggttaccatggcctcgggcatgctgactgcagtggcggtgggcgctacgtgtgtgatggcctgcctgtgcctacccggcaagcgtgcgcctgcgctgtgcacgacggtggtgctggcggtgctggcgatcgttgcctatcgctcgattccggtgattgatggccacgccgtgctgcgcgcgcagtcgcttggcgaactgttgttggccacgacacgcatcctgtcgtggccggcgcgctcgaacggctgggttgccgttgtatggctgccgggggcggtgatgatcactcgcatgctgctgcgccggcaggccacccgggccgacctggtgatggctggcctgtgcatctggaccgcgctgcaggccctggcgattgcctacggtcgtggccacaacatgacttccccggcaccgcgctataccgagctgttcgttcccggcctgttcggcaatgcctggttcgcgctgcagctctggggcctgctgccgcgctcgggcctgcgcagcgcggcgcgtgccgcggtggtcgtgttcgcgctggtggctgtgggggctccgctgagccaggtgggcaaggacttccgcaggatccagacctttgccgcagagagccgcctgcaacaggagaatgccacgcgctatctggtcacgggtgatcctgccgcgttggacgtgggcgagcgcgaactgccttacccggatgctgccaagctgaaagcacaattggatgaccccaagcttcgccagatcctgccagtgaaacttgagagcgttgcccccgaagggcgatag

SEQ ID NO: 531937 - DNA, 984 bp, Stenotrophomonas maltophilia
atgagtggaagcgcgtccccggtaccggcgtcgccggaccgccggggacgggcagcccgttgggtcatcgtcatcgcggcgatctatgtcgtcgcgctgtgttacgtcgatcgcgacagaaatgttctgtcccgcctcgctgacatggcagcgcctctcggcgtctgcacgctgctggtacttctgagctatctcctgcgttacctgcgatggcgcagtattctgcgcgcccaaggcttcctgcttccgcagtggcggcaggggctgctggcctacctcgcaggctttgctttcacggcctcgcccggcaaggccggcgaactgctgcgaatccgctacttcggatggctggacgtccccgccaggtccacgctcagctcgttcatcctcgaacgggccatcgacctgctgatcattaccctgctggcagtcggggcggccgctctggtgcccatcttcggcgtcctggccatgatcatcctgctggtcctgcttgggctggttgcatttgcctgctggccaccgctggcgcgcgcctcacgacgtgcgatcgatctggtgccgggcagccccctgcgccggttgggccacttcctggttgacggcgctggcgccctgggtttgctgatgcgtcccggcctgctgaccaccagttgcggctggggtgcgggcgcctggggacttaccgcgatggccttcgcatggctgtgccatgcctccggcatcgacctgccatggccactcgcacttggcatctatcccctggcaatgctggtgggcgcactttccttcgtaccaggcggggttggcacaaccgaggcatccatcgtggtgatgctgaacgcgggcggtgtcgacaccaacgcggcgctggccatcgccatcggcatccgcctggtcagtctgtggttggccgtcctggtcggggtgctggcgatggccatcctcgagtcctccggttcttcggcccggcagagccactga

SEQ ID NO: 531938 - DNA, 399 bp, Stenotrophomonas maltophilia
gtgatttcccgccagttcctgctgttcctgatcgcaggcggccttgccgcctgcgtcaacttcggctccaggattgtcctcagccagtggctccactacgtgccagcgatcgtcatcgcctactgcctgggcatgaccaccgcgttccttctgaaccgtgccctggttttccaatcggcaaccaacggcgttcgcagccaggcgttctggtttgtcatcgtcaatctcgccgcggtattgcagacgatcgtcatcagcctggtgttggcacgttggctattgcccttgctgaatgtcaattaccacaatgaaaccctggcacatgcggtcggtgtggcagtaccggtgctgaccagctacttcggtcacaagtacctgtcgttccgccaggacaattga

SEQ ID NO: 531939 - DNA, 1467 bp, Stenotrophomonas maltophilia
atgctgtggggtgaggacggtcatgtgttcattcgcggagcaatggaggggggctggcgtacgctggcctcgccttacgccggctatcttcatctgtacccgcgcgccgtttcgttgatcgcaacggcgttcggtgcccacgcgttggcaccgatcatggcaggcagttggttcctcgcttacggggctgccgtggtcgtttgcgtccaacggctacgggccttggacgttcgtctgcttcccgcgctttgtttcgtggtgttgttgggagtattgccgacaacctccgagacgctgttcaccgtcaccaatgcacagtggtacctggcgatcgggttggcggcgtgcgcgcttctcccgccccgggagagcgacagctggcctcatctggcctttgctgcgcttgcctccgttaccgggcccttctgcatcatcgttcttcccgtggcagtgctgcaggccattattctgaggcagttggggcgccggcagtggatgctgctcatcctgctggttgcgtcgctcgtccaactttccttcttcgttgaatccgaccggcttgccgcgtcggcaaaccatgatgcaggtgcttggctgcatgggctgcagtccttcctggcattcggatcgctgtctgcggtgagcaaggttgtcgctctgatcttttggctttgccttgtagcggcgctttcaattgtcggacgcgaacgaggatggctggggcgcgaattcctgaccacgctctcggtgctcgctggcgctggcatgttcgccctggccggattctacgcaatgcgtgaccagccagagattgcttcgcccctgggatttggtgctcgatacttcgtcatcccatatgggattgtgttgatggcgctgctgacaaccattccgtacgcgcgccgaactgcatgggtggccattgccgcctatctggccatctcgctgctgaactatcgcagctttgatcgccctgatcttggttacgaccgctacctgagattctccgaggttcatcggagtgtgttcgttccaatcaatccgcagttcgataatttccgcggcggcttctggttgaacgcggagattcggcctgatcggggcattgccccggtgcagcttgatctggtgggcacgccgacgacatccagaactcccgcaggaggactggtcaggtcctatgtcgtagcgcctgacgcatcccgttgtggcccaggaactgaagttctcggagtggatctcgccctggatggcaattcgggccccgcgaagatccaggcgtcgtgggccgccacgcctgcggccccgccggccacaggcccggtcctgtccatctatcccggcgagaggcatgcgcagcttgcgctgccagcccctgcaatcactgggaagaccctgcattttgcacttgaatctgcagagcaggcgcaggtgaccggcatttcgctgttctgcatcggtcgttga

SEQ ID NO: 531940 - DNA, 390 bp, Stenotrophomonas maltophilia
atgaaccacatcaggaatggcgcggtagtgctggttgttgccttgggcctggccgcctgcggcaagtcgccggacgaacgcgcggcggatgctgcccagcaggctccggcatcccaggctccggcagcggcggccgcaccggcagcggcaaatcccgttgcccagaagtacgaaggcaaggtcgtgcgtcgccctgcaagcgacggtagcaaggaagatggctggttctatgtcgagcagggccagcgccactggatcgtcgacgccaactggttgcaggtcaagaatctgaagcccgaggatgtcatcgagatcaccgctgaggaactgagccagattccggaatcgccggacgctctgggcggtgctgcggccaatccgtcgaactga

SEQ ID NO: 531941 - DNA, 3330 bp, Stenotrophomonas maltophilia
atgatcgaactgaacaattctgccttcatcaggccgttgaagctgccgccgagtggctggcatggccatatcccgtttgcgggctggataaccgaggcgctgcgtccggcgatgtttgttgagctgggaacccactacggtgcgtcctatctcagcttctgccagacgatccaggaactgggcctcgactcgcgcgcctatgccgtggatacctgggagggggatgaacatgccgctttctatgggaactctgtctacgcaggactgagcgaataccatgacagcaagtacgatgatttctcgaagctgctgcgctgcacgtttgatcaggcgttggggaagttcgaagatggcagtgtcgatctcctgcacattgacggtctccatacctacgaggccgttcgccacgattttgaaagctggaagcccaagctttccagtcgcgcggtagtcctgttccatgacacgcaggagcgtcagggtgacttcggggtctggcgcctgtgggccgagctctcttcccagtatccgtcctttgaattcaggcactcgcatgggcttggtgtcctggtggtcggtgagaatgctccggacgctgtaaaggcgctgggaacacttgatggtcaccagcgcaatctcgttacccatctgttcgcagcactgggccacgccgttgcgatggcctacgcacgagactggtggcggaacgaagtgcacgcgcttggcggcaaggttgcaaaccttgaaggcgagctggcgtatgtgcgcgccgaacacgagcgcagcatcgccgcggtgaacgagaaaacccagcagttgcatcacgcaggtgagcagctggcagcattgcagggtgccgccgatgactcgcacgggcggcatgaacttgcaacggccattgccgcgctggaagcggaactggagagcgccgaggcagagcgggacgtcttgctgcgcaaggtcgaggagatctcgcacaaccttggcaaggagcgcgaacaggcggttgccgcccaggccgagtgccgcgccaaggtgctggcactggctgctctggaggcggaaaaggcctcggcactggctgcgctggaggcggaaaaggcctcggcgctggctgcattggaggcggacaagtcttcggcgctggctgccctggaagtggacagggcctcggcactggctgcgctggaagcggacaaggcttcggcgttggctgcgctggaagcggacaaggcgtctgcgcttgccgcgctggaagggaagattgcccaggagcgtgaggcgcacgctgctgtcgctgccagtcttgaggcagagcgggccgcccaccagcgttccatcgcggcccatgaaagcgaatcggctttgcggctgcgggaacgcgagcagggactgcaggaggtcggcatgcggcgcaatcgactcctcagtgacatcaaggaccgtgatgatctcattgcatcgctcacgcgggatcttcatcaggcgcagcaacgttccgagacaattggcgccaaagtcgggcgcgcgttcgagcgcatccaccagcgctggaatgcgcagggcgggttgcgggcgcgggcgctgaactggggcatccgcaaggccgaggcacgttatgcccgttcattgggccgtgagcagcagtctgccgggggcgttgcattgacccggccacaggcagggttcaaccctgcgctgcgtgcggattgtcaggatctcgcggattacatcggtgccaccgaattgtctccgcaggcattggccgagcaggcggtcgccgcgaaggcgttcacctatcgcccgcgggtgtcgctgatcattcccatctacaaggttccgcgccaggtgctggacgaaacactgcagagtgtcgagctgcagacctatggggaatgggagacctgcctggcgtgggccgatgtggacgacctggatggttgggaatggttgaagcagcgctgcgcgtccgagccgcggcacaaagcgatactgctggccgccaacggcggtatttcagagaactccaatgccgccctcgaacatgcggaaggggagttcgtcgcgctgctcgatcatgacgacaccatcacgccctgggcgttgtacgacatggtggccgcactgcagcagggtggggccgacgtcgacttcctgtactcggacaaggattccatcaacgccgacggcacctgccggatgaatgcactgtacaagccgcagtggagtccggaaatgctgcactcggtgaactacctgacccatttgaacctcatgcgaacctcggtggtccgccaggtaggtgcctgggacaaggagaccgatggtgcccaggattgggacatcttcttccgcgtgacctctgccgcgcgcaggatcgtgcacgtgccgtcgattcattaccactggcgcatcctgccgacgtccacggcatccgggttgcagaccaagccgtacgcgatcatgggccagctgcgtacgcagaagaactatttcgccagccgtggtctgcctgcgcaggtgaagcggaccgatcaggggttgttccacattacttggccgaagcttgcctcggcttccgaggtggtggtcatccagcacggtaccgcagagcagctggtacatactctgaaccttctgctggtgtccgatctttccagcatcagccgcattcatgctgttcacgtgggcgaggccggtgccgaactgcaggcatttgcgaatctgcccgacagccgtttcgtgcttcgccggcaggatgcgttcacctggtcggcggtggccgattggctggacgcttcctcggcaggcgtcgtgctgattgatggccgggctgtgggtctgtcggaggggttgctgaacgagctgctgggttgggttaatcaccacccggacattgcatggacgtctgccctggcggtgagcgaggacggccgggtggtcgaggctggtcgcgtcgtagcggccgacgggagcagtgccccgctgttcaatggggcacatccccatgaatatggctggtttggtggcgcccagtggtatcggaacatgagagcggcgtccccatttgcgattgcgtttaagatgacgaagttccaaactgtgtcacgttttctgggcggagacggcgaaatgcgacacgcattcacgcgcatctgtaccgggagcatcgaatcgggcggcggaagaggcttgatcgatccatttgctgtggtctacatgcctcccggcacgcaggctgcctggtccaacgacggcgaacagtatcgagatgacccttatttcaacccggcgttccgacaggtcagtccgctgaggctcaacaaatga

SEQ ID NO: 531942 - DNA, 390 bp, Stenotrophomonas maltophilia
atgagggacttcaattcgggagacatccatggcgatgtcaacatcaatgatcattccagcaatcagtacaagctactgatccattgcactgttgaagagctgctggatgacgagcgacatcggaaggcgctgctcgaaaaggagcaggcaccgcggcgtaaacgcgtctacacactgctcggcattgcggtactgataggtctggtcgcctctgggtggttttacctgcagggaaggatggacacggtcacgatcgtgttgggcggaatagcgctcatcgtcgcctactttggtgccaagggctccgatacccggacagaatttgagcagcgtcagatcgatgctctgaaggaaatccatacgttgctgcgcgagcggggcgtacgctga

SEQ ID NO: 531943 - DNA, 1089 bp, Stenotrophomonas maltophilia
gtgaaaaggaataccaaattgtctgagctggaaaaacgagcggccgaggaggcgctggctgcagctgcacggcaagtaaaatttacagtcgccgagtatccggtctcaatgtacgtcgagcgattcaagagtgatgatcaagatcggtatttcgtgcccgagtaccaaagaaatctggcatggagcgacgagcagaaatcattgttcattgagtctctgatagtcggattgccgattcctttcatgttcttctatcaaacctctgatggccgcatggagattgttgatgggtctcagagaatgcgggctatgcgttccttcttgaagagcaatcttaagctccgagatttggtgctgatcccggagttgaatgggttcaccgcagctgacctcctcgtggaacgacggaggaagctggaagacgtgacaattcgaaccattattctcgacaccgaaacggatgcggccactcgggctgagatgtttgctcggatcaatagaatgggaaccaccgcgaacgaggcggaaattcgccgtggttcgcttcctggccccatcactgcgctcatcaaggaacttgctgaagatcctgcattcgtcaatctcacgccgttgacagcgaaggctgtatcgcagcgcgagcgcgaagagttggttacacgattctttgcgtatgtagacaagaatgatacgccgtccggtcgttttccagattatagggatcgaccaaagaagtttctttacgattatctcaaggattccaatgaggccgcacttcaggacccgggtgtggtgaatgagaagcgtaatgaattccatcggatgcttggttttgttgagagggcatttgttaccgggttcagaaaatctgcggccgcaaatgctgttccaagagtaagatttgaagcaatcgcagtcggatctgcactcgctctcagaaaagacccggctctgaatgtggatccagctgaggtgtctcgccgaatggtcgaaatggactttgataagattgtcgtttctgacggtgcgaacgtcagatctaagcttgagggaagaatcgatgtggtcgtcaagatcctggagggctga

SEQ ID NO: 531944 - DNA, 714 bp, Stenotrophomonas maltophilia
atggccgctctactggattctctggctgaacgaaaggtcgaatttgactctcatctcgcattcgcaaaagccatggaggcgagaattttggatggtacatctttcgagattgacgggctcagcgtcacgtctcgagagttgcgtgtaattaagtcggggttgattattcatctgtacaacatcgtggaagcactgatgagtaaggcgatggatgaggtggcttttgccgttcaagaagcaccgccggatcagtggtctcttcatactcttcgcgagtggctcaggtatagcgcttcctttgatgttaatggaaatgaagaaagtaggctggatttagtaaatttcgcagccaggaagttgctgaagatggatccgattgactatattaagttcaagaagcctccggggacctggtcggacagagtgatccataatttttccacccgtttgaatgttgagtttaggctgaatagggcgcttgctgaggttgtaaagaaagatgagcgttatggtgatctaacgccgcttgagtttcttgcgcggcgacgaaatgatatcgctcatggctctagaacatttgagcacggcgcacaagatttgacattgaatgacatcttaaagttggccgagtcgacagtaacgtacatggagcatgccgttgccgcattcgagtcatttgttgcaagcaagaaatatctgttggcaagtccatga

SEQ ID NO: 531945 - DNA, 1089 bp, Stenotrophomonas maltophilia
atgaaatcaaataccattacgattaatgctgtcgatctattctgtggggtgggagggctgacctttggtctcgagcaggctggtgtcaaagttcggctcggcgtcgatattgatcccgcgtgcgctttcccgatagagaacaactctggtgccaagttcttgcaggctgatgtcgcgaagcttgacgcctgtgccttggttcaagcgatgggtgaagacgggattacactcctggccggttgtgcgccatgtcagccattctcaacttattcgagaacggctaagcaaaagcacggaatttccgctgggactaagcgtaacgatgactggatgctcgttcatcatttcgggcgagtgatcaaagaaacccagccagacttggtggcaatggagaatgtggcgccgcttgcacagcaagacatatttcaggagtttcttgggtctctcgacgggtactgggtagactgggcagttgtagagtgcagcaagattgggctcccccagtcgcgcaagcgcctggtgctgctagcttcaaggcttggtcccatcaaggtccctgtgaccgccggcacctatagcactgtgaagtccgtaattggcggccttcctctgctcgccgctggtgcgcaagaccccaatgatcgcctgcacaaggcaagtagattgagtcccctgaacctaacgagaataaagcactctgtccccggggggacctggcgtgattggcccgaagagatcagagcctcatgccatgtgaagagtaccggcgccacctactcgtccgtttatggaaggatggagtgggacacccctgcccccacaataactactcagtgcttcgggttcggaaatggtcgctttgggcatcctgagcaagatcgggcgattagcctgagggaagctgcgatgctccagggttttccgaggaattataaattcataccagaggatgaagatgttagtttcgcaaaagttggtcggctgattgggaatgctgttccagtgacgctcggaaaggttatcggcgacgcgcttatcgatcacgcttctcagttcaagcgcgttggcgatgatgaccgttgtgaataa

SEQ ID NO: 531946 - DNA, 279 bp, Stenotrophomonas maltophilia
atggtgacgtgggtccatgagcgaggtgtgcagttgcgtttgatccagccagacaagccagatcagaacacctacattgagagcttcaacggtcgcctaagcgacgaatgcctgaacgggcactggcttccgacactgctgcacgcccgcacccagatcgaattctggcggcgggaatacaacgaggaacggccgaagaagatcttgggcggcctgacaccggcggcccatgctcaacagttggcggccaaagccgctacgatgaggtctggactctaa

SEQ ID NO: 531947 - DNA, 189 bp, Stenotrophomonas maltophilia
atggggcgagggctgactgagcggcgggcattggccgtgctatggatgagcgccatcgcactgcgctacgtccggcgccctgatcgcaatgtcgaactgcgcgagcggatccttgccctggccctggcaaagcgacacaagcgctacggtgcaggaatgacctacctgaagctgcggcaggaacagtga

SEQ ID NO: 531948 - DNA, 204 bp, Stenotrophomonas maltophilia
atggtggtgaaagacctatgccgccggcgcgggttcagtgaggcgtcctactacctgtggcgtagcacgttcggcggcatgagtttgccggagggcaagcggctcaagaagctggaggtggagaatgcgcgactgaagaagctgctgtccgagcagttgctggagaacaacgtcatcaaggatgctctgcgaaaaaagtggtga

SEQ ID NO: 531949 - DNA, 684 bp, Stenotrophomonas maltophilia
atgatcgaacgggtcgacgaagagttcgagctcttctacgtggacgaaggcttcggaccagcagtggacgcgcggccggtgtcccaatcgaaactggctcattaccagggaaagctgccagggaggctactggagtactggagagcgtatggcttttccggttacggccgtggactgttctggatgactgatcctgatgactattccgaggttctgaagagctggctgtacgggaccgagttctatggaaaagacgactactacgtcattggtcgaagtgctttcggtgatatggaagtgctgggggcaagaacaggactcaggctgaccattgactgcaaatgggcaatgatcttcccgagcgacaactcacgctggatgagtgagcgaggagcggacttcctggtggcatcgtggatagcaatgatgaagcggtcccgccaggatcaaaccgacgagaggaaccagccccttttcgacagagcagagaagctgctgggtccgctggcgtgcgacgagatgtatggcttcgtcccagcactcgccttgggcggggcatgccgtctcaaccatcttaaaaaggtcaaggctgtcgagcacttgatgttcctggcccagcttggagagcgcagagtgatgggggacatcgtgaaggaggccaaagatcgtgggctttggaagtag

SEQ ID NO: 531950 - DNA, 213 bp, Stenotrophomonas maltophilia
atgtcgcgccgggagttcctggaatggtgggagttccacaagcggaatcctattgacccggtgagcctgcacatcaagcccgttgccttcgccgcgtacatcaccgcctcgcacagccagggcgggaccaagcgttcgttccaggactacctggacgcattggtgccgcgctcggctgacgatgaagccgaggactggtttaactctctgtga

SEQ ID NO: 531951 - DNA, 1968 bp, Stenotrophomonas maltophilia
atgaccaacacattcgggcgcttcgccgccataccgatgggcccttcgcttgctgcgcgcgacggcggcctgactctcgctaccaccggcgcaacggatctcaaccgcatggcaagatcagacatatcgcagtcggccggcacggtgggcgttgaattcgccgtttggggagatgacagcctgatcgccgtggttggcgtggtgaatgagagcgcaagctttgctatttacccggggggtgactccaatggagtggggtggaacctagccaccggttgggtcatacgcaacggggcgccgctgtccactgggatgcctgccgtggccaagggcgatatcgtcggggtagaggctgtgatcggtagccccagccggatgcggttctacctcaacggcaccctggtgctgcagagggacgtgccgctggctgggccgctgcactttgcggcgtctttggccactagcaatgccggtgggctgcaaatggccgtcaacggtggccagtggaccgcgcgtagccccgcagccgcggctggctggccagcggaggagggtgtcgccggccatttgcggattgccgacatggactggctcagcgcccctggcgatagcccggcaaacgcccgctacgaagggctgctggccgagggagtgtccctgatatctgagatcagcttctggccatggggcggggattcgattgcccagactgcggccgcgcagtgcgtggtgcatgacgccgatggccagcttgatgcgctggcgctggctggtgcctccggtcttcccatttcgctgcgcgcggtgaacgccgacgacatgctggccgactcggtgcccgtgtttcgattgtccctggggagcgtggaaatcaacgacgacgggaccaagacgttgagttttcatgatgcacacaatgacctagacgagacgatcaaccggggcgtgttcctgccgaacatcgcagccttggcctggaagtcgcagccagtggtgattggggcggtggcaagcgtgcccgctgctggtgccaactctgatgccacggcgatgttcctggccgacggggcgcttttcgtggacgtggtcatggaccggggcgattccatggagcttgggacgttcagtctttctcccgatggacagcagctcatcatgaagtcaccaccgatgatgccggtcgttgcggacgtatcgagcgttggtgctggtcagcagccggccacgctgcaggtcgcggtgcaggacgtgatgaggcgtctggagaaagcggcctggtcggcaagcgactgtgtggctatcgacaccgccagcggctatgccggcatcggatactacgccggcaattccatcagtggtcgggccgcccttaatgcgatgctgccgagctacggggccgcagcctatcaagatccggatggagtgctgcggtttacccgtatcgtcgcaccggagacatacaccggagagccggcgtttacgttggacgggaacgatctggcagaggatctgctctgcgtgcctgacgaggcgcctaacctgaccaggcgcatggcctacaggcccaacggccaggcactggccgcggcggacctggtgacagacgtggttgatgtgcctcagtggcgccgcgatgagctcaccgcgctctaccgggcgcaggtctatggtgcgggtgcgctgcacgcgcactatcgccgagccgatgcagctgatccagtcatatccctgttctggaataggggcgatgcgcagcaggagattgaccgggtggtggacatctaccgccagcagcgattcttctaccagttgaccgtgcgtggcgaccagtcactggcgccaatgccgggccaaattgggcggattagctacaacaggtacggcctggcgaccggaaagcaggtcatggtgaggcgggtcgaacgcaacccatccacgggggacgtgatgctgacggtatggggctaa

SEQ ID NO: 531952 - DNA, 384 bp, Stenotrophomonas maltophilia
atggacacttttaatctccaagaggcgcagcgcttgctggccgagctgcagcgggtgcatgctgagtttgagaaactggctgacgcaggcgatcgccatcgagcattgagtacggatgaactcgatcagtaccggcagcgcctgattgagctaaaagcccacctcaagcaacgcgcatccacagggacgatcgatggctccaagcgtcaactcaccaagctggaagacgcgttctacgaaccagcggtcaggaaagcatccgccaacttctcgctgcggacgaacgcaccaccgtcccagtgggccagtgggctatacaacccgtctgcggacatttcctatcttgcgtaccagttggaggacatgatccgggaaggggattag

SEQ ID NO: 531953 - DNA, 279 bp, Stenotrophomonas maltophilia
atgaagttcgccgaagtgcgaaccttcaaccatcccgaaaaacagctcaagaagaccttctgtgctacgtgcggcgaggttgtgttcggcacaaatcgtcttggtatgtatgtcgttcccaatgccatgctcgcccgcgtagccgctggggggctggacatggctatggcacccacgatgcacctctactatcggcagcgggtaattgatgttcttgatgcgttgccgaagtaccttgatggctgggacggccctacgtaccagcagccggccgcatga

SEQ ID NO: 531954 - DNA, 429 bp, Stenotrophomonas maltophilia
atgcccaatagggctgttgtatttgtcagcgaagcggtgggcgagctgacctcggcccacctgtccaagatcatggcggacgcagagcgcttcaaccgtagggcaggagtgaccggggtgaccttgtttgatggaagccggttcctctcctacatggaaggccctcaggatggcctggatgtggccttctccagggctacaggggccaccagtcactcaaacctgatcgagattgcgcggggacgggtggggcagcgcaggcttccatactggccgatgcgctgcatacccttggcaccgccggaactcgtgcagctggtacgagctgactggactggcttcctgcagcggggaggcgaacaggttgctccagccacagcgatggagctgctggtggctctggtcgagccatttgccgaggctgcctga

SEQ ID NO: 531955 - DNA, 213 bp, Stenotrophomonas maltophilia
atgcaccgcggctacctcaaggcaatggagtacgcggtgcgagtttgtgttctcacccatccggcgcccgagaacctctccaatgcctggcatcagcttttgcctaccattgtgtccaagcacaggacagacaccagcgatctctttgccgcagcattccagcaatcattgacagttctaactgagcaaataggggaccttcaaagcccgtga

SEQ ID NO: 531956 - DNA, 483 bp, Stenotrophomonas maltophilia
atgaacacttcattgcgcctcagccgctatctgctgggaggggctttggtggtcctgccgctgctgggcggcgtctccaccgccagcgccgaacgtcatccgggaggcggcccgcacatgggcgccgtccgcgaggagccgatgcgttcgccactgggctatacccgcatggaacgaccgcgcgagatcaccaacgcgcgcccgcagttccgtgatgagtaccggcacaacttccgtgccgaccatgccttccggatcggtccgtatcatccgccggtgggcttccagtaccgccgctggcactacggcgagatcctgccgcgaccgttctgggtcggcgactacatcctcaacgatttctggttgttcgatctggatttcccacccgtgggttacgagtgggtccgcttcgggcctgatgcgctgctgatcaataccggcaacggagagatcgtgcagaccgtctacggtcgcttcatctga

SEQ ID NO: 531957 - DNA, 1209 bp, Stenotrophomonas maltophilia
atgcatgcagaggtgacgccgcctgcgaggcggcgaggcaggagtgcatggacgtgggtgctggtggtcgtcgcggcggtggccatcgcgctgctggcccgatggctggcgggccatggtggagggagtggcggcgggcgtccgaccgcatcggtcagcgtcgagaaggtcgcgcgcatggacgtcccggtgacgatcaccgcgatcggcaccgtgaccccgctggccacggccaccgtacgctcgcagcaggccggcgtgctcgggcgcatcctgttccgcgagggacagcaggtgcagcagggacaggtgctggccgaggtcgatccgcggccgttccaggcagcactggcgcaggcgcgcgccgaccaggcacgggaccaggcgcagctggctgcggccagggtcgatcttgcgcgctaccgcacgttgctggcgcaggactcgatcgcaagccagcaggtcgatacgcaggcggcgctggtccaccagctgcagggaaccgtgcaggcggatgcggcggcggtgcagaccgctgaactcaatctgggctacacctccatccgcagcccggtgaccggcgtggttggcctgcgcctgaccgacatcggcaactacgtgaccgcgcaggacaccaccggcatcgctgtggtcacccaacaggatccaatcgatatcgcgttcgccattccgcagggccagcttggactgcttggggcgcggggcgacgtgcagggcgatgacctggtggtgcaggcactggcccaggagggcgcggcattgctgggcgagggccgcttgcaggcgctcgacaatgtgatcgataccagcaccggcacggtcaaggccaaggcgcgtttcgccaacccggatggaaagctgttcccgaaccagttcgtcaacgtggtgctgcaggtgcgcagcctgccacaggcgatggtggtgccggtcagcgcggtgcgccacggcaccccgggtgatttcgtgttcgtgctgcagcccgggcagaaagtgcgcatgcaggtggtcacgaccggcccgatggtgggccagaagatggccatccttggcggcctggagggtgacgaatcggtggtcaccgccggtgcagacggactgcaggatggctcgcaggtgcgggtgggaggaggcgcgcccagcaccggcaccggcaaggcgcggagccagcacaagaagggcgcgccttga

SEQ ID NO: 531958 - DNA, 3126 bp, Stenotrophomonas maltophilia
atggacggcgcggcggagaccgcagcggacaccgccggagggccttcgcgccccttcatcctgcgcccggtggcgaccaccctgatgatggtggcgatgcttctggccggcctcatcgcctgtttcaacctgccgctgtcggcgctgcccgaagtcgattacccgaccatccaggtcaccacgctgtatccgggcggcagcccggaagtgatggcgctgacggtgaccgcgccgctggagcgccagttcgggcagatgcccgggctggcacggatgacctccagcagttcctcgggcgcttcggtggtcacgctgcagttcaacctcgatcttgatctggacgtggccgagcaggaagtgcaggcggcgatcaatgcggccagcacgctgctgcccaccgacctgccggcgccaccgatctatgcgaaggtcaatccggccgatgcgccgatcctgtcgttggcgatcacctcgcctacgcgcacgctgggcgaagtggaggcgatcgtcgagcgccagttcgccaaccgcatcggccaggtcaacggcgtcggcctggtctcggtatccggcggccagcgtccggcggtgcgcatccaggccaacatggccgcactcgcttcgcgcggcatttcgctggagaacatccgtaccgccatcggcaacgccaacgtcaacgcggccaaaggcagtttcgatgggccgagcaagagctggaccattgatgccaacgaccagctggccagtgcggaccaatacgcggtgctggtggtggcttaccagaacggggccgcggtgcgcctgcgcgatgtcgccaacgtggtcagctccaccgagaacacgcggctgcgttcgtggatgaaccgcgagccggcgatcatcctggatgtgcagcgccagccgggtgccaacgtcatcgcgaccgtggacgccatccgccaggcactgcccggactggaggcccagttgccggccgatgtgcacgtcactctgctcagtgatcgcaccgaaggcatccgtgcctcggtctcggatgtgtgcttcgagctggtggtggccgtgttgctggtgacactggcgatcttcatgttcctcggttcgtggcgcgccacgctgatcgcctcgatcgcggtaccgctgtcactgctgggtgccttcgcgccgatgtgggcgatggggttctcgatcaacaacctgaccttgatggcattgaccatcgcctccggcttcgtcgtcgacgatgccatcgtggtgctggaaaacatttcccgccacgtcgagaacggcatgcgcccgttccaggcggcgttgaaaggcgcgggcgaaatcggcttcaccatcgtatcgctgacggtcagcctgatcgcggtgttgatcccgttgctgttcatgggcgatatcgtcggccgcctgttccgtgaattcgcggtgtcgctggcggcgactatcctgctgtcggcggtggtggcgctgaccctggtgccgatgctggccgcacgctggttgcggccagcgcagcaggagcgcccgtcacggatcagccaatggacagtgcagcgtttcgagcagctcactgcgctctacgggcgcgggctggactgggtgatcggccatgcacggctgaccctgctggccttcgtcgccacccttggcctcactgcgctgctgtttgcgctggtgccgcgcaacctgtttcccgagcaggataccggccagatcgcggccaccacgctggccacccaggacctcagctttgccgcgatgagccagctgcagcagcaggtggccgacgcgttgctggctgatccggcggtggccagcctgtcgtccagcatcggcgtggatgggcagaatccagcgttgaagcaggggcggctgtcgatcaacctggtgccgatcgggcagcgctcgaatctggacgaggtggtgtcgcggctgcgccagcgcaccgacggcattactggcgtgcgcctgttcctgcaaccggtgcaggacctggtgatcgataccgagccgggcatcaccggctaccggctggtactgcagggcgccgaccagacgctggtcgatcagtgggggcagcggctggcacaggcgctggccgagcgtgatgagctgcgcgacgtcaccccggccagcctgggcgagggcagctcggtgatcgtggacatcgaccgcgatgctgccgcccgcctcggcgccaacgcgctggcggtggacaacgcgctctacgatgcgttcggccagcgcatcgtctccaccatctataccgcgtccagccagaaccgggtgattctggaggccagcccggacctgctcaccggtccgcagggtctgcagcacctgtacgtaccagcgggcaacaccgtggtgccgttgaccgcgctggccacgatccgcaatggaaccgcgccgttggtgatcgcccacgaagcgcagttcccggccgccagcatcggctttaacctggcaccgggcgtatcgctgggcaccgcgatgaaggcgattgcgcgcgtgcagcaggacatcgccctgccggccgcattgaacacgcgctactccggtgccgccggcgctttccaggattcgctgggcaatgaaatgctgctgattctggccgcggtggtggtggtctacatcgtgctgggcgtgctgtacgagagtttcgtgcacccgctgacgatcctctcgacgctgccatcggccggcgtcggcgcgctgctggcactgggcctgagtggctggggactgggcgtgatcggcatcatcggcatcgtgctgctgatcgggatcgtcaagaagaacgcgatcatgatgatcgactacgcgttgatggcgatgcgcgaggagggcaaggatgcggtggcggcgatccgccaggccgcgctgctgcgcttccgtccgatcatgatgaccaccttcgccgcactgttcgcggcactgcccctgatcttcggcagtggcatgggccatgagctgcggcaaccgctgggcatcgccatcgccggtggcctgatcctcagccaggcgctgaccctgttcaccacgccggtgatcttcctgatgttcgagcgcctgcgcgagcgccacgcacgaccggccaccgcagcgggggaaccgggatga

SEQ ID NO: 531959 - DNA, 3213 bp, Stenotrophomonas maltophilia
atgaacctggcggcccccttcatccggcgcccgatcggcacgctgctgctggcgctggggatgatgctggctggtatcgcagcgtatccgcaattgtcggtggcgcccctgccgcagatcgattttccgaccatcgtggtccaggccagcctgcccggcgccagcccacagaccatgtcgaccacggtggcctcaccgctggagcggcgccttggcgtgatcgccggcgtcaacgagatgacctcgcagtcgggcgtgggctcggcgcaggtgacattgcagttcgacctgtcgcgcgacatcgacggtgccgcgcgtgatgtgcaggcagcgatcaatgccgcacgcgcggacctgccgaccacgctcaggagcaatccgacctaccgcaagatgaatccggccgatgcgccgatcctgatcctcgccctgacctcggccacgcgcacgccctcggagatctacgacgcggtatcggccaccgtgcagcaacggctgctgcaggtgcagggggtcggcaacgtcgaactgggtggcgcggcactgccttcggtgcgggtcgagctggacctgtcggcgctgtcccagtacggcatcgcactggaggacgtgcgcaccgcgctgtcctcggaaagcgccaaccgtccgcgcggtgtcatcgatggcgacgggcgcgcgttccaggtctattccaatacacccgggctgcatgcggccgactatcgcgacgtggtggtggcctggcgcaacggcgcggcggtgcgcctgcgcgacgtgggttcggtgcaggatggcccggaggacgtgcgcaccatgggcctgttcaatggccagccctcggtgtcggtgatcatctcgcggcagccgggcgccaacatcgtcgacaccgttgatgctatcaaggcgctgctgccggcgctgcaggccaacctgcccgaggacgtgcacctggccgtggccagtgatcgcacgctgaccatccgcgcctcgctgcgcgaagtggagaccacgctggtgatcgccacgcttctggtggtactggtggtcagcctgttcctgcgcagctggcgcgcgacgctgatcccggccgtggcggtggtggcctcgctgctgggcacgttcgcgatgatgtacctgctggacttctcgctggacaacctgtcgttgatggcgttgacggtcgccactggcttcgtcgtcgatgatgccatcgtggtggtggagaacatcagccgccacatcgaggatggcatgcaggtgcgtgcagcggcactgctcggtgccggcgaggtgggcttcaccgtgctgtcgatttccaccagcctgatcgcagtgttcgtaccgctgatcttcatgggcggactgatcgggcgcatcttccgggagttcgccctgaccctgtcgatcgcggtggcgatcagcctgctggtgtcgttgacggtgacgccgatgatggcctcgctgctactcgtaccgcccgcgcagggcgagcagcaggggcgattgatgcgcagcgtgcagcagggctttgatcgcatgcagcagcgttacgtgcgcagcctggactgggcgctggcgcaccgcggcgtgatgctgctttcgctggcgctggccatcgcgctgaatgtctacctgatggtcgtagcaccgaaagggttttttcccgcgcaggataccggcgccctcaacggtggcatccgcgccgaccagagcatttcgttcaccgcgctgcgtgacgggttggcgcaggtggtgaagatcatccgcgccgaccctgcggtacaggatgtggttgcgttctctggagggagtcgagccggcggtggcttcctgttcgtggtactggtgccgcgcgggcaacgccccccggtggcggaggtggttgcccggctgcggccgaagctggcgggcatcgaaggggtggcgaccacgctcaacccggtgcaggacctcaatgtcggggggcggcagacgacctcgatgtaccagcacgtgctcaaggccgaagatgcagaccagcttcaacaggcatccacccgcctgctggcggcactgaagcctcacagtgatgtgctggtcgatctgaacgttgaccagcaggatgcaggtgccagtgcctatgtcgaggtcgatcgtgatgcggcggcacggctgggggtatcgatgcagtcggtggacaacgcgctctacgacgcgttcggacaacgtcaggtcgccaatctgtattcgggattgaaccagtaccacgtggtgatggaggccgcgccgcgcttcaacgggtcgccactggcactggccgatatcaaggttccgtcaggcgcgctgatcaccagcgtgacgggcaccacatcgctgaccgcaagcgtggctgcaacggccctggccagcgcagcacccgcacccccttcagcggccgaatacgcagcgccgatacgcacgctggtgccgctgtcggcgttctcgcgctggtcgtcgcagtcggcgccggcgcggctcaatcacagcgatggcgagccctcggccaccgtatcgttcaacctgcctccgggcatagccctcggccaggccgcgcagctgatcgagcaggcgctcgattcgctgcacctgcccgcgagcgtgcgcggtgagtttggtggcaccgcgcgcgtgttcaaccagtcgctggcgacactgccgctgctgatcgtgggggcgctgctggcgatctacgtggtgctgggcatcctctacgaaagtgcgattcatccgttgaccgtgatgtcgaccctgccggcggccggtgtcggcgcgctgctggcgctgatcgttaccggcagccagctggatctgatcgcgctgatcgcgatcatcctgctgatcggcatcgtcaagaagaacgcgatcatgatcgtcgacttcgcgctggaggcacagcgcagccgtggactgagcgcgctgcaggcaatccgggaagcctcgatcctgcgcctgcggccgatcctgatgaccagtcttgctgccgggctgggcgcgctgccactggcgatcgggtttggcgacggagccgagctcaggcggccgctgggcatcgccatcatgggcgggctgctggtcagccagttcatcaccctgttgaccacgccggtggtgttcctggcgcttgatcgatccggccacgcgcggcgtggcggcgagtctgcggtgcccgcgctgccttcaggagacgtgcgatga

SEQ ID NO: 531960 - DNA, 1452 bp, Stenotrophomonas maltophilia
atgagaccaatcatgggcctggcagtgctgctgggcatcggcttgttgcccggttgctcgctggcaccggcctatcacggagtggcgatgcaggcgccaccggacgctttcaaggaggccccgggctgggcggtggcggtgccttccgatgccgtcgtcaagggccaatggtggacactgttcaatgatccgcagctggatgcgctgcaggcgcgcgtggtggtcgacaatcagaacgtagcgcagtaccgggccgcctacgctgccgcgcgtgcattggtccagcagcaacgcgcagcactgtggccgcaggtcaccgcacagggcacgggtacccgcagtggcgggcagggcagtgatgccagcggcaacgccgctggtggccggcgctactcggtgcaggtaggggccagctgggagccggacctgtgggggcgggtcggcaacagtgtcagccaggccagcgccgaggccgcagccagtgccggtgacctcgccaacgccacgctgtcggcacagggcgagctggccatcgattacctgcagctgcgcgggctcgatgctcagcaccaggacctggcgcagaccgtgcagggctaccagcgttcgctggacatcaccggcaacaagtatgcggtgggcgtggcagccgccgccgatgtcgaacaggccaggactaccgtggccagtgcgcaggcccagctgcgtacactggacctgcagcgtgcccagctggaacacgccatcgccgtgctggtcggcgagaatccctcgaccttccgtcttgcgcctgcgcaatggaatgagcgggtgccggccgtaccttccagcgtgccgtcacaggtactgctgcggcgcgccgacgtggccgctgcggagcgccgggtggcggcggccaacgccaacattggcatccagcgcgcgggctacttcccgcagttcaccatcagtggcgatcggcagagcaacgctaccgcctgggggcagttgttcaccgcttcgaccagcctgtggtcgctgggcatcagcgcgctgcagacggtgttcgatgcaggcgcgacccgcggccgggttgcgcaggcacgcgccgagttcgaccaggcggcggcggtgtaccggcagaccgtgctgggcgcgttccagcaggtggaggacaatctggtggcgatgcaggtctatgccgatgtcagccagtcgcgcgtgcaggcggaagccgcggccaaccgcgcagaggtgatcctgcgcaatcagtaccgtgcaggtacggtcgattacaccgcagttgtggtcgcacagggcactgccagcagcgcgcggcaagcgcgcatccaggcggtggtcgaccggcagaccgcgatggtcgctctggcccaggccatcggtggcagctgggtggagcctgccgctgtcgcggttacggccccggcaccatcttcttctggcgcgccttga

SEQ ID NO: 531961 - DNA, 654 bp, Stenotrophomonas maltophilia
atgcccaatatgggtatccccgccgccaatccgtcttccgccggccctgtcgggctggccgacgcgctcttcacccagacccagcaacgggtgctggccctgctgttcgggcaggacagccgcgatttcagcatctccgagctgatcagcggcagcggtgccggctcgggcgccgtgcagcgcgaagtggccaagctggtcgcaagtggactggtcgagcaacgcagggtcggtcaccagaagcgctatcgcgcgtatgccggctcgcccatccatgccgaactggtgtcgctggtgcacaagaccatcggcctcgcacagccgctgcgcgaggcgctgcaatcgctgcaggatcagattgcgctggccttcgtcttcggttcggtggccaagcacaccgacagcgcgcacagcgacatcgatctgatgctgatatccgatacgctgggctacgctgacttgatggccgtgctcgatccgctggaagatcgcctgggccggccggtgaaccccacgctgtacacgcatgacgaactgaaggatcgcctgcgcaagggcaatgccttcctgcagcgcgtactggaacagcccaaggtctgggtgattggaggaatggatgacctcgccattgcagaatctggtcgggccgggtaa

SEQ ID NO: 531962 - DNA, 408 bp, Stenotrophomonas maltophilia
atgacctcgccattgcagaatctggtcgggccgggtaaaccgctcaccgtcgaaccacccgatccacgcgagatcgaagggcttcagcgctcggctcttgcgcggctgcgcgatgcgcgcaatggcaccctgtcgctggaaagccgcttcgatctcgcctacaacgccgcgcacgcgttgagtctggctgcgttgcgtgcgcagggctaccggcccagcaaccgctacatcgtgttccagtcgctcaagcacacgctgggcgttggtccggaggtatggcgcgtactcgacaagtgccaccagcagcgcaatctggccgagtacgagggcgaactggatgtcagcgggcgtctggtggaagacctcatcatcgcctgcgaagcggtgcgtgttgcgtcaggcctctga

SEQ ID NO: 531963 - DNA, 477 bp, Stenotrophomonas maltophilia
atgggcgggttcgcggcaccatggctggcctgcaggctgttgctggcggggcccgcgcaggccggtccgctctacgtggatgcccgtgactaccccgcgccgggcgccggacacgcgcgtttcctggccgccgagcggcagctggtgcgcggctttgacgacgtctgtggcgataccttctgcgagggggagtattacaacctcagggcgatgcgcctgcgctgctcggtgcagcaatccaccggcgtggtcgccggctgcatctggaccttcgcaggcagctctacccgcgtgcacccgatcgggcggatcgacgctgatcatggcacctacgcctgcgtgttgccgctggcagtggatacccgcctggaggagctgctgaccgcgtgggataccggaaacggctacgacgccctgcatgcaacgttgccgggcacccggacccacgtctacgacgggctgaccgactgcctgtga

SEQ ID NO: 531964 - DNA, 4221 bp, Stenotrophomonas maltophilia
atgaatcgcatctatcgacgtatctggaatgccgcccggcagtgttgggtggtggccagtgagctgagctctccgcggggaaagcccgcgcagatgcgggtgttgatgtctgcacttctgctgacgacggcgggcgcagcctgggccaccaacgaaggggatgatcctggcgcggtgagcgaagccgacgttgcgtcgatggcggtgcagaaggagcgcatcgtcttcatgtcggcaccaccgatgttttcagcagcatcagcctcgatcacgccgcgcgggatgtacctgcagtcggcgattgtcaccagcggcaactatgccgatgcgcaggtcagcggcgccgacgttctggcgctcgggtcgcgcgtgaagatctacggtaccgaatccactggcctgggcaactacgcagagaccagtggtggctacgctacagcgctcgggcacaatgccaaggcctatggtggtcatggtacggcggtggggcgaagtgcctacaccagtggcttcgccgcaactgcgctggggcaggatgcacgtgcaaccgcgcagaacgcggtcgcgatcggcagcggtgcgcgtgcggccaactcggagtctgtcgccatcggcgccaacgccgtgacctacgaatccagaacggtttcagtgggtaaacgcggagaagagcgtcgaatcaccaatgttggtgagggtaggggcgggaccgacgcggtgaatgtcaatcagctggcagcagtggaaagtactgccaacaccgcgagaagtgttgccaacagcgcgcagaccacggccaacactgcgaatcgcagtgccaatgacgcacttgcaaaggcaagcacgctatcgggattgctcggcgaaacggccagcaatggcaatgtccgaattggtggggcgaacagcggcacgctgcttgacatccgaaacagcacaggcagcaatcgacgcatcaccggtgtggcagaggggcagatcagttcgagcagtgctgatgcggtcaatgggcgccagctgtttgatacgcaggccattgcgcagaatgccaaagtggcggcggaggccgcgctgtcccaggtcaaggcctcgtcctacctgctggtcaacggcacaaccggcagcgataccaacaaggccaaggctaccggcactggtgcattggccaatggcatctataccgaggccagcggcacggctgctaccgcgatggggcgcacggccaaggcattggcggaaggggccatcgccatcggcgaccgcgccggcgtcgaatctgttacctccaagcacagcatcgccatcggaaccatggctaagaccggaccgcaggaggatctgctggccataggtcgcaatgccaatgcctccggcggggtcggggcgatggccctgggttatggcagcaccgccagccatctgcattcggttgcgcttggctcgggttccacgaccagcgctcaggaccaggtgtcggtaggcaacgccagcatcaagcggaagatcgtcaatgtagccaatggcagcgttacctcgaccagcaatgaagctgtgaacggtgcgcagctcttcgcaacagatcaggctgcgcgtggcgcggaatctacagcgaaagaggctagtgacaaggcggttcaggcacttgcgaaggccgcgacgctggagggcctggtcagcgaatctgctccgacgggcaatgttcgattgggtggggcgaattccggctccatcgtggacgtgcgcaacagcactggtagcaagcgtcggatcagtggcctggcagatggcgccttgatcgctggtggagcggacgccgttaacggcggccagctctttgctaccgatgagcgcgcgaaggctgcgcatgacgttgccagtgatgctgcttccagggttgcggaagtggaggcgcagaccatgtactcctctgtgggtgctggtggtccaggcgtggctgcgcgggctggcttggtgggtgttgcaattggcgattccgctcaagcatcgctgaactcggagggggcggtggctctggggagtttcacgaacgcggccggcatgaattcagtcgcattgggacgcgctgctcgcgtgactgagtatgcacagtctggcttcgcactcggcgcaagttcttctgtcgatgagattgctggtctggcacttggtgctgccagctcagtgaagcgcggtgcggtcaattcagtcgccataggtgctggtgctgtggcggacgaagctcgcactgtgtcctttggcacagttggacttgagcgccggcttgttcacattgcccgtggcaccgctgaacacaacgccaccaccgttggccagttgaacgacagtctcgccactctcggcggcggcgcgaagcttgataccgatggcggcgtgattgcgcctatctacgcagtgcagaacacgcgtcagcgtacggtgggcgacgccctgactgttctggataacgcggtagtccgtagcacttcccgcatggatggcgtcgaaggcgagcttcgctcaatcttccaggagcgggttggcgttcagtccaacggcatcaacaccgttgcgctggccggtctcaatggtgccttgctcaccaatctggctgatggccggatcgcagcgggcagccgagacgctgtcacgggtaatcagctgttcgctgcggagcagaagatcgagcgaaaccgtagtgagctggatgcgctgcaacgagataggggctctgaacagttgcgtgcgttcgccggatcgcatgcagggaattcgatcgatttcggcggtgctcgcctgactggcgtggccgatgcgcggctcaccaccgatagctcagatgcagtacgtggtagccagttgcattcgaccaacctgcgattgaacgtcatcgaggacagggccggagactctgctttcggctggttgccggagggctcgcgggacgttgctgcagcgggcttggcgggagttgctataggtagaaacgccgaggcttcattgcagtccgaaggtggcgttgctctaggttcctgggcaaaggcttctggaaagaactccgtcgcattggggcgtgcagccgacgtcggcgccaatgcagagagaggcttcgcgctgggcgttttttccgttgtagacgagtatgaaggcgtggcactcggcgctggcagcattgtgaggaagggggcggtagaggcagttgcggttggcgcaggttctattgctgaggagtcgaatactgtgtccttcggctccacggcaatgaaccgccggctcgttcaccttgccagcggcactcttaaccacaacgctgcaacagtcggccagctccgcggtgcactttctggcttcggtgccgaggtagactcctatggcaacatcatcggcccgcagttcaacgtgcagggcggcacccagtccacgctcaacgacgcgttgagcacgctggatggcgccgtccttcgcaccacctcccgcgtcgacggcatggaaggccagctccgttccatcttccaggacaccgccaccgcccgtgccgatggcttcaaccagctcaccctcgccggtgcgcagggcatggtcatctccaacgtggccaacggcctgatcgccgcgggcagccgagaggcggtcaacggtggccagctgcacgcggtgcagcagcagctcaacggccgcatcgatgggctggaacagcgcgtagacggccagggtccggcgccgcagtcgcgtgccatggcgctggcatccaccgagcaggagtcagcggcacccacgccgcccgccacgcaggaagacaaggtcgtcgccgataccggcaacgcaccgaagtcctcgcctgccctgcagccgaaggccgaatcgccggaatcgcccaagccgcaggtggacaccgccgagctggagaagatgctggctcgtgccaacgactacagcgatggcatcgcccgcgaagtggatgcgcgcctgaacaagatggacaagcgcttcaaccgcatggcggcgatgagcagcgcgcagaccgcgatggcaatgaacaccgccggcctggccacctacaaccgcctcggtgcgggcgtgggctatgccgaaggcgaatcggcgatggcggtcggttaccagcgcgtgttgaacgacaagggttcggccaccttcagcctcaatggtgctttcaccaacagcggtgagcgcagcgtgggcgtgggtgtgggtatcggctggtaa

SEQ ID NO: 531965 - DNA, 378 bp, Stenotrophomonas maltophilia
atgaaggatggaacagggggaccgcaaggtccaggcaagcgggcagaagaactgaatgaactgctggcggtaatttggcaccagatcgcccgccaggtgaacacactgatcgaggctcatgacacgtttggattcctgcagttcaacgcaaatctgaacccgagcttggcggagatgattgaagctctttctttcatcgactttgccctcaaaaagttcgtggacagcggtaagttggaagaagaagagttccgcaacgcgatcaattctcgtcaatgcatcttgaagatgaaggggctgtcccttgcccttgaagctcatgacgaagctgagtaccaacgaatcatggaagagctgcgcaagcagcggaaagactga

SEQ ID NO: 531966 - DNA, 168 bp, Stenotrophomonas maltophilia
atgaacggcgcccacctgaactttgatctgtacgcacttgcgcagccgaagaacaggactgatctggctgctctggctcgcgaaatcatcacgaagctggattgcattgatgcccatctggacgcggcgatcgcccgctgtgaggcgcagtccgctgtggcggcctga

SEQ ID NO: 531967 - DNA, 231 bp, Stenotrophomonas maltophilia
gtgatcggagacgttctacagttccgcgacctgcaggagctgtgccggcccgggaagcgcccacggctcgccaccgttgagcgctgggccaagcagcgcaagatccgcgtgcagtacgacggtcagggcggtgtctggaccaccacagccgccctcaacgaggccctgggccttagcaccaccgccaccagtgctttcgagaacgagagctaccccgcttcgctgatctga

SEQ ID NO: 531968 - DNA, 321 bp, Stenotrophomonas maltophilia
atgacccaggaacatatcagccaccccggagggttgccgaactgcgccgccggccaccgcgcgcgccatatccacgacaagcgctgtgccgctgccggcggtggccacctggtcgagtgcgcctgcaggtcgaccagcaagcacgccgatcccgacaaggccatcgcggcatggaccaggctcaaccggccggcgcgcagcgcgcgggcatcggcctcgccggctgtctccgacaacgtcgtgcagttcaacctcagcctggtcgaaacgaccgcaacgcccacccgcgccagggccagagcccaaggaggccgcccgtga

SEQ ID NO: 531969 - DNA, 1005 bp, Stenotrophomonas maltophilia
atgaatgacctgctgtcccaggacgagatcgatgccctgctccacggcgtggacagtggcgcggtcgagaccgatccggaaccgccgtcaggcgaggcgcgttcgtacgacttcgccagccaggaccgcatcatccgcggtcgcatgccgaccctggaaatggttcacgagcgcttcgcgcgcctgtggcggatcggcctgttcaacctgatccgccgctcggccgagctgtcggtgcgcggcatcgagctgatcaagttcaacgactacatgcactcgctgtatgtgccgaccaacctgaacctgatccgcttcaagccgctgcgcggtaccggcctgatcgtgttcgagccgaccctggtgttcgccatcgtcgacaacttcttcggcggcgacgggcgctacccgacgcgcatcgagggccgcgagttcaccgctaccgaaatgcgggtgatccacctgctgctgaagcagaccttcgccgacctgcgcgaggcctgggcaccggtgatggacgtcgacttcgagtacatcaattcggagatcaacccgcacttcgccaacatcgtgaccccgcgcgaatacgtggtggtgtgccgcctgcacgtggaactggacggcggcggcggcgacatccacgtcaccctgccgtactcgatgctggagccgatccgcgaactgctcgacgcgggcatccagagcgaccgcaatgaccgcgacgaaagctggggccagaccctgcgcgagcagctcaacatcgccgaggtgacgctgtccagcgtgctggccagcaagcgcatgaccctgcgcgacctgacccggctgaaggttggtgacgtgctgccgatcgacctgaacccgcaggtgccgctgtgcgtggagaacatcccggtgttcaccggcgagttcggcatcgccaacggcatgaacgccgtgaagatcaccgctacccatccgccgggcacccgtccgcgcgtacccgtcatccaggaagacccgcaatga

SEQ ID NO: 531970 - DNA, 306 bp, Stenotrophomonas maltophilia
atgaccaccgaacgtttgacggctgagatggccgagaacatcacccgctcgaaggacccgaccttcgctgtcgagaccatcctgaaagggatcaggaccgctgccgagaacggaaagcgcgagtacatcacccgagagtatggctttggcgatggatcctgctacacgacagaggacaagtatccgacgctgtgcaaggcgatcctgaaagagctgcgcgaccttggattcaaggccgatatcggttctagctgcggccagttcgttgatgtttggctgtacgttcgctggggagagcaggcatga

SEQ ID NO: 531971 - DNA, 381 bp, Stenotrophomonas maltophilia
atgagcgcgatcaagctgtatccgcacggcggtcgccagtacgtcctctactccgaccacgaggcagaggtagcccgcctgcgcgcaatggctcaggaacaaggcgttaaggacggcaacgaaatcacccgcctgcgcgctgaggtggaggagaacgagaacgccatcaacgtgtggcgcggacgcactcagcgtgctgaggctgaggtggaggcgtatcggaaggatgcggagcggtatcggtggctgcgtaagcgagctatttccgcagacttcacaatgaccgattgtgttggtttcaccttcggactcccgcacggctcgagagtttccggcgatgtagacaagaccatcgacgccgcaatgggagaacccgcatga

SEQ ID NO: 531972 - DNA, 222 bp, Stenotrophomonas maltophilia
atgcgcacccactacctggtactggcctcgtgcatctgcctgatcgtcttcctctgctgggctgcgtggttctcctatcggtacgaagcgtacgagctgacggttagcggcgtgatcctcgcagtcttcgccgcgctattcgcccacgacgagctgcacatcatccgcaggaagcgcaacgaccgattcaagcagccgccgctcaccaccgagcggggctga

SEQ ID NO: 531973 - DNA, 144 bp, Stenotrophomonas maltophilia
atgaagagcgatgacaaggtgctggcgattctactcacagggttcttcatggggctcgttggctcgttggtagttggctggcccgcaatcgtttgcgccgggatcgctatctgtgccatcgcaatgtccaaggagaaatcctaa

SEQ ID NO: 531974 - DNA, 210 bp, Stenotrophomonas maltophilia
atgacgcccatctccgagctcgaccgcctcttccacgccatcccgaagcccgatccgatggctccgatcaacatcaccaggatttcgatggatggcgatgcgttgaaggtcgagcgtatcgatccgagcgatttctacatggcgcgggtagacgccgacgagacgaaccatggcccttgcgcacagggggattgcgatgaagagcgatga

SEQ ID NO: 531975 - DNA, 183 bp, Stenotrophomonas maltophilia
atgaagccggattggaaggatgcgccggagtgggcgcagtgggtcgcgctgagtaccgacggtgaatggacgtggtttgagaaggagccgtggcgcgacatgcaaggcgactacatgcctggcccttcgggccagtggaggaattcgggcgttcatgttgtgacgctggaaccccgcccatga

SEQ ID NO: 531976 - DNA, 201 bp, Stenotrophomonas maltophilia
gtggacaagacctttgaagttgagctgatccgactggcgcgcaacggcgttgaccaggcagtgatccaggtgaagcccgagaacggcggaatcaccctgtacgccagcaacggcctcctgactcatggaattggcctgctctgttccgaagccgtgaccatcggcgagcagctgatcgctgctggtaaggcgggtgagtga

SEQ ID NO: 531977 - DNA, 201 bp, Stenotrophomonas maltophilia
atggaccccaagaccaggcgcaagcaccttcatgcctctgtcagcgccgccaccgcatacgggctggcggttggcatgtggatcggattcagggctgcgcatgctgggtggctggagatcctactgttcaccgttgcgatgatgttcgcccccggcatcgtcatgtctcgcatcgacgccaagtttaggtaccacgactag

SEQ ID NO: 531978 - DNA, 345 bp, Stenotrophomonas maltophilia
atgagcgagatcgaattgaaggcgcgggagctgctggctgcggagtacgaaaaggcaggcggctacgtagatccatcaacagaggcgtgcgcggttcgcgccttggtagccgcactcgcgccgcagtggcagccgattgagtccgcgccgaaggatgggacgccgatattggcgtgctacgcgccgcactacgagacaaacggattcctgcctgttgctgtgcgctggcgcgcttaccacccgaatgctcgcgggaacgaggagtggcgtgattcgtcaggagcgaaggttcgcgcgatcacccactggcagccgctgcccgctccgccggaggtggagggatga

SEQ ID NO: 531979 - DNA, 477 bp, Stenotrophomonas maltophilia
atgaagcgcaccttcctgatcgacccgcaggggaaccggaactggcatcaggtgctgtcgctggtcgtgagcggcatcaacgactggatcaagggcggcccggtgcagatcacgctggacgagccgaagcggacgctcgacgcgaattcggcgatgtgggccacgctggccgatatcgcgcgccaggtcgagtggccgcacaccaagggcgggaactggaccatcgggctgatggattcggacagttggaaggctgtgctcacagcagcgttcgagggcgaatcccggatggctcagggcatcggcggtacgaccgtgatgctcggcgcccggacaagccagtacagccgccggaagatgggcgagttcattgaattcgttcaggcattcggcaccgagcgcggcgtgaagtggtccgccagcgcacaggacgagatggcgcagttcgcgccgaccaataagagggcagcagcatga

SEQ ID NO: 531980 - DNA, 183 bp, Stenotrophomonas maltophilia
atgaacaccgagagcgaattgaaccttattgagtacacgtgtgcggtgcagaccgaatacggcacgctgatggttgaagtgatggcggagccagattcagatcaaaacgcgatcttcttcttagcttgtgaaaaggcagaggatgctgtgagtagtgcgaggaatggcggagtgtggaaatga

SEQ ID NO: 531981 - DNA, 225 bp, Stenotrophomonas maltophilia
atgcccgtgtatgcagcgctttggaattggtctatcaacgactacgccatcatcgccgagccggttgggccggaagaaatgttcgctgtcataggcccgaatggcgagacagcggttgtatccataacgcgtagcggtgccgaacgctacgaaggcaagtatggccgttcgctcgtccgctacatccgcgccgacctcgccgaaatcccttgggagaagtgctga

SEQ ID NO: 531982 - DNA, 192 bp, Stenotrophomonas maltophilia
atgaacctctccagctacaaggaccgcagccgcctgtctgaggccagcaatgagggctactcagcgcgcctggcacgtaagccgatcacctcgtgcccgttcgctgaggggacggatgaggccaaggctttccatcacgcatggggacaggcggaccaggacgagcataggctgcgagtggtcaagtcatga

SEQ ID NO: 531983 - DNA, 474 bp, Stenotrophomonas maltophilia
atgaggatcttagccattgacccgggcaccgaggaaagcgggtggtgccttctgcagaacggagaagttcttgagtccggcgtcctgccgaatgaagaggttctggcgatgctcttgggctggggcggatacagcaaggaccagctggcaatcgaaatggtggctagctacggaatggcggttggccgtgaggtgtttgagacgtgcgtctggatcggtcggtatcagcaggcatgggctcggtcgcatgccgtgcgcctggtctatcgacgcgatgtaaagctccacctatgcggcaacgtgaaggccaaggacgccaatatccggcaggcgctgctggacctgctcgggccgcaggggaccaagagggcgccggggccgacctacggcgtcaagtcgcatgcgtgggccgcgcttggcgttgcagtaaccgtggcgggcatcacaccggagaactgcaggagggtcgcgtga

SEQ ID NO: 531984 - DNA, 609 bp, Stenotrophomonas maltophilia
atgactgatgttcgcgagcttctggcccgtctgaacccgcagacggtcaagttcaataccggacgcggtggcgttccggagctgacaaatcacgacattctgggggccttgtccgatgtgcccgctgggctagggagggacctcttggaatatggtgcatggccggatggggcagcgcttcgcgctgtcgagatcagctcccgcatccacaagctggtcatgaccgaatggtcagccagggagcaggcctacatagaggccaaggtagagcggggcctggtggtctctttggctcgctaccaccggaaggccttggatttccggacaagggccgagctagacgccaaggttgatgaggctcgtgcccggcgctggccggaaaaaatggaggaccgtctggaggacgtggtgaaggtcgccgtaggtgatctgttcggcatggagaggtcatccaaccgggaccgcgcaaaggacatgggcatgagcgagtcaggctatcgcgaggtgtgggcgggcgtggtggactgggtatacacggccatgcaggatgccgagtccgaggctgggcgtcagatgtggcgcgctttgaacagggatgacgccgcataa

SEQ ID NO: 531985 - DNA, 531 bp, Stenotrophomonas maltophilia
atggtgagcaccgaatctgtcgctgccgccatgggggccggcaagtacgccgagccgctggagagggcctgtatcgagcatggcatcaccacgccgcttgagaaggcccacttcctggctcaggtagcccatgagtcggacgggttccaaacggcgacggagtacgcgtcagggcgagcctacgagggccgcaaggacctcgggaacgtgcaggcaggcgatggcgtcagattcaagggcaggggcctaatccaggtcaccggccgggcgaattacgccagctacagcaagtggaagtatggcgatgaccgagtggtccgttcgccccagatgctggccgaattgccggatgcagtcgatgcagcggcgtggtactggaccgttgagcgggcgaagattccggcgatggcccgggccgacaatctggttggcgtaaccaaggccatcaatggcgccaccaacggcctcgcggatcgcgccaagcgcctggatcaggcaaagcgcctgttcgggatagggcaagccgcatga

SEQ ID NO: 531986 - DNA, 261 bp, Stenotrophomonas maltophilia
atgagcagccctaccccgatcatcaccaagccgccgaagatcaaccgcgccagtgtggtcccccagggcgttgaatgcccgaaggtgatggcaaagaagtacaccacctacatctggggtttcgttgccgccctgcctgagctgtacaccagcgtcttggcactcggcccggtccccgattcgatgcggcatatcctgtggggtacagctgcgtttggcctggcttgctcctggatcaagcagcggatcgaacaggcctga

SEQ ID NO: 531987 - DNA, 219 bp, Stenotrophomonas maltophilia
atgctgaatcgaaaggcgcggctgtcgctgatggcctgcgcactcgcgctctccggctgcaagaccgctgggcaggctgtgaggcccgagtgtccgaccttgccgcctccgccagccagcctgatgcagccgccgacgaccgagcagcaggtgcgggcgatcttgttcgtgccgcagccgcctgtgacgcccaagtccgtgggctccaagccttggtga

SEQ ID NO: 531988 - DNA, 291 bp, Stenotrophomonas maltophilia
gtgaaggccggaggccgcaagaagggcacgccgaacaagcagacggccgagttccgcgagacggttcgcaagctgctagaggacaacagcgccaatgtgggtcgctggcttacccaggtagctgagggtgatggaaccgatagcggcaagcctgatccggcaaaggcgctggacctgctgtgcaagctggctgagtacgccgcgccgaagctcaaccgaaccgagcatgttggcgaggacggcggcccagtgaagacggtgaccatgttcaagttggccgatctggaatga

SEQ ID NO: 531989 - DNA, 867 bp, Stenotrophomonas maltophilia
atgagcgacgagaacaacgcccttgaacagggtggcggcgaagcagtggccgcgactcagccgaagaacgatgccgaagcagccacccaggaacaggctgcaacgcaggaggctgagaaggccaaagaggcagaggccaagaaggccgatgaagaggccagcaagcggaagaatcgcaccagtcagtacatcgacaggctgaagaacgacgccaacatggcgcgcaacgagaacgccgagctgcgaaagcgactcgacgccatcgaatcccgcttccctaagcaggaagccaagccacccacgatggaaaccgcaggctatgaccccgaagagctggcccgtcagacggcccgctacgaggttcagcaagcgcgtcagcagtgggaagagcagcagaaatccgagtctgcagcccgctcggagcaggagaaggtgcaggcgtacgcccatcgtgcgcaggcatttgcttcgcagaaccccgacttcgaagaggtcgtcggttccatcccgcagcagttcctgatccccgagctgcagaaggcggtcatggtccacgaacgtggccctgagatcgcgtatcgcctcgctcagaacgaggacgagcttttccaactggccgccacccggccggaactgatcgattgggcagtcgcccgtttcgcatcgcgcctggacgcagcgccgccgcagcaggaagccgaaccggctcccccggcattcgcgccaaccccgaccaacaagcccatttcgcaggcgccagtaccggcaccccgcgtcagtggtcgcgcgccgacggaaaccccgccggaaaagctgaccgatgacgactggtatcgccgtgaccgcgagcagcgccgcaagcgataa

SEQ ID NO: 531990 - DNA, 192 bp, Stenotrophomonas maltophilia
atggaattccccaagatgatctatctcggcggcgatatcgctgctgagtggcggatcgtggccgatgaggcagagcaggcagctgcagccaaggaagggttctacccccatggcgaaggcaagaaggctgctgccgaacctgccgacgaccagcccaagcgccgtggccgtccgccgaaggctgcgcaatga

SEQ ID NO: 531991 - DNA, 2136 bp, Stenotrophomonas maltophilia
atgcgtgcccagcctgttgacctgatcggcggcttctacaaagacgacagccttccatggtcgtgccaggacacggtgaactggctgccggtgatggccgaggtatcgggcactcggacggtatccaagttctctaccgcgccaggcctcaagccgtggcagcaggtaggcaccgggccgatccgtggcatgcacgactgcgaaggtctgcgcctgattgtgtctgggcgctatctgtaccggatcagcaacgcaggggtaggcatcccgattgggatcatcccaggcgttggccgtgtgcagatgacgcacaaccagtttgaaactggctatcaggtgcttgtcgagaacgggcagggcggcggcgggtacgtctataacacgggcgatggcagctttgcccggatcacggatgagggctatcccgggtcgatctcctcggattacctcgattcgtacatccttggcgtcgagccgttgggacgattctggttccactccaacctcgccaacgcgaccgactacaacacgcttgatcggtatgaggctgagtctgcccccgacaagatcgtcggcctggctgcgaacgcgtctgaggtagtggtcttcgggcagcggacgactgagttcttctacaacaccgggcaggctactggcaccttccagaaccgcaagagttcgattgcgcgcggctgcgcgtcccggtataccatccagaagctggacaacagcgtcttttggctgggtgacgatggtgtggtctaccggcttgacggctacgcggcccggcccgtctccacgcgcgcactggagaaggcctttgccgactccaacgtctcggaggccatcgcctacacctgggaggatcgaggccacaaggtctattacctgaccttcccggacggccagaccttcggctatgacgtgatcactggcgtctggcatcgccgccagtcgttcggcatgtcgcggtggcgtctgagccacatccagaagtggggccgggactggtacggcggtgacttccagaacggccgcatctggcagattgactgggactacttccttgagggcgaccagccgatcatcagtgagcgcacgtccggcgtcatctcggacaaccaaagcgcgctggtcataccgaatgctgagctgatcttcgacaccggccatgggcccgggacgactccaattgcgttcccggtgcagcctaatcctccgtccatcgcgggcgatgcgcctgatgggcaggttgggcagcaataccctccgtatcagtatgctctcacgcctggatcggctgccatcaacacggtggccgtatctacgggagcgctaccggcaggatgttcggtgtccaactccggcctgttgactggtccagtattcagcgatgctgacagcggcgtctacacgtttggccttcgggtcacggatgccaatggcctgtatggcacgttgagcgattcgataaccgttccgtatgccaatgttccgaccggctatgcgttgcctcagcaaacgcccgctgtctccttcactattgcgctgccatcgttcgttgctggtgatctgcttgttgtgcttgtatctacgggcgctgcgagcaaggcgccagttccggcgacgcctacgggttggaccagcgttgccaacaccacggtgacgaccagcggtagcgcaatcctcgggagtcgctggctataccgcgtcatgcaggccggagactcaacgtctctgattctgacttcttcgatcagctgcgcgtgggcggtacaagcctggaacttcaaacagcgaggcgcatcgccgtcggttgccgccaattatggcgcccgtacatctggttcagcgactcgccaggttcctgcgatcactgcgccctggggtagctcgactgacatcaggattgcagcctacgtcgggctctattcagagtccgctgcactgcccttggtgtatccatatcccaatggtcggctctcaaccacctcgtcattaggcgttgggtctttcatgcctgttgcagtttcgtgccatcaaacgctgacagggacgatcttccctacggtcaattacaccgttgggagtactgctcaagtgttccttagcaatctgctgatcaaggttggatga

SEQ ID NO: 531992 - DNA, 441 bp, Stenotrophomonas maltophilia
atgctaatcgccacggaccctgcctacttggagggcgtggcgaatcacccggacgtgttcccccgggtttcggtcagggatcagggccggatcgacctggcgccgatctggccgcgctgtgtggcctgccagtttgagggtggcgggtatgtattcctcccgcacggcgaaggcatgtgggaggtgcacgttcttttcctgcgccactccaagggcgtgcatgccgctggcgtcgaagccatcgggcatctgtttaacaacctgggcgcggatcgcatctccgcacacctgcctgacgacgtaccggctgcacggcgactagccctgcggctcggctttgagttccacagccacacagcccccttcccccggcactccggcgatgtgccggcgcgcctgtacgtcttgaccaaagagaggttccaccatgtcaatcggtag

SEQ ID NO: 531993 - DNA, 678 bp, Stenotrophomonas maltophilia
atgtcaatcggtagcgcgatcagcggcgcaatcggcatcggctctgccctgctgggcaactcgggcgagaagaaggcggctcgggcggcgcagcaagccgctgagcagaacaacgccctgcagcgggagatgtacaacaacgcccgcagtgaccttggcggctacctgtcggcgggcaacaacgcgctgaccggcctcaacgcgctggctgctggcgactacagcgggttccagagctcgccggactacgtgtacgcccgcgatcaggcccaacaggggatcgaacgcggagcggcagcccggggaagcctctacagcggcggcaccaacgtagacctcgccaatgccctcaacggcatcgcctcgcagaacctcggcgcgtacaggaacagcctgatgggtctggctggcatgggccagaacgccgcaggcaccatcgctggggtggggcagaacagcgccaatgctcagagcggcaacaactggggcgcggccaacgccgctggcaactccgcgatcaaccaggccaacaactggagccagctcggcgccggtctgggcggcttggcgaacaactggctgcagcagagcgcggcggggcgccagagttcgttcaatccgggcgcgacgaccgcattcggcaacaacctcgccggcttcggcaactggagggcctaa

SEQ ID NO: 531994 - DNA, 1389 bp, Stenotrophomonas maltophilia
atggccaacgcactcaccggcaactttggccctctggcagcaattgggtatgtgcaggaacagggcgatatcggccgtcagcgaggccagcagaaccggctcaacatgctgaccggtcaggcctactctgcgacaacccctcaggatcagtcctcgctgctcggccagattgcccagatcagcccgcaggccgcgcaggcgcagcagcagcagttccagagccaggaagaccgcaaccggaaggagctgtacggcctggcgcagggctggaagaagattccgagccagtaccgccagaactactacgaccgcttcctttccccgcgcttgtctgccatgggcatgggcgaacagccagcctatgacgaggcgagcatcgacggtgcggcggatcagatcatcgctgcgtttggaagtggtctagggaacgtcagtagccagaacaaggttgtaggtggtgcattggtcacgccagacggccaggttgtctacgaggccccagtgaatggacaagtcgtagatgtcccggacggcatgggcgggtcgaacaagatgatcttcgacccccggacacgctcactttcgccgcttagtggggcggcggcagcacgcccggcatctggaactggaccggatggaactccatttgtcatcggagccgacctcagtcctgagcaggtagcagcagcacagaaggacattgcttctggcgggtcgattgatcaggtacagcttccggatcgcggcgccactgggccgcgcctcgggtacacgccgccaaaggctcgtgatgcacctgctgggtataactacacgggcgacacgcttgtgcctattcctggcggccctgctgacaactcgtctccacaggcccaagcaactggggagcaagggctccggaaggaggtaagcaaccttctgaagcaggatcagagcattctttccatgtaccgcaacgtacaggccacctcgcgcaaccccagtgctgcgggtgacctcagcatgatctttgctttcatgaaaatgcttgacccgggctcggtagtccgcgagcaggaattcgccaatgcgcagaatgcggcgggcgttccagaccaggtagtgaacgcctacaaccgcgccctgagcgggcaacggctaaaccccaagcagcgagcagacttcctgcggcaggcagcgcagttggctggagaggctgagagccgcatcacctctacgaccaggcgatatcaggacattgctcgtcagtatggatatgacccggttcgcggcaccggcatggccgacttctctggtgttagtggcagcgctgaatccacacaaactccacgtggcagcgaagcaccccgatccagcagcatcgatgcgctcttggagaaatatcgctga

SEQ ID NO: 531995 - DNA, 300 bp, Stenotrophomonas maltophilia
atggctgacatcaactggggtactgcggtttcagttgcgattgccgctgccttggctcccgttcttgccaagtacggtaagaaggcgttgcaggccatagagcgtcacgacgaacgcaagcggctccgctacgaggccaagcgcgccgcccgtcttgatcgaaaggccgcacgcgaggcagcaaatgaagccgccaagggcgaccaccacacctcagtcttcatccacacgccgcctcggctcgggcatgatggcagcgctggcagcgggagcggcgaggatacccagcggcccacctag

SEQ ID NO: 531996 - DNA, 735 bp, Stenotrophomonas maltophilia
atgactttgatatcttttagcaatgcgctctccttggtcacggcaaggtgggttgcgagaagggtcaccagcgcgaactggtggcccttcgccgtttttgggcatgacttccccgctgcggccaatcgctggccgcacctggaaatctgggttaattccgttgataactattctctggcactgccgactctgcctcaaccaaggagctgcggggtgttgggcagcccgtcatcgtcgccccgtgtctgggcccgcatccccctgaaaaggccctccctgaaccccggtcggaggggtggtaggattcgggccagatcgtccaggaaggggtacttcatgaatgggaagacactcgctgtagctgcctcctttgcaattggccttttgagtgtgggaacagcctcatccagagatgcatccatgctgcatgacccgtccgtcaggtctttcgtaaccgcatgctccccagccaaagctcagttcgctggctccccgatttcctcggacgactcgttgttagttgcgttctgctttggctatgtttctggagcagcagaagcgtcaatggcaaacaggattgattgcgccccttcaaatgtcacagtccagcaaagggttctgattcttctcaagtgggccgagcaaaacccagaagtgatcaatatggatcgcgggcttggactagccttggcgctagctgaggcgttcccttgccaaggcacaaaggtgaagtga

SEQ ID NO: 531997 - DNA, 780 bp, Stenotrophomonas maltophilia
atgagcagcccgttctacgacccagccccggtattcctggacaacaacgccaagcccgttgctggagggttcctttacttctatgaatctgggaccacgacgccgaagctcacgtggtcgaacgaggccctgacgatccccaacccgaatcctgtccctctcgacagtgcagcccgaccaaacaacaacatctggatcaagggcagctattcggtccgcctcacggacaaccagggggcgatgatctggacacgtgatgtcagcgatggcagcgcgggccaggcccagttccccccgatggagtcagggaagttcctgaccaatgacggctcggtctacctttggggcgacgtgcgtcaggtgccggatcctaccggctcggccaacaaggttcttagcaccgatggcgcggccctgatctggatcgctcagcaggcgatccccgatctgcccattgaagttctcgccaacgcgatcaagatcaagggaatcatgatccagtggggcaccggctctgccccggccagtggcggattctcgacccagcaggcagtgacgttcaccacgcctttcagtgaggcaccgtacttcgctattccgagcgtcaacaatgccctggttaccgcgtccagcctggcggctacggcagcgaccaacctgacggcgaccggctgcaccttcaacttctccgctgctgacagcaaggagaacaactccgacaagatcacctcgccgatcccgtatcggtggctggcgattggcaaggtggcgacgagctga

SEQ ID NO: 531998 - DNA, 2250 bp, Stenotrophomonas maltophilia
atgcccattcctgccgaacagccccgattcgaccagccggtggtcgatgcgcgaggctttgccacgcagccgtggatgaactactggctccggatggcctcgttcctgagtcaggaggatctatcggcggtcgtcgccgagctgcagaggcgcgtgaccgagttggaagaagggcaggcccttggcttccagatcatcggggaccagtccatttcggtgaacggcgtcccgcagccggggcacgtcgtcatcatcacgctgcagggcgaccagcaggcgccgggcaacacccagtactacggcactgggccgaccggcaccaagggatggttcccagtgtctggcgcgatcaccgtcaattccggggagctgaccaaggctgtcggcaccgatggcgtaaccacgctggggcttgccgacgtggtcgactctggcgccggtacgctgattgcgatcaccaaggatgcgaaggggcgtatcacaggcagccgcccagccacgatcaccggcacggcccagcagatcaacgttgccaatgggaatgccgctgccgggcttcctacgctgtcccttgccccggaggttctttcggcgcttgcagaggcagtgacggccctgcagcccagcgatgtaaccgggccgaacagcgtcaaggtcacgtccaatggctcgggcggcatcatcctgcagctggacaacgacgttgccgccccggcagcactgaccgagtacagcaccaattcggctgggcaacgtggctggtggcgcccggcgctgtttgaatctaccggcgtcatcaacgggggcgctctgtccatcaacgcgggcaacaacgcccggtttgacatggcacaggcggtgatcggatacaccgactggagcgtaaccccgacccagccaacccgcgttctgctgacggtagggccgttctccgcccaggttgtgactggcatcgcgaccgccaatgcatcgtatgtcggcatccagatgcctggcggaaccatcgtccagcagacaagcccgttcacgaacgcccagcggcgaaccatcgcgcagatcggcgtgctggtgcacagcaacaacaccaacatcaatgcgatcaacgatcaggcggcaacgatccgggctggtgtgaaccaggttggcgacctgatggcggcgattggcccgctgaacctgacgggcaacatctacagcgccaatggtgcgaacctcaacatcaacaagtcggccgggtccatcttcaagatgggctccaacttccaggccaacaatctagacccccacgtggtgagccaaggcgcgcagaccgcgctgaccttccgctaccgcctgagcaacggggtggagggcgccgacaccaccaacatcaacccgaaccagtatgagagcgctccgggtgtgctgacggctatcccgattcttggtaaccagtggcacgtacagcgcatcaacatcttccagtccgggcttaccaggatccagtacggccagcagctctatgcgagcgcccaggcggcgatcaacggcatcctcaccgatgccttcacgactgagcagaacatcgccgagaacggcatcttgcggtgctacctgatcatcaaccggggtcttctcgacctgcttggcagcgccacctttgccccggttggcaagttcggtgcgctgcaggccagtagcgcggcgactccgaaccacaatgacctgccagggctgcagggcggcacgaccaccgagcggtatcacctgacagcagctcaggttacccaggtcaattcctcggttcagtcggtcaccgcaggccctgggataacggttaacaacactgatccccgcaacccggtaataagcgccaagtcgggtacattcattggtggcgtcgaactaacgactccgtttgtatcctccagctcaggctcggtcgtggtcccagtccctgggatgacattctcattcgtcatgcctgataggccggtgatgatctccttcgggacaacggcgttctacaactcgcccaatgcaagcaatcttgctgcgatcatcctgcgcgtcaatggtagcgattcggcgcagctgttcttttctgcggccatcacgaactattggtcacaaggcaagcaatacttgctgtctggcatcgcgccaggaacgacggtgaatcttgagtggtatctcaacagagggccagacacgtttacagtcttcgcggccaccacagacaagccctacatctacgtggtgacggcatga

SEQ ID NO: 531999 - DNA, 726 bp, Stenotrophomonas maltophilia
atgaagatcactacagggatggggaggattcatgctgcggaacgcgatatggttgcggtccctgccgagtactccggggacaactatgcatgcatcatggtgcatggcgtggaagccacaggtggcgcttgggactggatgacggccagcccctacaggtggccaatcgttaggaccttggtcgattcctgcagcctctgcacaatcagcgctgacctaggcgggagcgctacctgggggaacgacaccctcctctccagaatggatgaggcctttgcatttacgcagacgctgagccaagtgaagaaggggaaagtgatcttggtaggtcagtcgatgggtggcctagccatgctcaactgggccagggctaacccggagaaggtggctgctgtagtaggggttatcccagtgaccaacatgaacacagccgtcgcgcagggcttctctgtggagatcgaagcagcctatgggggttcctacagcgatgctctgcatggagatcgccataacccacatgtgttctcatcccaactggctggcatccccgggcagctatgggtaggccagactgacgcgattgccaaagtggcagatgcagcagttgtttcagatggagccgcttcgattcagacaatcgtcatgcctgggagccacgctgaatcaacgcttggagccatcgacctggattcgatggcggctttcgtgtcggacaacgccaactga

SEQ ID NO: 532000 - DNA, 303 bp, Stenotrophomonas maltophilia
atggaactcccgtccgacttcaagtggcgccaggccgccagctatgcacagatgccggacatgatttgcctggaagggcagtgtgtcgcccggatcagccagagggtggacgatctcaagtggtatgtagtgcttgaccggcacctagacgacaagcagcacaagacacggccgtgcgagaaccagtggacgggtagggctgggatggagctgtgggtgatccggcatcaggacaggctgcgacaagaggtcgcagatatccttgcggctaaggaggcggggaagattcgccccgccgagtga

SEQ ID NO: 532001 - DNA, 858 bp, Stenotrophomonas maltophilia
gtggagtttctgcgaaaggatgcgtatgtagttgcggtcgcaccagctgtggtttttcttggtgtctacgcgtatgagttgggccgctactactacctgaggatcccggcatccttcattgacgtttcggtcaaccgtctgctggcaggtggcgctctgattggcactttgaccgccattctcattggcctggctgcctgggcatggaagattgccggcaaggttgatttcttcggcaagtttcttgctgccgtgttcgtctcgatgatctacttcactcttcccttcgccctttggatgtctcgcgcgccacagggagctgaatggcaggagcttcttagtatcgttacatcggtgggaactggcgcgatcgcaatcatccaagcggcactcacgtggtactggcgtcgggaagaacgcgcaaaattgggggaaccgccagccactcccgcctctccagccccacattcgggcttgttcaaatctgtgttggttaaggggctactagttgggcttcttctagtgtggacactggcagtcttcgctgggctgggattcaccgttgagcgtcattcgccgtccagacaatgcacgggagactcatttgttgcagacgttcgtggcgacacccttgttctcaagaagattgctggaccttctggtgaagtgtcgtcaagcactcgctttgttgcggtcgagggagctgaactgttcgcctgttctccggcactagagggctcgcccgggctgacgaatcttatgcttgtctctccccatagagaggagaaagagccacgctcgttccacgacatgctcgctgcgcccgccaaagcgctgatcaaagtattcaaaccctag

SEQ ID NO: 532002 - DNA, 246 bp, Stenotrophomonas maltophilia
atgggcgcagctgagaagctcgcagggccgccgaccatcggagcggtgatctttgaagggatcaccgtcaccgacggtcaaggccgtccggcccagctggccgttatcgatagccaaggccggattgtcgcgtcagggccagagatcgcgaaagcggcgtggtccgcatcgatcgaagcgtatcgtaaccacctcaaaggaaacggccacctccgcgcacttcgcgctccaatgctcgatgactag

SEQ ID NO: 532003 - DNA, 312 bp, Stenotrophomonas maltophilia
atgacccaggaacatatcagccaccccgaagggttgccgaactgcgccgccggccaccgcgcgcgccacatccgcgacaagcgctgtgccgctgccggcggagggcacttggttgagtgcgcctgcaggtcgaccagcaagaaggcggatccagatgcagcgctggcagagtggcggcagatcaacaggccagcgcgcagcccgcgcacagtgccgaaggcgcccggcaacgtcgtccagttcaagctgggattgggcgaacaatcgtcgcagcaacagcgcgcggcaggaggtcgccatgggcgcagctga

SEQ ID NO: 532004 - DNA, 585 bp, Stenotrophomonas maltophilia
atgaccgcagcattgcccgtctccccggccaccgttgtcgaggccaccaaagcgtcgtcgcccgtcgctgcggtcgtcgctgccatgcggcgtgtcgatcccgccggcggcgccgttgccgccaaccaggtgcgagcgtgggccgacaccctgatgaccgcgctctacaccgcgcagcctgtccgctgggagtaccggcgcaaggaagacttcgcggcaggctgttgggtccaggccgacgcagggcacgtgtatgccgctcaccagcgtggactcgttgtccgcgccctgttcgagacccctcgggtaatccagcccgagaaggtccacgacttccagcggcgggtgtgcacgcgctgcggcataagcgaggactgggcagggccggactgcttcccacctgacaacaaacccgacccgcgcaccctgctccccttcgatcccagctggctcatccagccactgcagtggctcatcgatgcgccggcccacctcagcacctacgaccgccgccaccgcgcggcgcaagccgccttcctgctggaaaagctcgaagcccacatccaggagtgcaacaagccatga

SEQ ID NO: 532005 - DNA, 225 bp, Stenotrophomonas maltophilia
gtgactgaccagctgctcaccgctgcacctgtccgcaacgtcaccagcgcgaaattcgtcgcttctcctggggccaccgtcctgattggacggttccagtgcctcctgtcctgcggccacatcgtcattcgccagggtgagcacgtccgcggcaccaggttctctctgcgcgctccccacaccgctccctgcaaccagtgcccgaaggaaatcaccaatggctga

SEQ ID NO: 532006 - DNA, 651 bp, Stenotrophomonas maltophilia
atgaatagggaaatcttccaaggacattacgattctcaggctcaatcagaacagcctgtcgaactgagcgcgtacttcaaccagcgctacttcaaccttttcaaattttctcaacaaccctaccaccgtctcccttcggccaagggggtcaagattctcaatctccgtgtagggctcgatgtacgagttccactcgttgattcgtgcgcggagcaagctcaggctcatgagcagaacctcgtaacgctgcgagggctctaccgcatgcgcaagtggaggaagccgaattgcttcccattgctccggcataaaccaagcaccgtcctgccgcctcatttcaagatgattcagtgccgttccgactcggcgctccatgtctctaaggacaagctcgaactcaaccagtgcgatgcgggcgcgcactctttccttacgtcgcgtctcgagaaatgggagcaagaccgcaaagaaggtcacgagcgcagccacccaagtacctaccgcgccgactgcatcccaccagaccacacagtcatcaacgccgagcctgtggcatctaaaaatgccgtcccatctactcattccatttcatccctgtggcccggccggcattctgccacgactgcatttcggtggagggcctgtgactga

SEQ ID NO: 532007 - DNA, 669 bp, Stenotrophomonas maltophilia
gtgcgcgcagccgtagccgccctctccgcccagccctccccgggtggtcagggggatgcgctgaccattctcgccaagcacatgcgcagaatagcggcagcgcacaacgtccccgatctggccgccgacgcgaagatcgtggaaagcggctatgagctggatttctggatggatgcggcctactgcgcgttactagaagccctcgccgcccgccagccggtggggagtgtgccgcaaggctgcgatgcatgcgatcgaactggcatctgccagaacgatgacggccgcaacgtcttctgcccgaactgcgacttgggcagggcttgcgctggcgatacccgccagccgctggggcagatcagcgacgccgaaatcgacgcgcgcctcaacgccctgtaccgcgagatggtggacagcggccagcacaacggaggcatgtcgggcgttgcatgggcccgggccgtctatcgcatggtagcgagccagcccgcgcaggccgtggacctggggcagttccgtacccaggttgccgagttgctgtgcagggagttcgatctggaagtcgcagatccggaagaccaccgacacgacgacggctcgggcgaagccaaccagatcgccagcaacatcgcagccctgatcgacggcaaggcggtgggcgatgaatag

SEQ ID NO: 532008 - DNA, 723 bp, Stenotrophomonas maltophilia
gtgacgcgaccgctgagcgtgttgctggtggatgacgtagcgctggcgcgtgagcgcctgcgccggttgctggcggggatgccgcaggtcagggtcgatgcggaagcggcaacgctggcgcaggcgcgcgatcatctgcaggggcgacgtttcgacctgctgctgctggacctaggcctgcccgacggccatggatgggcgttgccactgcagcagccggcgctggcggcgcacaccattttcgtgaccgcgctgcctcaccacgcgctgcgtgcctttgaactgggcgtggccgactacctgctcaagccggtggcggcaccgcggctacaggaggcgatcgaacgggtgcggcgcttggccggcctcgccccggccgcgggcggcagtacgcgggtgctggcagtacccgacgccggcggcgtccgctatgtgccgctggcgcagatcgactatatcgacatggccggtcactacgcctgcgtgcatgtggggcagcagttgcatctgctgcgtgagccgctggcacggttggccgagcggctgggagatggggaactgctgcgggtgcatcgttcggtgctggtgaacccgctgcgggtgcggtccctgatcgagcggcacaacggcgatgcgctgcttgaactggccgaaggcgtgcaggtgccggtcagccgcagctaccggccggcgctggaggaggcgctggccgatcggtcctga

SEQ ID NO: 532009 - DNA, 1101 bp, Stenotrophomonas maltophilia
atgcgggcatctagcatggtgcccgttttccgttcgaatccctgcatgcccgcttcgcccaccctgctgccgcctgcgtcggttgcaccgctttcgttgccgcgcccgcattgggtgatgctggcattgtgggcgctgttgatcgccaccgctgtgccggcagtgcacctgacccgacagcctggtggcctggtgccggcggcgttgttcatccttggcgccgaactgccctggatgctggcaacgccaccgctgtgggcggcgtgccggcgctggccactgtcggcacgcagccacctggtcggatggttgttgctgggcctgctgctgatcccgctgctgacggccgttggatggaccttgggccacctgctgctgcagctgtggcaggaacggccatggccggcaccgccgcaggcgatgcgagcgatcggcaccacggcgctgttcgcactgccgaccttcatcgcggtggcaggcgtcggccatggcctggccggcgcgcagcggctgaaggcgcagacggacgcgttgcagcatgcccgtgaagtcgccctgcggcagcaccttcagcaccatttcctgttcaatgcactcaatgccatcggcggattggcgttgcagaggccgcatctggcggacgcggcgctggcgcagctgtcatcgctgctgcgggacacgctgcagtgcccggcgcagcgtgccctggccgacgagctgggggccgcgcaggattacgtcgccctgcagtcactgctgcgcgacgaggcgctgcaccttcgcctgcacgccagcgcccaggcactggcgtggcaggtgccgggccttctgctgcagccgttgatcgagaacgcggtactgcatagcggctggcagccgggtgatgaaccgctgtggatcgagctgcgtgcggaggtggacggggggctgctcgaggtgtcgttgttcaatgcctgcgtgcgacccagcagcggcgatggcctgggcaccggccaggcggcattgaagcggcggttggcgatgatcggggggcgcttgcaggctggcagcgagggcggtggttaccgcgcgcggctgatcctgccgcgggtggccacgtga

SEQ ID NO: 532010 - DNA, 393 bp, Stenotrophomonas maltophilia
atgtcctggagtccgcccgacaccacatcgagtccggcaccgcctaagccgtacacgctcaggatattcaagagtttcgtgaccaaagccgtcggatcgacggtcggcccgtcgccgcgcatcatggagcactatgactcactatctgatgactatctcgaccagcccatgacggccgacaacgtcagcgacttcgtgcggcgagagaacaatgcgttgttcgcttcgaagaagccgatgacaaagatggacaaggtcgcaattgcgttcaccccattcagagccgttgccgcgcatttcgtggcgcagaacgcggccattggcaagcaggggttcttcgcacccggtgactaccagcatgaagccattatcggtctcctgtcggatcattga

SEQ ID NO: 532011 - DNA, 486 bp, Stenotrophomonas maltophilia
atggtcaagcaatgcgtggagcgcggccagatcgtcgctgcggatccagactcgaacgacttcttccacatcgtcgggaacgaagtcgtgctgtttccccatgtggacagttgcgcggccgtaatggtgaaaaccacggcaaatggctactacctgtaccactcactgttctgcgaagacgtgggcactccgggccagacggtggccggggaggtcgtcaatgccatgcttgccatccatcctgttgcggtcccaatcgagcgtaccgtggtcatcgcatcggatgcatggaaaaagcaaccggagctgcccgttgccttggcaccctgccatgtcaattactgctccaaggccatcgacatcgagctgaacaccggaacgacacaactccgtatcagggagtacagcggcgggcctcccaacgcatggggagcctggcttccgttcgttacgttcacgggcgcgacggtccacgacggcacctag

SEQ ID NO: 532012 - DNA, 333 bp, Stenotrophomonas maltophilia
atgatcgaccaccaagcggaaactctccgacctatgatcgggaaggatgtgacactggggatggaagatggcatggctacgatcagtaccgacgatggctgggagctgcatgtctacaactcgttccgcctccatagcgatggcaatgtggagagccctccgccctcaacgctgagtttggtgctggaggactgccggttcgatcacgagacaatggttgcgcgattttctagaggggtcacactcacagtcgacttaagtgacgacggcttctctggcccagaggcgatgcagttgaatagtccagatggaaccatcgtgatctggaactaa

SEQ ID NO: 532013 - DNA, 1011 bp, Stenotrophomonas maltophilia
atggaaaagcttgagggaactggccgccgagcttcccccggtctttggggcttagctaagcgctttggtaaacgaggcctcatgggtgcctggctctgttgcgtactgctggtgaatttggcgcaggcgccatcagcaaacgcggagacggtcacctacgtccataccgatgcgcttggttcggtggttgctgagaccgacgccaatggcaacgtgatcaagcgccatgattacgaaccctatggggccgttgtcggcgggcaggttacggatggtcctggatatacagggcatgtgagcgatactgccactgggctgagctacatgcagcagcgctactacgatcctcagctgggactctttctctctgtagatcccgtctcaccaaacaacagaccaggctccgccttcaaccgctatcgttacgctgcgggcaatccctataggttcgtcgatcctgatggtcgacaggaacgggcggcggaaagacatgccgactcggtggcgaacactccctcggcatatgatacgttcggccccgcagcacttgcggtaaccacagcgattgtgcgtgcgacgccagttgttgggcctgctgttgcatcggcaatgtctggctcaattaattcggcgcaaccactggccctgccagcaccagcacctgcagcgccctctgcgccaactcctgccgctgccccgacgaaaccttccggcccgagctacgtcgtctcagcgaacgggacagcatttccggtacccgcaggggcgagcgggccaactccggtcatcaaccctgcaggaaaacagaccggcgtcgcattcactggtggtgccggaggcagtaacgggcaagtggccaccatgcggatgatggatccaactcctcccaggggaaacagccctggatatccagctggctatatcaagtacgagaatgctggaaagcaaggtgtagatccgctctccgggaaaacgctacctaattcgaagtctcacttcccagtcagatag

SEQ ID NO: 532014 - DNA, 999 bp, Stenotrophomonas maltophilia
atgggtatcgaaactgacaagcggattgaaatcgctctgctgatctatcccgattgccagttggcggcgatccatggcctgaccgatctgttccggatcgcgaatgaatgggccacgtatccgcacgaagatgaccggcagtgtttcatccgggtgacacactggcagttgaacccggcatcggggcgcatggaatgctgctgggacagtgatcccgtcgatgtgaatgctcccgcattcgtgatctcgccgcccagcgttgcgatgcccgaacggatgtccgcgatgccacgccaggcacagtggctcaaggagctccattcgcttggcgcgatcgtgtgctcggtctgcgcaggcgccttcgtgctcgcacaggccggcctgcttgcgcgacgtcgagtcaccacgcattgggcattcgcggagttgcttgccagcacgtactccgacgtgcaggtgacgaccgagaacgttgtcatcgatgacggtgacgtcattacgtccggcgcgatccttgcctggaatgatctcggtctgctgatcgtcgatcgcatgatgggctccagtgtgatgctggcaacggcgcgcttcatgctcagcgatgggatccggcaggaccagcggccactgcagggattcctgccaaagttcgatcatgatgatgcggcggtgctggccgtccagcgcttcatcctttcgcagccgggacagcgccacaccgtgatcgccttggccgagcgtgcgcatctcaccgaaagaaccttcatccgccgcttccagaaggccaccggattcaatccggccgactatatccgccaggtcaggatggccaaggcgagggacgcgctacagctcggggatcttccggttgcccggatagccgcgtcactgggatacgacgacgcgggatccttccgcaaggcgttccagggcatcgttggcatgtccccttcagcgtatcgggatcacttccgggcccggcggggtgcgcagggctga

SEQ ID NO: 532015 - DNA, 129 bp, Stenotrophomonas maltophilia
atggcgggtatcggctgctggaccttcgcggacccgcttacctcaatccagtccacaatccactaccagatccttgcgcgtcagaagatgcagccggcggtgaaggccaacatccagggcggggcctga

SEQ ID NO: 532016 - DNA, 639 bp, Stenotrophomonas maltophilia
atggatccggcattccgcttgaagtcctggctactgcccactcgacgcatccaggaggccgccatttggtggatgtgtcgtgaacttcatctttttcccgctgcaccgttgagcgtcattgcctgcttggcgtctgctgaggatgacgggcgcatcctccagaagcagccgggatcgggtggtgccggcgtgggtgggaaagtgctgctgtttgggcttgctgcaatgctcgcgtgtcctgctctggctcagcaacgtgatgcgggggccgacctggtggtcatcgggaccagattgattgccgaatacaacagaaaggaccatcgctcggatgaatcgagcggtgagttcattgaggatgtggtgattcctgctgtccacagcgttgttgatcggggcgcgggcaggctctccggtgctcaattggatgcgttggctgactttttctgggtggccgacggtctggcgagtgaggaggtgagcgagatcgcagcggaggtctattcggtgcagaagtcaggcatatgcatgtcgcttgggaaggttgcgaaggcgaagcgcgcgattgtcatcgagcgtatcgtcagcggagtgaatgcctctggcgccaaagcaacaccaggaactgtgtgtcggtag

SEQ ID NO: 532017 - DNA, 528 bp, Stenotrophomonas maltophilia
atggcaaccaagaaagctgcgaagaagaagcccgccgccaagaaagcggtgaagaaggtcgcgaagaaggccgctgccaagaaggcagtgaagaaggtcgcgaagaaggcgaccgccaagaaggcagtgaagaaggctgcgaagaaggtcgccaagaagaccactgcgaagaaggcagtgaagaaggcggcgaagaaggtagccaagaagtccactgccaagaaggctgtcaagaagaccgcgaagaaggccgtcaagaaggtagccaagaaggccaccaagaagactgccaagaaggccactgcccgcaagccggccaagaaggtcgccaagaaggcagtaaagaagactgcaaagaaggcggtgaagaagaccgccaagaaggcagtcaagaagaccgcgaagaaggcgaccaagaaggctgccccgaagaaggcagcgaagaaggttgccaagcgcaagccggccgcccgcaagaagaaggccgctccggtcgctctgccggcaactccggcgccgctgatctaa

SEQ ID NO: 532018 - DNA, 477 bp, Stenotrophomonas maltophilia
atgacccgccttcgcaccatcgcgccgttcgtcaccgttgtgctgctggccaccggctgcagcaccctgccagcgcgccgcgacccgttgtgcgcgcaccttctagccttcgccaacagcgcctcgatcggcacgcgcccggcgattgaactggtcagcgactggagccgcttcagcacgcactgcacgcatggcggcccccctgcgggcaggcagttctgcgattggctgctgcccaatacgcccaccgagttcgccacgatcaacatccagcgcaccctggcctgcctgtcccccgggacgaactacgccggctcggaacggctgttcccggaatacgtgaccgggaaggtgcaatccctggatgtgcgcggactcgacacggacgtagtgatcaccgtcgaatacgccgtcggcatcgagggtgaacgaccgcgcatgaaggtccaggccgaacgcctgtcgccgcaggactag

SEQ ID NO: 532019 - DNA, 207 bp, Stenotrophomonas maltophilia
atgtacctgaagggacaaccgctggatatgcctgcgcagcagctgccactgccgcgtcgcccggcggtgcgcctgtcgacggccgacgacacctattaccaggacatggcgcgtgtgctgctggctgtcagccagcgcggcctgcgcgtggatgctctcggccgcccgtggcggcactggcaagacggcttgatggaagacggttga

SEQ ID NO: 532020 - DNA, 732 bp, Stenotrophomonas maltophilia
atgattactgaaattcaggtgaatcctactggcagtggcccgcttgaaactgaggttggcgaaattgtgaatctcagggttcagcattgcgtaaagaacgtattctggcgggagggggatcgggaggggatggcagccaccggtgcattcgcagcggcgctaggccttagtggaccagcagcaggcatggctatgatgtctgcggaggaaatggaagagccagttaccaaggttgagttcagacttggtgaaatggttgtggaaggacttctctggaactggccctttaatgagggtgacattgttcgagttgtaggaacacggaacgacgaaggaagattctttgctatctcagttcttgatgaggaaagaaggctgattgtttcctatccgcatgttagtgctggtacgttggcgcattggatttcagttctcaaatattctcttgtggtttcagtttcgtggtgggggctggtaatagctttctatgcatggaggttttctgcgccgtttcatctgttggttcagtcatatttggtgggggttcttgttttttgtgtaattgggtatcgagttggacgtagatttgtcagttacgccaagttagcggattcagttttttttacgcttgggtggaggggggctagggggataaatcttcgtaaagtgaccaagaggaagcgtcagtcgggtgatcatgttgctctgggtgatacctatttcagatattga

SEQ ID NO: 532021 - DNA, 1176 bp, Stenotrophomonas maltophilia
atggctgccaaacgccgtcagtatgagttttcagtttgcctgctccgcaagttggaggtggcgcagaaggaggctgcgccctccaccgccagtgcccgcatccttcgcgatagtggcgtcgatcgcttcgtcactaccgcaggtgcctaccttctgaatcgattcccgatgaagggcatccaggacaccgccggcaatgcgatggtccggttcgtgcttctgacgcgggcgctgatggagcgcgatgaggccatcagcctggtggctgaagaactgagcagtggccagcagggcaagcgctacttcctggagcgtatccagttctacagaaccaagggcagcgcgctgccgatgcagttcgcgcttcgggacctggagctgcatcacggcgcgctggcgatgcgcaagcgttggcaggctgcggcagaaagcagccgcagcgtagtgcgcctgaactcgctgaccggcgtgctggagatggtgaacttcatccacctggccacgaaggtggacaagcagacgcgagactacgcgacgttattggcttctgcaatgtcgcttgtggctgtgtatgccggtgtacacgaggcggtggcgaaggagttttttggtgtgggtagcgccagtgccatacggatgaagattgccgggagcgtgatggcgggggcgggtagttttattggggcgtactacagcttggacgaagctgatggaactgtgaggaaaggcaactacgttcatttcacagcgctcttggtcaagggcggggcggcaggagcagtcgggtctgctcattttctgacggcgcttgcctattcttcgccggtgatcgaacggactgtcgggagaaatgcactaactttaggcctaagagggctgcatgctggacttgaagttgccgcaggaagggaaggcggacatatagtcgcatcgcaagcaatgaaacgtgtcggcgtgtggatcttgcgattgagtggctgggaggtggccttgactctgctggctattgaggtactgatctgggcgatcggcccaaacgagctggagaaatggtgtgcgtccaacgcctttgggaaaggggctgagaagaaggtaggaagttcttatgcaacagcgcgggagcagcagctggcatttgagaaggctctcggtgtcgtgtctgtgagggtgcaatga

SEQ ID NO: 532022 - DNA, 2919 bp, Stenotrophomonas maltophilia
atgacgcgcgatagcaaagataggtacgactccagcgggcccttcacgggtgaaagcaacgtcgggatccgcagcgcgggcagtccagacatcgtcgatcttccggcggttgccgccacgctgccggacgagacagagaaatcagcctgcgacgtctgccgctccactgggctggccatcctgccggtgcgctacacggtggtacctgccagttgcaacgtgagccttggtggcctgtcgcccgcagtcgccagcgatactgatgtcagtgcggcgggatacacctacgcgctcagaacgttgcgccagggtctgctgtacctgtactacgagcagggtccctacggtccggagtactgggagtgctacgccatcgccgaaaacggcaccctgtggcggcaacccaccgcctacagtgcgcgcgcgatcgcaggcggtggcctgcccagctgtggccgcagtggccacgatccgatgcgcacggagttcatcaccatccagcgcccgcatgtatccgggacggtctggctggcctactcccaacacccctggacgccagcgacgctggatcgctatggagctgactcggccctgcgcgctgagcggatgcagccgatcgagccagccagatggatcacgtcggcgagagcagaaggcgatcaagcgccattgaaggatgccgcccggctggcctcgatcatggaatatcgatggctggatagcccttcaggcgatccgccagaccttccgtacagcagcgcactcccgggtgcctccaattcggacggagcgcttcgcaaggcgcggctgcacgcgcatggcacgcgttacccctggtcgcggcgggattaccctcgcagcgacggtgtcgacccgcgccagcagcgctttgaacgcctgaagcaacacagcagcaacggccgcatcggcaatgatcgccaggagtacccgcccatgctgctgggcctgtgggatgcggttggcgtcgtgcacgagctcagtggttactgcaatgacctggtcgcctgcatcaaccagttcaagagcgagcgcgaactggaagtcagcgctgttgaccagatcgaacagatctcgcgcctgctggagctcaacggtgcggtgatggcagggaactacgcagcacagaccgtccgcgaggtggagcggcagcgccgcctcggcaatccctcgcttccctcatgggaccccaaggtaaagctttccgaggaggagaagcgggaactcgcgcgggagtatgagcgccagtttctgccgctctatctgaaggacgcccaggacgcgtggaaaaacaagtactggccgctgattgacgagccccgtttcaccgcgttcaagaggaacatggacgcgatgacgcaacaggtactcgaccggctgggacccaagatgcgtgtgctggttgcgtggctccgccatgatctcctgctcgcaacgctggaggactttgatggtcagtctgcggcgcatggagtgtggtttgaggagatcatcgccgacgccatcgcggtgcttggcatgcacgagatcggccgaacgctgttgactgaactggctggcgatctggctgtgaccggaagatcgtctttgctgtggcgagtcattgcacagaaccaggacgctgcccggctggagctgcagcagacgctcaaggcggctgaggctggggccaacaccgtgctgtccgctgcaggtgcgagctgggcggcctttgtgtccgggacggcgcatctgaagaccttcatctccaactatcgcaagattgaggctgctcaaaaggaggcagtgccatccaccggcagtgcccgcatcctccgcgacagtggtattgatcgcttcgtcaccaccaccggcgcgttccttctgaatcgattcccgatgaagggcatccaggacaccgccggcaatgccatggtccggttcgtgcttctgacacgggcgttgatggagcgcgatgaggccatcagcctggtggccgaagaactgagcagcggccagcagggcaagcgctacttcctggagcgcatccagttctatcgcaagaaggggagtgcactgccgatgcagttcgcgcttcgagatctggagctgcaccatggcgcgctggcgatgcgcaagcgttggcaggcagcagaaagcagccgcaatgtcgtccgtttgaattcccttacgggtgtattggagatggtgaatttcatccatctggcaaccaaggtcgataaggacacgcgcgactatgcgacgttactggcgtccggcatgtcgcttttggctgtgtatgccagtgtgcatgaaacggtagccaaggacttctttggggcgggcagtgtcagtgccattcggatgaaggtagccggcagtgtgcttgcgggggcaggtagctttattgggttctattacagctatacaggcgcaaacgaagctcgccagcagcaaaatctcgatcttgctgtacttttgggaattaaagcatttgttacctcggtaactggcggggcacagtttctgaccgctctcgcctactcttctccggtcatcgagcgccgtctggggcgcaattcattgactttgggtctcagagggatgaaagcagggcttgaagcggcagcggcgacagaaggggggactgtagttgcgtcgcaggcaatgaagcgacttggtgtgtggattctgcgattgggtggctggcaagttgcattggctcttcttgtcattgaagtcttgatatgggtcatcagtccggacgatctggaaaagtggtgtatgaacaatgtattcggagcaaatgcgggccatggaaaaggtgagcgaacatttggtggcgagccctattcaacaccgcgagatcaaaagcaggcgtttgacaaggctatcggctcggttacgttgagggtgcgatga

SEQ ID NO: 532023 - DNA, 324 bp, Stenotrophomonas maltophilia
gtgaccccgcgccaggccgccgagcatgcctttgcgcgcctgcgtacctgggataccacccacaacaacggcgtgctggtctacctgctgctggccgaccacgcgatcgagatcgtcgccgaccgtggcctgcagggccgggtcagccaggcgcagtggcagcgggtctgcacccacctgcgcgaggggctgcgcgggccgaacccggtcgaggcgctgcgtggggccatcgaagaggtctcgaccctggtggaggggcactttccggcctcgatgcggtcagacgatgacggcctgcccaacaccccacagctccttggttga

SEQ ID NO: 532024 - DNA, 330 bp, Stenotrophomonas maltophilia
atggctcgtctgcataccgtccctggtcgcctgaagccagttcctgcacggctgaagagcgtcacaccaggtagttggcgtggcccggataagagcagcacccaacgaggctatggctacaaatggcagaagtaccgggagtgcttcctgcaggcgaacccactctgtgtcatgtgtcaaagcgcggacgttaccaccgccgcctctgtggtggaccacgtcgttccgcaccgtggcgaccatcgattgttctgggatccgaagaatcaccaatcgctatgcaagcgctgtcacgacggtgctaagcagcggatggagcgcaagccctga

SEQ ID NO: 532025 - DNA, 291 bp, Stenotrophomonas maltophilia
atgcgccgacataccgctgctttgatcctggttgcggcgctgccgctgtgtggattcggcagctgcagcaaggtcgcgaagccggacttgcccaaggtggtttacgtcacggtcgataagccggtggcgcccccagcagcgttgacggcgctgtgccccattgctagggctcaggaccggaccgtcgagcaggtcgtctccgcctacaacgccaacatcctgagcctgcagctgtgcaacaagcagctgggcgagatccgggagttgggcgttgaccaggtgaagcgatga

SEQ ID NO: 532026 - DNA, 429 bp, Stenotrophomonas maltophilia
atgctggacccactacgcccatacgcagacctgctaaagctgctggcggtactggcgctggctggcggcctgttcgtaaccggctgccagcgcggagaagatcgccaatccgccaaggaccagaccaccatcgcgaaggccgacaaggcgcgcgctgttgctgaggcagatgctgccgagaacctgcgagcggccaatgcctgcggccaactgctgcaggacgtgaaccgccaaacccaagcgtcgatcgatgcctctgtccggcagaaggcggcagccgatgaggccgcgcgccgggcggaagccgcggcagcagagagtaagcggcgggccgataacgcggagcatgccctgcaggcagccaagagcaagccggcatgccggtctcaactggagatggccctatgcgccgacataccgctgctttga

SEQ ID NO: 532027 - DNA, 225 bp, Stenotrophomonas maltophilia
atgaacgacaaatggaatccgcggctgtggctgcggaactggctgagcaaaccttcaaactcagagttggccgaagggtcggccgccgaagcggccgccgagcaaatgctcaatggacaggcgccgaacgggaacccaattggagactgcattggatactcgtttaccttggggcctgacgcaaaggtcagtggtctggatcgtgttctgcggcagcaaggatag

SEQ ID NO: 532028 - DNA, 696 bp, Stenotrophomonas maltophilia
atggacgccatcgagaagcgggcgctggagctgtttgaggcatcccgtgggctctacaacgcaaccattggcgatcccgcggtgaccatccgctgccagtcaggggccgcgcgggatgctgtcgccgcggccggtgagcggcttcggctcgcactgctcgatcagcgccccgcgctcatccctgccgacgaccagcaggtcgttacgtcttccgcacctggggcacatgaagtgcagcccgaagctgtcgatgttgggctcgacctggccgaacccggcgaacgtctcgcggcagcggatgcactggagcatgaccccggcatacgccccgaaggtgacggtcaggctacagccgaccatgttgcgcatgacctcaaaatggtcgaacgggctcgggcgctgctggccgaagaactgcgcgccaggtatcccgacgacatcgcaagtaggcaggtgatacggcagctgctggccgacgagctggatctgatcaatgctcgtgtggcagtcaaggtgctgacgaccgccctcacgcctcccgagggatgtgtccccgagcgcagtgttctggtcgctgcaacgcacctccgcaggcttgccagtgccgcaacgccgatggcgcgctcggcctacatcaaggctgccgagatggtggagatggccgtgatcgccgctcgcccggaggtgccttcgtga

SEQ ID NO: 532029 - DNA, 183 bp, Stenotrophomonas maltophilia
atggaccggggtgtgaccgtcgacgatccggagcggcacatcgtctgggatctcaagaacgaggcccagcagattctggcggaggcattcttgcgggcacagcgttttgtgcatatggcggaaaccgttcaccgagagatgcctgtagcagtgaaggccgcgcagcggccggagggaaagtga

SEQ ID NO: 532030 - DNA, 186 bp, Stenotrophomonas maltophilia
atgaccgaccccgacttcttcgccgccatggccgtcggcattccgcccatcaccccgccagaactgaaggccgacagcagcggcctggtccggggcatcgccgttgagggccgcccggtgaccacgtggatagtccccctgcccaccgcctcggccgagccaaccaccgaacaggagaccgagtaa

SEQ ID NO: 532031 - DNA, 297 bp, Stenotrophomonas maltophilia
atgagcgccgccgccccgagcctccccatcatcgaagtacctgcctgtggcatgcgcttgcgtctgatgaagggtccggccggctggagcgtgtcgggctggcgccgagcgaaaggctcaatggccatggtcgtgttcgtttccgccgactccgcgccgactttcatggagaccgccggccagcaccacgtcatcgccggtcgcacctacatcgcactgccgccagcgagccagaagaagctgcaggcgttcattgcctccactgaaggcgcaagcgctcaaggcggtgttgcatga

SEQ ID NO: 532032 - DNA, 720 bp, Stenotrophomonas maltophilia
atggcaggcgagggcgacgagaagatctacaccgctggggcacatgataggccccctaaaggatgcgtaatgtacgccgcccgaaagatagaggatttccccgcgcaagctggtgttgacctgcttgatagcgtgactactttggtaacgcaggaaatcacaaacgccgcagccaccatcaatttcaccgcctgcgagcctgcggacaagcgtgttgagccgacgttgacggatctggcgcttctacgtgatcgagcccgtgctatgtcgcaggtgatgctaggcgtcgtgtcttcgatggccactttgtcgcctcaagacgcagttgaccctgagtgccgggttgtgctatcgctggattcggttgtccagatgaattttgactaccgcgacactctggagagttcggctgcgaagtgccgggaagttgtcgacctaaatgaatccagcaagaagtgcctggaggcaggaatcatggatgtgatagccgcattggatacagttgctggctcggccagagagctgataaaggcaatagaacggcacgatcagaaggttcgtcggaacgctggtgagtcagcggggacgctggcgagtgctgcggtggccggtggatctgccggcgtcgctatgtttgaggtagtgcgtggccttcgggaccgcaaggttttcagccgtgatagtgctttggcacgtatcagagctacacgagcgcgttaa

SEQ ID NO: 532033 - DNA, 501 bp, Stenotrophomonas maltophilia
atgcagatcttcgtcactgagctcttcgcagagtctgcgaaggaagcagggataaatgacctccaaccactcgttgatgagttccggtggtggaagcagacttgggatcctaaaaagggatctctaggcgcttgggaggggggccctgcctgccgcgaatttgcgagtacttacttcgggaaagatggagctaatcgcactccacttgtcgagggcgtgtcctacgcattgagacacgtgcatttgccgcctatcaatgacgacgaaagcgagcaatggatgcgttaccacgagctgggaaagcgtaagaccagcgactgcttcctcatgtatgcaagtgatcgctactacaagcatgttttgctgtacgttcttcctgagcccgaagctcatgccgttgttgcgatgaagacaaaggaagatcgagaactgatggagtggatggcagaagaggctgctcggtttctcgacggcgatatgtccgcaatacaagtagcgtaa

SEQ ID NO: 532034 - DNA, 792 bp, Stenotrophomonas maltophilia
atgtgcgttccgtcatcatgtgcgtggtcggccagcgccaacgcaagcagcagttcgccgccactccccggatacctggagaacaccaggccggttacccgggcgctcacaaggcacctcgggtgttctgctcagggtgaactactccccgccgtgaactcggcagaatggccgctgctcgtacagcagcttccagcgagcgggcacgtcgtccgccgttccggtcacactgttccggcaacgcttcccagcaccagtgtgggcgctgcattgcactcggcctccccactcgatccagtcgtagtactcggaaggtgtcaggcccagcagggcagacgtgtgcaactccccagccgctattgctgcggcttgctcggcggtcgcgaatgcctctctcgcaccgaacggtgcttcgatgctgaagaggaacatgccccctgcgctcgcaacggtctgcagtgctttcagaatggatggatcggccaaggtctcgctccttcgagcatggatgtacggcagatcctagcgccgatgctgtcatcaggatcatttcttcagaccgccaaggtgaagttggagcccggggccaccggccaccaggtgcaggccgactggccggtggtgccgcacggcgcggacggaccacgccagatgcggccctcccgggccagctcaggaaggcgccgcccgagcatgtggcggtcaaggccggtcaagttcgaaaggtgcaggctgctctggcccgggtgcagaactaccgcagcctcggccctagcgtgctgcacggcttga

SEQ ID NO: 532035 - DNA, 210 bp, Stenotrophomonas maltophilia
atggacttcaccaagtacagcacacgcagcaagttcgccaaggagatcaacaccgactattccgcacatctggccggcataccactggacgcgtgcccgttcgacagggcgctgcatccggagaagcgggaagcatggcagtacggctgggatttggctgacgaagaccactatcgcgaacgcgcccaggccgggaaggacacgcgctga

SEQ ID NO: 532036 - DNA, 165 bp, Stenotrophomonas maltophilia
atgaccgaccccgacttcttcgccgccatggccgtcggcatcccgcccatcacgccgccccagccacccgcagcgcaccgctgcgagtgcgacaccgcaaaccaccacgtgtgcgacgactgcgaggcaatcgcgcacgccctgaagcagcacggagaccgctga

SEQ ID NO: 532037 - DNA, 297 bp, Stenotrophomonas maltophilia
atgagcgccgccgcaccgagcctccccgtcatcgaagtgcctggctgtggcatgcgcttgcgagtgatgaaggatccggccggctggagcgtgtcgggctggcgccgagcgaaaggctcaatggccatggtcgtgttcgtttccgccgactccgcgccgactttcatggagaccgacggccagcaccacgtcatcgccggtcgcacctacatcgcactcccgccagcgagccagaagaagctgcacgagttcatcgcctccaccgatggtgcaagcgcccaaggcggtgctgcatga

SEQ ID NO: 532038 - DNA, 378 bp, Stenotrophomonas maltophilia
atggcaaatccccgtacgccagcggcgaaagcggcagtgtctggcgcggcggcaaagaatccgcaacggcatcgaaatcgcaagacgcccaaggggccgaaatctatcggcgcaccctacaaggggatgaccaaagagcaggtcgccgtgtggaaagaacaggtcgagaacatgccctggcttcacgccgggcaccgcctcctgctccggcaggtgtgcattctcgccgcgcgcatggcaaccgacccggagattggcgtctcggcgatgcacgccctcggctcgttgctatcaaagcttggcgccaccccggtggatgagacgaaagtgaatcatggctcaggcgaagacgacgacccggacgacaagcacttctag

SEQ ID NO: 532039 - DNA, 183 bp, Stenotrophomonas maltophilia
atgcacgcgacagtgactgcgtcggtccgcatgcgctggtggctgcgttgctatctggctgccgtggtgtggactgcccgggcgacgggtttggagccgaactgggagcgggtcgagcggtggatacgccgcggcctggtactgcaaacgacgagggttggtgatggacgctgcacggattga

SEQ ID NO: 532040 - DNA, 705 bp, Stenotrophomonas maltophilia
atggaaatgatcaacgcacgcgaactgctgtccagccggaccgggccacgcaccatgagctttgaaggtggtgccggtggcccctctacccaggagatcgttgctgcattggcgtatgtcccgcatggcctcgggcatgagctgctacaggctttgtggtggcccgagagcggtcagcgccgtcgcgaacagctgcgccaggcagtcgtcggcctggtggcgccggagttcacccgtcagatgcatgcccttgccgatgcccggacggagttcgggattgccaaggccagtatgggctggggcggtggcaccgttacggatgtgcagcgacgcgagctacgccgcgcggagcaggcgctggaagatgcgcgggcggcggcctggccgaacaacacgatggagcagctgggcgtgctggccggagcggtaatcgcggagatggctggcgcatgcgagtgctctcgatgcggtgggaagaaggtcttgcggaatcctgtgcttgccggagccgtggagtgcgaagactgcggcggcactggcttcgagccgctgagtggtcgtaagcgtgctggcgccatcggtgcggactggtccgcctacagccggttctggcgcgtggtctacgaatggatgctggcgaacttccgttcggctgaagcgcgcgctgtaaggcagttcaacaaggcgctgtccaaggtcgcttag

SEQ ID NO: 532041 - DNA, 399 bp, Stenotrophomonas maltophilia
atgctcgtgttcctcatctggctgctgctggtttccgcgctcatccatgccggcttccagccggatcattggcagcagcctgacatcgtgtccggaatcgtgccgtatcccacaggatcagtcatttccttcgcactgatcatcctggcggagatcgttgcaatgggcctgatcgtgcagccatggaggttccgacgcctgtggttgcgaatgcagctcggcatctttccatggctggcctggacggcctactggggcgcgatctccatgcatcaatcacccgtacgcgccgtacatctgctctggttgattgccgccagcgccatcctactgcttgcgcagttcgtgatcgtgccggcctcgctgtggccgcgcctacgccgctggctcgggagctga

SEQ ID NO: 532042 - DNA, 906 bp, Stenotrophomonas maltophilia
atgaacggactctctttgctgttgattcgagtggtactcgcgctggtggtgctggcggcttgtgtggcgccggcggccgcccaggaggttgtcgagtacatccacaccgatgcactgggatcaccggtggcgatcaccgatgccaatggccaggtgatcgagcgcacggtgtatgagccgtatggggcggtggtcaaccggccgttgacggatgggccggggtacacggggcatgtgacggactcggagacgggtctgagttatatgcagcagcggtattacgatccggcgttgggtgcatttctgtcaactgatccgatttcggcgacggagcatctcttctcccggtataactacgccagcagccatccctatcgttacacggatccagatggacgggccgcacaagacgagcttaaagcgacagcgccgattaaagatctggcgccggttaaggtgacagctcaaggcgcatcatctgcaggttctggaagaccggcagctcaacctagcagtgcggcttccgtggtcacattgggcaccgtgttcgttagagctgccccagtggcagttccagcggtatccagtggggttgcggcgacagttgctgctcctcttctcttttttgttgcgcctcatccctgcggcgggcgcagatgcggtgagcttacagaggagtctagacgccacccaaatggttattggccaggtgataggggggccgaggagtggggtaggcgcaacgacgtcggttcaaatgagggaaggagacgttttcatggaatcaagcaggcggacaagggacagggcggcgggaaagggctcgatgactatggaacgaatcctgatacgggggatgtagtaaaccctcagggtgaagttgttgggaatttgggtgacagatga

SEQ ID NO: 532043 - DNA, 924 bp, Stenotrophomonas maltophilia
atgaacggactctctttgctgttgattcgagtggtactcgcgctggtggtgctggcggcctgttcggcaccggcggttgcccaggaggttgtcgagtacatccacaccgatgcactgggatcaccggtggcgatcaccgatgccaatggccaggtgatcgagcgcacggtgtacgagccgtatggcgcggtggtcaaccggccgttgacggatgggccggggtataccgggcatgtgacggactcggagacggggctgagttatatgcagcagcggtattacgatcccgctattggatctttcataagtgcggatccagttgaagctaacgggcatacgtctttcaatttcaatcgctataagtatgcccttggaaatccgtacggccatgtagatcccgacggccgatgtgaaagcgtatccacatgccagatgatgagagatgatctggcagttatcaatggaaaaatggggctggatgagcgccggtctcgccaagaggcaagagcggccggagccgctgccggcgtttcagttttagccgccagtcgtattccggcagcgactgcagctgtcatcggtggtgctaagaacgtatttgtaaatgttgcaagtcgcgttgcgtcgctcactcgatctcaacagcaggcaattaagaaaataaacaacatcgtcgataataacgcaaagccccacgactttgacggggttgctaaagagcttcgcggtattgagaccggatttgatcatgtcaccgagatgcagaattcattgaaggggctgagctctgccgcaaaaagcttgaggggaagtttgaacaatccgagtctttctagagggcagcgtgctaggatccaaagaacgcttgacaaggcggatgagaacatagcgaaaatgaaggagacgcttggtggcggaaaatga

SEQ ID NO: 532044 - DNA, 1116 bp, Stenotrophomonas maltophilia
atgaacatgaaaattcaatatccggaactgaatccgtggcacaaacgccaagccgccctcatccatcatttcacctcgatggagtacctgaagggcctgctgccgcagatcgacagcctgctagccatgaccgaccagatacttgatgagcgctcgcatctggatacggcgggcagagccttggcgggttgggaatcacaagatacggcatcgcatttttcgacgtatgcctatcctgcactgatggaattccgggaatgtgtggttgaagacatagcactgcgctcaatcgagcggtatcgaggagcaggtgaacaccaatgtgctcgcatgctggaggagtacgcctatcagatggcctgggcgacgccggagcaggaaaaactgttccgcgagaccacagaacgagtattcagttatgcgagtgagctttccgggacagtcgcacgccctcctgtcgcgaatgacttctcattctggctgctctggaacaagggtgtgatcgactcacatcgaatcccaaaattccgtgttcgtacagattttgtagtgcgaaccaatcaggttcccccgcgcaccggcatctacgtcgccaaagacgaccccatggcttcacttcagtttgcatggaccggtgggtacggacacctttgcccagccatggcccccaatgatgttggacgagccgtactgcggcagttcggtcgagagcgactgtggggcgatgcagaaggcctgtatcgcttcctcgatgcaaaccggcatctggatccctatggatggtcagacattcaggccgatctggtgaaggtggctccgtcagtgatcgccggttcggccttcgatctgaaggattgcgactggtattttgtcgaacccattgccgatgaattcgaggaaatcgacggcagctacaccggcaccgatcagccggatctccgaccggaccgagtcgccgccggcaagcgggtgcctgtggccggctggtggtacacgcccgcgcaaggtggtcggcgcttcttcaagcaaggcgatgtgttccccgccatcaacagcgactggggtgacgccttctggatctgggcgccagaccagacgccgccggcattgggttga

SEQ ID NO: 532045 - DNA, 2337 bp, Stenotrophomonas maltophilia
atgcttgctcggcgccgacagctgcacgtccgcttcggtactggcgatgcgtaccttggtcttggccgccacgatcatctggttcttgtgcgcacgcgcgctcaccttgccttgcgcggcgtgcaacgcgatgccgcgctcctggttcgggctttcaccgctgggctgcacgccggcggtgtacatcaccagaccgccggccaccgccatcgtcagcgagccctgcgtcatccagttcagtgccacgccgctggccagcgtggtgtgggtgccactgacccagacctggtcggccggggtcaggctcagcacgccggccacgccgctgcccagcagcaccggcgcgctccagcccggtgcctcgccatcgccaccggcgatgctgccggcggcactgccgctgtgggtggcgcgcagcgtctcctgcagctcggtcagggtggtgtccaccggcagctcgttcggctcgccgggcagctgcgcctgctggttggcggccgattcggccagctgctgcagcagctgctggctttcctgcagctggctcaatgcctgcggcgcggccatctgcggcgagccctgctcggtggtcagcagcaggccgcggccggcacgcagcgcgccctgtgcctgggtggacagctccacgccgaaaccccgctcgccttcgcgcacattgtcctggccgcccttcagatgccccagggtcagcgtggtctcgtgctgggtggtggacagctgcgcgcggccctgcccgggcgtgtcgtcgaagcgcagctgctggtagccgccggtgccgccctggctgtcggccagcgcctggctcttgaagccggtgtacaccgcggcgtggtcattgccctcgaaccaggcggcggcgttgccggtggcggtggcgcccccgccgttgatctggttgtgctgtgcgtcctgctggccacggccgttgtagaccgcaccgaccaccaccgggcggtcgatgtcgccttccaggaacgccaccagcacttcctgcccacgccgcggcagcaccacgccgccccagttgtcgccggcccacggggtcatcacccgcacccaggtccaggcgcctccgttggccggggcgttgtcgtcgccgccgggatggaccaggccgctgctggcgttgccgccccgctgccacgggaactgcaccttgatgcgatgatcgcggtcggacagcagcgggtcgccatcgctgaccacgatcgcgctgagcgtgccggtgatggtcggccgcggatgcaggtgcgcgccgtggccgtcctcggtctgtggccggtagttcacttcggccgggatggcgacgaagcggttgtcgtagaacgcggtggacacctcgcccggcgcctggccgtaggccagcccggacagcgcgtccggcagcgccggcacggccacgctggacggacccagggtctgttccagagcgtcgaacacgtcggcatcgaggttgttgcgcgcctggtgcagcaccgacaggcacaggaactgtgcgtcctcgcccacctgcgggtgctgcgacaggccaaagcgcgcgcccggtgccagtgcccgccattggccggcgccatcgatggtatgggcgcgcacgcgcagtgtgtccagatgctgctgcgcgcggcgctggccgcgtgcattgtcctgccagccataggggccgcaggtatcacggtcgacaatgcccaggtcgttgccctgcccggcctcggcgctggcctggcgacgctccagggtgcggtaatcccaagtcgtacgctcgaccttgcccggccgccaacggtgcgcggtggaccactgctgcacgctgtcgctgcgctcgctctcgtcgcggcggtggaagcgcacgcggcccagctccgcggtgtcgttgctgtggtcggccagcaccagggtgtgcgtgccgaagtccgcgccgccgggctcgccggcatgctcgaaccagtaatagatgccttcctcggccagcaggcgctggacgaaggcaaggtcgctttcctggtactgggtggtcaggctgcgccgtgcgtactggctggcgtcacccagcgaccagcgccaggccggtgccagcccgctgtagtcggcgaacaggtcttcgacgatctcgaccacggtcttgtcgtggaagacgtagctgtccacccgctgcgacaggaacgccagccacggctgcaggcgcagccgatagcgcgccaggccgccattgctgcccagccgctcggcggcggtgatgcgaccgtgcaacgggcgcaggctgccgtcggcctgctgcagctgcagcagcgcgccctgcccgatcagcggcgccagtga

SEQ ID NO: 532046 - DNA, 207 bp, Stenotrophomonas maltophilia
atgagccgccgcgtagtgatccttgttggcgcggccatggctgtactggcgcgagaggccgcgtccgtccagaaggtcgagagcgtcacgcaccacatccgtggcgtacaccaagccgacatgcccacttggacgtctcagatacgtgaccccctcccttacggcaagaaggcgcgcagggcgctgcgaggcggccgccatggctga

SEQ ID NO: 532047 - DNA, 1635 bp, Stenotrophomonas maltophilia
atgggcgaccagactgcgcgcttcgccctcgccggtcaccgacaccaccgcttcctgcacgccgggcagacgcgccagcgccgcctccacttcgcccagttcaatgcggaaaccgcgcagtttcacctgccggtccaggcggcccagatagtccaggctgccatcggccaggcgccggacccggtcgccggtgcggtacaggcggtccccgccggcgcgggagaacggatcgggaacaaagcgctcggcgctcagtccagcccgcagataactgcgggccaggccctggccaccgatgtacagctcgccggccacgcccaccggcagcggctgcatgtgcgcatcgagcacgtgcagcgcggtgttgccaatcgggcggccgatcggaatcgcccgctgcgtggacactccgtgcgcaatcgggtggcaggcggcaaaggtggtgctctcggtggggccgtagccgttgatcaggcgcaacgccggggcagcctgctgcacgcgggccacatgggcaaccgagaccacgtccccgccgaccagcaactgctgcaacccggccacgcactgcggatcctcatcaaccagtgcatggaacagcgaggcggtcagccaggccgtgtccacacgctgcccggcaatgatcgcggccagctcgggcgcggtggggaccgcatcggggtacatcacgcaggtgccgccctgcagcagcgccgcccacagctcgaaggtggaggcgtcaaaggacagcggtgcggcatgcaggatgcgtcgcggccgcgacaggtccacgtagtccacgccaaacaacaaccgcacgatggcctgatgcggtgtctggatacccttgggccgtccggtcgagccggaggtgaacagcacgtaggccacctgccgcggatccggggcaggcaacgccaccgacactggtgcagccagcacaccgacctggtccagggtgatcacctccagtcccagcgcctgcaggcgctcgcgctgggccgggctcgccactacccggtgcagaccggcatcctcgatcagctgcgccagccggacatccggatattgcgggtccagtgggacataggccgcaccggccttgagaatgcccagcagggccaccggcagctgcagctcgcgcggcaggcagatgccgatccgatcttcggcgcgcacgccgtgggcatgcaggtgctgggccagcgcctgcgattgcgcatccagcgttgcatagtccagcgagccgtctgcgctggccactgcttcggccgccggcgtgcgccgggcctgggcactgaacaggcacggcagcgactgcgccggcaacggctgcgccgttgcattccaggcttgcaactgctggcgctcgctctcatcgagcagctccatcgcatccagccgacgttgcggcgatgccaccgcctgctccagcaggctgacatagtgctgccacaaccgcgcaatgctcgatgcatcgaacagatcggccgcatattgcagcgtgcccgtcacctgctccccggcatcggtcaacgctgccagcagatcgaattttccggcaggcaggtcgccctccagactgactgcctcgatgccgtcgatatcgaccaatgccatatcggcgtgctgtag

SEQ ID NO: 532048 - DNA, 1038 bp, Stenotrophomonas maltophilia
atggagtacctgaagggcctgctgccgcagatcgacaacctgatggccatgaccgaccagatgctcaatgagcgatcgcatctggatacagctggcagagccttggcgggttggagctcgcagaatacggtctcgcacttcgcgacctacgcctttccggcgctcatagagtttcgtgaaggcatcatcaaggacatagcactgcgctcaatcgagcaatacagtgtcgcaggcgagcaccaatgtgctcgcatgctggaggagtacgcctaccagatggcctgggcgacgccggagcaggaaaagctgttccgtgacaccacagaacgagtattcagttatgcgagtgagctctccggcatagtcgcacgcccccccgtcaagaatgacttctcattctggctgctctggaacaagggcgtgatcgactcacatcgaatcccaaaattccgtgtccgcacagattttgtcgtgcgaaccaatcaggttcctccgcgcactggtatctacgttgccaaagatgaccccatagcttcacttcagtttgcatggactggtgggtacggacacctttgcccagccatggcccccaatgatgttggacgagccgtactgcggcagttcggtcgagagcgactgtggggcgatgcagaaggcctgtatcgcttcctcgatgcaaaccgacacctggatccctatggctggccctacatccaggccgatctggccaagctggcaccgtcaataattgcaggtgtgggcttcgatgatcaggattgcgactggtattttgtcgaacccatcgccgatgaattcgaggaaatcgacggcagctacgccggcaccgatcagccggatctccggccagaccgagtcgcagcaggaaagcgcgtggctgtggccggctggtggtacacgcccgcgcaaggtggccggcgcttcttcaagcaaggcgatgtgttccccgtcatcaacagcgactggggtgacaccttctggatctgggcgccagaccagacgccgcctacgatgggttga

SEQ ID NO: 532049 - DNA, 204 bp, Stenotrophomonas maltophilia
gtgttcctcggcgtcgcgctggcctatgccgtcaccagcgggatctcgtcccgcttcggcgcggccttcctggccgcggcgctcctgtgggccgtcatcgcctacatcgagatccgcgcggcctggccccccttcgccgcggcaatgcagcgtcgccgcgaagagcgacagcgcgctcccctgcctgccgacgacacgcactga

SEQ ID NO: 532050 - DNA, 204 bp, Stenotrophomonas maltophilia
atgaagaaaacgaagagccgggcgccgaggctgaaccctcaagccgcgcctcgcgagcgccgaatggatcacaacaccgtctcccggcccaagcgcgcgaagcccggaatcaccttccgcggtccggtcgagacggtggacgagttcaaggcacgcggcgggaaggtgcagtacctgacggccagctgggagcagcgagcatga

SEQ ID NO: 532051 - DNA, 447 bp, Stenotrophomonas maltophilia
gtgacctggtggcgctgggcggccacagcgctgctcctcacggcagtggtcgccgcacaacgttggtggtcggtgcggcctgtgcccgagccgctcgcgttccacagcatcaccgacaatcgcttttcacagctgcgccgccaagcggtgcagttcgtggaggctcggcctcggcagggcttccagttcgttgaacggcaacgggatgtcgctttccagattcgctgcaacggcgttccggtgctcttgctggagaggcgctcgcaacatctgctgttgtgggcctcactggacgcgaagcggcgggcgctcctccaatggcagttggagccgttggattacctggagcaggtgctggctgacgtgccggagcctgttctgttggatcgggtgctgcagattcttgctagtgatgtgcctgatggagcgcgatgtggcgtgccgtag

SEQ ID NO: 532052 - DNA, 462 bp, Stenotrophomonas maltophilia
gtgggccactatggctgggcctggcatatcgaacatgtgcttccaaaggcgagatatcgtgttgacacattcaagctttccaatctgactgtcgcctgtgttcattgcaatagctggaagggggtgagggtcgataaacacgttgtgggaaggaagctgtcgatcatcgatccttccctcaagggcttcaattactcgcagcacttgcgcttcctgcaaataagcaccgaagatttttcttttgcaaagtacctgccgcactcccctgagggaatcgaaacctacggcaagctctcgttcgaggagctcgagcgcgcgcacgcgatcaacggcctgcatgcaatctccatggggcttcatgatcggctttgccggctgatgcagagcggactgtcagctccggatgggcatgagttggttgatctcctcgctcacctgaagctgtccatctatcggaagtag

SEQ ID NO: 532053 - DNA, 1269 bp, Stenotrophomonas maltophilia
atgggaatggggctaagtaataagcatcctttgaatactctggtcgacgctgttctggagagagtggcgaaatcgaccagccgtgttcatccaggaaaggttacttacatcattggcaataacggaaccggcaagagtcgcgtgctcggagaaattgcccagcgactgcggcccggacagcgagcgcgccggacagtggcttgcattgctaattcactgcacgaccgtttcacccttggcgatcatgatcgcgtcatctatctgggcgctcgtaacgccggcaacgcgatctttcaggcggcaagtgatcgccagctggcgcgactcattctgcaagcaatgcagtatgatcgaaagcgcctatccgatctatgcaatgcaactaatatcgatttctcgttcacggtagaccagaagtcgatcatggaattgcgctcacccaagcgagtcaccagagactccagtcgcctcctcaagcaagcagccagtcgagatctgctggcattcaagacgcttgatatgttggatcggattgcaactggcacgggtcgctttgagtcgctgacaaaggctcagatccccgtgctgttgaaatatcttgagctcagcgttggctttgacgtgctagtgacgctgcgagatggaggtattatgagcttcagcgatctcagtactggtgagcaaaacagagtgctcgtgtttgctaaggtgctcagcgtcatggaggatcgcactgtttttctgatcgacgaaccggaggtaagtctgcacctacactggcagatgaagtttcatgagtcgctgatgaagttgcttgagcgccagaagcgctttcatgcggtgatcgccacgcatgctcctatcgtcattagcgaggcagccaagtgtgatcaggaaaagaaccacaacatggtcgcggtgttgcgtcacaaggtcccgatcggtcagaaggaagcggagcttggccctggtattggtgaaatgaccgtggatatgcacaccttcagtgaggtccaaagccatgatcagttggttctgcgctatttccatacgtcgccttacgaagcgagagagatgagtgtggaaattgctgataaggtgctgggtgtggcggaaaaattggagactccgggtaaagccgtcgcatcgcttcagaagctgttagacgtggtcggaattgaggaggatgcgaagaatcagattcgggcggccataagacttatcaataaaggaattcccgagctcgttggcggggctgtgcagcaatga

SEQ ID NO: 532054 - DNA, 1827 bp, Stenotrophomonas maltophilia
gtgagtgacgcctaccttcagcttcgtgggatcgtgttcaatggtccgaagggacgctcgagtctcgatttcgtctcaggagttaacgtagtctgcggcgcgtccgataccggcaaatcattccttgccgagtcgatcgactacatgctcggcggctcagagcttcgcgaaattccggagcgcgtgtcgtacgaggaaattgagctacgcctatgcgccagcacaggtgagcactggcgccttcggagagcagcatccggtggcaacttcatactagtcgatctggatcagtctaacgatgccgggactgtgctcaagcacgtccatgctcatggcaagaccgacaacctatccggcttcctgcttgagaagataggtttgttgggaaaacgggtcctgaagagcagtgcaaagggcacgacccgaagccttagctttcgcgatcttgcacgacttgtgatcgtgcaggagggcgaaatccagcaacgaggatctccgttctggagcggccagttcacgactaagaccgccgaactggctacagtcaagctgttgcttaccggaatcgatgattctgcggtcatcgcggctgcggaggctggcccggatagtgcaaagcatattgcgctcattgacgagcttcttgccgacgtagccagtgagatcgaggatgcgggagaggggcgcgatgagctcgtagcacagctcggtcggcttgagctctcgatctctggccaacgagactcactggatctggcgcaacgtgagctcaatgagctgctggcacatcgacgtaagctgcttgaagagcgaagcagcatgcaggaccgcttgagcgaaatcggtgaactcctggcccggttccacctacttcgagagcattacagtatcgatatcgatagactagaagcgattcgtgagagcggctcgctattctcgcatgtcgaagctataccgtgcccggtatgcggggcgaacccagaggcgcagcacttcgaggcgacatgcgacggcgacgttgacgcgatcgtcttcgccgcaaactctgaaatagggaagatcgagagacttcttggtgaacttggagcaactgtctcagacatcaagtccgaggagggtagtctaagaagttctatcgttgagaaagatgttgagtaccgaaagctggatgaggcgatccaggaagcggtcgcgccggatttgaagggcaaccaggcctcgttctcggaactggtggagaagcgggccggtgtgcaaaagctcgtcgagatgttctccaggcgcgagaagctggaagagcggaagcgatcattggaggacgatggtgggggcagggaggagctagatcctgtcaaggcgggaatccaagactccgttgcgcatgccttgtctacgaaggtctctactatccttacgtcgtggaatttccccggcgaatgtcatgtttacttcgacaagcagtccacagatttcgtcattgatggcaagccccgcgcgagccgaggcaaaggtcttcgtgctatcacgcatgctgctgtgagcattgcgttgctggagtactgtcaggagaacggtctgtcgcatcccggattcgtggtgctcgattctccgttgctagcgtacttcaagccagaaggggatgatgacgttgcgttaaaaggaacagatctgaaagagcgattctatgattatcttgtaaatcatcacggcaagaatagtcaggttctcataatagagaatcaacatcccccggcacggctggacgggcgcctcgcaattagcgtgtttaccggaaatccggaggaaggccgttttggtctgttgtga

SEQ ID NO: 532055 - DNA, 1098 bp, Stenotrophomonas maltophilia
gtgatctcagaatctgatctaaagaaaatccagccgaagactgccaggaatgtgtcatcttcttcgcatgtgcagagcggagttcccgttcccaagtctgttcgcatcaggcacttcagtcccgatgagtgggaggagttcattgaggaatgggcaagctcacttgactcatcgtacgtaaaagtgcgtcgtttcggcggcgccggcgatctcggcgttgatatatccgggttctgcagcgaacaaggatttcatggtgactgggacaattttcagtgcaagaggtacgaccatccgttgcgccctggggatatatgggtggaaatcggcaaggtcatctactactcgcatcagggacagtatcaaccaccgcgacgttacttcttcgtgtgctctcagggtatcggcaccagcttggagaagctgctggatacgccgggtacgctgaaggaaaagttgctagaaaattggggcaagcattgccgcaatggcatcacgtccacccaggcagtccctctcgctggcgctctgcgagattactttgatgcgtttgatttctcgattttctcctcaaggtcgcttgtcgaaatcatcaaagaacacggcaacaccggattccacgcagtccgcttcggtggcgggctcccatcgcggcctaatccggatcagcccccggacacgcccacagagattgaaagtcgttacatacgacagattctcgatgcttatggcgagcatcttggagcaaacgtggccgacgcacgtgaacttgctccacatgaacacctcaagcgtgattacctgaggcagcgcgaacgcttctaccatgcagagtcattgaagaatttcgccagagataccgttcctgaaggaactttcgatgcacttcaggatgagatctatcacggcgttgtcgatatctgtgaaacgtcatatgtcaacggattcgagcggatgaaggccaccatcgcacaggctgcggctattgctgccacttcgaatccactcgtgtcgacgatcaagacgcaggatcgacaagggatatgccatcagctgacaaatgataatcgcctaaattggttgtctaagcatgaataa

SEQ ID NO: 532056 - DNA, 186 bp, Stenotrophomonas maltophilia
atgaacgactggaagaaaaccagctacggcaccccgaagacttgggccgagatccagcacgagaatagcgaggcggagctggagaaggtcagcgccagccccttctggccgatcgttggcgtgtttgccttgggcctgttgtccgtcggatgcctggtttacgtggtcattgcggtggttcgttga

SEQ ID NO: 532057 - DNA, 2349 bp, Stenotrophomonas maltophilia
atgccgatcgaagtcgaactgcccgatggcagcatcgccgagtttcccgacggcatgtccgacgacgccatcagcagtgtgctgcggaagcagtttggaaccggtggacccgcgatcaccgacctgcccgccgtccaggccctgccgcctgatttctccgaagtcacaagcagcgtctccagtacggccgacggccggcagacagatggctggaatgctggcatcccgcgtgatctggcattcggtgccaggtcagtaatccaaggcatcggcagcctgctgggcgcggtcggtggcgacgctctcggcgcgttggaaacgaaggtcacgggccgacctgtggccagcttccgcgacaacgccgcggcgctcggcgacacgctgggcctgcccaaggcgcagaccagcggcgatcgcgtactcggtgacattggcgaggcactgaccggtaccggcctgacgttgggcggcggcgcggcgcttaccgctgggcgcccggttgcctcactcgcgcccacgttgggtgagagggcggggacgttcctcactgcgcagcctgccttgcaggtcgccagcacgctcggtggctctgcagctgccagcggaacgcgtgaggccggtggcgggccggtcgcgcaggctatcgcgggcatcgccggcggcctcgcaccaggcgtggtcccgaggctgcccacatccggcgtggtgccggcagttgccgccaatgccacgcggcgagcgctgcgtggtggcgatgctgcggcggtgaagcagacgctgggtgacttcgcagaagcgggcgtgcagccgagcatggggcaggccacaggcaatcgtgtgctgcaggctgctgaaacgttcctgggaagcgtgccgggctccgctggcgtgatcgatcgattcgcacagcgacaggctggccagtttggcaaccggatcgatgagattgcctcctcgctggcaccgggtggtcaggctgtcgacccagaaatggctggcctcgccatcaggcagggaattgcggggccgggcggcttcaaggagatgtcgcgcgcagagagcaatgctctctaccaggcgctggacgagctgattccgcaggacacgcgggtcgacatctccaatgtgcaggcagcgctgagggatctgaatcaggctatccccggcgctccttccacgtcgcgtttgttccagaacgctcgcttgggcagcatcgagggcggcctgatcgatgacacccagggcgtgcaggctctgctgacgcagcccggtatgcaggagcaggccgacgcctaccgagcctacctgcaggcacaggcgcgctcgatcgagatggagaatgcacggcgcaagtcgctcggcatgaccgtgatggagccggtgccgactgcggagcagatcgaccagaacgtcatggccacgctgagcaacatgaccgacaaccgtctgccctacgaggccctgcagaagctgcggtcgctggtcgggcgcgagatcgacaacgccaacttcggcagcgacgtaccgcgcagcatgtggcggccggtgtacgccgcactgagccgcgatatggaggaggcggtcaaggctaccggcaacccgaaggctgccgaggcgctgacgaacgcaaatcagtaccactcccgctacgtggaccagctggagaacatcgattccatcatcggtggcaagaacggcgaagaggcgtacctggcggcggttcgaggttccaaggatgggccgagccgcatccggtcgatcatgcaggcgttgcccgaggagcagaagaagatcgtcagctcagccttcatccgtcggatgggccgtgctgtggaagggcagcaggatgccgacggcaatgtgttctccatgaatacgttcctgaccaactggaacaagaccaatgctcaggccagaaaggagctttttggcagctatgggcctgagttcgaacgcaacatgcagaccatcgccaaggccacgtcccgcatcagggaggggtcgaaggtattcgccaacccgtcgggaaccggtgggcgatatgcgctgattgggcaggtcgctaccaccggtagcactgcaggcactctggcggccaccggcaatccagcactggccttcatgaccgtggtcggctcgctggggagctccatcgctgcaaatggtgccgcaagaatcatgaccagcccacggtacgtgaactggcttgcgcggactgctgaaaagccaactggagaactgaatgctcaactccaggttctcaaaggaattgcggaacgatcaggcgatgccgaggtgagtcagcttgctgacgaagtccagatgcaggtcaacgaaccaccgcaatga

SEQ ID NO: 532058 - DNA, 243 bp, Stenotrophomonas maltophilia
atgaatgagctgcgcagcgtgaccgatctgctgtaccggcagaggcaagaagccattgagcggactggcaaggagccgtccgagctggtcattaccagtttccaagagagacagctgcgcacggagatggagccgcatatggccccctacggcccgggcgagacgccagctgacggcatccgcttctgcggcatcccggttcgggtcattcctatgtggggaaaccatggcagcgccgcgtaa

SEQ ID NO: 532059 - DNA, 354 bp, Stenotrophomonas maltophilia
atgagcgagatcgaattgaaggcgtgtccgttctgcggagggagcgccttcatggttcaggagggtacgcatgcccaatgcctgacgccgggatgctgtgtcggtcccgtcagcggactggatagctggaacacccgcgccccgcagtggcagccgattgagtcagcgccgaaggatgggacagccgtactcgccacatcttggtacatgaccggtccacatggcagtcctgtggcctgggccgctgttttcgatcacaagagcgagcgatgggaagccacgtgggatggtgagcctctcaacgatgccacccactggcagccgctgcccgctccgccggaggtggaaggatga

SEQ ID NO: 532060 - DNA, 1173 bp, Stenotrophomonas maltophilia
atgagcactgacaagaccctggccgacgtgcagccaggtggggcggtgaggctggggcagcaggccgagcgggcgcggtttgaggcgtgggcgagcgctaagggtttgaatgcgcatatctacagcgccaatggtatgtactcgcaccctgttactcgcggtgcatggctggcatggcagcacctctccgcccagccctccccgggtggtcagggggatgagatggagcctccgccttacatcctggatgccggtggcatgtgtgcgctggaatcgttcttggttgtcgcggaagagttccgtcatagcgccgaaccctacattgaattcatcaatgagggcggtaatgccgcggaagatgagatctccgaagtgttcgacgggctgctcagcaccgcgaaaggtgccgtggcccgattccgccccctcgcagaccgccagccgtttgaagtcccgtttcccagtgcgctggaggaaacccgcgttcgtgacctgcgagaggcgttcgatgcggcccatcaagccttgaccaaccccatggcatccattccgtccaatgaatggggcggccgcaaggacatgatgtgcccggacgacgaagaggaaaccctcgagttcaaccggtcaggctggagcgcagaggtcgagacgttcgggccgctgggagtgcgccccgaggattccatcgtactgacggcatcggcggtcgcgtcggtccagcgagtgctgatggaattgttgcagtcagcgaccgccgcccgccagccggtgggggagcagcgtgcagcgctgtggattcagttcgccaagaacggaaacatccagttctggaccaaggaccaggatcgcgcactggcagagtcgttcctgcacgcacgtccgctgacggccttctacgcgtcaccgcagcagcccgcgcaggccgtggacctggggcgccagccgactccgatgggttggagcgacacggatttcatcgcgctggggaaccccattcccctccgaatcttccgtaaggccgtgatgcgattcaaggtgctggcagagcttggtgttgacgttgaatccatgcagatgcacttcatcaagtcacctgagaagtacgcggcggacgtgatcgaagccgaccgcctgctggccctgatcgacagccaggcggtgggcaatggttga

SEQ ID NO: 532061 - DNA, 621 bp, Stenotrophomonas maltophilia
atggttgagcgcccgatcctgttcaacggtgccatggtgcgcgccatcctggccggccagaagacgcagacccggcgcgctgtgaagggtgtccgagcggacaactgcatgtcgctgcgcaagccgacgaagaccatggccggtatcgtcacccacgtgttggatgccgctgagcgaggcctgtgcccatttggcaaccctggcgatcggctgtgggtacgggagacgtggaccaacgcctgggaagagggaatggggcaatggtccgatccggagctgtatcactaccgcgcagacggtgtggaaattgctcacgtcgatgacatgcagcactcgccttggatcccgagcatccacatgccgcgccgggcctgccgtctggtgctggaagtaaccgacgtgcgcgtggagcgcctgcaggcgatcagcgctgacgacgcagtggccaagggcatccgtccggatggcgccgacggcttccacgtcgagggcggagccaactacagcaactgtgctatcgagagcttcgcatccctgtggaccagcaccggtggcgactgggacagcaatccgtgggtgtgggtgatcgagttcaagcgcgtggagccgacccatggctga

SEQ ID NO: 532062 - DNA, 573 bp, Stenotrophomonas maltophilia
atgatccctgacggcgttctgtctgcggtccccatctcggccgattttgtggaacccaaccggaaccggatgcgtcccctcgtcgactacgaaatggggggcgctggcctgcaggatcctaccggcgggcttcagtaccagctgtggacgctggaatcggacgggaccgacgtctggatcagcgccgagcatgttgcccgggtgcacctgttcagccggccgggtatcagtagggtaacgctcgggttcgacctgaacatgcgcgtgcacgtcgcgttcgtgcagaacgggtcgagctggctgtggtggtacgacagccaggccggggccatggtcttcactgagtacccggccttctcctatccgacacttgggaccgacgagaagcgtttgaccgagctggccaacagcgacctgatcttcgcctacatcagggccgacaacctgtgcatgcgtgtccagcgagatcggttccaaaccgagtacgtcctgcacagcggggaaaacctcgagctggttgctatcgggatgaacatcgagaacaggttccaatacgagtgcgtgcgggcctga

SEQ ID NO: 532063 - DNA, 957 bp, Stenotrophomonas maltophilia
atgaataattccgttatcgaaatgaccggccaggttggtggcttcttcaagatcgacgctgtgaggctcgatgctgatggagaagagctggggcgccgaaatctggcgccttggcagtcgaacatcattactaacagcggaatggagcagctgaagaccagcgcggcaaacgtccgtgattactgccatgtgggaacgggcagtgctgtgccagcattcaccgacaccgtgctgcagacgtggcgagcgtctaccaacaatctcaacggttcggacgctcgtggactggtcgtgacccccgcgtattactactacgcgcgcaaggtttatcgcttcaatgcagggtcggcctcggggaatctgtcggaggtcggcttggctaccggaggcgcctcatcctcggccctcttttccagggcactgatccgcgacagcggcggcaaccccaccaccattaccgttttgccggacgaagtgctggacgttacctatgaagtgcgtgtctacgtagacacctcggacgtgaccggctctgtggtgttgggcggcgtaacctacgccaccacttgccggcgagcgatgctgggaggctcgaacgcatacacgaaccgcttcctgcaagggcagtggttccagagcaacttctccaacgaggccggaacccacgtctataccggcactcttggcccggtcaccggcaagccttcgggcactgagggaatcaatgtctacaacgccgggggtaccaccgcagcaggcccagctggaagctattacatggacaccacttcgacgtggcagctggatcaagggaatttggccggcggtgtccgttcatacgtccccgggtcgcagttcggcgcgttccagatccagttcgatccggtcgtcccgaaggacgctaccaagcggctgacgctgacgttccgctggtcttgggagaggtacacgccatga

SEQ ID NO: 532064 - DNA, 1188 bp, Stenotrophomonas maltophilia
atgtcggcgcgcatctacgaccggccagacctcgaccagcggcggcgtgaattgcctctgctggtggtgggggacctgccgaaggcgctgccgttcgtgccgtatgaggggcggctgcaaatctacaatgccgtgggcggctgcacggtgcgccagatcgacggcgaccggttgccgcctggtcaccagctgtacgtcgaccaggccacaaagcaagtggtgctgacctggccggcataccaggccggcgctgcaccgatcgccaacccgggtttcgagagcggtccgaccggctgggacaccggcgcgggctgggtgatcgccaccgagaacccgccgaccggctcctgggccgccggctacaacaatcagcagggcgagtcggtcatctccaatactgcccgctacgagtgctattccgggcagcgcaccacggcgaagtgcaaggtgcggcagggcgcgtcggccgagggcaacgccggcgcctcggtcctgctcgagtaccgggaccaggatggccaggtggtcggcagggtcgaaggcaaccgggtcatgtcggccagcaagaaccgggtgtacgactccaacgtggtcggcatcgcgcccgccggtgccgccacgatcaacattgccggcaacgggatccgctaccgcgagaacaagatcctgttcgttgacgacttcgagtgggaccacaccgtcgctgcggtcggtttggatcaccaggaagagtttcgcctgacccttcaggtcagtgattctgctgggcgctcagcgatttggaagggagtgatcggtgatcgcccgatctacttcaccagcaagccctatccgctcgtggcagtggacgacttcctggtaaggggtgacgccgttgcgggaacgatccgaactgcgccggacttcagccagcctgcggagatagtcctggtagccggcgccctggtcggcggcgatttgcgcatgccgttcgtggcgctgaatcagggcttcgagccgttgcgcgtcaacggccaactggtcgccggcgaccttcgcgcgccgctgaaggaaaccgacgtccgggaggacgtgctggttactggctcgcttcaatccggcgaccttaagcagatcctcatccaaaccacctctttgcccgaaaacctccgcgtcactggcgcgcttatccaaggaacgctcgtatga

SEQ ID NO: 532065 - DNA, 315 bp, Stenotrophomonas maltophilia
atgggtccaggtgcaattttcgttgggatgatggcagaggtgttggttccgatgctgctgcttttcccattgagctactacggcatggccaagcgtcatggtcagcgttacgggtggaagagggtcgtcgcggcgttcaccgtgtcccttgtagggggcgggctggtctacgcggctttgtgcactgttctacgggtcggcaccatggggccggcagcgtccattgatctctcgaacatcatgattctggtcgttccgctgctcgcgtccgttcttgcactttgggcgttcaagccgaggacgccgaaggggtaa

SEQ ID NO: 532066 - DNA, 414 bp, Stenotrophomonas maltophilia
gtgaacgaccagaccatcgagcaggaaatccagtccaagggcctgacccacccgcgcgtgaccccggctgacatcgaggctgagatcgcctccgagtgcttcttcactgcatgggatgcgttcaccgcaacgttcgatgccgggaaggttgtgtgccgtgagcttgactacgacaccctccgcctgcctccgccggcagcgtctcgttacgaggcaacgcgttgcctgacgatctgcgtgctggtgctgcgcaacggcttcaccgtcaccggtgaatcggcatgcgccagcccggagaacttcgaccccgagatcggccgcaagatcgcgcgccagaacgctgttcagaaggtctggccgctgctgggcttccgcctgcgcgaccagctggtgcgggaccagttggcgcgctga

SEQ ID NO: 532067 - DNA, 558 bp, Stenotrophomonas maltophilia
atgcccccgaagagcctgacgccgcgcgttcccggcgaagccctgccgaccaccgagaccgatgtggaaaccaccgccgccgctggcgctgtggatgccgccgccgccgccgccgaccagctccgcgcggaactggaggccatcgcctcgctcaacgtgcccgaggtcctggaggccctggcgaccctcaaccgagacgagctgatcctgctccacgccatcgagacggatggcaagggccgcgtcaccgtgctgggtccgatcagcgaccagctggacgccctggctgctgaccagggcgagaccaccgccggccctgccgacggcacggccgctgtggctggccgcctggccgagaccctgggcgcgagcgatgcggatgccgcctggaatgacccgcgcggctatgcgaatcgagccgataagggcttggccgagcatgcagcggccgcgaagaagcgccgcgccaacggcggtccggtcaccaagaccgagcagcccgcagcggtgctgaccgccgagggctgggtcgtgcccgagcccgaaccgaaggagtga

SEQ ID NO: 532068 - DNA, 336 bp, Stenotrophomonas maltophilia
atgccacacgatcaccacggggaaaacccgacctccttgcaccatgccagcgcctgcatgcaggacgcgatggcgcacctgagagagcgcagcgcgcgcccgctcgtaaagctggcagagcgcctgccggatggccgcattgcggtgctggtgtttgaccgcacgcagcagcacgacgaacccatgtacgacttctactgcagcggcccggaatcggccctgatgtggatcgcgcagatggcgggcaagtcgtggatcacgaaggagcatatcgaggcgttctcgatgctgatcctcagcgctttcgatgaagtagagggtcaggatcttggctaa

SEQ ID NO: 532069 - DNA, 225 bp, Stenotrophomonas maltophilia
atgaacgccatcaattctgcaatcgaagcggtagggagtacggcggagctagcgcgccggctcggcgtggtcgccatgaccgtcacgcagtggaagcggcggggccagatcccggccgagcgctgtcttgaagtcgaggcggcaaccggtatctccagatacgccctgaggccggacgtgtacggacccgatccccgcagtgacgcgacgaaccaaagcccataa

SEQ ID NO: 532070 - DNA, 579 bp, Stenotrophomonas maltophilia
atgcgccccgcagaagccgcacgcatgcttggtgtcagcacccagaccttcaacgggtggcgaaagcgtgggcaagtctccgctgatgcctccgacagcgtcctcgcgcacatggggaggggcaccaccgtctccgcgcgtgcgacggccggcgactatgttcgtgtcgagcaactggacgcggaggcaggcatgggcagtgagtcgatcaatgaggactatccagaggtagtccgggccatggatttcacgccgagttacatcaggtcgttggtcggcttcgtgcctgcaccaggccgcctagtactggtaacggggcggggtgactccatgatcccgaccattcagccgggcgagtcactgctggtcgatacggggtgcaccagctatgacggcgacggcatctacttggtgaacatcgggaacggccaacagatcaagcgcctcatggatcacggcctggaggcaggtgtcttcatccacagtgacaaccctgcctaccccgcaatccggttcccccggggcgcgatgatcggcgggaaggtctacctgcgaaacaggattgagcgattcaactga

SEQ ID NO: 532071 - DNA, 186 bp, Stenotrophomonas maltophilia
atggcattccgagaccagagttttcgggtcccccagatcgcttgggcagtgctgatcgcgatcgcggcgattgttgttcctttgcgaatcgcggagatagtccaacagcacagggaccctatttttaagcctaaaaaccacgcggacgcagtccttgcaccgtcgcagcgtaagccacagccgtga

SEQ ID NO: 532072 - DNA, 387 bp, Stenotrophomonas maltophilia
atggcgaagaagattgtaccccccgaacaggcaggtccgaaaatcgaacttgccaacgatacccactggatcgaaagctcctggaacgacaacccgctgcccgaattcatcaagggacagatgcatcgcatcgagcgttgtgttatcggcgcatctaccgtcgcgctggtcctgcaccgctttgcgatgggaatggaggacgttgaagccactggcgacggcgatgatttccgcgtcgtctacccgtccctgtccaaggacgaacttgaccgcctgcgccttgggatgcaggagcttctggatctcgctgagaccacgatcgagaacgtgcgcgacgaccgcggcggcttggtcgcggcgtggatgaaggagaacgcccatggctaa

SEQ ID NO: 532073 - DNA, 234 bp, Stenotrophomonas maltophilia
atggctaagcgtatgccctcagaacaggtagcgtccctgagtcgtgaggaagaagcgttccaggcgctctatgaattgcatgtcggtctcgtggatattcgggacattctccagttcgtgatcgaacacggtcctctcggcaatgaggacttcccacggggcgtcgcagcagcagtcagcatgagtcacatgcgcgctgttgcgctctgcaaagtggcggaggaagtccagtga

SEQ ID NO: 532074 - DNA, 669 bp, Stenotrophomonas maltophilia
gtgaacgcgaagacagaccccatcgaccggttgctcacgcgcggcctcagcgctcgcgacctaatcgcctacatgctgcccggcgtcgcctggctcgccgaacatcaggacgaaacattcaggctctgctatcacggatccaacggtgaggttgtcgtcgagaccgtggcagggggtgccttgatcgggcgggcgcgcgagcttggttggacgccaggtgagttgctcgatggccgcccggcctgcatgttcgatgaagcggtctaccactgccggcgcggcgtgcactggtatgcaactgcgtgcgatgacactacgcaaatgctgccgctaggcctgccggccaaggaactcgctgcagcgcagaagagagaagagcgcctgtatggagcagcggcccaggcgcgccgaaaggccgcagatgaacgccgcaagcgagccgctcatcgtgcagaggatcgagcggtgtatgccagggtgaaagaggttgttgagatggtatccggcgacctgatgaaagaagcgcgggaatcaggtcggcccattgcgattagcaccgcacgcaggcgggcgtggaagcatgtgaagaagacggacgacggaacctatttcttgctctgcaagaagcttcgggcaatgcagaacaacggcgtaaaggtgaaagtatga

SEQ ID NO: 532075 - DNA, 225 bp, Stenotrophomonas maltophilia
gtgaacgaggccacaaatgttctggcattccccatccacagggtgaagcagcgcgcgcccggtgaattccctcacggctggcctactggccacgtcggcgaggaaatggacaaacttgcgcgtctaactatggcccgggcgctgagccttggatccgagatcagtctgcctgactgccgagctgtgatttacaccgtcgtctacgaggcccgccatggccgatga

SEQ ID NO: 532076 - DNA, 1197 bp, Stenotrophomonas maltophilia
atgcgactgaagttcaccgcccgaggccgcgccgcgctggtaaacgcggcccacaccggcaccaacgccgtcaccgtgacccagattggcgtcaccgaccgcgcgttcacgcccgaccctgccggcggcaacaccacactgccgggcgagcgcaagcgcctggccaccttcggcggcaaggccgtggccgatgacgttgttcacctgaccctgcgcgatgagagccaggacacctaccagctgcgcggcatcggcctgtacctgcaggacggcacgctgctggccgtgtacggcggcgatgcggtgattctggaaaagtcctcgcaagccatgatgatgctggcagtggattggctgttggccgacaccgacgcccacacgatccagtttggcaatgtcgacttcctgaacccgccggccactaccgagacgcagggtgtggtggaactggctaccgatgaggaaggtatcggcgggagcgatcgacaccgcgccatgacggccgctgcggacaaggccgcgttggacgcacgcctgggtagtgctgcgcccacaggtctgaccaagcgtctgctcgggcgtgagaagccggaagacgtgcgggaagacctggacatcaagagcgccgcgttgaagaacgaaggccatggcaatgggctcgatgcggacacactcgacggcaagcacgcggctgatctggccagcaagacccacacgcacaaactgtcggacatcaccgatctcaacgcctcgcagctgctgccgcccggccttgtcgcgcattttcctacgacgacaccgcccgagggttggcttcgctgcaatggcgctgacgtgagccggaccacctacgcggcactgtttgctgtcgtgggtttgacattcggcagtgccagcggctctacgttccgccttcccgatctcaggggagagttcattcgtggttgggacgatggtaggggagtcgatcccggccgggcgttagggtctctgcagcaggacgaaatcagggagcacagtcacctctcgccgaccgcttccggaagaacaaccagcccgggccgtgaagtcccaggatcttctggcagcgatggatatgactatgcagatcagtatggctctatccctgtgaagagcacgggcgggcctgagactaggcctcgaaacctttctttgcttccttgcatcaaattctga

SEQ ID NO: 532077 - DNA, 873 bp, Stenotrophomonas maltophilia
gtgcatgccgccgatggcacggccctgcagagtgaacttgccattgctggcaccgtccacctgcaccagcggaataccgttgacggtctgtgcaccggcgccattgatgttgttgaccacgatccgggtgttgccgcttgcatcgccggtgacgtgcaccttcgaagtcggcgcatcgtcggcggccaacaccgtattgaagtgcagcgtgccgccctggccgacatagttgccgttgacggtcagctggcggaactcacccggcccgagcaggatgtcgctgcccgcacccagggtgaggttgccggtgttgctgtcgccggacagcatccagcggccgccctggtcgacggtgacatcggccgggccgaggatgcggccggtgaggtcgaggccgtcgaggaagcgcagcgcgccggtggcggtatcggcgatggtgatatcgcccttgagcgtggaggtgcgggcggtgatgtcataggcagcatcgctaccgatctcaatgatattcccattgcctccgaccagaacggcattgttctgcagggcgactcgcatgacttcagggtgcgtcccagcagcaagcgacaatgcggctccggctcgcccttccagccgcgaatcatctacgagcaatccccagtaggagctgtcgggagactcggcagcgagcacggtggaatagctcatcctgatgccattttcttcgccaatggcgctggatccactccgaaggttgaccgcagcagcaccaattcgaatggcaatcatgtcgctggtcaattgtgtcctgctggcattcaaggtgccgccggcgtttgcattgagtgcgaaagaacgcccgctgatctggctttcgtttgctgtgattga

SEQ ID NO: 532078 - DNA, 813 bp, Stenotrophomonas maltophilia
atgctcaggttcgggggagctacaagcggtgtgtcgacccgcttcaggggaatggaagatcgaattcggaagctcggggcattaggtgcctggctgtgttgcgtgctgctgatcggccttagcctgtcgccatccgcaatcgcccagacgacagttgcctacatccacacggatgccttgggctcggtcgtggccgagagcgatgccaacggcaacgtgatcaagcgctatgactacgagccgtacggggccgtggtcggtggtcaggtcacggacgggccggggtacaccggacatgtgagcgattcggctaccgggctcagttacatgcagcagcggtacatggatccgcagttgggtgtgttcctgtcggtggatccggtgacggcgtatgagcagcctgtggggcagttcaatcggtatcggtatgcgaatgggaattcctacaagttcacggatccggatgggcggaatgcattactggccgcgccgctggtggttgttccgatcgttattggcgtgacccactatgcaaccacggcagccgagcaacgagcggatatcggcaacaagctggacggggcagtaaaaggcctacttcagaagtctgatgaatcaccgagactgcctgcactgcaaggtgatgggtcaattgccagagataagcagtctccgaaaatcgaatcgagcgcgggagagcagaaggcaactggcacgatctatgtcgattccaaggggaacgcgattccgacaccgctgggtggcaaaataaggatcacccgatggtcgatttgttcaggcaaaggggtctga

SEQ ID NO: 532079 - DNA, 822 bp, Stenotrophomonas maltophilia
atggaagtgatgagcagggacgattgggatgtgttgtgtgcgcaagtaactgaggagatgacttcacacgtcaagcgctttgcagttccgctgactatgagtgaggaacacgggtcaggagttgcgtggggatcgggcacctacatctcgctgggccgggatacttggatcctgaccgctgagcatgtcttaagcaatgttccagaaggggggcgtcttgcccatctccctaaagatgggggggactacaatgcagcgttcggaaggccagaagtcgccggatggcctgtagatgcggcagcccttccgatctacccagatccgcaatttttgcctgaagcggctagggtcacgtcatccattgctgaaagctactcgccggtcgatgaggagctcctgttcttctatggttttcctgggtatacggtagagcgaaacgatccacgtcagaaagacaagctgattgtgtctcgattcaaccatctgacggtttcgggcaaaccgatgctctcgcaagctatcggtccagaggtgagtctggctgcatccaactttgatcccaacgcccacgttgctgttcactatccattcgctgcacagcgcgctaaggacggggtcgtagtgccggtaccgaatgctgctggcatgagtggaagcgctctttgggataccaagtttgttgactgtgttaacaagggaatttcttggactccagagtatgctgagatctgtggagtcgtttgggccgtgctcgacaatccggaggtcatctttgccactaagatcgaaaacgtccgtgcggggttgccagaggtcttctag

SEQ ID NO: 532080 - DNA, 948 bp, Stenotrophomonas maltophilia
atggaagaagttgctaatggagtaggtttcaaggatcgtccgattgtgcctttagacgtcactatggtggtgttggacacttctgcggtgcgacaactaattcatgagccgggcgttacctgggatgcatgtttcaaaagaatgtcggaagacggatactcgtttagcttggctgaagtagcggcattcgagctcacttctcaggttcaacgaggatccatttctatcgaggatcatttgaccctgatggaaaggctgacctcgttcctcaatcccgaagcgcccgtgcttccttcatactgcgatgtgatgggaatgatcggggctggggagttcaatgagctcgaaacacgcatcttgattgcgacggcgtggagcatgttgaatgcagacttctcctctcaggactacgcccccgtcctgacggacgagatgcgagaagaagaggtggacgaatgggctggcttccttaaagacgtgatggagcatgtatggtgctcgggacttgatgtttcccaggcaactccggaagtagcagcagaggctcttgctgttgccgctgcggattcgctggacaggacgggccccgtagttccggggatgagtgttcggcagcaccttgaggtcaggtatcgcttcaggcaggcggctcgcagtaggttggacgagaggccctacaaccccgcttctgccaagaaaaagaacgacgccatggacctgagtatgtattcgtatttaacccttccagcgttcgtcgtcaccagggataatgggtttatgtctaagctcgctagcattgagagctttcagcgtgactggtttaagttgccggaggagttggctgacagttggaggcgaggtgagcgtcccacgccgcaatggccagccacagagtggattgagaaagagaaggaacggactttgctggattttttggtcccaaggtaa

SEQ ID NO: 532081 - DNA, 831 bp, Stenotrophomonas maltophilia
atgacgattcgttccgacatcctgattggtgactcacgcaagctgctcaaggacatccctgaccagacatttcagatgtgcgtgaccagccctccctattggggacttcgggactatggaattgacggtcagataggtgccgaaacgaccgtagatgactactacgcagacctcgtagcgatcttccgcgaagtacgacgcacattgcgggacgatggaacgctgtggctgaacatcggcgatagctacaccagcggcgggcgcacttggcgcgacgttgacgataagaacgtggctcgtggcatggactaccgtgcgccgaccccggaggggttgaagccaaaggacttaatcggcgtgccgtggcgtctcgctttcgctttgcaggcggacggctggtatctgcgcactgacatcatctggcacaagcccaacgggcaacctgagtcggtcaaagaccggcccacccgatcgcatgagtatgtgttcttgctctccaagaacgagcgctatctgtacgactgggaggcagtgaaggagccgactacgaacggcgacggcacgcgcagtcggcggtcagtgtggtcaatcaataccgaaccgtaccggggtgcgcatttcgcggtgttccctcccgagttggttcgtctctgtattcttggcggaagcaggccggatgacatcgtgctagacccgttccttggctctggcaccaccggcatggttgccttgcaggaaggacgtggctttgtcggaatcgagttgaaacccgagtacgccgcgctggcgcgcgagcgcattctgaacgtcaatcttcgaatggcactttag

SEQ ID NO: 532082 - DNA, 756 bp, Stenotrophomonas maltophilia
ttggataaggcgcgactcgcacgactctttgcatcaatcgaaacgctgacagaaacgcagattgcgtggctggaaggtgtcatcgctcaactgtcgcgcccgcatgacttcgcccggctgcccacgtccgacatcgtgactgactgcgtgctgcgtgatttcggcgacaccctgcgcattcaccatgctttctcgaaggaagcattctccaaagacaagttcgagtatgcgctcgaccgagttctgaggaattgcgggattgcatcggagcttgccccgcgtggtaatccgggccacgacatcaccattgcgggcgtgccggtgtccctcaagacgcaagccaatgcctccatccgcgacgatcagatttgggtatcaaagttcatggaaatgggccgaggagattgggtggacgagtcccaccttgccggcttgcgccagaggttctttgaccacatgcgcagctacgaacggatcttcaccctgcgcacgttgaagaaggctgggaatcgttggcgttatgaactggtcgagattccaaaggctctgctactcgaagcagcaaacggcaggctcgtgatgatgaacgacagccgacaaaccccgaagcctggctactgtcacgtgaccgacgcgcaaggccgtacgaagttcgatctgtacttcgatgggggcaccgaacgaaagctgcaaatcaagaatctcgacaagagcctttgcgtcgttcacgcgacgtggagcttcgagggcgactaa

SEQ ID NO: 532083 - DNA, 1281 bp, Stenotrophomonas maltophilia
atggctgaaataccaccgcgtgacagccagggcctgttctggaaggacagcggcgaacaggcgcagcgcaacaaggcgcttgaggacttccgcaagggcgaggaagccgccttggaacgggagcgagttaaacgcggcctttcgacgaagccgaagaccgttgacccgaacaagatcaagttggagttcgccatgtctggagatactgaaaccgccaaagtcacctaccttgttgatccgttcctgccgcagaaatgcgtcgtcggcttcttcgggcgcggtggcacatcaaagtcgtcgttcctcgcaacgatggccgccatgattagtgctcatgcgtccacgttgtggatcagttctgaggagcttacggactggattaaggctcgccacatcaaagcaggcggcgcacctcgtaccttgcaggtctatcgcggcatcgagacggacgaacaaagcggccaacagattcaggtcttcggcgtctatgagcacttggatgcagccatcactatggcgaacgtcgcagcgcagaacgcgggcacgccgcctgtgcgcctcgtcgtgcttgatgctgctgtcgcgctcacgatctggtcatctggtcaaagcccgaatgatgacgcctcggtcaagcgcctgctcgcatacatgcaaacgctggcagagaagcacgacgtgaccatctccttcattggtcacaataacaagcgcagcagccagagcacggagcacttcgaggacatggtggcgggtgctggcgcatgggtcacgtcaccacgagttgccttcgtccatgcccgcgacaaacgtgaggaatattccttcgtgatgcgactggcgaagccgcagctcacaccgcgcttccttgtcacctacaagagcgaggcagtgcatactctggcccagcgtacagacgcgcctgcttcggtgctgtgcaaggcagtgctgggcgaatgcgtgtggggcgaggatgaatcggcgcgcgcgttcgatgccgccaccggcaaggagaccgaggaggacaccagccgcgcgctcgaccagaagatgaccacagtttcgcaggtcatcgaagctttggtgcagatggttcacgtcacgcatacggggcaggacgtgacccgcgacatggtgcatagcgtgctgaatcggctggtgaacggtcgccgctggaaggacgtggacgaaatgctccacatggcacagttccagtatcgcatcgcagtcgttcggggcgcgaacaatcaggtgctttaccggaaggccgcgccgatgtga

SEQ ID NO: 532084 - DNA, 246 bp, Stenotrophomonas maltophilia
atgaccacactttccgcgctcagccccgatctgctgacgaacgaagaagctgccgcactgctcggcatcaaaccgaacacccttgaaatctggcgcacgaagggcaaaggcccggagttcgtgaaactcgggcacaccaagtccgcgcccatccgctacctgcgcaccaagattttcgagtggctggagcgccaatccttcgccagtaccagcgcctacgcgccgaacgccaaacaagctgtttga

SEQ ID NO: 532085 - DNA, 459 bp, Stenotrophomonas maltophilia
atgacccgctggaccacctggaaagcaatagccagcgttggcatgatgttgctttcgtgcatggaaactgcgctatcgcacgacagagttgaagtgcgttccccacagcgtctggatgccctgatcgacgcgctcgtcaccacgccgtcgccgatcagcccggcccagttgcatgagctgggcatcatcgcgccgttttcatttgagaaggatgcaggaccgcgcatctaccggtcacagccgatgctgaccgccgatggctttgccatcgataacgtggagtatcgcgttatacgcggcgaggacgatgaaatccgccttctgttcgtcacgttcgtggatgcgccattgatcgcgcggaaccacgagcagcaccattcgctcaccgtaggagcgcaggagatcatcgtccgcagccagcgcgatgctccgcactgcgtgctgggcctgaggcgctga

SEQ ID NO: 532086 - DNA, 1269 bp, Stenotrophomonas maltophilia
atgtcagatggttcggtattcgtagcaaagctagacgacagagcagtcattgaagcctttcataaggtcgtaagggagtttccgtcccagcttgaggttgagttcaccagccagtttggcgagctagctggtgagcaacttgccatatgcatgaaacctggcagcctcttgctgaccaaggttttccttgactttggtgcctgctcctggacttggcatcgactgggacctacagactcgaagctctacccacagtctgccgaatacgaccgcattgccttttcagccaagcaataccacgccgtagaaccagatgctcctcgtgttgatcaaacactgaagctcgcgtttcagcaaccattgaccgagatcgacccgtcttcgccgctgaatcttgccactggtcgcgaggtacttcaggcgctacaaacggcatctcagagactgatcacggagacggcggagcatcggaccaaactggagatcgacttcgcggccagggaagccgctcgggaggaacgtttcagccaagttcgtcagcaggatgaagaccgcctcagtcaggagcgagaagccgcgcaggtcgcccatgcagagcgagtagctgccctagatcttcgcgaaggtgagctggactcgctgaagaagactctggacgatcgcaacaatactcacgttagacgcgagatccgctccagcctccttgatcttactaaggagcgcctgctgaattttcgcgtttcccctgagacccgaacccagtacattctggtacacgcggtttgctcggcgggaatcgtgttcttgcttggactcgcggcggtcaccgccgtcaagttcgacagtactctaccgccaactgcatttgcgctctctgccgcgcgctccttgctggccggtgcggctgcaatcgccttgggtgcgtggtacttgaagtggttgaatcgatggcttcagaggatcgccgacgccgagttcaagttgcaacagttccgcctggacattgagagagcatcctggttgaccgagacggtcttggaatggaatcaaagctctaaggagccgttcccagaactcttggccagtcgcctatctactggtctgttccaatcgacgaaggacgatgtcgaagacccgcagacaccggccagccagctcgcagaggctctgttggggtccgccgcatcggctcggctgaagcttggtgatcaggaactctcactggatcgcaaaggaatccgccaactcgagcgcccggatgcaaggtag

SEQ ID NO: 532087 - DNA, 993 bp, Stenotrophomonas maltophilia
gtggcaacttacgataaaagagcatgtagcgccaatctagttttagtggcgcccccgatttcgaacaccttagccgcgagcatagccagtgacgacgcacaggtgattgaccaattgcgccgcagtcacttctacatgatttgcggcagacctaaggcaacattcggcaaaatcgaacccgtagaggatgggtcaatcgcgatcgaaatccggctggcttctggtgagttgtcacacggctttctctacatcaatgagatgtccttcttcgagagcgcgccagagcatatggcgcttcgcctcaggtccaacgaggatgtgctcaagatcttttggggaaaggagctcgttttcgccacggctcccgatcacgtattgatgatgcgggggcggaagcaagcgttagtcagcggcttcgacaaccatcgcgacatcctcacattcgatctactttacgtcggaatcgccaagagcaaccaggatagttacagcaggctgatcaagaaggggcacaaggccagggtggacattctcgcggcagagaaacagcgaaccattggggccagagtgagcgatgagacttatctcctgctttttgaagttcagcctatcgttctcactacgtttgccgggctcggcgacctagatgacgaagaccttgatcagccggtcaattatcaccgcatcatcgcagatgcggagaaggctgttatcagcgcgtttaagccgaaatacaacaagcagctatacaagaactatcctcagggatcggatggtctctacggccagggatttaccggctactcctattccatcgcagagggattcgccttcaatacggcctacgggaccatcaggggggcgcgcgactcggaagatgttctactctctaatgacgccgattttatctcggttgacggagacgaggtaagccttcatatcgcaggaaaggacttcaacatccaactcgagagcatggcgtcggaaagctaa

SEQ ID NO: 532088 - DNA, 1182 bp, Stenotrophomonas maltophilia
gtggcaaaagcgaaggaacagccaagtcggccggatgcgcacttggaagcgatcgtgttgcaagcccaggccatcacggaggtctgggccaagcggcacgaattctgggaggactccactcacaagaatccattggtgcactacgacacggaacctggggagggcgtgtcgatcctgacgctgtgctccgatggcatgcccgcacgatgcctgaacgagggagcccgggaggccgaagagctgggggaggagttggcccggataggtctctacctcgagctggacgatgcagtcactgccaactactatctcatcgaccacgagtctgcattgcagaagcagttcgatcaacgggctaaatggcagtggacttgccgcctgatcgaagcggacacagctgacgtgtcgggggacatctaccgacactttgcggatcacccggaagatctttaccggcttcctcaccgtgactttgaagaactgatcagcagcgtattcactgcgcggggttggaagacacagatcggccccggcacggccgatgagggcgtggatgtccggatgtggcttcagtctccgctgggcgatgcactgaccttggtccaagctcggcgatacgcaaagcaccggcccattggtctggaggccgtggccgcattggaggcgcatagcctgcgcgaagaggcttctgggctgtttgtaactacctcccgctatcggcgagtggcccagcgcttcgccagtcgaaacaagaagctcttactggcggattcgtcggacgtggcgaactggtgtcacgaggcgtctgttgctgtgcaaagcgcgaaagcaaaggcgctggcccttgagtcggttgatcgcctactgacagaggtaagggcagcgggcactcatccggccctggtgtactgcctcaagcgttatccttccttctgtctggtgctgcgggagactccgactggtgcgctgcttctgcccatcccttcggaagcgacgtcgagcgacgggcaggccggatacgtgttgcccgtgttggatgggcgtttaaactacaaaacgccagacggtggggtgtttcgcgccattcgcacggagcgagatggcgacgtcagatactggggagcgggagatctttacagcccttggggaggacaagccctgggcttcgatttctgggactaa

SEQ ID NO: 532089 - DNA, 303 bp, Stenotrophomonas maltophilia
gtgccgcagatcaagaagagtgacctgaactacaccgactacagttggacagctgtatcgggtgatgatccaaccaagaccaaagaagatgccgatcgtttcagtcgtacggaaggctatgaggtactcaccctgttgaactcactgacgagcaaaggcaatggggacttggaggtcagagttcgccagatctgcgagtggatgatccacgagcatttgccgtcggacatccagggccgcagcaacgtgatcagctggatcgctcaaaactaccccaccctatctcctgactatcctcactaa

SEQ ID NO: 532090 - DNA, 198 bp, Stenotrophomonas maltophilia
atgagtcgcctgctacgacttccagacgtgaaggccatcaccggcctgtcgaagtcatcggtctacggattgatggctgagggacggttcccgccgtcgaggaagatcactccgcgcatcgccgtgtgggtcgctgccgaggtcgaggcatgggtcaaggccgtcgccaacggcaaccaaacggcaaccgtagcctag

SEQ ID NO: 532091 - DNA, 426 bp, Stenotrophomonas maltophilia
atgaagaccactgaaccgcgccgcgccgtccgcttccgccttgaagagggccacgaggtcgccgaggtgccactggcgaacggtcgaggaaccgcctccctgtacgccgaggattaccgccggatcatcgccgacggataccacccggactggtgcgtcaccgtgggcgctaacgccactccctacgtcgccacgcggggtggacgcaggaccaccatcgccgcccggctggtcgcatgcgccatgcctggtaaccgtgtccggtacgtagatggcgaccgcttcaacctgcgctggaacaacctgctggtcaccgaaggcccgtcgaagcaggacgcccgaaatattgtagaaatcttcgaggccccttcattgaaaccgaacagcgccgttacccccgtccgggtggccgaggtggccgcatga

SEQ ID NO: 532092 - DNA, 834 bp, Stenotrophomonas maltophilia
atggaacgaatgaacgataccgagtgggagatgatcccgacctcggagctgccaattgccaacatcgacaccgaagaccacctacaggcccgctcgacggtcgccctgccgatccggcgacgcaccgctgccgagaaggccagcgagaaccacgtcaggacgctctcgcggacactgggaggtggactggaggtccatctggagccgatttgggtggcacaggtcaacgaccgactgctggtcgtggacgggcaccaccgcctgcatgcctaccacgctgccaggaggaccacgattccgggcagagtccgactaatgacgatggcgcaggccgtcgtgcaggcgcgtagggtgaacctcagggatcggaggttgccgctggagccggaacagttgaccgaggtggtctggcaggagctggggcgattgagcaatcgcgggacgctaccgaaggagctgctgccgtcgtgcaggaagctggcagcggagttcggagtatcgaagtcatcggcagcgcggatgctgtcgatgctggagaccattgacctgagccagttccccggttcagctctcgatccgtggtcgcaatggccgcattggaagtacatgcaccagatgcctgatgacccgctctcggtggatcagaagcgcgcccgacgcattctgaaggcccagcgcgcagtgctgaaggcgattgagccgctggcccccgacgaggccgccgaggtgtacgagggactgatcgcagacgatcaccgattcgccatgatggacgaggtcgggatactgccaaggttccccgaaggaccagccgtaagagccgctgagttctga

SEQ ID NO: 532093 - DNA, 165 bp, Stenotrophomonas maltophilia
atgccaatgctactgatcgaacgaaccctatccttcaccgtccccggcttcgacgtcttgaagctgtggcagcgccatttgtccgaccagcaccgcaggaccgtcaccaacgccgaagcgctcgactacatcctcggactgatcggccgcccggctgaccagtga

SEQ ID NO: 532094 - DNA, 1302 bp, Stenotrophomonas maltophilia
atggcactcactcaccgcgaactgaccacctccaccatcggcgcatggctctcagacggaggagcgaggggcgctggcacgctactggcgcgtaggaccgcgaccacgaccctgttctacttccggtacgtggacggcggcgggaagcgcgacacgctcccgattggcgacctcgcttccatgacgctagcgcaggcgcggcagcgagcgctggagttgtcggctcgttacagggcgggcgagcgcgatatacgcagcatcctcaaccacgagcaggcgcagaatcgacgccagcggcagcaggcagcggaggatgagaccgaacggaccttcggccacctgctggaggcgtactgcgacgcgctggaagcggcagggaaggtctccgcgagggacgtccgggcaacgctgcggttgcacgtcagcggcccgtggcctgccatcacggccctgccagtggcgcaggtgacgctggaggacctgctggagattgtgggccgcatcgtccagctcggtcatcggcgcaccgctgcccgggttcgctcctacatccagtcggcattctcggcggccatcagggcgcggcaggacccgtcggccacaccagcgctgcgagcattgcgggtcacgaccaatccagcgcgcgacctgctgacggtcgagggcgcggccaacgcaagggaccgcgcactgtcgctgccggagctgcgggcctactggcgcaggttggagaccgtcgaaggcgggtacggcccggcgctgcgcttccatctgctcacgggcggccagcggatcgaacagctgcgacggctgaccacggctgacgtggacaccgaggccaggacgatgcgaatgctcgacccaaaaggtaggaggtcgaaggcccgggtccatctgctcccgctgaccgatgcagccatggacctgatcgcgcacatggccccggagcggcttggagagtacatctggacggtcaccgctggcaccacctcggtggacccgtcggcgctctcgaagagactcgcgggcgtcgtggaggccatgctggaggcaggcgaactgccgggcggcaggttcacgctgggagacctgcgtaggaccgtcgagacccgtctggcaggcgctggtgtgtcgatggaagtccggggccagctgcagtcgcacggccttagcggtgtgcagacgaggcattacgaccgacacgactacgtggccgagaagctggcggcgttggagacgctggagcggatgctggtgcaggaagccgcgacggtcaccgctctacgcgcgcgctcggcctga

SEQ ID NO: 532095 - DNA, 936 bp, Stenotrophomonas maltophilia
atgccgtatgagcttaaagatcgacttgtagtaggcgtggcgtcgagtgctatgtttgaccttggcgactccgacaaaatatttaggactaagggtgagcaagaatatcgtgaataccaagagttgaataagaatgagccgcttgccgaaggtattgcattctcatttataaagcgacttctttccttgaatgacttgagtgcgagtgatgaagggcctttgatcgaggttgtcctgctttcgcggaacgatcctgataccggcctccgggtgatgaactccatcaagcatcacgggcttggcattacacgagctatcttccagcagggcctttccccatacgactacatacctgcgctgagcatttccttatttttgtcgtcaaacaagagtgacgtgcttgaggcaatagcaaagggatttccggctggctatgtgatggattcaaaaaagatcgatgatcctgaggatcagacactccggatcgcatttgattttgatggcgtcctcgcagatgacggcgctgagaccgtgatgcaggagactaaagatgtttccatgttccacgcccatgaaacgttgaacgtgatggagccgttgggtggtggtccgctaaaggaattcttgatgaaggtgtccagaatccagagggccgaggaggctaagaggaagctcgacattaactacaagaatcgcctcagggtgtcaattgttactgcccgaaatgcaccgtcccacgagcgcgcgataaataccttgaagagttggggagtcatggccaatgatgcatttttccttggcggggttgaaaagaagctcgttcttaatgtaatgaggccgcacatattcttcgacgaccagtcagggcatttggcttcggctagcgaagtcgctccatctgtccatgttccgtttggaatagctaatagagcttga

SEQ ID NO: 532096 - DNA, 1185 bp, Stenotrophomonas maltophilia
atgacacttcaatacttcgaaaatagcgacggcacccgtccgagccgccacaagcagatgggccacctgcttgatctgctacgcaacaacggaattcaagaccagcagagccttcgcgactggatcggcgggcgctcggtcatcaaacacaacgacgccgagttccaagttatcaccgctaaagatcttaggctggacgatgaaaaccggtggcacaagtctgagttcaagattcgagaagtgatcattgactgcgacgaggtggtgctccagaacagcctcaacatcgtcatcagggactgtgcgttcatggggtcgctaatcattgggaacaagaccggaagccccttcaatctaaccttggataccgtggtcgtcggggacagactaacggtctctggcaatgggctcgtgcggtcccctctaaccctgacgggcgttcgctcgcccctgctccgactggacaattttcagtgcgatgaattgcacttgagcgggtgtgccttcgcctccacgcagctgacgcggctcacttgtaataccctgtcagtgcggcacaaccaactcggcacactggaggtcaccgatggcaagttcaattcagttcatttcccccctgggcaagtggactttccttcgttcttcaacctagctaagccatgggcatggctgcgccaaagttccactgcattcagaccattctgcgttcctccgcgagaatcgtttgacgaagtggcagaaaaaattagccgcatggaggatattcggcggatttccgagaccttggatttcctgcaggaacattccgaggaccgctttagccgaaggcacgcggcggagcagaaatacttgcgcgcgctcgccgagagtcccggccacctcagcactgggttgatccttgtgacgggagcattggtcaaacccatgcgtatcgtaggattagccgcagccacgatcgtcctgttttccttcgcattcctattcggcgagctgaaatgcgatgggaaggacgtcgaaaccttcttggacgccctctatttctcgggcctgaccttcacgacaatcggatacggagacatcacaccaaccggttttgcgcgattcctcgcggtgcttgaggggctgcttggaatcgtgctgtccagcgcgctcgtcgtcagcctggtgcgccgccacatcgagtag

SEQ ID NO: 532097 - DNA, 867 bp, Stenotrophomonas maltophilia
atgaccctccatcactacaccaatgccgccacgcttccgctgatcctagctaatcggtccttgcgcttcactcgctgtgatctgctggacgacgcgtccgaagttccatttcgcatggctttacttgaccagcgcaaattcttcgtcagctcatggtcgcgcggcacccatggcgaggcaggcatgtgggcaaggtatggggacgctgaccgtggcgtgcgaatctcgttgcccaaggttcgattcccttggtcgaaactgagcgtggacgtgtcccggccaacggaccaaatcaaagaagacggctcacctcggatggtggggttacgcatacgggaagtctacgctccgtacgcagaaaagacgctattcgggaacggctacatgatcgtgccgttgggttcagaaatggagacgacgttcggctccgatgttctttacgccaccgatccgctcggcgaagtcaaacgcagggtgcaactaaccgatggaggcctgaatctcgaaggtgatgcgacgtacgtggcacgagtcaagggcatcgcttgggcggatcaggctgaacacagattcgtaatcagcgcgatgaaaggacctgcgatggtttacgctgcggacccaagcggttatctcgccgctctgttagacggcatcgaggccggcgcggccacagggtttatcgactacagtacggaagtacgctacatcgatgtgccgctcgcagaagacgcgtttgaggatctggtgattacaaccggggcggcgatgccgtccgcagcacgcgaggatcttgaacgtcgggtcaaagatttggcaccgacggccgtgttcgaacaatgcgcgcttaaggtcaggccgaagccctaa

SEQ ID NO: 532098 - DNA, 3993 bp, Stenotrophomonas maltophilia
gtgtcaattgtcaaagaagagtatcgagatcttccgccaaagggcgataagctctgcgatgtcgttgtcctcgcacaggcatggaagaagtcgcatacctacatccgccgccacaactggtatgcggatgttttggaattagatgcttcaaccatcgacctggaaaatcagctaaagcaatggtcagctcaagtttgtcaagctgattttcgacctaaggatctgcagctcgttcccgcgcccaaaaatgcaagttggtgctttcgcccggcgcctacgattacttcgctcaagcaattgttggagcttagccccaacgacctaggcgaagagccgacgttcgaggattggacgccttgcgagccaagccgcagagagatgcctggtgtggaggcagaacaggaacagccacagccacagccacagccacgtctgaagctacgaccgcttgcccacctgtctattcgtgaccagactttggcgacagcggtaatgatgtgcttggcggaagctgtagagtctgcgcagggcgatacgacgtgcgcagatgtaggcgaaatgcgcgcaagcggggtagtgagctatggcaatcggctgcactgcacatggggctccaatgctggtgtccgccctcgagccaaattctcttggggaaatagcagaacatatcgccagtacttccaagactatcgggcgtttctcgcacgccctcgccgcgtgtgcgcggacttgtcgcagcaattgaggccacgacgagagttgttcgtggtgtctttggatatcaagtcgttctttgatcatgtggatcgcgatgccttgcttgcagagctgaagatctttgaggaagagcaccaagcggagtacgggcttcccgatatggcggcggcagacccgcaattctgggagcgagctgcgcagatcttctcgtggaagtggcgcgctggcgatcagcaagaggctgcgctgattcgtggcgaagagcatcaggaacttgaacttgggttgccgcaaggactcgtcgcctcgggctttcttgcgaacgcctacttgattcgtttcgaccgcgacatgcagaaggctgcagccgatggggtcacgataagcgacgacgtcaagttgctggactactgcagatacgttgatgacatgcgtctcgttgtcgaagccaagagtggggctggcgggcttggccaagcctcattgttggagcatgtcaaaagttacgtcaccgaaatgctgaaggagcattgcgagcgcatcggtgcgcggagatcacttgaactgtctggagaaaagtgcgcggccagctcatatcgagcaatctcggcgcagagtcacgtgtctgctctgatggagatgcttaacgcagaactgagcggaacgttcgatctggactctcttgcacaggcggcaggcggccttgacggtctactttgggtatctgagcagattgaaagtgccgctgacccggcgccatctagattgggattagctacggttgcggttcccaatactgatgtgagagacgacaccgtgaagcggttcgtcgcgacacgcatcgcacagttgatgcgccatcgattggcgatgacagacctcgaaagtccggctggttcgtccgaggcgattggcgatcatgtgacaaatggattgctgctgtcccatgagttcgaatccacggcacgcaagctcgttaagtgttgggccgaaaatcctgccttggtcttgttgctgcgctgtggcttggatcttttccctcacccccgcctgttgagtccagtcaccgaggcactcagcatcaagcttttcgacgtgaaggcggatctggacgtagaacagcgcaggcaagtgcgcgtagcagaatatgttctggcagacctattgcgggcaggtgcggtagaaacgggatttcgtgatccggaagagtaccctcaaggcgtcgatattcaaagctaccgcgaggacctcggcggaatcgcgcgtcgcattttgaccgaaaggattctatcaccatggtatctccgtcagcaggcccgactctatctggcctctatcggtgattcgtcactcgctatgatggtcgaagctgcccccgaggtaaatgcgtactctgcattgcaacgcgtggctttgtttgaacccatgtggggcgaagctcttagggatgttattccgctagccattgtcgcgcagcaactgcagccgaacgtacgtcgcttcggcgtgtggctgtctgaagggttgcggcgcacagaagacgaaggggttcgagaggctgttgtgcaatctgtggcgctgagtcgtccggacttgttgatggccgcgctaaatgcgaggcggacgacgaactggcgccagttcgtgccgtcctccttgatccaagccagtaagcgaccgagcaactctcggaggcatccggccaaattaaaggctgttcagtccctcctgcaaatcatcagcgagcccaacaaccctttcgaccaggaaaattctgtgctcatgctcgctgatgcactacttcgacatcagggagtggaagagcagttgtctgcggggaagagctccgttgacatcatgcttcgatgcgaggattggcaaaggctatcggagatgcctgagcagtcaggcttcctgcgtgtggaatcaattgaaggcggtgatgcaactaatccgctgtacgagagtcctctctgggtagtgcccgaaaaggcttggctctacggactgggacgcatcctgcgttcggcactcaccggagagtttgacttcacgagccgtcgctaccttgtcaccgaggaggtgggtcggtacagcggcctccgcagtacttggttcaaacgtcgtttcggccttctaaactcaggacgtgggttgctggatgagcccggcccagtgtcgccctggctctccagcctgctttcgacgctccttcaatggccgggagtggagtttcgaacaaatgcagcgtcggcagcaggtgatgtacggacacctgccgaattgctcgcgcttattcaagagcgcatcgcgtcgcagcgtagattgtttggtccaagaagcaaggcgccgatgtacgtggtgccggttgatgaccatgaacccctgcaggatcggccgctgcgagttgccatcgttcagccgatgcgcccgcggcgagaagagtttgatggtaaggatccaacgcattggatgccgggaaccttggcagaacatcgccgccatctggcggaaatctgtaggttgactcatcagaagctcaagacctggtcatcggcatgctctgcgaaaatatccgataagagcgatgacccggtagtcgatgtcattctattcccggagctggccgtgcatccggagcacgtctttttgctgagacggctatcagataaggtccgagctaacattttcaccggcttaacattccttcattcacacaaggctggcggcatcgtcaatcaaggcctgtggctgattcgaaccgagtcgccgggccacggacgcgcatttcagtatgcctggcaaggcaagcagcatccgatgaaggatgaggtgaagatgggcgtgaagggtcaccggccacatgtgaccttggtcgagttgccgattgggtccaagacccgtacacgcattgcagcagccatttgctacgacgctacggatttggaccttgtggccgaccttcgtgacagatccgatatgttcttggtggcggcattgaatcaagatgtgcaaaccttcgataatatggtggctgcgttgcatttccacatgtaccaaccggttgtcctggccaattcgggcgagtttggcgggtcgacggcacaggtgccgctacccaagcacgagcgtctcattgcacacgtccatggaaatcagcaggtcgccgtcagcgtgtttgaagtggacccttctctcttcaaatccacagcatcagccaaggctccaaaagctctaaagacgccgccggctggatacaaggggcgttcccattga

SEQ ID NO: 532099 - DNA, 825 bp, Stenotrophomonas maltophilia
atgctgaccatgctcaggcggctggcgtcgctggtgccaactcccgccaccaacaaggtaacgctgttcgtcagcgacaccggcatcccgtcgtacaaagatgacgccggcctggtcacgccgatgagcggccagccgatcccggccggctacatcgatggcctgaagatggagtgggtatcgggcacgcagatccgtttcacgagcggctcggcatacatcccgtcgctggggcgagcgctggcacttccatctgcgctgaccaagacactgacgctatcgccgaatacctggtatcacaatttcctgtacagcaatgcaggtacttcagacgttgagacggtcacaacgctgccggacacgccctacagcggcaccgcccgagcaaagaccggcgacacctcgcggcggtatatcggcagcttccggacgaatgccagctcccagatcatgcgttttgaccattcgccacaggctggcgtgatcagctatgtcacaagcatcaacaacgcccctctccatccgctggctactggagctgcggtcgttcagacgaatgtgagcctgtcagggtcaatcccaatttcagggtcccgggcaagcctctacgtggagaactcaacgtcaaatggagcaattgcctatgtgggcgttccgtacatcgacgttgtggccgacgtgattacgttcgtccggccatctggccgtctctccagccagtacctgatcgactcaagccagcaaattgcctacatgttcaacagcgcgccggcagccagtacggggcttgatgtttgggtattggggtatgtctatgagcgctga

SEQ ID NO: 532100 - DNA, 813 bp, Stenotrophomonas maltophilia
atggttgtcaaagccttgctcgccgacgagcttacaccccttgtcccagtccgcccctgcgaacaccagttctcggcagagttccgttttcccctgcttcgccgcttcatggaggacgctgtagccggcatagttgttgtaggcccagccctcgtctccgtcgatgttgaacgttcggttccgactgaccagttcttcgttgggatccacctgctccagcagacgtttggcgtcgccggcctcaacgagggccacaatgttgagcacgcggtcttgctcctccttcgtctcctccgccttttccgcggcctgctcttccgcttcggcatcccaataccgatcctcgtggtagtaatcccgggtcgcataaggggtttcccccctgtcgttctctacgtggtgctggggaacgcctcgccccaccccatcgaccaactctttcatggcgcgctcgtccgcggtgtgagcaggaatgtttccctccatgtcttttgcgtcaacctgggcgccggccaacaccaacgcctgcaccatctcccccgttttgacgtaatgaagcggggttcggcccagcgcatcggtgtccctcacactgccgccctgccccaacgcagcgacaagctcgctgggcgtttcggccaggaaaatcgggtcggtcgccgcatcgacgcgctcacgcggcgaaaaatcgtctcggtggttccgagcgttttctcgataaagcaccggatcatgtttgagcgctggctcgccactggagttcagcagggagggatcggccttggcatccagcaagcgcagcacaacgcctag

SEQ ID NO: 532101 - DNA, 978 bp, Stenotrophomonas maltophilia
atggaagctttagaggtgtggtggaggtggatcaagaatgttgtaatcaatcactgggtatggattgcttcaatcgttgcgaccactggtcttgctctttcgccactgatcgctgatcaggatattcgaaaagtcattgtcacaattggctctgttgtcttggcttctggcatagctggtgctgttatccggtccagcacatttactgatatgttcattgcgagaattgtcgatgttttttatgaaggaaagcaccttcgttctcgaaaggatatgaaggaaatatgcaccagaactcttaatgctttgcttgagtcagagtctcctgctctccgaggggccgtcggaagcgaattgctgaatggatatcttgactttaaattgggatatatctatcgagatttctcagtccaaattgaggtcaaaggactggaccgagatactggagtcatggagattctggagactactacagcgataattgttccgaacccaggcgtcgcccagattactttgcattgggcttggttctcattgggccatacttcggctaaagctgatcttctgacaatatctattgatggcgataagatagatcttgctaagctccatgaaaatgaacaggcgattgacaatagaggtttttcgtatcggcacgcgcttaaaaatacttcaaccgaaagcgaggataatgggattgtctacgttaagcgcgcaaaaaagtttattgacttgcgccaagaccctgtaacaatctacaagttccgtgctccttgtcttggcatgtccgtgacgttgctggatttcccagaaagcgaccttgagtgtgatgttcaggcctttgggcttccagaagagttccgtcctgaccgtagcaaggaagacctccaggggcactggagaaatcaaaaatactcgcggttgatttttcctaagcagggtgttatgctccagtggaacgtcctcagaaaggagtga

SEQ ID NO: 532102 - DNA, 582 bp, Stenotrophomonas maltophilia
gtgcatgccgccgatggcacgaccctgcatagtgaacttgccattgctggtaccgtccacctgcaccagcggaataccgttgacggtctgcgcgccagcaccggcaatgttgttgacggtgacctgggtggtgccactggtatcaccggtcacgtgcatgcgggagcttgctgcgtcgtcgccggccagcacggtgttgaagtgcagggtgccgccattgccggtgtagttgccattgacggtcagctgcggataggccgcagtgtttgcagtaccaaggaaaatgtcacttcccgcacccagggtgaggttgccggtgttgctgtcgccggacagtgtccagcggccgctctggtcgacgatgacgtcggccgggccgaggatgcggccggtgaggtcgaggccgtcaaggaagcgcaacgtgccgctggcggtatcggcaatggtgaagttcccggccagcgtggaagttcggccggtaaagtcgaacagggcacctgcattggcctgcagaaggttgccgttgccacccttcagcgtggcgccgttctgcacaatgaagcggttgacctgcggagctga

SEQ ID NO: 532103 - DNA, 819 bp, Stenotrophomonas maltophilia
atgttccgaaatagacagtcccttgccgatttttttgaagcaatccattccaatgcaatcccttgcgcagttatccaagcgccacacccctgctcaactcttccaatcatggacaatggtccgctgcgcaacgcacaggagcagaggcaagcaataggcgaagaaaccaaacttaagagcataaagtacacgcaacttccgccgatatcttcttttatatgtagagacccaagagatgccatgattcgactaatatttgcagtatcactactactcttgggttttgccagttctattcgagaacttctaaacagcaactatttcatcgccgcatcagtaatgatgatagctatggttgctgccattggagtacttctatcgcaaaagatgattgtaagttacgtaacagcttcgttctgcatcttcatctcggccgcggccatctatcacgaccatcgggccttcaacaccgatctcatgcaggcccaatcggcagccgccgtctatctagtcaccgccaggcctgcatatggatgcgactaccaagagacctcaaggctgcagtcctccgcattacaagcctgtgccatgggaccgtacgacgatctcggatcagccacgcaagccttcggcggcgcgatgtactttggtccggtaagcggcacaattctcggcggccgggatgcactgatcggcggcgccgcggctccccaaacttgcgaaaaagccgtaaaacaattgcattcgcattgccagggcgctatggatggatttgatagaaagctcctaagttttcttcttgaagccgctgataggtga

SEQ ID NO: 532104 - DNA, 360 bp, Stenotrophomonas maltophilia
atgtttattcactattcgccgcgcggctccaaatacgaagcactgacaaagctaagtattcctcagttgatccaaatacggaatgacgtcaagacaggcaccgcttcgcattatcgatcaggatatatccacaacgtcaacgcatggaccaacgagttcggatatgaaacggagttgatccgagaggcggctcactactgcagtatctatgaggagaagaccggcgatggagcatggtcgctccactactacaaacggcgagcgtatccactggcggaagcattagccgcgttgggaatcgtcgaagaggatgtgcgcctggctctaatgccgaagcccttccccaagctagacaactga

SEQ ID NO: 532105 - DNA, 2685 bp, Stenotrophomonas maltophilia
atgacgattctgcaagaaatccatctgtggtcgaagtctcttccagcatggcagcaggacgcaatcgcgcgtctatacgttgatcggtccctcagccccacagatatggacgatctctatgccctagccaaggctgaggtcggcattgacgatccgcttggacgcactccggcaccgctgcctgatgcacacgtagcgccgatcgccggagccattcgcaccgtccttctcaacaccgtcaaggacgtcatcaacgtcaacgccctcaaaaacggggcacagctaccaattgcgccaacaggaatcaccgtaatctacggggagaatggtgccggaaaatcaggctactcccgaatcttcaagcgagcatgtagagcccgcgacagacgcgagcccctccttggtaacgccaacctcccacctgcggaggccggaactgcacaggccaccttcaacgtgtccatcgatggcagcctacaggaccttacctggcgtgatggaacagaaccgcctgaggcattggccgacctatccatcttcgattcccattgcgcccgcgcgtacatcgacaaccacggtgacttcgcatttacaccctacggcctggacattctggagggactagcgaccgtctgcaatcaactcaagacccgcactctggccgagaaggctgcaaattcgcctagcgacgctgcctacgccagtctttcgacaggcgataccgctgtggcacgcacactacgtggaattccgtcaagtaccaccgctgatgacatacgtttgttggccagctttgatgttcagaagcaggagcgattggagctgctgactgcagctctagccgaagtcgatcccaagaagaaggcggttgcactacgacagcgggttagccggatctccgatctaagagcacgcattgaaaccgccctctccagagtcgacgcgcagaaggtaagagatctagccgaactagtcacaaagtcaaacgagacaaaggctgtagccgagcttgccgctaggcaattccggacagcgccgggccagctctccggaacgggaaatgaggcgtggaagcagctgtttgaggcagcccgagcatttgccgagaccagccatcccgagctcggatttccgaacttgccagcagaggcaccatgccctctctgccagaactccttaggtgaagccggtgcggcccgcctaaaggtctttgatgagttcattcaagccgctgcggagagggcggcagccgcggcccgcgcggcagctgtgacacagtaccgcgccctccaagatgcagatctgaacattaactttgcgggcgcgcttcacgaggaactgcaaagtgttagtgaagaagcagcccttgcttgtacatctcttcaggagtctttgattgcgctgcgtgcaacggtcctgcaagcagccgcaggcaacctgccatgggatcaggtccctgcacccagcaccgatccccagccaatgttgttacagatcatcagtgagctacagcaacaggctatcgcacttgaagctacggctgacgaggaacggaaggccgcgatggttctcgagcatcttgaactcgatgctatccgcaggttagtggaagtcaaggatgcagtcttggaatctatggataagcacctactctgcgcaaagctacaactctgcgccgatggaatggagacacgagcgatctccagaaaatcgacagagctgtcgcgcacgacagccacccaggagcttgcggatgcactaaatgccgaactcaagctactcaaagtgcatacactaagtgtcgccatgaagcccgaatcccctggcgcgaggacgcagttcaagctcatccttcagctgccaggaggaggcactccggcttccatactcagtgaaggtgaacagcgagctatcgccattgcatcgttcttggctgaagtgaagctcagcaaggggcgggggggcatagtgcttgatgatccggtttcctctctagatcatcgacgccgctgggaggtcgcgcagcggctgtcgacggaagcactgaatcgccaagtaatcgtgttcacccatgacatctacttcctgctcatcctcgagcagaaggccgaagaggctggcgctgcgatcaagaagaactacatccgcaagacggcagagggcttcggggtccattctgacgagcttccatttgacgtcctcggaacgaaggcgcgaattgggcgtctgaagcaaatgcaggttcaggtgaaggccgctgccaccagcggtgatgacgatctccatcgcgcactgaccaccgattgctatggacagttacgtcttgcttgggagcggtgcgttgaggaagtcctcttcaacaacgcggtaaagcgctttggagagggcgtgcatacccagtgccttaagcttgtcgcagtgaccgacgatgactatttgaccgttgaagctggaatgagcaaggcctccaagttcgagcacgatgcagctgcagcggttggccgcttgcctgtcccagatcccgatgagctgatggcagacatcgaagttctcgccacttggcgggatgccttggtcaggcgcatggaagacatcagacgcgggacaatcacgcgagcaagcctcctatctccacctgcatcagcagctgcgccggagtcggaagctgcgcaggtgaacgcatga

SEQ ID NO: 532106 - DNA, 1962 bp, Stenotrophomonas maltophilia
atgatcctgactgacagcgagactcgtgtcgaccttctcaacaatgaagctattgcaaggacgatcgttgccctgctgcgaagccgtcctgatcgtccggtcactgtcggcgtacatggcgactggggcgcgggcaaatccagcgtcctcgagatgattgaggcaactctaagcgatcaggacaaagttctttgtttaaagttcaatggctggcgcttccagggatttgaagatgccaagatagcgctgcttgaagggatagtcacagggttgattgagaagcgtccggcgttgcgcaaagccggtgatgccgtcaagaacgtcttcaagcgcatcaactggcttaagttggcccgcaccggaggtggcttggcattcaccgctcttaccgggttacctagtccagatcaagtcggcgccatcattgatcggctgaaaggaatggcctcagatccggccgaatttgcaacccgagagaattacgaccgggtaattgacggcgtgggaggactgctgaaaccagcagagcctaagaatgttcccgaggaaattcaagagttccgcaaggcgtttgacgagctattggatgcagcaggcgtggaccagctaatcgtccttgttgacgacctggatcgatgcctgcccgatactgcaattgagacactagaagcgattcgactctttgttttcacaagccgcacggcattcgtcgttgccgcggatgaagcaatgatcgagtactccgtgcggaagcactttcctgagctaccggacaccacggggcctcgagactatgctcgaaactacttagagaagctcatccaagttcctttccgcattcctgcacttggggatacagagacacgcgtgtacgtgactcttcttctcatcggagccgaggttggtgacgatgatgacgcctacacggcactgatcgatgaagcccgcacattgctgcagcgaccttggcggaatgagggactgagtgcggacgcggtcaagcgagctttcggaagccgcttcaatgacgtccaggctgcgctgacattgagtgaccagattggcccgctgctggccagtggtacgcagggcaatccgcgacagatcaagcgctttgtaaattcgctcctactgcgccaaagcaccgctgtggcccgcggctttggcggggacatccagcgtcccgtgttggccaagctgatgctcgccgagcgctttatgtcgagattgttcgaccagatcgccatggcagcggcccgagatccactggggcgttgccctgacttggcagcacttgagtctgaagacagaacgcccccctcttcggcacagtcggatcagcccgtatcgggcaaatccaaagggaagggaaagacggatgcttctgcacaagtgagccagccaccagagtccactacgctggcagagtggcgcgcatcggaggtaattcgtgaatgggcaagcttgagcccacaactcgcctccgtcgaccttcgtccctaccttttcgttgccaaggaccgcaaggactactttggcgcgacctccgcgctcggccatctcgcgatcgtcgcagagaggttgatgggcccgaagatttcggtacgtggccttgggggtgagctcaagacattggcccccccggaggctcatcgcgtgtttgaggtgctccgcggccggattatcggacccgatagctatcagtccgcgccacccggggtggatgggttggaggcgctcgtgcgcgcgcagccgacattacaggcagctttgatcgaccttctggaatcgcttcccgcagatcgctgtggcccatggcctgccagtggctggaacgctgtccttaaggaccctgcggagctaaggcgataccgagacctactgtcgacatggacacgatcggcagccgcccccctgaaggctgcggctgtgatgacgcttcgtacactgggagggcgttga

SEQ ID NO: 532107 - DNA, 876 bp, Stenotrophomonas maltophilia
atgggcacctccacacaatttggcggtagccctgggcgctcaccactaattccgtcatggctaccggatggaagcgggacagcgatcccttcaccaacgccggcgccggcgccggcgccaaccgaacctccaacgccaagtacaccaactccaccggcaccgcgtcgagaaccaagaccaggggatgcctcccggtttcaagtaccccgaggcaacctaactaggtttgccggctccggcgggactgaccgtcgaagcctgggacgcgccatcgctggctatgtatccggatccgctggaggtgctcgtagcgctgcccagcgcatgggaccatcgcgcggcgttggcgctgggttgatcaacttcctgaattctgtgcaagccaacggcgcacgtgcggcgctgcgcacactgaacctggaaagtttggccggacggccaatcgaggaggtcttctccggattggcggactacatctgcccggagggaggaacgatcgatgagggaatcgcccgtgaggcgttcgcggagaccatcgccgatctggcagaagcagggatcaccgacatcgaccaactcacctcagaacaggtcgaaacggtgttcgagctctatgttactcatgccatcgaggcgcgcctttacaacgatatcggcaacaagcttgtatcggttcctgcatccgctcaagcggcagagcgtgtacaagcaagcctacaagagttcattcagcgaggcgtgagtgacgcactgtccgccagcagcttacgtattcaagccttgggccaagcagaagtaatggagttcgtaacgagtatgtatcagtccgcgtttgaagtcctacagtcattgggcgaggcggaggcatacgaatga

SEQ ID NO: 532108 - DNA, 1359 bp, Stenotrophomonas maltophilia
atgagtcgacatcttattgccggccgcttcggtccatctgatcgcgcacgcattgcaaaggcccgagatgagcacccaactagcctttcattgctacatggtgagcagctcggtcacggcattggacatgcccttcacgatctgcgcttgcttggattgacacccaacgaaataggtgtcgacttgctcgttctggcggcgcacgtgtatgcagcagacacccgaatcttccgtagaagcgaggctcaggatggctggacccgggagatccgccttgtggttcctgtcagcgatccacaacgctggacgagtgcggcccccatcttggtgcgggcgctgcagtttctcaccggtgaccagtggctgattggcttccgtagccgcccgaagcagtttaggaccactgtcacaccagcagagccaagcctactgccactgccctttgacggtgtcagcctattctctggtggtctggatagcttgatcggggcgatcgacgcgttggaggccggcaaatcacctcttttggtcagtcacgctggcgaaggagcggtaagcaaatcgcaagatgcatgcttcaatggactcaagctggcctatcccaaggcaaccttcgaacgcctccgagtttggatgagctttgagacaggccttgtcgaaggtacgaggcccgagaccaccacccgcgctcgatccttcctgtttttctctttagcagcgttgtgtggctccggattgggtcgcgattttgtactgaacgtcccagagaacggactgatcgcgctcaatgtcccgctagatccgttgcgcctcggcgccctaagcacacgaacaacccacccgttctaccttgcccggtggaacgaactactgcaggcgataggtattccaggacgcctggagaacccgtactgggacaagaccaaaggggagatggcatccaactgtgccaatcgccgtctactgcgacgcttggtaccttcatctctctcgtgttcatctcctgcaaatggccggtgggaacgacaagcccaaggaaactgcgggtattgcctgccttgcctaatccgccgtgcggccttgcgcggcaaagatcccacgacctacagggtgcaacacttgcgaagggccgtactggatagtacagaagcaacaggccgtcagattcgatcgtgccagctagcaattcgccggctcgctgcccgacctgagctggctagcacactcatccataagccagggccactattcgacttcccaaatcggcactctgctcttgctgatgtatacagacgcggcatgcaagaactcgagcgcttgctccgtggagttcacgtcgggccggtcaaggatgcctaa

SEQ ID NO: 532109 - DNA, 756 bp, Stenotrophomonas maltophilia
atggcttcttcccctctcgtcgatttccactgccatctggacttgtatcctgacttcgctcaggcggttaagcgctgcgaggaaggaaaaatattcaccttggcagtaaccaccacgccacgcgcctggagccgaaaccaagctataacgtcgtcaacccagtatgtgagagcggcacttggcctgcatccccaactagtagcgcaacacgcgaacgagctctcgttgtttgagtctttgttgccggacacacgctatgtaggcgagataggactggatgcgggtcctcaacactaccgctcgctcgagcttcagaaggccgtatttcagcgcatacttcagctatgcgccaaggccggaggcaaggtgctcagcgtacatagtgttcgagcagccaaggccgttctcgacactatcgatcagaatttgccatccacgcatggccgcgttgtgttgcactggttcactggatcgcgagcagaagctcggcgagccgtcgatcttggatgctatttttcaatcaatgcggcaatgctaaccgagtcaaagcgccgcttctgggtaagttgcctcccgattgaaagattgcttaccgaaaccgatggccctttcacgcacgtggatggacggcccagtcaatctggggatgtcaatgagacgctcgcatctcttgctgacatctttggcacgtctcacgccgagatgcgggcacaagttgcacggaacttacatgtgcttctgggcaacggcagctga

SEQ ID NO: 532110 - DNA, 2421 bp, Stenotrophomonas maltophilia
atggcttatgaccaggaaatccttgaggtagaacgcggtaaagcgatgcgccgcttcgagttggcgaaggaggcgggagttctggctgggaccttctcagatgagtcatggaaattcaagtcgcggtggctgaggttcagtgtatttagctcccgaaattttacttctcttccagaggttggtctttccgaaacgtcaatgctcttggcgaagtcatttgtgacttatgagatctcacgtagcagatcgcttgccgccgacacgatctatggccgtcttgtggcgttccgagcgcttgcggtcgtgattcaggaagcgggagcgagctggaacgaagttcaacgttggcatcttgatgacgttgtagccaggctcaaccactcgcgctcggccaagaccgtctaccatagggcggaggaacttggctgcgtggttgagtacctcaataaagtgaaagttggtagtggaaaggctgagcggcgcttcctacccagatacctaaagtggtctcacggcctccgtcacccggaccttgagctgggagatccaacatccgaagcaagtaatatccttcgtgagaggaggtacttgcaagacctgccatccgcgctggcgcaggtgcgggcagcaacaattaatagcccaagcattgagccatcgccaggatacgacatgctcaggatcgaggcccaagcattcatgcttgcgcttggtatccgtgtgggagaggtgctctctctgccggttcacgcactggatgagcagtccgttccaggaagtctcttcctgagggtctcagtagaaaaaggttcggaggccgccgcagttcccgtgcccgctgtctgggaagaggtggtgcgagcggcgtatctctacttcctggaattctgtggcccggctcgcgctcgagcacgtcaaattgagagctatggattcgcatttgtgggggaggctctgcaaatacgccgccaggaatttccattgtcagctgggggcatctcacaaattagactggctggtctgagcttgtcagaacacttcttggtcggagaggtgacacgctgctttgcgcttagtgacaacgcctttctggctaaaggtaggtaccgcaagacgatagtcgaggtgccaaagccggtgacctcgagagttgtgcggtggatcgatcagcgcttcgctttttgggactgggcacgttatggggcggccaaactgtgtgcggcagaaggcgctgagatcgggctgaaagacatagcagaagcgctagggctgcgcttgcagaacatgtcaaagaattgctggtgctcgaccgaactacatgagctgctcgttgatatgagtagtaaaggtgccttcaatcatgcttttgcgaatgatcctgttgcaatgaatgagtggatgcgccgctggttgctactgcgtcgacggatgatgtccaaaaagggagggaccatgggcatggtcgtgagtctgtccgcctttaaggaggagctaagcaagcaattcgctggatacctgaaccagcatttcgacgagatcatccacactcatgaagaagaggatgaagtgagccgtcccaaccaagccatgaggccgcgtgcaggaatggagaggcggctgagtgaccaccttatcgttgtgtgggacggtcagttctcaggtgacagggggcttggaattgtcccgaggcccatgtcgcgtagggatctatatcaatacctttctgcgaaatctgggaagcacacgatatttgaacgattgaacattagagaaaggtcgggggaagtggtttcgcttactcctcacatgattcgacactgggttacgacagcgatgctgcgctccggctctaacgaagcagcagtcgatatgtggatgaaccgtgcccctcgccaagggcggcactacgatcatcgaacggcgaaagagcgcgccgaagctgtccgttccgtatacatggcttccgagccgccgagcgactacctgggacggagggtgcagcattggaggaacgcgaacatcagtgaggaagagatccaatcgttgattagcgagaagctaagagtggtgcatatctcgccgtggggtagctgttctagggatctgtacacgtcgccttgcaatcgcggcttgatgtgcttgcgtggattcggcaccaacaaggcgtgcagctacttccaggttgatgtggatgaccaggaagcgagggcggaaattgaacggctacttgccgagaacgagaggatcatgcgcgctcttgagccacagtttgattccatctcggatgctctgagggaggagcttaaaacgtctcattcacttgatcagcacgtcatgtacgtaatggatgttattcgaggttgcagaagtgcgctggagacctaccagcgcaggggtgatcaagcggagaatggctcatga

SEQ ID NO: 532111 - DNA, 1611 bp, Stenotrophomonas maltophilia
atgaatagaaccccaaaagaacggagggagatcgcatccttgttctctggtgtggattttgatccattgcctgattcagtgactacgatctacggtgagtcggtcgaattgtgtaacgagcgtggagagtggctggacatcattcgttttgagcatgttggctatgcccgaaagatgatcgcttggcgaaggccgtttcacccaaatgtctatctcgattggataattagactttggttgattgacaggcttgagacttcaacagacattcggccggtcaaggcagtcgcagcgattgtttccacactggccccgcaggaacaaagtgccgaagctattcatgacagcctcagtgcggaatttgagagggtcattccatcacttatcaacaagaagcatgaaatggcgttggcggggattcgcttcttctatcgatgggcggtagacgcagggctgccagggttcgacgaagagactgcagatctccttcagtggggctatgcaaagagattcttagtcatgaatccgctgatggcgctaagggacccggttcgggggccgtacacgtcactagagatgtccgttctcaatgaggcgatacgcaattccaaagttatttccgtccgtcagcgtgcgctgttcctgctatgcagagattggggcctcaggccagtgcagcttgcattgctaaggctagaggacataggggatgacgatctggggccatttgtgatggttccgagtgtaaaaggtactcggaggtcgagacttcggaggtcgcctggaaacatgctgaagcggcacattgctgacgatactgccaacgcaattcaaaagcaggccgcatgtgccgctgagcaatgtgcgagcttccaaaagcacctgactcaaatgcggcttgggggcaagaaaaagatggcgcttcctatcccgctgtttccctgtatcgatcggggcgatgagcgtttggctcgcttctttcgtagtccagccatctctgagtacgcacttcacgaagactccatacatctgtctaaggaaattgtgaagcttacgaatgcactatctattccgcagtcacgatttgacccgagacaatgtgcaggcgaattgatgctcgtgtccgcatatcgactgagaagaacgatggcgaccagtcttgtgcttgccgggcacagtcaggaagaagtagcgcaagcattggatcacgctagtgcgagtacggtgcgctactactttaggtatagcagggactttcacgagttcatcaatgcgacagcagaggggagcgctgaaatccagtctgctgtcaggagctgggaaggacgactctcctcagatgtaacgtctggagacagtttaaagattggcagcctaggtctttgtacgcttgggaagccttgcccttaccatccaacagtgagttgctactcctgccattcgttcaggccgagcgcccaagcggatcatgaagcggcgctccaatcgatagcagcccttcagctgaagctacggcaaagctgtactggtccgttcaacgatcagctgagtgcagaggttgcgggcgcgatctcactgattggatacatccggcagcaaaagacagagtag

SEQ ID NO: 532112 - DNA, 1209 bp, Stenotrophomonas maltophilia
atgcattcgtatggatatgccaatctaaggcttgaagtaaagaggcacgcccgctccgatggcgaattgtggccttacctccttcgaggaggcgtccccgaggtactgcctaatgcttgggtcctagctgacgggatgtggcccaaggctaataccgtcgaggcctatcttcgggacgttcagctcgtttacgaggttgctgaccgcaatgggttctcggtcggacagcgcattcagacttttagagggttcagcagagctgagcttgatgcgattggaacaagactcagccagaccgctcaaggcggtcaagctagtagggctacatgtgaacgtagagctgagtcggtgaagcgtttcctatcgttctgcttcgagtactacaagcaaatacagccccttagtctgttagagcagttccaggcagaccgtaacctcgctatccaatgccggatgatatcgcggcgattgaaaattgaagggtccaaagggaagggaccatcgccagcggaggagctcacttcaagtgagatcgatttgctcgattcagtcatgcacccaacctctgaactcaatccgttcagaggtcaatttgtccgcttcaggaattactgcctcttccatgtgatgcgggaaactgcattgcgccgaggtgagttggttctcctagagctcgatgacgtgtcgctcggaggaacgccgaccataaaaatacgtaagccgacgttagcccagcgatgcaggaggagggacggagcgagcatgaaaactcgaggaagagaagtccctatatctcaaggactagcctgcctcctcgaagagtatcgcgactactggaggctccaacgagtagtgactgtgcggccaagtgcggcgcttttcttgagtgccaaagacggtcgtcggctttcaatgtcatcaatcaataagatatttgacgccttacaagcggtcccggttgtagcgcaactcggaaagagactacatccccacggtatgagggcgacgtccaccactgagatgcgcagaaggatcacggctcaagggagggtgtcaggaattgagctcaaggaagcgctgtcctacatcggtgggtggacacaggagagcccgatggtagctcactacacgcgggcagccatctcagagaagctggcgaacattctgagaggtcgctggcggggcaaggaggatgcatgcaatgaatag

SEQ ID NO: 532113 - DNA, 1188 bp, Stenotrophomonas maltophilia
atggcacgcggcagaaaacggaagttcaatccggccatacctgggcacatcgagcaggaagccttgccgaaggggatctactggcatgacgaccgctggttcgtgtaccaggatcacgcggagggcggccggcgcgtaaagcgcacggtcgcccacgcgagcgcgcgcttgtccgacctgcatgccatcgtcgaatcactgaccaccggccagcggcgcggcaccgtacgctatctgttcaaccgctttcacgaatccagcgagttcaaggaactgagcgtcgattcgcaggccgattacaggcggtatgccgacagtttggcaaactacgtgcgcaaggacgggacaccgttcggcagcatgcccgtcgaccggataactacaccggtggtgcagcgcctggttgaagtgttcgccaacggtcggcctgctactcgcaatcagcctgccctgccggcttatcccagcaaggccaaccaccagttccgctacttgcggcgtacgctcgcctggggggttcgccatggctactgcaagcacaaccccgcaaccggtgtgcgtcaggccaaagaagccagcgagcacaagatgcccacgcccgaggcgttcgccaaggtgttggccttcgcgcgtgagcgcggcgcaaggccgccgcacaccaaaggcagctgcccggcgtacattgccccagctatggttctggcatttagcgcccgcctgcgcgggatcgaggtctgcacgctgaccgacgcgcaccgccttgaacaaggcgtacacggagaacgccgcaagggatcgcgcgcatcgatcaccgagtggaatgacgaaatgacggaagcgtgggaggcgctggtggcgcgccgcaatgcgatctgggaccgcgacgggcgcaacttcgctgtaccgatcaggccggagcagcgcttcttgctggtggagcagtcgggcaacccgattgcgcgttcgtccgtctccagtgcttggcaacgcttcatccacctggcgatgcgcgaaggcgtgatcgaggaaagcgagcgcttctccatgcatggcctcaagcaccgaggcgttaccgacacaccaggcaaccggggcgacaagcaggacgcagcagggcacaagtcccccgccacaacgggccgctacgatcacgacgtgccggttgtcaaacctcctcgcagacgctga

SEQ ID NO: 532114 - DNA, 204 bp, Stenotrophomonas maltophilia
atggacgacgccatggagcagcatcggcgggcctgcgaggcccgccactggatcaggcagggctacaacagcggcagatgggtagacgaactgattacccgcattgcgggtaaacatggcgccgctgccgccgaagccttacgggaagaaatgcgccggcagtggttacgtcggcgcgagtggatggaggcgtccgagctttga

SEQ ID NO: 532115 - DNA, 489 bp, Stenotrophomonas maltophilia
atgaccgccgatgccgattatccgcgcacactgtacgaagtccgattggacatctgctacgccgtgaagctgtattcgattcacgaacggctgtatgcgcgcttggacaaaggcatcaaggctatcgagctgatcgccggcagtggcgcgttctacgccgtcactgccggctacaccggggccaccaagatctgtgcattggtggtcaccacgttcgctctgctgagcctcgtctacgacttcggcggccgggcgcgcgaaatgcgcggtgcggcgcgaaacttcttgcagttgctgacagaagtggaccgcaagggcgctaccgtcgcatcgcttgagaagcaggttgcacaagttggcaaagatgcgcccaccacaattgatggtctggcgaagcctgcctacaaccagaatttgaccaggcacggcctctatagtgccgtcacgccattgagtcgctgggagcgtttcctgcagatgattgcctga

SEQ ID NO: 532116 - DNA, 321 bp, Stenotrophomonas maltophilia
atggctgttcttgaactggcgatgctctcgccaatggcgaagctttgcctgcaatccaccatccgctacggcggattgatggttggcgctcgcggctataccggccgccaggccgattccggcgaagccttcaccgctgcgcccgtgtggcagttgatggccctgggccttgtacgttgcgcccccggcaatgaccgcctgctggaagcgactgatcgcggtatcgagttgaacgactgcggcgtggtcgagatcaagaacccgcccgatgggctgggcctgaccgaccccgaggccgaccagggcgaggccaccccatga

SEQ ID NO: 532117 - DNA, 1404 bp, Stenotrophomonas maltophilia
atgaagacgctattccaagggtactacgatcctaccgacgcagaaattcgcgctctttgggatgacgcgctcattgttctggataccaacgtactgctaaatctctatagggtgccaaagaaggcgcgcgacgagatcatgaatctgctccaatcacagagagaacgcctctggattccatatcaggtggctgtcgaatttcagagaaatcgcctcaaggcgttgaaagacgagtacgacaaggcaaagagtcttgccacaacaatcaacaaggcgcatgtcgcgttcagacaggcgatccaaagtgttcaattctcagagcgaggctcaagcgctgaggttgatcctctgatgaagaagatctcggacggagtgactgaactttccaagctggccgatggcctggcggagagctacgtgtcgccgaaggaagtggatccggtcgcggaattcctgacgacgctgcttgatgggagggtgggtagccgtccggagtcacaggtagaacttgacgccttgtatcaggacgcttccgagatgtactcgattggtaccgggccaggacatctggatcaagccaaagccggcgacaagtacgtggctgacggccttgtctacgacagacagtacggtgactacgtcctctggagtcagctgttggctcactgcaaggaaaccaagccgggtggcgttcttttaattacttccgatgtcaaagaggattggtggcaagacacgaaatcggtatccggacttcggccgcaacctgagctggtcatggatatccgcaggcgtggaggcgtttcgagcttttggatgtacaccctggtcgattttgtaaagaaatctcagggctacctgcagtcgaatgtgtcggaagacaccattacggatgtcgagcaggttgatcacttccttcctaagcgcacactcggaaacataatcgaccagtggcagctgcggaatcgagcggcgattgctaaaaagtacggaagatcgctgaacgacatcgctagccaaatcggcaaggtgcttggcggtatagtttatcgacgacccaacgaatctgctctcattgcagccgtgccgaggcaggccgacggctctatgagggagtactacatcgtcgacgtgacggagtggccgaaggagcctgcatccctggctggtctcgacgcctatgttgcgctggccctagctgaagcagaaaagattccgggcctcattctttacgacgcggcggagcctcttgaattctggctagacaaccaatgggcaatggccattgcctttcgacttgcagacgaatccttcttcgcagtggacgtgatgggtgcaagccgcgtgggaagtgagattggaatcgtgccactgttcgatgagaggcctagcgccaatcgctag

SEQ ID NO: 532118 - DNA, 612 bp, Stenotrophomonas maltophilia
atgcaactgaaaaccgaccacgaaatctacggccactcattcgatgcggtgacggggctctacgtgcttcccatccggatctacccggaagctgacggtagctgcccactccccaccaacacggtcgatttcccgccagtggatcaggcgggcacccacgaggcatggaggatcaatgctgatcgcaccgcctgggagacggtcgccgacttcaggggcgtcatgctgtgggataagaacactggcgaggccgcgcccaaccagctcacgttgggcgaacacccgccggcaggggtcaccatccagcgcccgctgtctatcgagccgggcaaaccggtggcgaacagctggaatgacgcgctcgatgcgtgggagcttgttcccgactacagccaaaccgcgatctgggagaaggcaacgggcctctgcctgccaccgctggccgtgggcgagccgctgccggccacggcgacagcgctgccaccaccgcgtgacaacaccgggccgtggcgctacagcgaggcgctgaccggctgggagagcgtgccgccagagccattcgaaccggcgccggcatcgccgcagtcggcccccgatccggctacggactga

SEQ ID NO: 532119 - DNA, 1416 bp, Stenotrophomonas maltophilia
atgagtaagcgcatcaccaaacggctcaccaatgagccagtcgggatcggcgatggcgcgcgcaccgtgttcgcaccgacgttccttggcaagcccacgcgccttgccacagagatcacgtcgatctatcgccgcgactggcgtggccggcagcggctgtcgcgcgagccccgcaccaacttcctcgccgactcggatgtcaccgcgtcctcgatcggcagggtgccctctgtcggcaacttcccgcccggctgggtgaccgtcgttgggccgttcggcggctggacccgcgagatagtcggcaaaggcgtgctgccggatggaacgccctacgtcgattaccgcctgtcgggcgcgagcaatgcgtcctacgtccgcttcttcgacatcgttttccaatctgcgcctgtgcctgcctcccgtggttccatctggaccgtgagcgttggcctgcaggtcattgccggcgacccggaggcgggcttccgtgagccgctgcgccagctggtgctggccgagtgcgaccggaacggccagtacctggtcagcagcaccagcaccaagcccaacccgaccacgctgcagcgcctttctgtcacccgaaagctgagtcacgacgacgtggccggcatcaagtgctacatcggaatggcagtcaacccgaacagcagcgtagacgtcaccttgcgcatatcccagccgcagctggaacctaccagcgcggctacgccgtacatccccacgcgcggcggcgcgcgtaccgtcatcgactatgtgctggacgagcgcaagcagatccacctgggcgaagcgccgccaatcggcgcgacactgacgtgggacggcagcgtcggtgttgacgtgggcaccagcctgctgccgccgaacgccaccacgctggagcgagccgccgaggcagtcaccgcgcgcagcttcgacatcgacacggtcgtcgggttgctctggaaccccgccacctgccccgagaacctgctgccatggttggcatggacgatgtccgtggacacatggcgcaacagctggccgctggcggtgaagcgcgcccgcgtcgccaactcgctgatcgtgcagcgccgtaagggcaccgcgcgcagcatcgcggacgtggtggacagcttcggtggtgtggtcgacatcaccgagtggtggcagacgacgccacgcggcgccccacacaccttcgcgctgacgctgacccttggcggccaggacggcgaaaccactactgcgcagtacgtcgatgacgtcattgccgaggtgaacttcaccaagccggtacgcagccacttcaccttcacccaaggcatcaacctggccggtcgcgtgggcgtcatcgctgccacccgagccgctgtgtttgtccgcctgcaagctacggaagccaccactccatga

SEQ ID NO: 532120 - DNA, 708 bp, Stenotrophomonas maltophilia
atggccgacagccccgccaagcgccacctgcagcgcgtcgccgccgaggaagcggcggcacgctcggccggcagcaacctgatggaaggcaccaccgagtaccagcagatgcagctgcagctcgcccacgaccgtgcccgcctgaaacagatccagtccacgcaggccaaggcggcgctcaaggtcgcgctgctgccgacctacggcccttacgttgaaggcgtactggccgccaatcagggcggcgctgacctggtggtgtccaccatcatgctgtggagtctggacgcgggcgagtatgcccgaggactggatctggccgagtacgtcctggcccatggcctgcccatgccggatgagttcagccgaacggcggggtgcgtggtcgccgaggaaatcggtgtggccgctctcaatgccctgaagaccggcgccgagttcgatccggcggttctgacccgcgcgatggaactgaccgaaggccaggacatgcccgatcaggtccgcgcccggctgctgctggcccgcgcacgcggcctgctgccaaccgacaccgaggctacgccgctggatgcagaggcggtgtccacggcgattgatgatctgcgccgcgccatccagctgcacgacagctgcggcggcaaggaagacctcaagcgcgccgagcgcctgttgaagaagatcgagggcaatcagtccaacgactga

SEQ ID NO: 532121 - DNA, 1023 bp, Stenotrophomonas maltophilia
atgcgtaccgaaacccgcacccaattcagtcagttcacccgccgcgtggccgaactgaacaacgtcgagaccgccagcttggccttctcggttgaacagtccgtgcagcagaccatggaacagcgcatccagcagagcagcgcgttcctctcggcgatcaacatgcccggcgtgatcgacctcaagggagagaagatcggcgtcggtgtcaacggcaccatcgccggccgcaccgacaccagcggcgacgccgagcgcaccccggccgatgtcaccgcactggacagcttcggctacgagtgcgtgcagaccgactacgacacggcaatcccctacgcacgcctcgacgcctgggcgcgtcagccgaacttccagaccttcctgcgcgactcgatcatccagcgtcaggcactggaccgcatcatgatcggcttcaacggcaccagcgtcgcaaagaccaccaaccgggccaccaatccgctgctgcaggacgtcaacaagggctggctgcagaagtaccgcgagcatgccgccaagcgcgtcatggcgaagggcaagaccgatggcgtcgtgcagatcggcggtaccgacaaggcgaagcgggactacgcgaacctcgattcgctggtgatggacgtggtgtcctcgctgatcgagccgtggcaccagcaggatccgggccttgtcgtggtgttgggccgcgacctggtgttcgacaagtatttcccgatcatcgacaaggacaacgcgcccaccgaacagctggccgctgacctggtgctgggtaccaagcgcattggcggcctgcagccggtcatcgtgcccttcatgccggccaacgcgctgatggtcaccaccctggataacctgtcgctgtactggcagatcggcggtcgccgccgctacattcaggaacagccccagaagaaccgcatcgccaacttcgaatcgtccaacgatgactacgtggtcgaagactacggccgtggcgcagtggtcgagaacatcaaggtcggggactaa

SEQ ID NO: 532122 - DNA, 870 bp, Stenotrophomonas maltophilia
atggccaacaagactgacaacaagaagctgcgttcgaagttctttcgcgtagccgtcgaaggcgccaccactgatggccgcgtgatcgagcgccagcacatcgcggacatggcggcttcctacgatccgcagctgtacggcgcacgcatctgggtggagcatcttcgcagcctgatgcccgatggcccgttcaaggcatacggagacgtcctggccgtgaaggccgaggaagtcgacgtgggcggcgtcaagaagctggccctgttcgcacagatcgagccgacacctgcgctggtggcgatggtcaacaacgacaagcagaagctctataccagcatcgagattgccccgaagttcgccgacactggcaaggcgtacctgcagggactggccgtcaccgacaccccggcaagcctgggcaccgaaatgctcgccttcgcggcccagcacccggacgcgaaccccctggccggacgcaagatcgacgccgacaacctgttcactgccgccgaagaggcgcagatcagcttcgatgaaatcgagcagcctgcgccgcgcaagaaccgccttgcagtactgctttcgggcatgggcctgatcgccaagccgccggctgcgcccgagccgaaggacgacgacaccgatgccgccaagttcggccagcagctgctcgacgttttcgctgcgcaggatgaccgcatcgagaagctcgccgcagagaaccggggcctgaccgcgaaagtgcaggcgctctccgcgcaggtcgcatccgtccgccagacgctcgacagcacgccccaaaccttcgcgcagcgcccgccggtcgctggccccggcggcagcaaggccggcgacgccaccgactgctga

SEQ ID NO: 532123 - DNA, 702 bp, Stenotrophomonas maltophilia
atgaagaacgaactgatccacggcgatgcgctgaccgtcctgccgaccctgccggcggcgagcttcgacgccctcatcactgatccgccgtatgccagcggcggcgtgcatgcagcctcgcggcagcaggcgccatcgagcaagtacgtgcgcagcggcttgcacgacgactttgttggcgacgagcgcgaccagcgttcacaccttgcatggatgcgcctgtggctggccgaatgcagccgcgttttgaaggatggcgcccccgtgttgctgttcacggactggaggcagctgccgctgaccaccgatgcgctgcagtgcgccgggttcacttggcgcggtgtggccgtgtgggacaagacggagggtgtgcgcccgcagctggggcgcttccgcaaccaggccgagtacgtggtgtggggcagcaagggcaacatgccactcggccggcgcgccccggtattgccaggtgtgatccgcgagagcgtgcgaaaggctgataagcatcacatcaccggcaagcccaccgacctcatgcgccaacttgtgaagatctgcgaagaagacggccgaatccttgatccctttgccggctccggtaccaccttggtcgcagcagaccttgagggctacaactggaccggtattgaaatgaccgagcattaccacggtgtcgcgctaagcagacttcgaatcggataa

SEQ ID NO: 532124 - DNA, 657 bp, Stenotrophomonas maltophilia
atgacgatctacgttcttgcggagggcccgtccgaacgggcctttctcgacaaatggatcgagcggctcgggctcaatcacagagttagcattcacccacatcaggggaagggcactttacccagagacctggtagtcgctcccccggcacacaagcgggggctcttggatcagttgcccgctaagctgagggcattctccgcttcacttgagccgtccaccgatagcgtggttgtattggtagattccgactccgatgatgcgcttgagctgaagagacaaatcactgcggtggcgagggactgttgccccgccgtcaatgtctccgtatgcgtcgcgcaggaggaaactgaagccttctatctgggtgacctagctgcactacagattgcttacccccaatgcgacatggagaaggcgcgcaggtacgcccctgactccatatgcggaacgtgggagcttttcggagaaatcgtcgacgatgacggcggtaacaaggtggcctggggaaccaagatggggcagtacctgaccgtgctgcatggcagaagtcgatcaccgtcctttaacgatatgctggcgggtctgcgagcactcgattcgcttccaacgcgggttgtaaagcccaaacgcaagcgccgctatccggcgaaatag

SEQ ID NO: 532125 - DNA, 1233 bp, Stenotrophomonas maltophilia
atggctcggctcctgggcattcacatcaagaactatcggtcactggcagacgtaaagcttggccaggtccactacggaaaaggcaacccactgccgccaatggtgtgtctgatcgggccaaatggttctggcaagtcaaccgtgctagacgcctttggcttcgtggctgactgtctactcgagggcgtcgaagcggcatgtgacaagccgtggcgtggtggattcgacaggctccgcacccaaggctccgccgagccgatctcattcgaaatcttctttgaggttgatgatccatcccgcccaatcgtctacgagctggtcgtagacctcaaagatggcatcccagtggcggttcaagaaacctgcaggcagcgacgcgaaaacgagattcgcggcaagcccttctacttcctaaagctaaacaagggagccggaaaggtctgggctgggcaagctgtgggccagctcaaagacaagaaggacaaggactccattcaagtcaagctggcagacctagataaactgggcattgctaccctcgggaacctatcggagcatccacgaatcgtggcgctccgctcgtacatcgagcaatggtatctctcttatttcgtacccaatgcagcccgcaacctgccgccagctggtgcccagaggtggctggaccgcgagggcggaaacatcggcaacgtgcttcagtactaccagcgccagctgccggatcagttcgacgcaattctggtgcgcttggcgaaggcgattccgggtctcaacaagatcacgcctaagacaagcgacgacaagcggcttctgcttgaattcgatgaaagcggatactcggacccgttctatcagcaaagcatgtcggacggaacgctgaaaatgctcgcctacgcgctccttatggaagatccgaccccgaggcctttcatcggcatcgaagaacccgaaaacggtctctacgtccgccttgtggaacggctggcgagtcagttctcggagcgcacgagcgggccaaaagcacgcactcagatgctcgttaccacacattccccctacttcgtagacgctcttcaacccacccaagtttggatgattcgcaaagggctggacgggcacgctgtggcggtaagggcagctgatgttccgtccgttatggccttgagcagccaaggcatcccccttggatcgctgtggtacagcaatcatttcgacgacggggcgcctgaatga

SEQ ID NO: 532126 - DNA, 432 bp, Stenotrophomonas maltophilia
gtgctgtggtggagcggccggcagatcgctcacgtcacgccggcaaaggacgacggggtgcggttgcatcttgatgcccggaagatgtggcaaaccaagaacgttcgggcggccagcatcgcgcagggcaagcgcttcgccgaacgctggtgcgcggccaggctctaccctgagctgaggctgcgggacgcagtagccaggctggtggacagtacgcccaccgacctgccgccgccgctgcccagcctgccgccgacacctgagcagctgcagcaggcccgtcgcttggctgaggccgggacgacggaactggaacgggtcagggaagcgctggagccgcgcaagccaccggcagcgaccaagcccagggcgagggatccgcagaaggcgcgggtgagggcagggttggagagtctgcgacgcggggtctga

SEQ ID NO: 532127 - DNA, 609 bp, Stenotrophomonas maltophilia
atgagcaacgacaacaagaccctggcggacgtgcagcccggcgcgagggtaaggctggaggatcagctgccgccgctgccgaaggctggatacgtcaccggtggggacttcggtcacgaggcgcacaacgctttcacccccgagcagatgcgggaatacgcactcgccgccctctccgcccagccctccccgggtggtcagggggatgcacgtatgccgtttgaggcgtgggccaagggcggtggtttcgacgtgagcaagttcaagggcatctacaactccctcgaaacccgcgccgcatgggaagcatggctgtactggcagcgcctcgccacccgccagccggtgggagagccggtgggtacggtccactccgggaagtacgcgagtggcatgccgtggtgcgaggttgagtggcatatcccacagcctgctggaaccaagctctacgccgctcagcccgcgcaggcggtggacttgggtgaaatgcgtaagtgtgccgaccaggcagtggagttcatcaaccacggttatggcggccacgcccgtcgcaaaattcaggaactgctggccctgatcgatagccaggcggtgggcaatggcaaataa

SEQ ID NO: 532128 - DNA, 345 bp, Stenotrophomonas maltophilia
atggccgacccaatcgttctgaaagcgctgcagaccgttgcgagcgcaggaggcatgttcctcttcagcatcgaggcaccgttcggagcgagagaagcattcgcaaccgccgaacaagccgcagcgatagcggccggggagttgcatacatccgcgctgttgggcctgacgccttccgagtactacgactggatcgagtggggaggccgtgtgcaatgcagcgcccacactggggctgggcaacgctgccggaacactgtgaccggagcggcggacgaggtgcccgctcgctggaagtcgctgtacgaccagcagccctattgtcgggttcacggcggggagtag

SEQ ID NO: 532129 - DNA, 645 bp, Stenotrophomonas maltophilia
atgccctataccgattcacctcgatgcacgccagtcgtcgatcaaacggcgaatcagtggtttttctctccgcatcaaacccgaaatctctttgacgctgatgctgaccagatcccgcagtcgcagcatctcctcgtgagcttcctcaggaatgcctgcaaacccattttggtcgttgtgccacgtatcgccgtgtctggtgagttccacgcagcgcagttccaagtagatacgggcgtgcatcacctcccacttgatgagctcatgggtgggaatctgacgcagggcctgcagcatgtcttgtccagcacccctgaagtacttgtagttcatgggctccgggtcacgcgacactgcggcgtcggaagcctgcaagaactgaaaagctgtaatcccgcacagcgtaagagcagaagaaattcgacgatgcgtttgtgcctgcacgatacgccagggaacatacacggcagcgaaacctatggcgactgcaacaaatacctgagcccaggccgcccattcgctgcttggtatgcatggccagttgaggatcggtgggcagtagataagaggttcggccattgcgaaggttccattttggctgtctcgagcataagcgccatccttaatggagtgaataggcgttga

SEQ ID NO: 532130 - DNA, 1749 bp, Stenotrophomonas maltophilia
atggcgacacggaaaagccgggcaacgcgttcgccgcgctcggaaagccccgcgccgccggaaaatgactacgtcgatgtcgcgatcgggtatgcgaaggcggctgcggcagataggggagggaggttcggccggctgatcaagctggcagcgaaacggttcctggacgatctgaagcgcgcaaagaagaaggggtcgccgttctccttctcgcgcgatcacgccaatcacgcctgcagctggatcgaactgctcccgcacgtggaaggcaagtgggagacgccggagatccggcttcacccgtcgcacgtctggttcgtggttcagctattcgggttccgaaagcccgatggaacccgccgcttcacgtccgcactgttcgcggtcgcgcgcaagaacgcgaagtcgacgctgtcggccgcgatcttgctgtactgcgaatgctgtgaagaggaagagggtgcgcaggtcatttccgcggctaccactggcagccaggcgcgcatcatcttcaacgtggccaagcggatggccgagaagaaagccgatcttcgggaggcctacggactggagtgctgggccaatgcgatcagccgggtcgagaccggcgcgacgttcaagccgatcaacgcgaaggcatcgacgcaggacggtctgaacccatcccacgtcggtctcgacgagatccatgcgcacaagacccccgatctgctgaacgtgttgcagtcggcggccggtgcgcgccggaatcctctgtggttgttcacgaccacagaggggtacgcgaaccccggcccttggtcggaaattcggcagttcgccacgcagctgctggaaggggtgttcggcgacgccgccgaccacttcttggcgatcttcttcgcagtggacaaggacgacggggatttcgacgagaaggcctggtacaaggccaacccgttgatggacgtgaacccccatctgctagcggcaatcaggaaggagtcaatcgaggcgaaggcgatgccttcgaagctcgctgagttccagatcaagcggttgaaccgacctgccgcagcggcaaacggcttcatccttcttccaaagtggaacgcctgccatggcgttgtcgatctggccgcgctgaaggacgttccctgctggggcgggctggacctggccagcactcgcgaccttgcatcgctgcggctggtctggcgcttggatgacaagatcatcacttggggacgccgctgggtgccggaatcggcagtggcgcagcgcaccgagcgcggcactgtcccgtatgcgggctgggtagcggccgggctgctggagcagaccgagggcgaggtcaccgactacgcggtgattgagcaggccatcctggatgtccacgagcgattcaacctgcagtccctggcgttcgaccgctggaacgcgaccgagatggtcagccggctggtggcggcagaggttccgctggttgagttcatccagggcacgaagtcctaccaccccgcgatggtcgagctggagcgcgcctacatcggcaagcggctggtgcacgacggcgaccctgttctggcctggtgcgcggctaacctggtcgctcgcaaagacgtgaacttgaacatggcgccggacaagcgccggtccgccgacaagatcgacgacatgaccgcgttgctgatggccctcggtgtgagtctgaccaccagcaccgagcagccgatcgatgatttcctcaatagcccggtgatcggatga

SEQ ID NO: 532131 - DNA, 363 bp, Stenotrophomonas maltophilia
atgatggccaaggtcattgcgctcacctcgttcgaacaccacgggagccgtagccgcggcgcggagttcgatgtatccaaccaccacgcggacttgctggtcaagcgcggtatcgtcaaactggcaggccaggccgccgctgccggcgctggcccggtcgtgcctactggcgggaccgatgatggcgctcagctcgtccgccagaaggctgccgacgcgatcgcggcaattgcggcggtgaccgatctcgaaatgctggacgctgcgatgaaggcagagacgggcaagggcgaaaagtcccgcgccaccgtgatcgaagcaatcgaagccgccatcaaggcggcgacgccggcccaggcctga

SEQ ID NO: 532132 - DNA, 549 bp, Stenotrophomonas maltophilia
atgccactgaccccaatcgatacgacaaccgatcacggaagctacaggggagatccggccaagactgcctttgggaaggtcaacgataacgacgcgtatcttgacggtcgcatcaataccgttgccaccgctgccgcgactgcggacacgaaggcggccaatgctggtgctgcagctgcggcggctgttccgaagtctggcggtgaaggcggcgccatgacggggacgctcgttatgcgaggtggcggaacggcagttcgtcgcgcgaactttttccacaatgcgaatgctacgagcgatttcggagccaagctcaccctgtcctacaacgccagcaacagcgatctggccggtgtgttcctggcccctacggggaccaacggattcgagtcccaatgccaagtctggttgaaggacggcgacttcttcaattcggcctatgtccaggtgcttacgatcacccgaacggctgtctccttccggggcagtgtcctatggcacgcgggaaacacgacggtggatgccaacaacttcatcaagagagcctga

SEQ ID NO: 532133 - DNA, 414 bp, Stenotrophomonas maltophilia; identical to SEQ ID NO: 522364

SEQ ID NO: 532134 - DNA, 1785 bp, Stenotrophomonas maltophilia; identical to SEQ ID NO: 522365

SEQ ID NO: 532135 - DNA, 1617 bp, Stenotrophomonas maltophilia; identical to SEQ ID NO: 522366

SEQ ID NO: 532136 - DNA, 336 bp, Stenotrophomonas maltophilia; identical to SEQ ID NO: 493234

SEQ ID NO: 532137 - DNA, 534 bp, Stenotrophomonas maltophilia; identical to SEQ ID NO: 522368

SEQ ID NO: 532138 - DNA, 447 bp, Stenotrophomonas maltophilia; identical to SEQ ID NO: 522369

SEQ ID NO: 532139 - DNA, 351 bp, Stenotrophomonas maltophilia; identical to SEQ ID NO: 522370

SEQ ID NO: 532140 - DNA, 615 bp, Stenotrophomonas maltophilia; identical to SEQ ID NO: 522371

SEQ ID NO: 532141 - DNA, 1176 bp, Stenotrophomonas maltophilia; identical to SEQ ID NO: 522373

SEQ ID NO: 532142 - DNA, 1200 bp, Stenotrophomonas maltophilia; identical to SEQ ID NO: 522374

SEQ ID NO: 532143 - DNA, 1434 bp, Stenotrophomonas maltophilia; identical to SEQ ID NO: 522375

SEQ ID NO: 532144 - DNA, 2382 bp, Stenotrophomonas maltophilia; identical to SEQ ID NO: 522376

SEQ ID NO: 532145 - DNA, 528 bp, Stenotrophomonas maltophilia; identical to SEQ ID NO: 522377

SEQ ID NO: 532146 - DNA, 1164 bp, Stenotrophomonas maltophilia; identical to SEQ ID NO: 522378

SEQ ID NO: 532147 - DNA, 906 bp, Stenotrophomonas maltophilia; identical to SEQ ID NO: 522379

SEQ ID NO: 532148 - DNA, 438 bp, Stenotrophomonas maltophilia; identical to SEQ ID NO: 522380

SEQ ID NO: 532149 - DNA, 558 bp, Stenotrophomonas maltophilia; identical to SEQ ID NO: 522381

SEQ ID NO: 532150 - DNA, 552 bp, Stenotrophomonas maltophilia; identical to SEQ ID NO: 522382

SEQ ID NO: 532151 - DNA, 981 bp, Stenotrophomonas maltophilia; identical to SEQ ID NO: 522383

SEQ ID NO: 532152 - DNA, 531 bp, Stenotrophomonas maltophilia; identical to SEQ ID NO: 522384

SEQ ID NO: 532153 - DNA, 681 bp, Stenotrophomonas maltophilia; identical to SEQ ID NO: 522385

SEQ ID NO: 532154 - DNA, 465 bp, Stenotrophomonas maltophilia; identical to SEQ ID NO: 522386

SEQ ID NO: 532155 - DNA, 732 bp, Stenotrophomonas maltophilia; identical to SEQ ID NO: 522387

SEQ ID NO: 532156 - DNA, 2121 bp, Stenotrophomonas maltophilia; identical to SEQ ID NO: 522389

SEQ ID NO: 532157 - DNA, 2574 bp, Stenotrophomonas maltophilia; identical to SEQ ID NO: 522390

SEQ ID NO: 532158 - DNA, 1845 bp, Stenotrophomonas maltophilia; identical to SEQ ID NO: 522391

SEQ ID NO: 532159 - DNA, 1719 bp, Stenotrophomonas maltophilia; identical to SEQ ID NO: 522392

SEQ ID NO: 532160 - DNA, 2235 bp, Stenotrophomonas maltophilia; identical to SEQ ID NO: 522393

SEQ ID NO: 532161 - DNA, 1527 bp, Stenotrophomonas maltophilia; identical to SEQ ID NO: 522394

SEQ ID NO: 532162 - DNA, 429 bp, Stenotrophomonas maltophilia; identical to SEQ ID NO: 493262

SEQ ID NO: 532163 - DNA, 1530 bp, Stenotrophomonas maltophilia; identical to SEQ ID NO: 522396

SEQ ID NO: 532164 - DNA, 669 bp, Stenotrophomonas maltophilia
atgtggcttgacctgcaggtgcagcgtcgcctgcaggcggccggccaggatttcgtgttggacgtatcgctgcagtgcacgcagcggcaggtggtgctgttcggaccctccggcgccggcaagagcctgaccctgaaggcggtggccgggctgctgcggccgggccagggccatgtgcgcctgcaggggcagaccctgttcgatacggccaccggcgtggacctgccaccgcagcgccgtcggctgggctacgtgttccaggattacgcgttgttcccgcaactgagcgtgcgccagaacgtggcgttcgggctacagaagggatggctgaatccgcgggtcggccagcgtttcgatgcggtggagcagtggctgcacgcattccgcatcgacacggtgggcgatctgctgccatcacagatttccggcggacagcgccagcgtaccgcgctggcgcgcgcgctggtgacacagccgcaggcgctgctgctggatgaaccgttttccgcgctggaccacgacctgcgccagcacctgcgccaggagctggagaccgtgctggacaagaccggcattccgctgcttttgatcagccatgacccgcaggatgtggccatgttcggccagcaggtggcgcgcgtggtggatggccgcatggtcgacaattga

SEQ ID NO: 532165 - DNA, 684 bp, Stenotrophomonas maltophilia; identical to SEQ ID NO: 522398

SEQ ID NO: 532166 - DNA, 744 bp, Stenotrophomonas maltophilia; identical to SEQ ID NO: 522399

SEQ ID NO: 532167 - DNA, 777 bp, Stenotrophomonas maltophilia; identical to SEQ ID NO: 522400

SEQ ID NO: 532168 - DNA, 366 bp, Stenotrophomonas maltophilia; identical to SEQ ID NO: 522401

SEQ ID NO: 532169 - DNA, 567 bp, Stenotrophomonas maltophilia; identical to SEQ ID NO: 522402

SEQ ID NO: 532170 - DNA, 261 bp, Stenotrophomonas maltophilia; identical to SEQ ID NO: 522404

SEQ ID NO: 532171 - DNA, 1254 bp, Stenotrophomonas maltophilia; identical to SEQ ID NO: 522405

SEQ ID NO: 532172 - DNA, 999 bp, Stenotrophomonas maltophilia
atgagtggggaattgaacgcggccttccacatggccgatgtccgcaacaagcgcatcagccgccgccgtgcggtggcggtgggcgagctgcatgccggtccagtggcctatccgctgatcgtcgagcgccgcctgccaaagggcgatgcgctggtgatggccgagattgccggtctgcagggcgccaagatggcgtcgatgctgatgccgctgtgccatccgctgccgctggaactggtgcaggtgttctgcgcgccggtgccggaacggcaggcgatccgcgtgtggtgcgagtgcgccagcgaggcgcgcaccggcgtggagatggaggcactggccggcgtcaacgcggcgctgctgaccctgtacgacctgagcaagccggtggagccggcgttgcgcatcgaaggcatccgcctgctgttcaaggagggcggcaagcgcggtgtctggctgcacccggacggcatggacgaggccgagcgtgagcggttcaagccgcgtgcgccgaagggcctggagggcgcggcctgcgcggtgatcacgctgagcgatcgcgccagcgaaggcacctatgaagatatctctggcccgaccctggtgaccggcctgaaaaagctgggtggcgaggtggtggccgccgaggtgctgcccgatggcatcgagccgttggccagccgcctgcagtccttggccgccgagggcgtgcgcctgtgcctgtgtaccggtggtaccgggctgggcccgcgtgacctgaccccggaggcgctgcgttcgttgaatgcgcggccggtgcatggcctggcgcagatggtgcgggcactgagcgcacagcacacgccgatggcctggctgagccgcgccgaggtggtgcagctgggcaacatgctggtgtttgcattgccgggcagcccgaaggcggcggcgcagtgcctggacatcctggcgccggtactgggccacgccctggcgatggtcgagggggatggccacgcatga

SEQ ID NO: 532173 - DNA, 981 bp, Stenotrophomonas maltophilia; identical to SEQ ID NO: 522407

SEQ ID NO: 532174 - DNA, 375 bp, Stenotrophomonas maltophilia
atgaacgaatcggacctcccgcatctgcacgcccaccgcagcaccgccggcgacgacggttcgcctccggctgcgccaacagtggacaggaacaccttcattgccaatctccaccgcatcggctccggtgcggcggccgacggacaaccttggccggagcgtcaccagctgcccggccgctgcctggccctggccgacgccgattgcgcgttgactgggttgcgggtggtgctggaaatgctgctggcagccgaacgcacccggcagaacggcgaacccgggcagtacgtgggcgaccgcgtgatggaggggttggtcatggcctgccagtcgttgtgcgcccaggcggtagggcggttgcagcccgaagggtga

SEQ ID NO: 532175 - DNA, 387 bp, Stenotrophomonas maltophilia; identical to SEQ ID NO: 522408

SEQ ID NO: 532176 - DNA, 324 bp, Stenotrophomonas maltophilia; identical to SEQ ID NO: 522409

SEQ ID NO: 532177 - DNA, 336 bp, Stenotrophomonas maltophilia; identical to SEQ ID NO: 522410

SEQ ID NO: 532178 - DNA, 867 bp, Stenotrophomonas maltophilia; identical to SEQ ID NO: 522411

SEQ ID NO: 532179 - DNA, 1962 bp, Stenotrophomonas maltophilia; identical to SEQ ID NO: 522412

SEQ ID NO: 532180 - DNA, 210 bp, Stenotrophomonas maltophilia; identical to SEQ ID NO: 522413

SEQ ID NO: 532181 - DNA, 885 bp, Stenotrophomonas maltophilia; identical to SEQ ID NO: 522414

SEQ ID NO: 532182 - DNA, 1437 bp, Stenotrophomonas maltophilia; identical to SEQ ID NO: 522415

SEQ ID NO: 532183 - DNA, 348 bp, Stenotrophomonas maltophilia; identical to SEQ ID NO: 522416

SEQ ID NO: 532184 - DNA, 324 bp, Stenotrophomonas maltophilia
atgagggcactaatgtgggggcttgcgggcctgttcgtggcgtacgtggccggttgctcggcgatctcggcgtggcattcccacgcgcttgcctcggtcccggtcggggcgagcaggggcgaggtactgcgggcgctggggccccctgacgtggtggagcacgccgatgttccctttacccgctatgccagccgtggatgcagtggtcgctgtgcgcagcgatggtggtatgagaaccggctgggactagataccgaagcctggtcggtggaactggatgcttccgatcgcgtgatcgcaacgtcgcgcctgacatcaccgtag

SEQ ID NO: 532185 - DNA, 621 bp, Stenotrophomonas maltophilia; identical to SEQ ID NO: 522418

SEQ ID NO: 532186 - DNA, 453 bp, Stenotrophomonas maltophilia; identical to SEQ ID NO: 522419

SEQ ID NO: 532187 - DNA, 528 bp, Stenotrophomonas maltophilia; identical to SEQ ID NO: 522420

SEQ ID NO: 532188 - DNA, 675 bp, Stenotrophomonas maltophilia; identical to SEQ ID NO: 522421

SEQ ID NO: 532189 - DNA, 1254 bp, Stenotrophomonas maltophilia; identical to SEQ ID NO: 522422

SEQ ID NO: 532190 - DNA, 387 bp, Stenotrophomonas maltophilia; identical to SEQ ID NO: 522423

SEQ ID NO: 532191 - DNA, 1809 bp, Stenotrophomonas maltophilia; identical to SEQ ID NO: 522424

SEQ ID NO: 532192 - DNA, 921 bp, Stenotrophomonas maltophilia; identical to SEQ ID NO: 522425

SEQ ID NO: 532193 - DNA, 654 bp, Stenotrophomonas maltophilia; identical to SEQ ID NO: 522426

SEQ ID NO: 532194 - DNA, 1005 bp, Stenotrophomonas maltophilia
gtgacaacagagccgattaccattatcgcagagaagcaacagagccccgtaggcgacctctattctgctcacatcgctgtagtacgccctattcttaccggccttctgtactcgctcaagaggcaggtggcggaccaccttggcggctatgaccaaatccccctattcatgcttccccggttgaggagagagggggatggcgacattgggatttgcttcgagtattcagttcacgaggcactccgccagcgccagccaggaatcaccgagagaatatatgacgcattgactcggcactgccgagtccccggctcagagattgactctatcctcttcgccgcagaaaagagcggctctctgcagttggtaaacactgcaaatggcttactcaccgacgattcgagaatactgacgggcgcgcaggcacaaccgcccaaattgaagcagtacctgaatgatcttgcgagggcgttcagatcatctacgtaccgagaagcgctcccttcaaccatcaagggtctatggaaggcggatctctttgtcgggtgtcgcgactcagatcggtgggtaggcacaactgtcaagatcaacccttctatgctcgaaggtgcggccgggctacgcctcggcatcgtaccttccacccagggaaggtacgacggcataagttttgacgtgcagcgaaatttggttgtctgcccagttccttacgatgcttcattcatggaagttttctatgtgtcgtggtctatcgtaatgcagttcttgggcgcagacgccagcatgcctcgcgagtcacacttgccgatcccttttcaccgacaggtggctagtgaactcgtctcgaggaggaattttcccgtggtcgaagtcatcgatgccctcagaccaatcgcgcaaccccacctcctttacaacgcaaatgtgaccgttccggtggacgtggaaggagcggagaagacacccgacacgctgatctcaccaaccccggcaattatcgcctga

SEQ ID NO: 532195 - DNA, 819 bp, Stenotrophomonas maltophilia
gtgccctattccgccacagttctcagcgttctgatagcctccccgtctgatgtcaaaggcgagcgcctagccattgcagaaactcttcacgagtggaactcacttaacgcgcaatccaccggatacgtccttcttccagtcatgtgggaatcgcacagcgcaccggccatgggcgagcgaccacaagaaatcattaaccgacaagtcgttcgcgactgcgacatgcttgttggcgcattttggacgagacttggctcacctacaggcgtcgaagagagcggaacggttgaggaagtgcggtggttcttgagacaaaacaagcccgtcatgctttattactcgaagcagcaggtagatcttgatcgcattgacaccaatcaacttgaaaagttgaaacagttcaagtcatcgatacgagacaaaggtatacaagcggactattcatcgatcccagaacttaagcagatcctgcttcgccacctgacgatagtcatgcgcgacatctccgtgtcaccaaaggtagacgcaaaaacggtaaagaaagcaaaagagtccgtcggggacgacgaatcaaccagcaggagcaggagcagcagcgccaaactaaaggccaagaatactgtctggctggaagactacacagaaaaggcattcgtggttcggggtgccaccacagagttcgccacagaacttaagtctctaaacggaaaatggatcgcgctcagatcgggcgggaaaggctggatgttttccaagcgcaggctagaagatgtggccaaagtcctaggcatcaaagcatcgctagccaaagaagcttga

SEQ ID NO: 532196 - DNA, 276 bp, Stenotrophomonas maltophilia
atgaagctgaatccgctcttgaggccaaacttatctgatccccttatatttctctacaaccgcctctttcaattttgcaaggcggggaggaagctctccgtcatgctcaagaagatccagaatagtaagtatttccaagctttcaagatcactcattactcttggacccactcctttaataagctgcgccggagcattaagctggtaagcgccaccaagctcggtcaacttaccttggtaaacgtccttatcaagccccgccatttgcccggttga

SEQ ID NO: 532197 - DNA, 897 bp, Stenotrophomonas maltophilia
atgaatcaattcaacagccatttagatccttcgatttccgccccgcctaccgaaagctcgcgcgataagttcgagcgaattgtcagcctattaggatcccctgcggctcgcggtgatcgctttgcgatatttaatggcgactgtattgatctgatggcccgcatgccttcgggctgtgtagacctgtcgttcaccagccccccatataacatcggaaaggaatatgaatccatccttcctttggcgggctacctcgaatggtgcgcggattggattaatgaactgtatcgcatcagcagttccgacggagcctttgcgctcaatgtcggatacatttcaatcccggaacgagcccgctccatcccaattccctacctgctctgggatcgcattccattcttcctgcaacaggaaatcgtgtggaattacggtgccggcgtagccgccaggaaggccctctcaccaagaaacgaaaaattattgtggtatgtgaaagacccaggcaagtattgcttcaacctagacgacattcgagaccccaatgttgcttatccaaatcagaagaaaaacgggaaactgcgctgcaatacattaggaaagaatccttccgacgtgtggcagattgcgaaggtcacctctggcaaagggagggcctcaaaagaacgcactccgcatcctgcgcaattcccggtcgatctctgcgagcgcgtcataaagggattttcgagtaaagatggattgattattgatccattcctcggctcgggctcatcagccgaggctgcagtgaagaatgacagattcgccattggcttcgaaataagaaaagactactgcaaatttgccgcagagcgaatccatgaagctgaatccgctcttgaggccaaacttatctga

SEQ ID NO: 532198 - DNA, 837 bp, Stenotrophomonas maltophilia
atgtacaaccagagccacggctggcagcaggaacgccgaacccaggatgacccacgcgagtccatagtcatctatcagcgggtagcgcagttgtgcgaagaacgcatattcgccaataagcaggtaggaccagaggcgaggcggacacacaagcaaagccgctacacgaatgccggcaggcaggtaaaactggtccaaagagacccgccaggcggcccaacacgtgatcgcgtacatcgcggcaatcgcgagccccaagggccgtacgcggaacgtcagctcaattccccttttccaccaattcaacccaagcctcccttgctcgtgacatggcggcggccccagtgctgtttgaacccgccattgggtgacagtatcgatagaagcacgggggcgcaatcacgcggtggtgcgcggtcctggcggggtaagggggcgtgcgccgaacaaagatcacttttgagtagtgatctgcatctcgtttccgcagggagtcaggtcgcggcccgtggggcgcctggatcgatgaagcgcgtacttccacgcatggattcgttggcgtccgtctggcgggaatctccctgtgcttccgtcaacacgatcctgagcctgttgcccgtgatgtccatgtggccaccatgcaccaggattcggcccagcaaatgctcatttgcttgttccgaggtccgggttcccaatgattcgtttcggcccacgagggctatgcagatgaatacgccgggcttctggatgaagttcccgcagcggatactgacagaaatctgtccggattcgcatttcaggagcagtgacaccgcgtcaaccacgagtcggtag

SEQ ID NO: 532199 - DNA, 531 bp, Stenotrophomonas maltophilia
atgagcatcacaaagagcgcctacaccaactcgcactgctacaccatcggcctgccccttttcgcacgaagtgagttgaatgccgtcgccttcgacctgctgaactgggagggctcgcgtgagaggatcgtgtcggcctggaagctgatcagagctgaggtgctaacagtgcagagcgtggatgacgacgaagtcgcgcagctctacgacgccgtcgagaaggacgtgggagaagcgatcgcactgcacgacatcaatgtcgacgcgtccggcagcgacgaacgcgaagtgaacgagtggtacaaggcgtacgtagacctctcgaccaattacgggtggtacggctggcccgagctcgcgctgaccgactacctgcgcgggttcgagggctatgaagaggcgagagcgaaggccaccgcgcagcgcgcgtgggagacagcacgcatggcctacgacgccctcaagtccaagtccgttgacgtaaagcccgcgaagaagccgagcaagaaggcaaagaggaaggcttcctga

SEQ ID NO: 532200 - DNA, 210 bp, Stenotrophomonas maltophilia
atgagcaccactcaaatcggcgtcaaatgctcttgtggaagcgacaagttcgaggtgcccaagaacccgaaggcatcggacacgatcaggtgctccagatgcggagccagcggcacctacggcaacgtgatgcggcaggcgacctcgcaggccaagaccgccgtcgagaggcagctcaaggacatgctccgcaaggcgggattcaagtaa

SEQ ID NO: 532201 - DNA, 513 bp, Stenotrophomonas maltophilia
gtggccgcaaagaagttcacccccgaggtgcaggaggtcttcctccaggtgctcgaggacaccgcgtcgccgaagcaggcggcccaggcgtgcggcatctccaggcgcctcgcgttcgagtacaagcagaacgacgtcgagttccgcacccgctgggagaaggccatcgacgtcgcgatggacgcgctcctggacgaggcgtaccgccgcgcctgcctcggcgtggaggagcccgtcatctaccaagggcagctctccacgacgcgcgacccgcagaccggcgacgagaggccgctcaccgtcaggaagcacagcgacaggctcctggaggtgctgctcaagttccgctacggcgaccagatggcggacaggctgcgcgtaaaggtcgaggacacgggcctgtcggccgacgccctgctggcgatgcccgccgacgagcgcgcgcagctcgtggcgctgctctccaagtacaacgcggcgcggccgcacgacgaggaccaggacgatgagtga

SEQ ID NO: 532202 - DNA, 2373 bp, Stenotrophomonas maltophilia
atggccgcccaagaaaacgcccacggcgtgctagaccgtgggcgcaaggttacgactgaccaggagacggagcctgccagagctcacgggatcaatgatgccgagcggcgccccgcggatacgccatcattcgacgacgccgagttcctggtccgcgccggctacgagctgatccccctgaggggaggcagcaaggcgcctagggacaaggactggccctaccgccgctacgaccccgctgccgtgctggcagaggcgcgagcccgcaacggcaacttgggcgtgcggttgcgcgcgaccgacatggtcgtggacgtggacccgcgcaacggcggcgacgactcgctccgcgcgctggtcgccaactgcggcctggacctgggcgcatgcccgcacgtcgccacgggcgggggcggacaccactactacctgcgcaagccggaggggctcgccaccgtcggaaggctgccgcgataccccggcatcgacttcaagaagcagggcgggcaggtcgtcgcgcctggatcggtgcacccagagaccgggcgcaggtacgagtcggagttctggatgctcggccccgacgagacgcccgacgcgccggccgcgttgctcgaactgctgcgcgtccgccaggtcgagatgcctgccgggacgggcgacgccgacaggtggggcgaggtcacgccggagcagctcgccgccgcgctggccgacctgccgcccgacgactacggcgagggcacgcacgacgactggttccagctcatgtgcgcatgccaccacgcgactgcgggcgcgggccgggaggagttcatcgcctggagcacgcaggccgcgggctacggcgaccacggggagtccatcggctaccgttgggactcgctcgcgtcccgcactggccagggtggcaggccgacgacggtgcgccacctgcaccaggtgctcgccaggcacggcgccggggtaccgcacgccgcgccggaggacgacttcgacgcctacgaggacccggccgagctcggccggggcgttgacgacgcggcgctgcgcgagccgccgaggcccgagggcaaggccgcggtgctggaggagatgaacgcgaggcactgtgtcgtgatggagaacggcaagttccgcgtcttcaccgagatgttcgacccggtgctcagacgccacttctaccagcgctccacgaaggaggacttccagaacctgtactgcaacagcttcgtggagcaggtgaacgacaggccgacgacgcgggcgcagttctggctcaagcacccgcagcgccgccagtacgacggcgtcaccttcgacccgtcggagaaccacgagggctggctgaacctgtggcgcggctgggccgtcgatccggcgccgggcgactggtcgctgctggatcagctcattcgcgaggtgctgaccgacggcgacccgcagggctaccgctacgtgctgaactggatcgccgccatgttccagcggccgtcgcagcccgcggaggtagcgatcgccttcaggggcgcgaagggcaccggcaagggcacgctgggccgcgtcctacagcacatcgccggggcgcacggcctgcacatcagctcgcctgagcacatcacggggcgcttcaactcgcacctgcagaactgcatctgcctgttcgccgacgaggcgttctgggcgggcgacaagtccggcgaggcgaagctgaaggcgctcgtgacggagccgacggtcgcctacgagggtaaggggcgcgacgcagtgatggggaagaacctgatccatatcgtcatggcctccaactccgactgggtcgtgcccgcgggcctggacggcgagcggcgcttcgcggtgttcgaggtgaacgactcgcgcaaggacgaccacgcgttcttccgcgcgctgaaccgccagctagacgagggcggccgcgccgccttcctgcacgacatgctcgcgcgcgacatccggggctggcacccgcgcaacgacatcccgcagaacggcgcgctcgccgagcagaagctgcgcggcatggaagcggagttcgcgtggtggcactcgctgctctacacaggcgagctgccgggctacgacgaggacagggactggcaggccggcgcggtcgagctcgacaaggccgacctgtacgagagctacctggccttcgcgcgaggccgcaccaggcacccaaggccgctgcccggcctggcgaaggtgctgctcgccaaggtgggcgtcaccacgcggcagatcaggagcggcgcccgcaaggacaggtgggtgtacgtcgtccccgcgctcgaccaggcgcgcgccaagttcgcggcgatcgccgggatgacgtcggcgcagctctgggtttga

SEQ ID NO: 532203 - DNA, 294 bp, Stenotrophomonas maltophilia
atggaaacgaacctgctcgcggagctgcactcgctgcccgacgacgccctgctcaccgccgacgaggccgcgcagttcctgcgcctcaagtacacgacgctcgcctggtacaggtgccagggcgtcggccccaagttctcccgcgtcggcccgaagctgatccgctaccgcgtgggcgacctgcgcgactacgcgagcgggcaggcgatgggcgacggagtgcagcgcgccgcccaagccgcgctcgccggccgccgccgcgccgccagcctccgcaagaagtcggagggctga

SEQ ID NO: 532204 - DNA, 156 bp, Stenotrophomonas maltophilia
atgagcaagaacgagaagtcctccaaggaactgtccagcctggctggcaaggttctccagcagaagtcctccaccactgcggcgaagaagctggcagggtccgtcctgacgcaggcacccgaccgcaagcctgctggtggcggcaagaagaagtag

SEQ ID NO: 532205 - DNA, 837 bp, Stenotrophomonas maltophilia
atgaacgagactgcccccggcccggctaagaagagcgccaagcatcgcagccccgcctaccccggcttggacctcaaggcggcaatcgagcgtgcgcgatccttctaccatcatgagaagcggtcgtcggcgaacgtcgcggtggctgtccagcattggggctactcgccgtccagcagcggaggcaggcagacactggccgccctcatctcctatggtcttcttgaagacaagggcagcggcgatcagcgctccgtcacgctgtcagacctcgcacttcgcatccttctggacgatcggcctgactccatcgaacgggctgacgccattcggagggcggcgctgttgcccaaaatccactccgagttgttttccaagtggcctagcgagctgccttccaacccgaatctccgccactaccttctgatcgagaagaagttcaacgagaacagcgtggatgacttcatcagccagttgcgcaccacagcggacttcgcgcgcatctacgcgacccattcggcgaacgctgcgacctcttctgcacttagctcagaggacgaggagcaggatacggcgctgtcggagacgcccatcgagccggcatctgttaatcgcatctcatccggcacggatcagccaactattgccttggtatctagcggcaagccggccggcggcggcgaaccaaagaggatgaggcaggacgctctatcgctcgacgaaggccaggtcgtcctgcagtggcctgaccgactcagcgaaaccagcttccaagatctcagcgattggcttgaactgcagttgcgcaggatcaaacgcaacctacaaagcgagtaa

SEQ ID NO: 532206 - DNA, 813 bp, Stenotrophomonas maltophilia
atgcaggtcgcagggttggggcaagcttggcgctcgcctgtcagtctgctgcacatcggtctgctgctattgagtttcttgttccaggataccgcggaggaagtcatctttcgtggctcgctgctgtcgttggtggcgcgcaaggccaatgtcgcggtggccatactgattgtgtcgtttgtcttctgcttcctgcattccagtccgcaccagccgccccgggccatcttgggcatgttcctcttctctgtgttcgcctacgtgtgggcgttgcgggccggcaatatatggggcgcaatgggctgccacgcggggtggaactggttgctcgcgaccggcctcgaactacccgtcaccggcaccgatgcgcacttgccggcgctgctggtggcgctgcgcccgcaaggcctcgatagcctgaccggtggcgcggaagggccggaaggtagttacctgtgcagcgtcttcttcgtcgccgcgatcgcgtggatccagtggcgaaagacgcgcggagcccagaacttctcgccggccagcagtaacgccactgcccgggcggcatcgccccgacggggcccttgccgagataaagctcgaccaggcccacctgcggctacgtttcgcgacgactgctcctggccggaagcggtcgtgagctcgacatgtcagcatccgcccctaagcagccgcttggaagcattgtgccaaaaccggccattcgcccagcgcgaagctgtcgggcaaaaatgcacggaacggcgggtccggcctaagactccgagagagccgcgatcggcgtcagagccccgctga

SEQ ID NO: 532207 - DNA, 339 bp, Stenotrophomonas maltophilia
atgaccccagttgccctgtattcgtccgatccggcccgtggctggctgccctgggcctgggtgacgccgatcctcatgatcctgttcaacgcggtaccagtgatcgcactggacgggtggatgcagtctcagcattggtcgaccccgcgtggcgatccgatcggcctcggtggcttgcttgcgctgctgtggattggctttgcgccaacgctggcggccgtgcgcccctgggtacgcctggtcgaagcgcgctcgttggcgagtaacgggctgaccggtgcggcgccgccgaaaaccgtcatgcgcggactgccgttgggttcggcacagtcacgctga

SEQ ID NO: 532208 - DNA, 1065 bp, Stenotrophomonas maltophilia
atgaccgagcggtatgttatttggaacaacaagggtggcgtcggcaagagtacgattacattccatatcgcctctcgatatgccgaacttaatcctgacaagcaggttctggtaattgacctgtgccctcaagctaacgcaagcatgatgctccttggagggggggttgccggtgaaaaccatgtaatgactctctgcactcaagccgttccgcgcactgttgttggctacatgagcacggtaattgcgggtggtgccggagctcaattgccaaacccatacggttttttagttcaagtggattctgtaaatccagcgatgccttcaaatctcgcattgctttgtggtgatggaaaccttgagccaatggccccagctgtcagtggcgcagcaaatgccccatcgctgacgcctgcgatccagccttggaaatgggttcacctcatcttccggggactgatcgattccttcgcgaactctctccaagggcgagagctggtcgtattcatcgataccaacccaagcttctccatctatacggagcttgcaatctctgcgggtgacaagctaattgtccccgtgaatgccgatgattcgtccagagtggccgcaaacgcactcttcatcttgctccatggtcaaaatcccccgcaccccatctatggggcatggacgtatgcgacgaaagcgcaggcttttggcatgctcgttcccaagatccacgtgatcgttgggaatcgtttaacccagtatgatggagctgctggtgccttcagtgcactttcagacgccacggcagacaccctttttcacgcgtacacaaaccatcccggatacttcaccccgcgcagctaccaggcacagaatttgacggatttccgtagccagtactccgttgctctgcgagacttcaacaccgctggtattgtcgcggctcaccttggcaagccgctaacaaaattgaacggcggttatcatctcgttcatggtaatcctatccagatcaatactgatcgagtgaccgaatgtcttaaggctgtcgattcgcttgtgtcgagcctgtag

SEQ ID NO: 532209 - DNA, 687 bp, Stenotrophomonas maltophilia
atgactgatgtcggttcgaacttggctcagggcgtggcagactgcctcgaccgcaggcggcacactcttactgagacgcagcgtgttgtactttcgctgcagggcaccgtgctgcatgaacatgcttgccgcatggccgtgccgatgctgtacgcgatttgggaaggctttgcgaaggaagttctgcagctctatatcgaacatatccagtcgactgagattccccaatccgaaaccgctacgcctttgctcgcctatgcatggactggttcgttcaagaagcttgctaacaacttggaccatctaaagaaagtagaactggtggataggttcttctctgccttgacggaccggctggtcttcgagaggcgcgaacgtgagatagacaccaagtctaacttgacgttccgggttctcgaggaaattaccacggcgctctgcttagatttgactgtcttggcgcagcacaaggtcaagctagatgcactagtaaacagaagaaacaacatagcccatggcgggcgagaccaggctattgatgagacagttgtggccgagtacaaggagttggtccttgagctcatgattgcccttgaggcaaccctgctgtctgcaatcgaatgcaggtcatacatgagagcagaggtccgacagactgtcggctctgcctgcgtagatgtgcagtaa

SEQ ID NO: 532210 - DNA, 1095 bp, Stenotrophomonas maltophilia
atgagcaaaaatctagatagccttatcgatgagcggcgtacggagatacggacagataagctagacatgacatttggtgagttcgccaacatgtatgagaacaacgaactgatagtggctccggactatcagcgattgttccgctggaaggatgcgcagaaggggcgtttcattgagtctttgcttctcggtatcccgacgcctgccatcttcgtagcagagactgaggatggcgtttgggagctcgtggatggcctgcagcggctttctaccgttctcgagttctttggagtcttgaaggatgccgaagggcaacgtcttcctgcctctacccttgtagcaattgaaggcgcagctctaccggaccttgatggtcttacatttgaagggctaagccttcgttccaggctttcactacgccgtgccggatgccgagttgaggtcatcaaggtcggtagtggaaagcggatgaagtacgacctcttcgaaaggctgaatacaggtggcgttcgactgacggaccaagaggtgcggaactgtatcttcagggcggaggcgccgtcgctcatggagcatttcgacgctcttgccaagaccggagactttgcttcgagtcttgaagtctccaagcacaagctgaactcactgtatgaccgaggcctggtccttaggttctttgctcttaagaacgacctagatagcttccggcatgacgtagagccgttcattacaaactacgttcacaagattgtggatggagacgccgcttttgaccgccaggcggaagatgcagtctttgcgaggaccttcaaggtcatcgcttcggccgccccgtcgggagcctggaagcacctaaggagcgacagtccttctggtgagttctcggtctacatcttcgaggctctctccatcgcagtggccaagaaccttgacttcgttgaggcaatggacccaagtgagcttgcaagtcgaatcaatagcatcaagaccgatagtgagttcaagaaggttgtcgggcctggcggcaacactcgccgccgtctcaccaagaggctagaaatagcgattgagaagctgacggctccgctgacatga

SEQ ID NO: 532211 - DNA, 1356 bp, Stenotrophomonas maltophilia
atgctgacatccgaggaccggagagacgttgaggcgtgcagcgcaagcattgcagaggcggcttcacagttcagtgctaagcgcgacgcaagcaatctggtgggccttgaacactggctcccttactatgctggctacactgagagcttcgcccggaagctcattcaagccgcttcacgtgatgggcgcaaacttcgggtgctggacccatggaacggcagtgggactacgaccaccgccgcaatggagttgggccatgtcagctttggttgcgacatcaatccggtagccacgcttacagcggctgcaaagctggcaaatgcccaggacgcgctgcaccttcagggcttgctccagcatctatccacggcaacttgttcccacaggatttcagtttctgacccgctaacagcttggatgccaatgccggctgttaggaagttcagagcaatccaagaggcaatacttgcagaaatgtcgacatctgcaagcggtgttgttttgtcgccctccaggtcagcgataccgcccctggcgtcattcctgctgttggctttggtccgggcgggacggtctgtagccgctttcaaaagcggtaccaatccgacttggagccgctctgcgggcatcctgcggccctatcgcgctgggcgactcgaacgggagtgggcgagccaggtaagagcaatggcgcaagacttgtacgaagcctctttgcgcgccgcaccaggcggaagcgccacaattgagcttgccaatagcaaaaggcttccgctccaagacggaagtgtcgacttcgtactgtcgtcccctccgtactgcacacgcattgactatgccaaaagtacgtcattcgagttggctgctttaggctttgctgaagaggagcccgactaccggaatctacggttggacgctatgggcactccactgtctaggccgcctggtgagtccgagaacgacaggagtcattcggaggaggtcctggctctattggcctccatcaagcagcaccctagcaaggcgtcctctacgtactactatcggacttacgcccagtacttcactgactgccatgactctctgtctgaaatcatgcgagtcctgaagcctggagcggttgctgcgctcattgttcagagctcctattacaaggaagtctatgtcgacctcccccagttgtttgttgcagaagccaacacggttgggttcgtctcccgtattgccggtgtaacgaaggtcagccgagcattttcgcagatgaatcccaagtcgagcgcttacatgcgaaagaagacgtacgaagagagtgttgtgcttctccagaaggacatgacgaagggtgtaaagcaatga

SEQ ID NO: 532212 - DNA, 690 bp, Stenotrophomonas maltophilia
atggacattccgtccaagcacgtttttgatgctcttagtgaaaaaggcgttcacactttgcatcatgcaaacagtgtcttgaccgcctgccagttcctgcgttcaaagtccttgatgtctcgtgggaccgtcgaacggctgggcattaagcagactgagcaatcatctgatcagatcgacaagcgctacggcatttggtttgacgtttttgccgactctgttgacatccatcgcagggcaagaagggcaaatgcttatggcccggtgctgttcgagcttgactcaagaataatagagaaaacttacaccggaaggatatgggtaaccaaacttaacccaacgaaatgggctgacaaacccgaaagccaaagatggtttcaggatagggacgacttaagcgcgaactttgttaggggtcagtttgatcagatggtggttcttcgccattgcggtggagagctcccatttaggagctatgtttccaagataattttggacgatcccggccaagagactgaggacgcagttgacttgtatagttccgctcatggcgcccttaccctggcaatgtctgacagcggcttagatatcccgattgagaggcgcgcatgcgctgtcgggtgtcagtgcatcaacaactacaccgccaatattgccaggtgccgcgagctcttcggcacgaagatctag

SEQ ID NO: 532213 - DNA, 237 bp, Stenotrophomonas maltophilia
atgagaaacgataagagtagcaacgatgagctgtcttggtcgttggaagaccagggttatgtctatcggcgttcgactaagcagtatcacgccattggcgaaagtgaagaagcagagaataattttagcgtggatgcgagggtgtacgtcatgtctcacgcccaggtaaccgccgaccgtgccgatgagtacttagcttggctggagaccgttggcgttaggcacaccgaagagtga

SEQ ID NO: 532214 - DNA, 1158 bp, Stenotrophomonas maltophilia
atgagaatcgctaccgaggatagatctgttacacccgctccgcaggggagcgcgtttctagtgcatgtgcttctggacgtaatgagtcgagtggagggccgtgcgccagcggtaatcatggctgagatcctggatgtcacgccacagctcgcgcggaggcagaaaggtggtccgcgccggcctcggcgggtggggcgtgccactacgcacgcagagcactggggcctagagcgtctgcttgaaggggggctcaccgaggtggaggcaagcgatttccttgcaaaacgaccggctggcgtactcggtggactgctctactgtatgttcggtgcaactccgctgtcgcctgcgtcgcaagaggcgatccgtgagctggatgccatcgatgaacggttgttcctgctggtgctcgaccgcgacttggacgcggcgttgagctggctgcgcgaggaggagcggcgtcggccagatctattcgctttggtcgacgttgccggctgcccgtccgttgtttttgctgatctcgagccgattgacgagatgggggcgcgcttaagacatctcgcggccaacacgctcctgttactgcttgccgtgatcgatcacgaggtcaccccacgaattgccacagagcaatggtccggttgctcgcttgttgcagcactgctagcaccagaagatatgcccggagtctgctcgcccatcgccatgatggtggacctcgttcttgcgctcggcgtggcctcagttgatggtgcgtttcctgctaaacgaccgcaggctatgcatgcagaacgtctgtttgctggccgtagacccgctgcaactacgagcgcgcgggtgatcaacagccttcggaggcgcgagaagaggttcgatcgccgtgcgctgcacacgttgatgctggataccaagctgcgtccgggtgacccagcccagaccgtcgcggatgaagccagaatgctgatgccccttctcaccgcagctcacctcctgaccgcgatgatgcccacaccctctgggcggagagcccacccggatcgacgcggatggcgcgcagcctacttgctctggtggcatcgacacgccgaggcgcagggtctgccgactgcaccgacagcgtcccccgcgcctcctgcatggtttaccttcacttag

SEQ ID NO: 532215 - DNA, 363 bp, Stenotrophomonas maltophilia
atggagaagatcaagaagatcaaagagctgcaccggattccagttaaggctggcgagtatcacaactacgacgatatttccattccaagcttcttgatcggctttaaagggccggattcgaaagacggcattttcaagatttacgaaaaatttagcgacagattgattccgaatggcattctatgcattgagagcggaattttttacgggcgagagatgtctagtaaggactggctgatggcttccggcaaggcggcgtccctgttcgcgttcttgcagtgtgtaacggatgcattgcaatcatccggaatgaatagattcacactttctgatttcagctccgttcttaaagctcagtcatga

SEQ ID NO: 532216 - DNA, 450 bp, Stenotrophomonas maltophilia
atgaggccaaccattcttgcaatggacttagaaggaacgctgatctcaaatgctgtcagccagatcccacgccccggcctattcgcgttcctggaaacgatgcgggccgagttcagtcagctagtactctttaccactgttccggagtcaagagtgcgagagatttgtagccttctcgtggcggagggcgtggctccgcgctggtttgggcagcttccctatgtttcgtggcacggaccaacgaaggacctgcgatttgtcacatctcacgccggtaaggcccttctcctagacgatcatgcgccttatgtgcatcccggtcaggaaccctggtgggtagagatcccgttgttcggctcaccctacgccgacaatgacactgggttagacctggcccgcttaagaatcgaagagcgacttgcgaaactctcgttggggggcgggcattga

SEQ ID NO: 532217 - DNA, 522 bp, Stenotrophomonas maltophilia
atggccgccgacggcctgcagggatggccacaccgtaagcgtcgcgggcgtcacgcaactccggccacgacaccgccgggcgtggtcaatctgcttgaacacgattctcccgcgctggagccggaaaccaagtgggtgactgatattactgagatcgagacccggcagggcaagctgtatctgtgcatcgtgctggatctgtacgaccagcgcatcatgagctggtcaatacacgatcgacaggatcgccagatggtcacccgggctgtgcagatggcggtgcggcagcgtcaaagaagcgatgaggtaatcctgcattcggatcgtggcagccagttcctcagccgtgaccaccaaggggatctggtggctaacgggctgatctgctcgatgagcgctgtgggtcattgcggcgacaacgcggcctgcaaaggctctttgggctactcaggcgtgagcggatctatcggagaaactgcaccacacttgatgcagcacgagcgggtgtgtttgactacatag

SEQ ID NO: 532218 - DNA, 486 bp, Stenotrophomonas maltophilia
atggggctggcggattccgtcagtcgcctcacgagcctgctggcgatggtcggacagatcgctattgtgttcagcttgcccgcactgctggccggcgcggtggcggtcaattggcctggactgcttctgctgatcgcctcgccccagctggccctgctcgcacagctcggcctgtctcgagtgcgtgagttcgatgctgaccgcctggcggcggaactgaccggcgacccgcacgggctggcgtccgcgctggcgaagatcgagcaggtcagccgctcctggcgtgcctggctgcggccgggatgggacaatcccgagccttcctggttgcgcacccatgcggcaacgcaagatcgcatctcacgcctgctggcgttggcgcccaggccagcatcagcgttgccgtttcacgagatccatttcttgccggaatccgctgtgacgctgcgccccccgcgctggcgcccgagtggactgtggcgctga

SEQ ID NO: 532219 - DNA, 447 bp, Stenotrophomonas maltophilia
atgaatggacgccacgcccgactggcggatcgccacgttcgccagctgatcttgctttgcgcctgcctccttgccggatctgcgctcgcggagacagcacctttgcagcgcacctggcttgtcagtggggcggagctcatcacgctgctgcagggcaaaggcgctgacgggttctgcgatggcgaacagtgccgggggctgtccagcgcccgggccagcagctatatcctgggtgttgccgatgccagccgcgggcagtggtgtgggcagggccggatccttccgcatgaactggtcgatcaggtgtcttcccatctccggcagctgccccgcgagcgattgcaacaggatgcgtctgccctggttgtcgaagggctgcgcgcggcgtttccctgtggtcgcggcacatcgcctggtggcagtgccgagcccggcaaggcacgctga

SEQ ID NO: 532220 - DNA, 627 bp, Stenotrophomonas maltophilia
atggatgccacctcccgcgcgccgttgtcccagcggacgctggcgtggctgaagaaggaggtcgtgccgctgctgatgctgctgggcctgttcttcgctgcacgcgacaccctggccaaccactacgtggtgccgagtggttcgatgcaacccaccctgcagccgggtgaccgcgttgttgtcgatatgcgcgcgcacggcctgcgcctgcctttcaccgggctgaagctgatgggcgccagcgtgccgcaacgcggcgaggtggtggtgttcgcttcgccggccgatggcgtgcgcatgatcaagcgcgtggtggcggtggccggcgatcgtgtgcgcctgcaggatgggcgactgagcgtcaatgggcggtctctgcagatgaccggtgcgaccgatgtggagcggttcggcgagcgtcaggcccggctcgacctgacgcgtggcggaggccctgacatcgccgaagtgcgggtgcctacaggcaaggtactggtgctgggggatcaccgtggcaacagcctggacggccgcttcttcggatgggtcgatgcggaccggatctacggtcgcgcggtggcggtgtactaccgacgggggcagggtgtggtctggcagcgcctgtag

SEQ ID NO: 532221 - DNA, 126 bp, Stenotrophomonas maltophilia
atgaaaaaaatttttccgcccgcgcgcgtcggccaggcgtcggtcctggacaatttcggtgacaagcgtcgcactgtcagatatctgacgttcatttacggcaaagtgtcactggatcggccttag

SEQ ID NO: 532222 - DNA, 144 bp, Stenotrophomonas maltophilia
atgaccggtggggtcagagccctttgcgaagccaagggatccgaccccatgaacgagaacgcccggccaaggccgggcgtttcgctgtccagtagttccacgccctgcgtggatggcttccgtcagaacccgcagaagcagtaa

SEQ ID NO: 532223 - DNA, 924 bp, Stenotrophomonas maltophilia
atggtcacgagcaagatctttaaactaaagaagtggctgacgcttgaggaagccgctgaccaccttggcggggcacttcaagagcctgtctctgtggttgacttgctaagactcgctcaggatgggcacctgacgctctcagcaaacttcgtgaatcatgccagggtttatagggggaagcgcgttcccttggacatggcgaggatcatgatcttcccaggactgaatgcatctctttctgaagagcagaaggagcagttgtccgcgtttcccaaagatgggtcgcgcgaggagcagcacctgtggatgttggcaaacagggagattagcgattgtcctgacgtgacgttggcaattcagggggatcgcatttccaaggagcatgtcattgaatgggaatctgaggtcgtttcgatagacgggatttgggatctgccagattttggtggtgcttccttggacatagctcaccttcttcagagcctcgtgggtggcccagaagtgactctggtttgccttgatggcaccgtggttgttagcccggacggggaacgttatgccaagattctggagcgatttgaagagggattgacagagaagtacccctacggcgatcgaagaaactacttcccaagcgcaggattgccatcagatgccccgatcgtcgtacgccccgaagcgttgaccgctttcgtcgcctcgttgacgagtgaggtgccctcccgaaaagatctcggcagaagggaaaagtcaggtctacttaggatcattgccggtctggcgcacgaggcaaaaattgacatccgcagcaacaaggctgttgctcagatcaccgcagcggcagatgcgtttggcgggccgtcggagcttactgttaggaagcatgtggatgcgatccgcgaagaagttctgccaaggaaatag

SEQ ID NO: 532224 - DNA, 138 bp, Stenotrophomonas maltophilia
atgcacgaggacgaccacggaccgtacaaggtggtcgagtactacgtcccgcaagaggtccagcgcgcctggcaggcattgaactcctcaaggggacaggagattgactcaggggacctggaggaggggcagctatga

SEQ ID NO: 532225 - DNA, 291 bp, Stenotrophomonas maltophilia
atggcaagacccggcggcaacccaaatttgaagacagtccgcaacgcagacacgaggcgggccaatacgaagcggagaacgctagcccgtgaatacgccatgagtaccgctcagaagctctgggaggcatcaaatcagcagtcacagatgaccgatacgcagtacgctgaatggctcaacgctgaagggtggccaacgcgacggggctctctctggaccgcaacccaagttcgtcgggtgtttcgccacctgggactgaacacccccactcacgccaagaagcgcccgtag

SEQ ID NO: 532226 - DNA, 534 bp, Stenotrophomonas maltophilia
atggaagatacggaatacgaagggcgacaaactgagctgcagaagggactcgcgggacatttcctgcaagacgactacaacgcattcatcaccttgaccttcaggtctgaaggctcggtcgcctatgactacgccgagaaggccttcggccgtttcctccatgcgctccggtgcaccctgttcaaggaaaaatgcacgtacaggatgcccttggttccggtcgttgaaagttatccggggaggccgttgtgcagcggcgttcctaatgactctaccgagcggactcatatccattgctgcatcaagcttcctggaaatcccctgagccacaaggaattggttcgggagaagtggcttgctgcgggcggagtatgcggtgacccgcttgtccacgaccgtgatggcgacaagtggttcatcgaaatcgcgactcctgcccaaatgaggaagtacgtcaactactcattgaagcaatgctgcaccgatacccagcctgtgctctggaactttgcgcgcaaaattcggactgcttga

SEQ ID NO: 532227 - DNA, 855 bp, Stenotrophomonas maltophilia
atgacggagcttgagtggagttcgagcgccttgcatgcacgctccattttctttgaagagttcaacgacatagacatctatgttgaggacacagatgcgactactgttcgaatcttcacaaccctgttccaacgggcgctagagcacctccgcattgacacagtgtttggactaggaggacgtcacgaggtcatcaagcgattcaatcgtgatacgaacaatggccggaagaggctctatgtcatagacggtgacttttcctgccttattggggagctttgccatcatgacgttcctccagggatattcagactatcccgatattgcatcgagaactatctcctcgacaaaacggccttttcagaggtcgctcatgacgaagatggactgcgcagtccaactgaactgctcaggcaagctgagtttgaccagtggcttctggattcgtcttcccagttgctccgcctttcattggcatacgcttgcagcgaacactttgagcttggcgttaaaacctgctctcgcccaattgagcggttctaccaaggcggtgatggccgtctcaatgacgcggccattgatgcagtgatttccgagatacgcgccgtcgcagatgcgagattggggataggccaattcgatgccaaaatgcaagaactcgaaacaagagcaggcatgctgcagtacccccacttgtcgataccatcaggaaagggatatggcctacccctactgattcggcggctgaaatgggttaccaagagtagaacgtctgacaagtcgataacgatgcgtctatctcgatatgcgccgattgacgaaatcgctttggccgttaactttgcagtcgactag

SEQ ID NO: 532228 - DNA, 1335 bp, Stenotrophomonas maltophilia
atgaagctacttgcttttcgagcgaaaggaatatacggccagttctctctgaaccttcggttcaatccagacctcaacatactcgtcggcgcgaacggtagtggcaaaacgaccgctcttcggctaattcatggattggtgagcgcctcaatcgaggagctgtatcaaatccccttcgagatgcttcagctaagcatcgagcttcccaaacgcggaacagcgcacatcgaggccttccgagacagagagagcctcagaatctccgtcgacaaggtgagcgaggcgctcattttgccgatgatggatagccccgacatgcggcgattaattcgcaaatcaagcggcgactcttcgctggagagcttcctggcaccccattgtgcgaacaacgccacttggcgctacctaaaggagctggggtctccactcttccttggaatcgacaggcgcggcggacttgtggacgaggaagtgagtatgcttcgccactatcggggcgaagatggacgactgcggcatgcagcgaatccacctagggatggcatgaccgaagttcaatcgctgctatcgaacgagtatcggcgtctacgggccatccaggaaggtcacgctagaagtctgagaaaggccgtgattctttccgcattcaagtactcggagttgtccgagcgagacatccatgcaatggggagagagtcccttcagacgcagcaccagcagctgcttgcccgccagtcagaaattcggaacgccttgcaaagcgttgatgctgagagtgcagacgtcctaagggaggttgataacttctttcgaaagatcaacacactctatgaccagatggagaggagccacaaggctagcgagcctaccttcaacatcgagtggctaatgaataaggcgcagattgaacgaatcacgacgcttctcgaggtcattgacggtcatcgtgcctccgtcgaccgtctcttctcaagcacgacgcgcttcttggcatccgtgaactccttctatgcagactctagaaaacgagttgttattgatgaagtgggtcaattgagcgttgaaggcatcgacaaacaagttgttcctgtatcagcactctcctccggtgagcgccaagtaatactgatgctgggacagttgtttttcaggcgcgacagaaaggtgttcatcatcgatgagcccgaactttcactccatatcaggtggcagaagattttcgttgacaaggctatggaagcgcagaagaacaatcagctcatccttgcgacccactcaccggagattgtgggtgagtatcgggaaaagtgcatcactgtgagagcaagcgtatga

SEQ ID NO: 532229 - DNA, 351 bp, Stenotrophomonas maltophilia
atgagtcagcatatgggacccggcggaactcccgctcagcagggagtcctgcccgagcacatccggcagaacctcaagaagtatcgtcagcacgccgagcgcatcacatgcctcgaatgcggctatgtaggtccgatgggcatcaaggcgcgcatcaagccttggtatgccacgtggtggggcagcattctgctggccgcgatagcggcgagcattgcctctgttctgtttggtggtatcgggacgatggtcgctgtcatcgtgggcggcctggcaagcgctctggggctctcgggcggccgggacattcactcctgccccaactgcgaagccgacctgcaccggcgctga

SEQ ID NO: 532230 - DNA, 435 bp, Stenotrophomonas maltophilia
atgagcgctttccgctcgctttgcattgccatcgttctgttcttgccagctggatgcgacaagctcgcgtctaaggccggtcccggcgagctggtttcattcggctatgttcggccggtgtcatgcgagcggcgcggccccatcagctacaactgcgtaatgaggaatcaccttaacgggttgcgtgaagtgaacatggagtgtgctggctttgatgcagagggccgaatggtgggccgctccaagagcgtacacgcgctgacgcacgtcacgatgcaaccgcacgaagagcgagtagcaacgttcttctatgaaaagggtgtggcaacgatagtctgcgccgatgtgggagatagcatcccgccgtacgaccgcatgcgtgaactgctttccgactcgagggcaaaggacatcacgtccgttctgcccctttga

SEQ ID NO: 532231 - DNA, 162 bp, Stenotrophomonas maltophilia
atggcagcatatgaagtgaagatgggccgccctggaggcggcagtggcacgttcgtggtgacagtccacgccagcaccccggaccaagcgcgacgtaccgccgaagcccagaatcccggttacaaggcgcagtctgtctatcgcctgccgtactcgaattga

SEQ ID NO: 532232 - DNA, 831 bp, Stenotrophomonas maltophilia
atgtataagccaattgtgttgatgacggctttggcgctgtacccgctgacgccgcaggctcaagtcaccccgctggtagtcagtggtcaatgggagtaccaagacgcatcgcagaaggagacagatgaagggatgagcctttgcttccgactgcgggctgtatcgattgcacagagccccgagctacgccatttcggcggtgctctctgcgtgtccaatcctgccgaaggttcgaagctcctgggtgttgctcagcggccacggcgggccgggtgcggctacggagccgatggtgacgcgacagtggtcctgtcgggcttgcgggtactgcccgaggacgaaatgtacgatgagcgactggaggcccgtctggtcgacgttaaagccaggcgaatcgccgctccgttgacttcggattgcggcaacaacgagtcgtcggccttcgggggatttaagggcatctacgacgccatcgcggccctcaaggcgcattcggactacgccactcttgcgatatcgaactttgtgcgcgtggatgctgccagcggtcttgccgagctggatgcaagcacgcaattgttcttgccgcctggttctaccgatacgcttgtcatctacaccgagaacaacgctggcacacccttcctaaccgtggagcgtttcgacggtcggcaatggcgggatgtcaatgccgcgacgttgcctggatacttcagcaggaatggcagcaactactacctcgattggagtggcggcgtagtcaaggtccgagaccttccggggaggaaggcttggagctacgagaatggacgatttctcaacgagggctag

SEQ ID NO: 532233 - DNA, 1185 bp, Stenotrophomonas maltophilia
atgaagctcacggtcccgttcatcggcaaggcaaccccgggcagacacggtgatggagggggactctatctgcttgtgaagttggatgggcggaagacttgggtgttccgttatcgagacagaacaacggggaagcaacgcgacaaaggactaggcccttacccggatgtcaagcttgctgaggcccgggaacttgccgccaactgtcgttcacaactccggcaggacatcgaccctattgccttcaagagggacgcccgagagcgagcgaaggctgagcaaggaagaatgatgacctttggtgagtgcgccacacgattcattgccgccaacaagccctcatggcgaaacgcaaagcacgcagaccagtggcagtcgaccattgagacttactgcagcgcaattcttaagcttcccgtgtccgaagtcgataccaaccatgtctatcgtgctctttatgaaatctgggaaagaaagacagagacagcgacgagattgcgtgggcgcattgagcgagttctggattgggctagcgtgaacaagcttcgttcaggcgacaacccggcgagatggaaaggcaatctgcagcacctcttacctgcacccgagccactcaagaatgtcgagcaccgccctgccctaccgtactcagaggtgcctggattcatgaagaagctcgagcagcgaagagagctgtcagccctcgcgctacagcttcaggtactgacagccacccggcctggtgaagcaacaggcgcaaaatgggaagaaattgattggcaggcgaagctgtggacagtgccgtccagccgaacaaagagcaagaaagcgcacgaagttccgttaagcgaagaagccattgcccttctgaaaagggtgcccaattgcgggaagccccacatcttccccggcagggcgaacaggccaatagttaccgcggcttccttgaaggttctgcggggaattcctggtgccgaagaagccacttgtcacgggtttcgcagttcgttccgagactgggctgctgacaagacaaatcatgaaagggacatcatcgagatgtcccttgcacacaaggtggcagggaaagttgaagccgcttatctgcgaaccaagatgcttgaaaagcgggcagcgctcatggcggactggggaaattactgcctcggaatcactggcgactga

SEQ ID NO: 532234 - DNA, 2121 bp, Stenotrophomonas maltophilia
gtgagcctttccctgatacagagccgggcttgtgaagccagagcggcacccccaatatggttcaaagggaccgtggccaagggggcctatatgcgattggagtcgtttactgtaagtaattaccgctctatcaacgatagcggagaggtcaaagtatctcgcgtcaccgcgttgttgggccgaaatgaaagcgggaaatctaatcttctgaaagcactagagagcctcaatccggctggaggaattaagaccctcaattcaaccaaggattttcctagggacaggaagctgtctgactgtacagacgacacgcaagttctcgactcgcgctgggagttgaacgacgacgaccgcgatgcccttgctgaggttttccctcgtgctgcgagcgcgacccatgcgactgtaaatcgacgttatggcacgacgcgatacatcggcttcgaaggactgttgccgctagagttcaatgctacggaagccaaacaatcggtgaagaagatcgcagctgcggcaagagcagcagccgataagctagacgatggcccgaaggcagctctcacaacagctgcagatactttcgaagcccaatcatcgtccaagaaatttagccttacattcgcggaagaactgtcgtccgctatcaaagccttccggaaggcgctggcaggcgcggatgcagagctaactgccaagcaagacgaagttctcgacgcgctggactcgtcctgcgactccgtcatcaatgacaatgatgagagtgcggccggcaggaaatggctatcatcgaatctcccgattttcgtcttaatcgatgaataccccgaactgcctggcaagcagaacattgctcaatatctccatcggaagcagcaaggtcagctcaccgatgaagatcggtgttttgagaagctctgcaaggtcgccgatcttgatcccgccaagttgcaacaacttcttagcaaggccgatgctgaaacgcgaaatcagctcgtcaatcgtgcaggcgcgcttgtcacgaaagaaattcgacgactgtggaaagatcgcgccctcaaagttcgattcaatattgacggcgactatttcgagacgttggtgtcggatcccaatgcagtctacgaggtggaggtaaacctcgaagatcggagtcgcggcttccaatggttctttgccttctacatcgtatttgcggctgatacccaggggggctccgccgacgacgcaatcttgctcctcgatgaacccggcttgtatcttcatgcacgttctcaaggggacctgcttaagcattttcgagacgacttcagcaatcagatcatttactcgacacactcacctttcatggtgccgacgaatgatcttgattctgtgcgaaccgtaagcatcaccgaggacagcggcacgaccgtatccaacgacccatccggcgacgcgcggactcttttcccccttcaagcggcgctgggctacgacctcgcccaaagcctgttcgttgggccgaacaatttggtggtcgaaggagtcaccgattactggtacctgagctctgtgggtagtcacttcgctgatagcgcgcttccaacgctgaatcctgagatcacgatgacacctgcgggcggagcgcaaaaggtctcctacatggtggcactcctgacctccgaggatttgaacgttttggtcctgctcgacagcgaaaaggacgccaagagcacgaaggatgagctagtgaagaacaagctcatcgcccagcagaatgtgctgttcgtcggcgagtctttcccaacagcgcctactgaggcggacattgaggacatgctcgaccctgtggtgttcgagcagcttgtgagggagtcctatgctgcggagctgaagggcaagaagctcgttctgaatgccagcattccccggatcgtgaaacggtttgaagccgccttctttgatctcggaattcctttccacaagacccgcccggcacgtctcttcttgaagaagatggcagccgagccggagaaggttctgccgcaggaaagcaccgaccgattcgcagcactgttcaagctggtcaacgaaaggctcgacaagtcgagtgcaaagggcagcaagcccttcaattcgtga

SEQ ID NO: 532235 - DNA, 1155 bp, Stenotrophomonas maltophilia
atgaccatcaagcaatacgcgtttcatgtccatgcgcaccttcgggcgcagggctgtacgtcgcttacccgcagccaagtccacgagctgctggcggctgccgctggcttctctacccatgcagccttccaccaccaggccgcatggtgcgacgtcgcttggcgcgacaccggactcgtggcggacgaaaacaggatcatccagcgatgtctgcagtttgggatatcacccgaggagacgaagcgcatagccaagtgcttggccaacttcctcgaagcatccggctacgcgccggtgtactttgacgaactgattgcagcgctggcgagcgatcaaggcgagtggatggagatcgacgagatgatgtcgcctgtcgtcgacacatggatatcgaccatcctgatcagccgcatgcaggaagacttcgatgcgatgcgcgggcagctccctctgctgctcgaggggttggaggcggccgcggcgcggagcgttgctgcagcgcacttggcaactgcgtacgtactcgatgcgcatggagatctgtcagaggaggacgaccaccgattcggtcgtgagctacgccggtgcggccagtggtcgacccagcccgtgaccttcgcggagatcgccgaaggcacagacagcttcattcaattagtggccaagcatcggtaccacctccttgaggcggcacggagcaaggacaggcgtgcgctgttgctcacggctgagcgctacggagatcccggcgtgctcgagcttgagccgtcggatgatatggacccgtacgaaatggctgacttggccgatgcgagtggtcgacccgagctggcctatcaatggctggccgtgcttgcacgcgagggagatgtatctgccatgcgcacgctgattgaagaccgcggcgagacgccgttccgcgcttgggtctggatgcatctctcgcgcatgctgggtcgagacctgagccaggatcgatttgaagcgatcgacgaatacggtgggccgtacgacgacgatgtgggcgggccagcgtatgttgggggagaggatggaatcgaattggtgccccttgcagccgatgaggacaggcgcgccgaagaagaggctgccaagctgttcgccgtaatcgaagagcgctatgaactgaattga

SEQ ID NO: 532236 - DNA, 171 bp, Stenotrophomonas maltophilia
atgactctagtggacctactgacctctggcgcctatcgcgactatctactcggcttggacgcgtacctgaagatgcagcccttcaagcatgaggagttgatcgagccgatcatcgtccgtgtgcaggtaatggggcggggggcgatgtccgcatctgcgctggcttgttag

SEQ ID NO: 532237 - DNA, 1872 bp, Stenotrophomonas maltophilia
atggatattgaaactgctggggccatcaggctgttcttcccgaacccatcgttgaacttggtctatttcgaggcactagccaatgcgctggatgcgggtgcgaccgatgtgtccattgagattgatgtccagggatacgacaggcctgacacgctgaagatcacggttacggacaacggtgatgggttcaacgatgaaaattttgatcgcttcaaaaccttgttgaagcctcgggacaagttccacaaaggaattggacgcttggtgtttctcaactatttcgatcgcgttgaagttttcagcgcacgggataagtggcagaggaaatttgtcttcaaagagggttttgatgacaatgcgccacttcaacagcttgagcaagcgcaggatgcaagaacaacactgacattcactggattttccggttctcgcgtaaggtcctatgacaatctgaagccggacaccatcaagccgctcttgattgagcagttcctgccaacgctggacgcgcgcaagcgtgatggcaagacctttaagattttgatcaacttgagtaccacggagagcaatccgcagaaggagttctttcctcacggggtgacgatcacacctgatgatttgccttcaatgaccaagatcaccattcaagatagctctctggatgcgttttccaccattgatatgcactatcacgttgagcccgtttctggcaaagggagcctgcttgtcgccttcaacattgacggtcgaacaattcccgtgaacctgataccagcttcggcttttccgacgggctatatgggtgtattcctattcgagtcagagatgtttcactccaatgccgacagttcacgccaaaagctgatctttccgggcggcctccaagaagcgagcctttatcgtgttttgcgccgagaagttggcaagattctagtggagaaaattccgaagatcactgagaagaaccaagaggtaaagagaaagttcgaggagcaattcccgcatctcctgggttacttcgaaaacgaaactgttggcttgattgatcgtgatgatgctctggagatcgcgcagcagaaattctttcgtgcccagaagcaggtgctgcaatgcgataaaatgaccgaagcggcgtataagaagtcgctggagctttcatcgcgcacattgacagaatacatcttgtaccgcgacaagatcatcggccgcatgaaggaaatgacggccgaaaatgctgaatccgaaatacacaatgtcatcgtgccgaggttcaaggagttctcgaaagaagtcatgccttcggagatttaccagaacaacgcctggttgctggatgacaagttcatggtatttcgtaccatcctgagcgagaagcggatggatactgtcgtcaacgccattcggcttgacgaagaatgcggagaagattcgggtaggccggatattgccatgatattctccgccgatccaacagacaaccgcgcagtggacgttgtggtcattgaaataaagagaaaaacggacgatgaaaaagaaaatcaatatgccatcaatcaattgcttgatcgtgcggtgaagctggcggcgcattgccctaatatccagagaatctggtactacgcggtcatccagataagcgacacaatgggaacacgactgcgccagcaaaagtgggcgcccctgttttccagggggaagctttactaccaggaattcccaaccgaacggccagatggaacggtcgttccgactccgaccttcgtcgtgtccttcgatgccatcgtggcggatgccgaaagcaggaaccacacattcctcgaaatcttgcgtaatggcatgagggaatacgccgcacaacaggccacgggctag

SEQ ID NO: 532238 - DNA, 876 bp, Stenotrophomonas maltophilia
ttggcgcagcagaaagaagctgtactgacggcgctttcgattgccggcatcagtcgtgagcctgttcaggaatgggcgccatcggacgacacgcccgtctcctttctggacggcttgcccagcgttcggctgcgcgaagacccgatggtggtcaacgacctgcaaaacttgccgggctttgatgtgatcaggacttacgcccactgcgcggcggtattcgagtccgaggacgcttcggaacgcctaacggtcatccttgccaaccgtcttccactcgaagagcaaaccggcaccgatctcatctacttcaacgaaacctaccagagctttgtcatggttcagtacaaggcgatggagcgtgaagacaggcacaacaggccagccgaagccgtctatcggttgcccgacgcgcagttgaaggaagaaatcgatcgtatggatgccgtgcttcttgcattaaaggcctgtgggcccgacaccgacgttggcggctaccggctcaccgaaaacccgttcttcctaaagctctgcccaagattggtattcaacccggatgatgtgggcctagtgcctggcatgtacctcccgctggattactggaagctgctggagaacgacccaggcatcaaagggccaagaggtggcctccggatcacctatgagaacgcaaagcgccatttcgacaacaccgcatttatcaccgtggtgtccaaggcgtgggtcggcacaacgcccagtcagtctcaggtgcttcgggatgtcatccgggaaaccttggaaacgggcaaggcagtcgcgattgccatcaaaccgaagaggcccgccgagccccaagccgacgatgaagaaaaagatgaagaatccctcgatttctga

SEQ ID NO: 532239 - DNA, 453 bp, Stenotrophomonas maltophilia
atgggtagcattgcctttgcagattcccatttccagaagtacaacagtgcgctgatctcgatgaattctcaggtccgaatgcacaagcatgaatcagagaatctttcgtcggacctggctgaatttacaaggacacaccttgagttgatttcccaaagtgaactatcgggtccgccgataagcaggcgttcgcttgatgaattcaagtccgagctggacaaattcgttctcgccaacagggaaatgtcgactaagaacgcaggcgatgccatcaagttgatggaactcatccacaccagacgtatcatgcattactacctaattgcatgcgctggcggtctgctggctggcttggtcattaccatcatcggcttcagactttggtatcgaaaggtgcaggttccggaagataagaagaatctctcccaaacgacgaaggcctctaaacgttaa

SEQ ID NO: 532240 - DNA, 840 bp, Stenotrophomonas maltophilia
atggcgaaatgtcatttttgtggagacaatgaagcgattcagaactcgcatatcttgccaaagtatatttttacctggctaaaagagagttctccaacaaactacttgcgcgccaccgacacgcctaacaggcgcgagcaagatgggcgcaagaacgaaatactttgtttaaaatgcgaaaatcaattttcaaagctggagaacaaatttaaagttgaagtcttcgaggagctcataaaggatccatcgaccaatagcttggatccaaaatttaccgaagattccattaaatgcgctttagttattgcatggcgatctggcgtcaacttcctccttaattctgcgcacaaagaacacactttagaagctcgagactactcactgattgacgattcacttgaacagattaaaaaagctatcagtggccgtacaggtgcaacgattagctgcgcaactctcacccccgctcaagtactagaaagcgggtttcctgactataataataatgcgtacttttacgacaggggtgttggagaggacgtccgatgccatgatgaaaagctcatggttttcataaagctccctcgtgcgataatttggataacaccaaagtttcgcaatctagcggccggctcttacgattgcgatttgaatccaaagttgaatgagatgccagtcgaagtgccttatattttgaatggatttattaattcattcaaggatgcacgtgacgcactcagcgatagtcaaaaaagcaagattgcagagtcatatgacgcatcacgtgaaaacaatgactggaaacgcagtgccaaccggcaacgcaacgacggcagctaa

SEQ ID NO: 532241 - DNA, 264 bp, Stenotrophomonas maltophilia
atggaaatcaccagaagctttctgcgaatgcacttgtatgtggttgcagtgaatcagcgcctcatgaatcaacaggtccggcaaggcctagagcagtacgaccgagccaccttcgagcgcctcatcgatgctcgtatagcgcatctcgaggctgagtctaactccccgaccgccttcttctcgcccgagttctattcggggggcgtggccaccatgagagaagcgcttcataacctagactacatcctgtcgaaggtgccctaa

SEQ ID NO: 532242 - DNA, 621 bp, Stenotrophomonas maltophilia
atgacagatcactttgagctcctcaaacaacagattcctgcattagagaagatttccgagattcatggggagatcgggttctttgcccaggaggcgttgcgattctgcacaatcgcggggacgctatgcgcaacatttccgctagacaatagctcgattgaagagcgtcagattacgcacatattggccagatctctcttggagaactacttctggctcatatacatcttcgacgaccagagccaaagaagctcccgatatggtgagaagatcaatgggttcaagcgtgagtactcgaaactaatggccgatccactagtgccgaagaaggatgagctcgagcctgccgaccccacttggagcagtttacccaagcctatggacattaatagcatgctcgcccaggtcaggaatgacctgggcgatcgcctgagctacctatattttgtgtaccgagtcgcaagctttgatacccatggcaacagcatggcagttctgttcgagcaggctttcggtcagagctgcagtttctcagcgctaaatctcaagttcggatttgatctcatcgctaatcagtaccttgtaatcctgcaagagctcgctgaggaaggagcggtctag

SEQ ID NO: 532243 - DNA, 1881 bp, Stenotrophomonas maltophilia
atggaagcctcccggccctgcggcgaggctgatgcccccttgaaccgcatcatcgatgccgcaactccccggacgcgcatgatcccctcccgaatcaccctgggccttctggcctctctcaccgcagcgcctgcgttcgccgcgcttccaaactgcccctaccagttctggtctccgccttccctcaagtacaaggaaaaactacccaacacgcacgctccgggcgacaacacctgcaggaacacggagctttccatcacggattggtactggatggaccgggtcgagcttcccgatcgcttccggaacctcaggatcaagaacatgtccgtctacccgtcaagcgtggtggagatccaaggcccgatctacaacgttccgggcgggccattgaagctgcccagcggcgaatccatcgagttccacgccaacgctactggtagcgagggcgcatggcttgaatggcaatccagcctcgagctgagcgtgcccaaccagcaacgctggcagatcccgaccagcaagcacctggtctcctttgtcgtactgcgcgatgggcaacatgctcgcgagctgctactgcccaaccagggcacggcctatcaaaccatcgtgatcgacaacctagcgaccacgccgacagaggtactgggtgggggtacggacttcctcgaccagcgaatcaccgtccaccgcaagcagctggcgcgtgcggagtatgatcccgccaggaaggtgtggacgtgggtgcacgcaccgtactaccacaacaacgaccctcggacctgggagcaccgcgtttcttcccgcactatcgtggaattcagcgatggcaagtgggcgggactcatcacgctgccccgtacacgttctgatcgcgacaggatgatctatcgttcaagcgcctccatcgactccgtcatccgccttgactacggtgcaccccaggtgatcctgcgcaagggtgacgaactcgagttcgtcttcctcgccgaactgggacattggcagcttgttcgccggagtgggaaggaggtgaagttccatgagctgcgcaatggaaagctcgaggagaagacctcgtttgtccgcgtggtggtcggctctcccaatacgtcttaccggacgctgaccctgcccaagccggagaccgaacggcgcgtgcttgtggagaacacggcgctgtggcagatcgatgtcgcccacggcacgctgcgcgaaacggtacggccacgcgaacaggttgcgttccgggtcaatgacaagggcgtttgggagcgtgaaacaaccaccatcgatctactgttcattgtcgaccagcaggtggaagccgttggtgggatgggcggcgcattgaagctcatggaggagaacctcaagctgaccaatgaggcccttgaaaactcgggcgccaccttccgctatcgccaggcctacacgttggcggacgatttcaccttcccgggcgtggagtcattcgatatcgcctaccgcctggcgcacgaccccgacgtgacggccatccgcaagctgatcagggccgacggcgtctactacggcggcacgctcaacaccaacaagcggctgccgtgcggcaacgcatacgcagccccctctcagggcatctactcgattgccacatcgctgctgtgccccaccaccacgctgcgccagcaggtcgcctacggcctgggcatgcccaaggcgcagccgcgccagccggtacccgtcattggctacggcaatgaattgccgtactacccgaccccgaacagagtgctgcccgacggctaccgcatgttcaaccctgggcaggaaggctatgtggacaggatgaacgaacgcgccgaactggtcgcaggattctccgacctgctgtaa

SEQ ID NO: 532244 - DNA, 156 bp, Stenotrophomonas maltophilia
atggagggtgagattgcggctgaactgcctcgcctggagctggaactggccgaggttgcgaaagactgcctgagtgcgaagaacgccattgcagtgaagctgccggccaggcctatgggcagttgctggagcaagtggttgatagcctggcagtag

SEQ ID NO: 532245 - DNA, 1290 bp, Stenotrophomonas maltophilia
atgaccaccccaaccaacgcaacagcgaacaagagcagctggatcacaggagaccggatcgtcttcttcctgatcatcctgttcgcaatggcgtacaagagcaatgatgcgctgagcaatccgcagttctgggcagaagacgctactgtgttcttcaaggaacagttcggacagtcgattcctcagttctttactccctacgccggatatttgcactttgtaccgcggctggttgcgtggatcgcgtcatgggctccggccgcaaaagcacctctgatctacaacgcatccgcaatccttttgacgacagccgccattgttgtcacctgccggcggatgaagctcgttgtgcctgtgtggattgtcgcgctttcatttctcgccgtccccaccagtggtgagatcctgggcacgatcaccaacgcccagtggtttctccaatttgccctcgccgccgtttgcctgaccccatatcaatcggagcgcggctggatgaactggttgcgcccgttggcggtcctggtgatctcgcttaccggcccattctccatcgtcttggccttgatcatcgcaggcatgttggcggcctccctcctgtcgctacggatcaaggtggatcctttcaatggtgcgttgggagagttcgccacaacgcgggattggactgcgctggcagcactgtgtgtgggtgcgatcattcaagccgccgtagtgatgacagatccgcctgtcaaagccgagggtcattacggtctatttactctgctcaagatcacctttggcgagctggtgcccattcacgcattcggtggtacttttctaactgccacagcttggatcattctcttttccttgatatttgggacattgatcctttcaaagaagattgaaggtcgctcccgcttgattgtgcttggattcgccgcctttgcaggcgctgaagtattcgcaccagtgaggctgagggacttttctcccctatatcatttcatgcttgctgaccgttacttctacctaatcaaggttgtactctggtgggcagtatggttgtcgatgaccgggctcagtcgccgacgtcgattgaatgccaccgttgcaacaactgcgctgctgtgcctggtagcagtaggcaacccacagttcctacgtcgccccgcgttcgttgactttgattggcggagccacgcgagggagctggaagctcctggctcccacacaatcccactcaatcctcagggctggggcgtaatgatcgaatcgaagtccgccgaggtcgagcatgaccgctaa

SEQ ID NO: 532246 - DNA, 1071 bp, Stenotrophomonas maltophilia
atgaaccagcgatatggcacggagccgcgctactcgctgcgctcccagtacgcccggcgaattgctgtgatccccgaacgctacggcttggtgatgtcgccgtgcgcaagcatacgcctgcacgcgttcaccgagcacttcccagctgacgttcgctatctgattccggaagaactcgatgcgttcgctcctcacgttgtgctgtggaatcgaggcgcagtagctgatgaggcgggttttgccagtttggcggcagcccggcaccgcggcgcgcggctgctgtacgatcttgacgacaatctgttggctatggacgaacatccggagcgtaacgcgtatgcaggcatcatcgatgccgtgcgccgttctattgccttggcagacgccacttggtgttccaccgctcgcttggccgaagttgttgaagcggagggcggtatcgcggtttgcatgccaaatgcgctggacgacgttctctggcaggcggcggatcctagcccggtaagcatagcgcgcgatgccgagctgcgattgctgtacatggggacgcgcactcatgacgaagatttccgactgctggatgaagcgctgcagctgatctgggcgagaaagccgcgcacgttctcgctcaccttggtcggagtgaatgctgaggcttcgcagtcccgcccgtggttgtacgccgagagccctccgcctcatgtcggtgcgtcttatcctgcattcgtccattggttctcaaggttgcgcggtttccatctcggtctggcgcctctgctggacacgcgcttcaaccgatgcaagagctccattaaggtgctcgactatgcgtccgctggcatggtcacgctggcatccaatgtccccgcctaccgcgatgacgcgatgaacgaccgtattctggtggacaataagcctgaggaatgggcgaagcgtatcgcggcgatcattgatggggtgctgcctttgggtgagattgcgactcatgctcgacagcgcgtaggcaggagtgtttttcaagcggcggtcgcgcgccgctgggaaagctgcgtacagagtccaggtgactga

SEQ ID NO: 532247 - DNA, 1059 bp, Stenotrophomonas maltophilia
atgatcgatttccagttgtccccgaacatgctgatgatgccccgcaagcttcctcacagcgcgtggcttgggcacattccgttcgccagctggttggtggagacggtgcgaccaaagagcatcgtggagctcggtacgcacaacggcgcgtcgtttctagccttctgccaagcggtagaaacccagcacgtcagtgcgcgtgttttcgcggtggatacttgggaaggcgacgagcatgctggtttctacggcaacgagatctatgccgaactccgcgattatcagcaacgccattacgccggaatttccgagatgatgcgcatgcgctttgaccaagcgctggagtatttcgcggaaggatcggtcgacatcctgcatgtggacggcctccatacctacgaagctgtacgcgaagacttcgaaacgtggcgcagcaaactgtcgcgacgcgcagtggtgctgttccacgacagctgcgtgcgcgagcgcgggtttggcgtgtggcaatactggagcgagatctgttcgcagtttccgtcgttcgaattcacccacactcatggtctgggtgtgctgctggtaggtgaggagcagccaaaagagctactgcggcttgctgaggcagcgcgtaatggccagttcgcaacgatcaaccaattcttcgatgcgctaggccgcaacatcaagaatgtggaagagatcgaacgggtgaaccaaggcttggcagctgcccacggcgaaattgggcgactcaacaatgaggtcgcccgactcaatggcgaggaagctcgtctgcgcgcattgctggataaaaacagcgatgtcaccgaggaacactatgccgtggtcgagtcgcagttgccagccttggcacagggcttgtcaatgctggagcggcgtgtcattgagggaatgaacgaaacgcgtcaagcgctagacgactcccgtgagctctctgtagccaatgtcgtggcgtctgtgattccccgccttgacgaacaggaccgaaagctgactctcctcgcgcgcccatggtggcgccgtatgctcggccgctga

SEQ ID NO: 532248 - DNA, 3627 bp, Stenotrophomonas maltophilia
atgaatcgaatctatcggcgtatctggaatgcagcacgccagtgctgggtggtggcgagcgagctggccgtcgcaaggcgctgtggcacttcaagaaggaagctggcgttgctggttgttgcgctttccgtatccacgtttggcgttatggatgccggcgcagtcgagtactgggggtgtaacgtcttcgatctggacaagcccgagctccgctgcgcgccgcaccttggtcaaaccgatgcggtcccctatgcaagctccaagttgtccacgtccaaggagtatctgatcatgggcggcggggcctacaacgatggatcgtggaacgccacctttggtcacaaagccaaggtgcttggcaactacaacaccgctctgggccagcaggcatacatcagtggtgtggacagcgttgcagttggctacaacgccacggcccagctggggcacagcaccgtggtgggggccaacgcctatggcaagggcatcgggtccactgccttcggaaacaaggcctcagccacgcgccagaactcgattgccatcggtagtggatcgctctcgcagagcgagaattcagtggcgatcggtgcaaattcccttgccagtgaagtgaacaccgtctccgtcggcagtgacaaggagaagcggcggatcgtcaacgtagccgatgggcggatcaccgcagccagtaccgacgccgtcacgggcaagcagttgtacgcgaccaacagcaagctgggcgcggtcgaagcgagcgtcggcaccatgaaaaatgatctgacagcggttcggacgcttgcgcagtccgccaccaatcgcatcgatgccaccaccctggcactgggtaggggcgcgatcgcagaatcggggagctacggcatcagcaccgccatcggcaacaatgccaaggcctacaacggtcgcagtgtcgcactcgggttcgatgcgctggccggcgtcgatgcggagggcaaccgagtgaccggccagaatgccggcgtttccatcggtgcaaacacgcgcagcgcaaacggcgcggtcgcgaccggcttccgggccattgccagcgggaacttctccattgccgtaggcggtgacgccaatgcggccgccgagcatgccactgcaatggggtacctgagcaaagccacggcaaagcagtccacggcgctggggcgtggcagcgaggccaaggcgcagttcgccaccgcgttgggcaatcttgcggtatcggccaacaccagcgccgtggcgctgggtgaccgcgccaatgcccgccatgacaatgcggtggcactgggtgccggctctgtcacggcgtcggtcaactccgtttcggtgggcagcgctacgctcaagcgcaagatccagtacattgccgatggcgtggtcagcaatggcagcaccgacgcgatcaccggcagtcagctgttcgcgaccaaccaggccgtgtccactgcccagagcacggccacgagcgcgcagacggcggccaatgctgccaaggccgatgctgccaaggcactgaccgagacgaccgcgctcgccgggttggtctctcagaccgccgccagcggcaatgtccgcttgggcgagaagaacagcggcactgtactggacgtgcgcaacagcgccaacgccagccggaaggttaccggcgtggcggatggcacggtaagtgccagcagcaatgaagcggtcaacggcaagcagctcaatgccaccaacgtgcaggtggctgccgtggagaaagcggctacggcggcgcaggcggatgcaacggctgcgaaggcggacgctgccaaggcgttggtcagcaccaccgcgctggaaggactggtcagccaggctgccgccaacggcaatgtccgtctgggcgagaagaacagcggaaccgtgctggacgtgcgcaacagcgccaacgccagccggaagcttgccggtgtagcggatggcacggtaagcgccagcagcaatgaagcgatcaacggcaagcagctcaatgccaccaatgtgcaggtggctgccgtggagaaagcggctacggcggcgcaagcggatgcaacggttgcaaaggcagacgctgccaaggcgttggtcagcacgggtgcgctggaagggctggtcagtcaggtcgcagccaacggcaatgttcgtctgggcgaaaagaacagtggaactgtgctagatgcacgcaacagcttgggcaccaatcgtaagatcactggaattgccgacgcagatgttggtgcgggcagcagtgatgcggtgaatggcgggcagttgttctcttccaatttgaagatagcagtgctcgaggagaagagccgtctcttcggggcaggcaatgaagctggtccgacctcagcacgcgccggtgaattcgggttggcgataggcaacggtgctatggcatcagtcgattccgaaggaggcgtcgccttgggtgccttcgctggcgcactcgcaaggaattccgttgcccttgggcgcgcggccagtgtggaggccggagcggttgccggatttgcacttggtgcgggcacctatgtggctgcagctgacggaattgcgattggcgctggttcggaagttgaggctggtgcagatggaggcgttgccctcggcgctggttccgttgtggctgagagcgacactgtttctgttggcaatgacagtctcaaacgtcgaattacaaatcttgcccgcggcaccgctgatcacaacgccacgaccgtctcccagttgaaggattcccttgccactctcggcggcagcgcaggcatggatgccaacggcaacatcattgccccgacctacgcggtgcagggcggtacgcagagcaccgtggaggacgcgctgatggcgctcgatggcgctgtcatcactgcaggccgccgtgtggataaggtggagggtcagctcaactcgatcttccaggacaccccctcggtccgtgccgtcggtctcaaccagctcaccctcgccggaacccacggcatggtcatctccaacgtggccaatggcctggtcgccgccggcagccgcgatgcggtcaatggtggccagctgcattcgatgcagcagcagctcaacggccgtatcgatggcctggaagagcgcatcgatgcgccgcagccgcaggcaatggcggttgcttcggcgccggagccggaagcaccggtgccgcaggccgaaggcggccagcaggtggcgtcggtcggcgagggtgagaagcccgcgccgcagccgaagtcgaagaacgacgacacgcccaagccgcaggtcgacaccgctgaattggagaagatgctggcccgcgccaacgagtacaccgatggcgcgatcagcaacttcgaacgtcgcctggacaagatggacaagcgcttcaaccgcatggcggcgatgagcagcgcgcagaccgcgatggcgatgaacaccgccggcctggccacctacaaccgcctgggtgcgggcgtgggctacagcgagggtgagtcggcgatggcggtgggctaccagcgcgtgctcaacgagaagggctcggccaccttcagcctcaatggtgcgttcaccaacagcggtgagcgcagcatgggcgtcggcgtgggcatcggctggtaa

SEQ ID NO: 532249 - DNA, 789 bp, Stenotrophomonas maltophilia
atgccggccagttccatcgccttggcgccctgctgcttgcttcgtacagcctccagtggcggagataggtggagaacctgtctcctaccacgatcgccagtgcatccttttcgctcagcccattggaggctgtatctgtgcgctgtactgcttcaccgacagtgctgccgaaggcgggtcaatccttactctcattatcttttatccaaactcgccacgaaactcaaccttgctccagacaggctcctctgtcacctcagcatgaggcctaccgcggccgacaagaatctcgacttcgaggtcacaaccaaattcaagatccccttgcatcgcccgccccccccttttgatccctactgccatcagagaagccgccacctaaacccctacgacctaacctttccaaccgactcgatccagtcaacccagacagaggaatcattcaggcaaccgcaatcatctaaaggcgacgtgaaaggcccaataacttcgaacagcggaagatcctcaccggatcgaccaaaaaacgcctcgaggaataccagcgttaccgagaacgcatccagcaacgtcaaacgtccacctgatgaattaatttgcgcgctacagaattcagaattaagaacatttccatcaactgaaatatcagcaaaatgcgtcgcatcagccaccccacatcgccgggtcgttgggcaagtcattcgcccacagaaatacccaccggaaataatagatcaacaagagtgccccacccctctccccaaatacttattcaggaaaatttattag

SEQ ID NO: 532250 - DNA, 1560 bp, Stenotrophomonas maltophilia
gtgaagtatcgcgaaagcaagacggacaaggacctaagatcctggttctctaacgatctgtcaaaagcgctattgcgtggtattactcttaaacagggcgcattgcgtggcgtaaatagcctatccctcaagtttgaatacccaattgtcgcattcgctggagttaatggtgcgggaaagtcaactattctcgcaatggcgagctgtgctttccacaacgtcccgaaagggtttcgtctgccgagaagaaagttaccgtactacacgttctcagatttctttattcagcattcgcaggaagttgcgccgcagggcatcgaaattctctattccatcgctttcgataactggaataagagcgcgcgtcttcctgatggtaaaggcgttgctgcgcagattcggaaaaaagcaaaaggcgggaaatggaacgactaccagctgcgtgtcgatagaaacgtcgttttcttggggatcgagagaatagttccccacaacgaaagaagtcagtcgagatcatactcgcgtgtcttcaaggatgttccgaaacgaggctgggagattaaggttgctgcggctgtgggatatgttctcgggaagaagtacgatgattttcgatatctagagcattctcgatacagccttcctgtggtcaggagcggtgccgttacgtattccggattcaatatgggggccggggagaatgcgcttttcgagatattctccaatatctacgctgcgggagaaggggcgcttttcgttcttgatgaaattgaactaggactgcattcgcgcgcacagaagttgtttatgcgtcgcctgaaggaggtctgtagcgaaatgtcaactcagataatttgtacaacacattcgcggtatatttttgagagcttgccggacgatgctaggttcttcattgagaatgttgctgggaaaactaaggtgacacagggggtgtctcctgattttgctttcagaaagatgggcgatgatgtaaaggcggaactttatgtcatggttgaggatgatgtggcgaagtccatgatcctcgagtcgcttcacagtgccgtgcggtctcgcgttgaggtgcaggtcgtgggctcagctaccgcgatctcacgacagctggcggcagcatttgttcgaaaggatcaacgaaaattcgtggctgtgcttgacggagatcagcggaaaaatttcaaaaataatctaggtgttgccaaaaaaatgctggaagtggcatctccggattttgaaaattggctgcaagagagagtgtcgtatctaccgggagattcctggcctgaatcgtggatggtgcaaaagtgcaaagaagttcctgctgccgtcagtgcttcacttgcggttgatgcagatgaagtctctgatcttatggaatatgcgttgcaggcaggcaagcatagcgagtttcacgaaatttcaactcacatagggatccctagagatcaagtgctcaacaagatctcggcggtgctcttccgtgagcatgcacaagagttttcagagcttgttggatttattcaagggcgacttgattcataa

SEQ ID NO: 532251 - DNA, 1971 bp, Stenotrophomonas maltophilia
atggatgttttcggaatcgatgatgtcgaactggttgatcgaaccgaagttgccagacgcaatctaaagaatctactgacttcctacgctgatgaagcagatgtttttaccgaaagcctccagaatgcagtggacgcgatcactagtgcgaaagccgaaggaatgtacaaagacggggaactcccaagaattactgttgtcctggggagaccaatcgaccgccagcactatatatatgtagcagacaacggcgtcggaatgagcagcgaagtcgcaaagcgcattactgtaccgggattctcacacggcaaagcaaagggaaaatctgtcggctataagggcgttggtgcgtcatacttctttgcagcaactaacaaggcggcgataagaagtgtttcccccgatggtgagttgactgagtacacagtctacaattctcacaattggatcaggaatgagggggagcgccggcccgagataaagccaatctttgacataccaaaatcgatagctgcacttgttgacacgaagaggggtactgaaacgtactttcagtttcatgattcgatgaggcccgccaccctcaacaatatcgtagtaattgggggaggtgcggaatcagaacttaagaactggatgtccttcctctgtgcgaaaactccaatcggctctgtcctagatcgaagtgatcttaacgcagagatcgtaatctgccttgaccgaggcgatggcgacgttacccagcaaaaatggagatcgggaacatacagcttcgacaatcgcacgaccggctatcccttccctcatctcgttctaaatactgcaaagaacacctctgagatcgacaagaccgaaattcatcgaaagcacatccacgcagggaaacacgctgctgtgtataaagtatggagtgcggatgagatcattcaagataccgcttcacttgaacaggatgagatctcaaagctgcaggagcatctcgatggagtatacggatacttctgctattccacagatgttctgaaggtgatcaatagccgcttgggtagtagagctagcttgatcagacacggtatccgcattgcaagcgacggagtagcgcaaggtcgaaacgttgatctatctctaaccagtagtcaggggcttgatcgacagacgcatatagttctaatgttcaagaatctagagctagacacgggtcgaaagatttcggcggatgaggtaataggttccgcaatttctaaactcggtcgccgagtcgtcgatgtaatgaaggactatcgttgggcaatgaagaagaaagatcgacccgacgtgcagtccgatttggcagcttggcgacgtgacgtcgacgttaggcatcagacggcattaacccctcttgttttccccaatggctcaaagtctcctctacttgttgaccctagtaacgagcaggaagtaattgcacttttttcggctctattgacagcagacaagatacgtagcattgatatcgcggcgatctcgggctttgagcgatatgactgcctagccaatgtctctgatctaggagataaaattcgagatccggaagaccctcttgccgtacgggttcacaatgtaacgcctactggggagaagctagttattgagtttaagtactcattcgacgagcttcttcaagacttttccgagaagaagaagaacccggcagagatcgatgttctggtctgctggtcggtgccgcaactatccgttgaaaggggtagatttcaaccgtgttacggccaatggcgggactacagagcgctacattctgcgtcatacatttggacggatgagaatgaaacttcgtccttcgctgttatatctcttaagaatgtaatcgctgagatactagcccatcaggagattcgcgcggaaaaggatggccaggggcgagctctcattagtcgcctagaacagcatgacagtgaccatctggtttag

SEQ ID NO: 532252 - DNA, 672 bp, Stenotrophomonas maltophilia
atggaaccgatgtctactcgagttgtcgtcgacgcccatgagatcgaggacgacatcgtcagcaggttcgggatcgcaccggcagacttggaaggggtgggaagaagcatgctgcgggcattcctccaagtcaccagtttgcatccgaaggggttcgaagggaccaatgcttggggtgagggctctgctgccatccgctcggctttgattccgaagggttggcatcccgaagatccgcagaatcagcctaggatcgtatcgcgtaggctgaacgttgctatcaccgtcagcagtggtagtccttacaccggagtcaaggatcgcacgccccaaacacggaacaacaagggcgcgcagacatccgcgagcgtgaacttcaatgccaagcagttcgagatgtttccagtagcccagcatgttgcggccttcccaatgttgcagaacggccaggcgctctggatacttctctactacattgatctggacaatcgtgagctgagatatgaattgtctcagcctacagccatgtcagaactggacaaggtgagcgaatggtctgtccggtatatcttcccgcccattggcttcggtgatcatgtggatgaagttggtggtcgtgacgatcaagacgacatgcccgacattgacatcgaagtgacaccaaagaagtag

SEQ ID NO: 532253 - DNA, 1101 bp, Stenotrophomonas maltophilia
atgaacggtaccttcaacccaggtcgattgatcattgctcgccagcggtcgcaacttagcaagaaggacttggctgcgaagacgggagtgagccaaaagcaactcaaagggttcgaggagggggaacgacaaccgccctccgatgtggtcggttcgctcagtaaagtgctcggcttcccagccgagttcttttttggcaaagatgttgaggcgccgctcgcaagcaacgcaagctttcgctcattctcgcggatgtctgctggtcagagagacgctgcgctggcagctggcggaatcgcttttgagttttcctcttggctcgacacgaatttcaatcttcctcaggtcagtgtccctgaccttgctgggcttgatccggaggctgcagccgaagttgttcggtctgaatgggctcttggcgtgcggcccgtcaaaaacatggtccacctgctggagtccaaaggggtgcgcgtcttttcgcttgtggaggacacgagggaagtcaacgcgttctcttcctggcggaatgggcgtgtgccatttgtctttctcaatacactgaagtcgccggagtccagtcgctttgatgcggcgcatgagctcggccatctggtgctgcatcgccatggtgatccgaaggggaaggagattgagattgaagcgaacgcattcgcttccgctctccttatgcccaggtcagagatgcttgctttggcgtcaaaaccaatcggcatctccgaggttatgcggatcaagaagatctggaacgtttcggctatggcgcttgtctatcgactgcataaagttggtgttctaacggagtggctttatcgatccatgtgcatagagctgagttctaaggggatgcgcagcagggaactggacagcgccgatagggagacttcgttggtgttgaagaaggtgtttgatgcgatgaaggcggagggccggggattgcgagatgtcgctcgtgacctcactttgccggtggaagagctacataagctgattttcgcattgacagcgatttctctcggtgccgacaacgctaaacctgtacagagtccgccgcggcgtggccatctgacgctagtgagttga

SEQ ID NO: 532254 - DNA, 513 bp, Stenotrophomonas maltophilia
atggttgagaccgtgcttggtatgaccgatctgcagatcaaactgttcacggcgcttgggcagatcggtgtagctgtcgctgtgggctacgttgcttaccgtcaatggcgaactgcacaacagcaggcttccactgctcggaaaaagttgcagctcgacctattcgaccggcgcttggcggtttatgaggcagtgcgatccgtggcctaccgctcaattacgtctgactggcgggcaaacgttgagctggagatggcctctcatctcgccgaactccgatggctgtttggcgagaccgtgcgcgacttcgtttggaacgagctctatctcccgctggtggacctgtcttcggccaaggccactattgctgagccaggacggctcagcgagccagaggtgcgaaaatcgcacgaagcggcaactgtcaggcagaacgagttgagaaaaaggctcggcaattcactgaaggtgctcgacgaaacgatggccggattcctgactcttacccactga

SEQ ID NO: 532255 - DNA, 558 bp, Stenotrophomonas maltophilia
gtggcaaaggatgcattggtacaacaggttctcgcgcgcgcgcaggaattggctgtggcgtacggaaaagggcgtcaggtggttcaggactattcggtgcgtatggctgacaccgatgagtcattcacgccaagtactgtcaaggccgtcgcagactcagcgatctccgcgttcgacggcgcaaaggatgcctacaactggctcaacgcaaggctgggtgagatcaaggattcgtgcggcgcgctgccccgggacgaagcactgtttctcctgaacgtctttcacgcaatgcacgccaacgcttcagcgctgcagcattacgcctctgccgcggagatggtggaagcgaacctaagtgtcggacatgcgacacgcgctgttacggactatcgcgaagggcttaggaacaccataggtgaactgattaggtgcctcgccgggcagcccgactacggcttagctcttaacggcattgcgaactgggccgtggacaacctgaaggcgtcgatgcccgtaattcacgctgcaactgtgaacggtgggcattcatctagctga

SEQ ID NO: 532256 - DNA, 768 bp, Stenotrophomonas maltophilia
atggacgcttatcgcagtctctttaggggatcgtatttcgaaggaaactttccggctttcccgtgcccgacatgcggagccggaattctcagggagaggcgggaaacactccagaaatttgaggctgagtactcgaaaaatcaggctggtgaggattggtgggatcctgaccatgaagtttcaaagttcaatttgatgatgatctgtgatcgtcagatttgtggtgaggtggtcgctgcgctgggagatgtaacttggtcgctcaatcctggtgagatggatgacgatggcacgcccaatggttatggtgaatgggaatggtttttggatccaaagtgcttcaatcccccgctttctattgccaaagttccagacggggttccagattccgtggtggagaacatccggcgagccagctggagtttctgggctgatcgccgatcctcggcaaatcagcttcgagctgcgctggaatgtcttctggatcattttcacatcgcgcggaagggagggaagaataataatcagtatattaatttgaacaacagaattaatatgatggtgggggatgatcccgcccataaggcgatttttaacgcgctgaggacggttgggaatctggggtctcatggtgatgatgttgagcgaaatgagctgctagattgttttcagctgtttgagtacgtgctcgacgaatacttcggcgacaggaagaacaaggcggttgccatggcggaggcgctgcttgcacgcgacgttgagtcctga

SEQ ID NO: 532257 - DNA, 342 bp, Stenotrophomonas maltophilia
atggtcaccaaccaaaccaagacaattgacattgcgaaggacttttcaccggtccccgcgggccgtcatgtgtctgatggagactatagcggtgaatttttcagaacttccatacttcgaccggcgctgaacaacttcgcaacggtggaagtcattctagacaacactgaaggatttggctcttccttcttggaggaggcgttcggcggattaattcgtgacggattaagcgctcagtacataaatgaacaccttttcctgatcgccaactcatcagcgggtaagcgctacaaggcgaagatccgacagtacattgctgacgcctccaagctgagccactaa

SEQ ID NO: 532258 - DNA, 1104 bp, Stenotrophomonas maltophilia
atgtcggcccgggagcgtaaacgagtccgccgactgcggatcacccgtcggaagcggcaggtatggctggaacagatggggcacattcgcctcatcgcaccccgaaaaatccaccctctgagcgagcatgcccagaggaagcgtttcgtgcggacgattacaccgccccctgtactggatctggaaaggaactacgaagaaacgatagctctgctcaagagcatcaggttcgcgaccagaacgctcaaagcaaagttcatgatcgacctcaaggccctccaggaggtgtcacctgctgcggcgcttctgatggtggccgaatgtgatcggtggcgtgaaaagactcgccagaaatggttgcgagcggtcgactccgcccactgggtgccgagcgtacgccggcgcctgaaagaaatggggtttttcgaagtgcttcggacccgcaacgtgcccgacgacgccactgttccaggagaggatcgctatgttccatttctgaccgggagtcgtaacgtgggacctccggcagccgcccttaggaagagcattgaggacctaggcccagcgctagtcgacggctcggccctctacgacggtctggtcgaggccatgaccaatgtcaagcagcatgcctatcgagcgcctgatgggtcggacacgcaacgatggtggatttcagcatctgtgaacacagctcagaataggatgacggtgctggtagttgatcacggggtgggcatcgctcgaacaatcgcaagggacaagaagtgggaactacttcgaaagatcctgggtccacttgtcgtgaaggatgatgccaagctcctcagtgcggcatttgcgctggattcggtcaaccgatcgcaaaccggtgaggaacaccggggaaagggactgagggagaacatcaagggctatgtatccacccacgagtccagaggccatcttcatgtgatcgccaatcatggcaggtatcgcttccagcgagacagtcgcaccaatatagaaagcgaattctccagcaaactggagacggagttcaacggaacatttattgagtgggtaattgaagattatggtcaccaaccaaaccaagacaattga

SEQ ID NO: 532259 - DNA, 1269 bp, Stenotrophomonas maltophilia
atgcaggctcatccgctccaggtcaccgcaatgtatttccgcctattgcgtcgtctaccgctggtgatgatgctggtcatggctgcaccgggcatggcagcgagtggagcggcggacggtgtaggtaatgaacagctcgagcaggtcgtcctgctcagccgccacaacctgcgcgcgccggtggtcgcgtcgggcgccctggcccatgccacgccagagcactggacaccctgggacgtaagccccggcgagctgaccaccaagggcggcgtgctggaggtctacatgggccgctacatcggccagtggctgcgccaggcgcagctgctgccggggtcgggttgcccgcagcgggccgactttcacgcccatgccaacagcctgcagcgcacccaggcgaccgcgcagttcttcgttgccggcgcgttcccgggttgtcatgtggaggtcgagcagcgcagggcgctgggcacgatggatccgttgttcaatccggtgatccaccgtgacgatgcggacttccgcgcccgcgcgctggcggcaatgcagaacgcgctggcggcagcggatctggccccggcactttccgtggtggaggaaatcacccgttacccgcagtcggcggcctgtgcggggcgcagcgactgtcatctggtgccggccgatacctctttcagtgcggagccgggcaaggagcctcgcgcctccggttcactggcactggccagcgggctggttgatgccctgttgatggagcattaccagggcagtggcatgcgccgcgacggttgggggagattgaacacccgggcccaatggcaggcgctggcgcagatccgcaacctctaccaggacatcctgttcggcaccgccgaggtggcgcaggatgtcgccggaccgctactgacccacgtcaatgcgttgttcgctgatccggcgtcaccgaaggtgaccctgctggtcggccatgactccaacatcggttccgtgctggcggcgctgggcatcaccgactacacgttgccgggccagtacgagaagacgccgatcggtggcctgctgcagttcgagcgctggcgtgaccgccagacgggtggcgagcggtttcgcctggcctacgtctacccgaccaccgcacagctgcgtggcgcacagccgctgaccgaggcgcagccgccgggccatgtcgcgttgcgggtgccgggctgcgcggcgcagggctgcaccatcgcggaattccagcgtctgctgcaaccggcagcccgctga

SEQ ID NO: 532260 - DNA, 189 bp, Stenotrophomonas maltophilia
atgctgcgcgccgcggtctacccgctggccgcggtcgctgtcctggccctggccttcctgctggtcggtccgaaatatgccctcggcgcgctggcgtccggtgtggccatttcggccggtggctgggtggcggcaaggatggcgctggggggggggcggtggccgcaggatcggcgatggctcgcctga

SEQ ID NO: 532261 - DNA, 252 bp, Stenotrophomonas maltophilia
atgatgctcgagtcagtgacagttgcggtgccggcagcgccaccagagatgccattggttaccgccaatcccgcggcgcggctgttctgtatccgggtgccggcgatcgttgcgttggaggaggcaatctggacggcggcaaacggatcggtggcggtggctgctgcccccgtcatggcgagcgtggatccgtcgctgatgcctacggatgtggcggcgctgccggtgttgaaggtcagcgtggcaccctga

SEQ ID NO: 532262 - DNA, 693 bp, Stenotrophomonas maltophilia
atgatcagcttgtcggtggcggcatcgtcgccggccaagacggtgttgaagatgatcgtgccatcggcgccgctgaagttgccggccacgttgagagtgtggaaggcggagccgtcgccgagggagatggtgccgttaccgaggcttagcgcaccgatcgtggaattgccggtcatgttccagctggccgagtccagcgtggcgctggtgacgttggtcatgacgccggtcagtaccgcaccattggaaagcttggtgtgcagctgcgaggttgcatcggcacgaagcgtgccctgcagttgtgacgcgccgacgttcagattcagcgtgccgccatcgacggcttcagcaatcacgccattgccgccgcttacagtgctgccgtttagaacgttgacagtggttggggcgatgatccctgcaccactgacaacaatgcctgagccgtttcggccggagacgcgcgacttgtcgatggtgagtacgttgtcactgattggactggtgggagttcccccgatgtccatcacaacgatgccgttctcatcccccatgacggaagatccgttggtgatgttgacgcttgagttcgagaagactgccagaccggacgagatttcggacggtaggaggccggctccgatgccggttccatcaatcgtcgtgttgctcagggtcagtacgccaccttga

SEQ ID NO: 532263 - DNA, 279 bp, Stenotrophomonas maltophilia
atgccgttgctgaacttcaccgacgcaccgccgctgaactcgccacggctgcgcggcacgcgtgcatcggcgatttcgtcatccatgcggatctgcgattcggcgcgggtgtgcagccagttggcggccaggtacggctgcacctcggcggtcccgttgccccagcgggtcacgccggacaggcgcaggcccgcacgcccgaacacaccattggcattctcggtgctcaccgccgtgccgttggcctcggtgtggcggttgctgtcccagcggctgtag

SEQ ID NO: 532264 - DNA, 237 bp, Stenotrophomonas maltophilia
atgagcgagatcgaattgaagccgtgtccgttctgcggcgtgaggccggtgatgcgcgagcgcagcggtgacgagcggaatggatacaacaccagccttacggtcgagtgcaggtgcggcgcatccatcgacactgaaacgaagaacaacggcggcttgccgaccgagacggtggccgcagcgaaacgtcggttgcggactgcctggaacacccgcgcgccggaggtctcggcatga

SEQ ID NO: 532265 - DNA, 351 bp, Stenotrophomonas maltophilia
atgaccgacgatcgattcaagggatttgcaatcgcgctggtgaccattgcagctactgccgcgcctgcagtagctaccgctcaatctgaggtagagctatggcgcgacggcttcaaacctgcctgggaatcaggctatgaaaccatcgatggttgtgagtacgagaagctgatcaagctttccgatggctacttcttcgaatgcagcgaatacaactacctgtatcactatggtgccgttcgagtgatgagcaaacctgtccggtatgccggctcaattgtagaggtcagctatctgtgcatggagggcgaggacgagtgccttgaaggccgcctcgttcggatgcgatga

SEQ ID NO: 532266 - DNA, 342 bp, Stenotrophomonas maltophilia
atggcaaaaaagaccgaaacgcgctcttcgaccgcgcatatcaaccccttcgggctacggatgcagcccgagctgcgggagcgccttgaggcagcagcagcgacagaaggaaggtcgctgaacgcagaaatcgtcgctcgcttggaggaatcgttcgagctagagcaagaggtcgttgagctcgagaaggtgaccgaggcgttcgagcgatctcaggagctgttgacggactccgtaaagagatttgaggccaaggttgagcaaatgctcagcctgcttcctaaggcagataaggaatccgttgagaactcgctactgattccacgagccaaggcgaagtaa

SEQ ID NO: 532267 - DNA, 684 bp, Stenotrophomonas maltophilia
atgaactcgatcatccccattcagaatgtgcggattggcggcgatgtcgtgcgttcagtaaacgcgagggaattgcacgcgttcctcggtgtggcaaaggacttccccacgtggatcaaggcccagctgagcagggctaacctcgtggaacatatggattttgaggttttccccctcttggtggaaaaccccaagggtggccgcccggcgaaggaatacgtcttgtctatcgaggcggctaaacacatctccatgatgagtgggactggccgcggtcatgaggcccgggagtacttcatccagtgcgagcggagggccaacgaggctcaggcgccgatggtcaaggaccccaagatcgcggcgctggtggaggtgcttgttcggcaggacgcaatcgaacaagaacaggcccgccagtctctggaggtcgcccgccttcaggaagatctggcggtcgttgaggcgcgcacccagccggagaacaagcacttcacggtgatgggctacgccaacctggtcggcgtgtctgtggacatcaaggccgcatcggccctcggcaagcgctgtgcctccctgtcccgcgagaggggcctgatgatcggcgacgtgaccgaccctcgcttcggcaaggtccacacgtatcacgagtctgtgctggaagtggtgatgcaggagggcgtgtga

SEQ ID NO: 532268 - DNA, 453 bp, Stenotrophomonas maltophilia
gtgagccttcaagtcggctatgtgtattgcctgaagagcaaggccacggggaacgtaaaggtagggtgggctgcagatgttcaggcaaggagggcggcattggccaccgggtcggaggctgaactggagattgttggtttcttcacaggaacgatgggtgccgaggcctgggtgaaaaacctactctctgggcggaacctccgaggcgaatggttccgtgatgacgatgggcgtgtttctcagtggttcgagctaactggatcgctgagaagcgaggcctccgttggccctgccggtggtttccctgaaggtctaagcgcagaccatgcccagttcaaactgaggctgccaaaggccatccttgaaagggttgctgcgttggccaacgagaacttccgttccaccggagctgaaatcgcttggcgcctgcagaagagcttcgggcaattttga

SEQ ID NO: 532269 - DNA, 450 bp, Stenotrophomonas maltophilia
atgttcaaggcttcaattcttaccccgacttctgccgcgaacgcccctgtcgggtctttcctacttgcagagggggagtggaacatttgcgtagagctaggccgcaaggctgtcctgcgcctcactggacgcgcccagtcgcgcctcctctttgcagatggggacacaaccacgtacttgactcctagcgcagagcctggattcgaggcggaaatccctgacctgcacgcgtgcttccagattccacatgacaatcaagtaggcgctgcgctgaactactcgcagaggggtatggtcctgcacggcaccacgttccaggacatgaacgagtactacttcaccctgaatggaaatcacatccaagtcgcaccaactggcttgattccgctgttcgggtggagccctctcttgaccaagtctgatgggacagggtcgttctacctgttttaa

SEQ ID NO: 532270 - DNA, 252 bp, Stenotrophomonas maltophilia
atgagcgcagaacgcgaagatactaagaaggatcaggaactggcgcgggagatcttcattcgcgtggcatctgcccatattggcgcggggcaatcccggctggacgaagaaagcgcgggaacgatggcggacgagtcttttaaggccgccagagtgttcaacgataaggtttcgcagaggaccccgccgccggaggtgaccggaacgcgagtcctggaccaacgagacaagaaaaaaggcaaagccgaatag

SEQ ID NO: 532271 - DNA, 246 bp, Stenotrophomonas maltophilia
atggaagacgatcaacgcgttcttgaactgatcagaacgtggatggaccgggtgtcagcccttcaagcgcgggtggacgtgctggaggtcgccagcatcacgctcgcgcgcggcgcttcgcagcagcagcgagacgagctgcatgccgctctttcgaccctgcagcgctcaggcgccgaaaggacgtgggaaacagggacgatgctggaggaggaagtcgcccggttcctgcgctctctgcgataa

SEQ ID NO: 532272 - DNA, 324 bp, Stenotrophomonas maltophilia
atgcgtgaattctatcagagcggccttgagcgtccggccagccttctgtgcatggtgggcgtgtgtcgaccaaggtcgacacctaccggtgcaccgcgcgcccaggattccggtaggtgccaacctgggttggcacggtgcgcgccgaccaaggttggcacctaccggactgctggccgcgcaggcgtggccgagggagaccaccgtgccaaccacgcatccacgctcagcctgccggcgccgctgaaaatcaacggcagcagcatcgccatgaacagcaccggcagcttgaagttgccgaagccctggtcagtgatcgcatag

SEQ ID NO: 532273 - DNA, 828 bp, Stenotrophomonas maltophilia
atggaaagtcaggaatttcctgtgctccccggaagtaatgtgctcgttcgtggcgaaattctcgagtgtatccgtgcggggaagctcgtggttggtgccgctgagcccgataagcgagtgcggggttgtagcttcgatctgaccgtaggaacaatcttctggggggggcgtgttcttcgcagaaaaaattctgagccgcagcaggttgtggtccctccgggcggagtggtggggatcttcacggaagagtcgcttaagctccctagcgatgtatatgggaccgcgtttgcaattaatgcgatgagttcaaagggctttcttgtgctgaattcaggtcacgtggacccaggattcgaagggcctttgacagttaaggcgcttaatgtcaggaagacgagcatcgcgatttcacaaggagatccaattttcaccgtcttgttcactcctattggaaaaagtgcccccgtcttcaaaggcaataagtcagcctctgatagggagcgagagttcaatgcagagacggtgcaatcgtcgccgcagactctaggggaaatgatctcagtcgatcctaacgggccgtttcccaccagagatgaggttcgggagctagtgcgaagtgactcgatagtccgactgacgctcgggctaacggcaatcgccgcgctggcatccgtgcttgcacttttcggggtgacgatcggaaagagcgaccgtcaaatgcaaggtgatcaacacctcggtgcgagtcagtcaagaatgtctagtccaaataatcccgtggatccgaacgcggttcggaacgaggtaaagctagttgaaccaaagtga

SEQ ID NO: 532274 - DNA, 843 bp, Stenotrophomonas maltophilia
atgaatcttaaagtggacgtctcctcactttgcacagaggtccaatcgagactcggcattgaaatcgaactcgacgttgcgactctcgacgggtgcgaatatcaagcgttaaggccccgcgacctggagcgtggccacggattctttgtcgcgatcgcgcaaacgccaaagcagatcttagcgagcgttcacttcgatgcctatgcgggccgcctttttagactaatggcggacgcggataatgagagcaaggagtcgatgagacgacttgtgtcagcggccccgcttgccggaatgactgcctattgcatgatcgatgatataccaatgccagcggattgcttcaaccacgcgacgtggaagtctcttgatatagaggtatcttcacgtataggcagatctgttcaagatgacggcctcctgcatatcgcggccggcaccgcatcatatgcttttgcaattccactttgtctagtcaaaatcgaggaagttgaatcgccattagttccctccggtcaaccggagggggctgctcagctgatagaggctaaaaggtatgagagaagcccggcaaaccgggctgcttgccttgcatttcacggaacgacctgcaaatgctgtggcttcgacttctattcagtgtacggagatattggaactggtttcattgaggtccatcacaccctacccgtgtcgctgatgggtgaaggctatatcgttgaccccattagagatctagtccccctttgcagcaactgtcactcgatggcacacagggccaatccgccgttgaccattgaatatcttcgcgaaagaattcgaggctcacgaggccatgcataa

SEQ ID NO: 532275 - DNA, 1599 bp, Stenotrophomonas maltophilia
atggaaatccaatcctcctatattgaggtcgcccctgatgttcaacgtgtaagcgaaggccttagggacaccggatacgacttcaatacagcgatttctgacattgtcgacaattcaattgccgcagacgcttcacagatctcaatccagctggcgattgatttttccggtgaaattgtaatcgcggtctcggacaatgggtcgggcatggaccgaactggcctgatcgacgccatgcgatacggatctccgcgccggccgaatgccaaaagtcttggaaagttcggaatgggactcaagacagcatccactgcatttgctcgtcgcctaagcgtggtaacccgctcaaatggtgcagacgcactgcgagccacttgggacttggataagcttgcgaaggatgggacttggcttcttgaaatctccccgccattgagcgaagaagtctcgttgctcgatgctctagccaatgggaccacgggaacggttgtgctgtggcagaaagtggaccgcctcctggacggctacaaagatccggcttccaaacatcgtagaaatgctctggataaactgggggatcgcttgggcgagcacctgtccatggtgtaccagcgctttattgatccaagcgatcaacgagaaagaaccgtctccatttcagtgaacggccgcgtgatccagcattgggacccgttcctgattgaagtcaccaaagctccagtaatggaaaagacattgactgttcaagcaccggatggagccacgtcagaatttactgtgagggcattcatcctgccaaggaaggaggagtatgcggatcaagccacacaggctctcgcgaagatatcaatccagagacagggtgtgtacatctacagagagaatcgcctcattcacggcccagactggatggggatgtacaagcacgaacctcattacaaccttctacgcgtcgaactttcgtttgatcatcgcttggatgcagcattccaagtcgacataaagaagagccgcattcttcttgaggagcatatgtatgaatggcttcgagacaagtttctcgccggcccacgccgtgaagcagaaatgcgctacagacgcggcgctgcggcggtggcaactggtgcaagcctactaattcattccgcggcgagcaatgtaattgatcagaagtcaaacgccctatctaaaccaagtgtttcggtcatagacgaaagcaaaggggaaattaggacagactccgcaacagctaaattgcgaatagtctctccaaatgacaaaggcagcctgaacattattacctctacaactttggagaatggtgtcctgtgggagccgacgcttcgcagtgggggatcaattgcagtggctctaaataccggacacccctactactcgaaagcatatctcccaaacaaggagaatagcccagtcgtccaggcgttggattatttactgtgggcactcgctcaagcagaggtcgatcagatgactgatgaaaccattgatgcgtttgaagaatttagaattcttgtctcgagaaatcttaagaagttggtagcggaccttcccgacgctccagagcctgaagtcggataa

SEQ ID NO: 532276 - DNA, 417 bp, Stenotrophomonas maltophilia
atgaccactgttcgcaaaactctaagtgcaaacgatctgggactcactggcagccatcaggcaggcatactggtaccaaaggataaggaggttctggcatttttcccaagtttggataagacgaccaagaaccctcgggccagcttggttctcctagaggtaggcgacggcgcaaggcgcgagttcaattttatctactataacggaaagctgtttggcgggacgcgcaacgagtacaggctaacctgtatgacagcctatcttagagagtgtggtgcgcgggtgggcgacgaaattgtactgtcacgaaatgaagacgcgagttatttgatcgacttggctagagcaaattcagaaaatttcagcgagacggaagatacaattttcctttctggcggctggaaaatcgtaaaataa

SEQ ID NO: 532277 - DNA, 1914 bp, Stenotrophomonas maltophilia
atggaaccgcaggaggcggctacgcgcgtgaccggaagctcgtggttggtaaaagacggaattctgggacttgaattggttcctggtcacttcgtagcgccaagcgctatggagatcttccgtgtccagtttcaggacgcggagcatgccttgggcgagcgttgccgcaaacctcatgtagacctgccccacctgcacctctcaaagttccctgcagaacctgctctactaattctcagagagcgcgacagccttcgcggcactttcggggtcatcgcgaatgataaattttctgctcttcagcaggacatcgatcaggtaatcatcgatgacacttggtatccgattgatatttcctctctaatggaaggtcgccagtctgcccacgactttggcgccatcaacgggcacgtaagcctcggcgcgctcgtcaaacttcgcctggcagagcacctcccctttcgcttgattgacaaagtagcatccaatgaaggtccaaacaggcccgaagcagccagcgggtcgctgcaacgcgatggtgtcaatgcggttctgtatccctatcaggcggatggaattgactttctcaacctgatcgcagaccagagaatagggtgcgtactagccgacgagatgggactggggaagacgctccaagttatcggcatgctcgtccatctatcctcaacccagtcgtatccaatcctgattgttgctcctgcaagcctacttgagaactggcgacgggaaatctctcagttcgcgccctcgctctccgcccgagtccatgctggtgacaagcgggccggaactgcttccgcgctcggaagtattgatattttgattacatcgtacgaaaccgtggtgcgcgatgccccgcttttaagttcatacgagtggcacgccgtggttctcgatgaggcacaagccatcaagaaccctgaagcacagcgcacgcgagcagtgaaggatctcaatcgcaaagtgtcaatcgcggtctctggcacacctcttgagaacaggctcgatgatctttggagtgtgtccgacttctgccttccaggcctccttggcgacctcgaacacttccggaactcctactcggatgaagtgaaagatgcccagcgtctgggtaacgcagtggctccgctgatactccggaggcgcgtagcagacgttgcctctgatcttccagagaagatcgagatcagacagcctataaaccttacagatggagaggcgcgcgattacgttgcgatccgtgatcaggtcatctcggaacatggtccagcaggggcgttagtcgccacgacgattctgcggacattctgcgcggatcctgcactagccaagtacacgcttcaacattccaggcccccaagctcgaagttcgttcgcgtggtagaactattggaggagatctttgcgaacggagagaaggcattaattttctcttcgttccacgggattgcggatctgctgttacgcgaacttccaagcctgtatcgtcacgcgcacttcaacgcaatcgatggcagaacgccggttgagagccggcaggacatcgttgatgccttcttccagcaccaaggggtcggcgcactgctacttaacccgagagcagctggctcaggattgaatatcactgctgccaaccacgtcatccactacaacccagaatggaatccggccctcacagcacaggcgtctgctcgagcatttcgtcgcaaacaaacgcgtccagtcaccattcatcatctctaccatccgggaacagtggaagaagtgataattgagaggtcacagttcaagcagaccttggctgacggtgcggtgacgggccatgatggatctccatcttcatcagatctggcgaatgcgctggcaatctccccaatcgatcagtataggtaa

SEQ ID NO: 532278 - DNA, 1638 bp, Stenotrophomonas maltophilia
atgttgaatgctgcaccgaattcttccaatgccccgcccgggtcagcggtagcggtgccaatagtcgcgccttcggtgcctgcgcttcacgacagcgaacttgcgctcgagttcgagcgcacggcgaacgggactggcgacgttctggtcgtggcaaacgcgttcacagtgttagtcctcgaacgtcctaacgacacggcgccgtggtcgtcgaccgcttcgggtgattttggctccaagtgccaggctgccgtccgccgtctccgtggcaggctttactgggcttcggtcgacgacgatccgctgacagcagacattgcgaccatcgatgaaaaggtgtcgacgcccgcatttatcaagggctggcttaagaaggcgagcttagttaccgcgtctggccgccaaggcgatatcaattcaacgcagaaggaagagttgggctaccaggccggatggcgttgccagttcgcaggttgcggacaggacctccgctggcacgaggccacggcgacgataggtcggttcggctacttcgcgcacatcgtcgcctcatcaccggacggcccgcgcggcgacccggtcgagtccgctaggctcgcatccgatcccacgaacatcctcttgttgtgcgatgcctgtcatcgccgcatcgataaggtcgagccgcagtcttatccgaccgacgtccttcgcaaaatgcgcgaagacaacattgcagcggtcaaacgcctactcgacacgctgcgctatcccgacgtctctgtgctctgtgtgactgggaatatcgcggggcaaccggctcagttctcgatgaatgacgcgcacgaagccctgcgtggccgccagctgcgtaccagtgagctcaagccgcagcggttcttcgacccgggcgggactcagcacaacgtccacgaactggcgtactggacgacagcgttccgtcagctccgacgggatcttgttgcgctgcaggggctgctcgatggcagccggcacggggccgcgcgcccgcacatcgccgtatttccccagcactcgacctcgatcctcgcgctcgcgggccgcgtgcttggcgacacggcgggagtccatgtttttcagccccatcgcagcatcccggcgaacgaatcgcgctgggcgtggccctcggatgccagggagccaggatccggcaagttcaagttaacgaagctgcgcgaacctgatgcaggtgagcgtgaggcaatcctcattctggaccccaccgccacactcagccacgtgcggttgccggacaactgtgcgaggggtgggaagctggcactgccggccctgcgcatctcggtcgactccccgggcattcattgcatccgtcatcctaaagacctgcagctcatcacgcaggtgattgacgaagctgtccgtgttctacaggacgagtggcgggtcaaccgagttcacgtgttcgctgtcgcgcctgcctccgcagtcgttattttgggacagaagatgcaggcccgccatcaggcggactacgtgttgtacgagacgatcgctgcgggtgccgactctccctttgaaccgaccatcgaactcacctctgaagttgtgcgagagctcgtgagtgggtatggccaagagcaatccttgcaaccctga

SEQ ID NO: 532279 - DNA, 1236 bp, Stenotrophomonas maltophilia
atggacaacaaccgcttttccaaacgcctgaccgcctcgttgctcgagcgccacgagacggaccagtggacggccctgatcggtcaattgctccgtcgcctcgagctgaagccggaagacttcgagaaagccaagaaggagtacgaggcgttggcagaccgcatagcgcgtcgactcgatctgccacgtcatgatgtgcacatcttcccgcagggatcgatgcgcacgcagaccacaatctctccgcaatggccgacgaagtttgacctagacgtcgtggttcacttggaggggctgcgctatcagtcccctgatcccgagaagatgttccaagacttcggcaaagccttggagggccatgaggggctgaccgggagtccggtggcgaagcgtcgttgctggaggctgaactatcccaatgagcggttctacttcgatgtgacgccggcggtggacgaccagaccggccttcaggggtcaagcctatcggtgcgcgatccggacacatactggtccccgtcgagcccgggcgagtatgctaactggttctgcgagcgtgcgagcaagcgttttcccttccagacccgtttgaccgagtttagtgcagacgcacgtagccaagtggacccgcttccagacagtgaagtcgggctcgacgatattcttcgccgcactgtgcagcttgtgaagctacaccgcgacactatttaccgcggtgagcctgctgaaaagcagtcaataatgcctatctcagtcatcatcgtaacgctcctggcgcatgcctacgaaaagttgctcgccgagcgcgcacattccttcaattcgccgatcgaagttgttcttgagctaatcgaaataatgccttcgatgatcgagcagcatggcggggggtggtgcgttccgaatcctactttgcccgatgaaaacttcgctgaccgctggaatgatgaccacggcgcgcgcgagcgggaattccgcaagtggcacaagcagctcgagggcgacctcgagtctctcttgcatcagagcgaccgcactccgcaggaggagtcaatccgccgcgttttcggtcccgctggtgtcgaggcttggaaagcgagcaagcccaacgtactgaacggacttctgtcttcggcaggccccgcggcgactaacccgaaggcacccatgcgtgtgggctcgtcgaatactttggcttcgaccagcggacgcggtccgaacaacacgatcgtttga

SEQ ID NO: 532280 - DNA, 1722 bp, Stenotrophomonas maltophilia
atgattcggcgcgccgatttggcagccgaatgggtcatcgatctggtcgattccctattgccgatcacgtcagtgacgctacgattgccgccggactttcctgatcgcccgtgcgagttcttcgtcaataagtgctactttctgaaggtcccgcatatcgagcaggacgggcggatctgcctcggccttcatgctgcgcccggcgatcacgcagcaccggtcgctgctgtgtgccgggccatcgagacgctccaggacaaacttctaacgcttgcggcggatccggactggtgcgagcagcagttccacaatgagcgagcatcctattgggcccaggactgcaatgcccgtgacaagcaagggtctcggcggccagtggcgctcagtacattagtggagattagcaatctgtcgaactggactcagggcggtatggtcgcctacgtttctcaaaataggaaccgaaagaccgctcgcctccagatcgcctcctttggagatgcctcgcctcaagaccttgccacgcggcacggatgggcgtgtggcaccgaagtcaatggccaatcgttgttcgtaccgctccacgacagcgagctttggacgccgcggacatggcccaccgagttctctgagttggaggcgttggtggcacggagtactaacggcaaggtttctctcgccgattgggtcgcaaaggtcggagggtttcatattatccggccggaagatgctggcaagaagccagcgaagtcccagcgcttctgcaccaggccgacgcttcatcgacctgtcgtcgtgtttgtcggagtgggtagcacggtcttcgggtaccaaatcttcgtcccagaagcgatgatcggcagttcacctcgaattgaaccagtggtggtcaagcgtattgacgtcgactgggcactcgcgcgggatcagcagctaccgacgttgcatgcacgacgcgctaaacgcctcctgctgctcggtgccggctcgcttggcagcccactcgccgtcgcgatcgcccgcgccgggatcggcacaatggatatcgtcgataaggagatatttgacgctgagaacgtggctcgccatcacttgggcatgcgcgcacgcgaccggtggaaggccgatgaacttgcggcacagctgcgtgccgatgtgccagggcttgaagtggtcccccatcacgaggatgccgtgacctggtgccggaagcattgccgacccgagcagtacgacttgatcgttgaatgcaccgccgaatcgaccgtgcgcagtttcatttcgcaccacaggcctaagctatttggcagcacgcctatcatccacacatggcttgagcccctttgtagtgccggccatgtcatgttgacgcagcccgacgttccgtggccgactgatgacccggcagacgatctggtcaacgcgtccgatttgtcggcccgggacacccgaatccccctcccaggctgcaatagtggcttccatccttatggcgtggccgatgtgaaccttgtcgcggcgttcgccgctgaacgcatcttgtccgtcattgacgacccacgccaatcctccaccgtctggtcgtggatacgttcaagcggcttctttgatcggcttggcattgacgtaagtcgaacggatatcattcccagctctgctagcacggctgacagcgcgacctgtacacgccctcttgccgacattcttcgatcttatgactga

SEQ ID NO: 532281 - DNA, 1209 bp, Stenotrophomonas maltophilia
gtgcccgagctcatgcatctatccggccacgcgctagggtcggtggccgatgatggtcattacacattgaatctgaccggtccgggcagccatgcgctggtagttgagcccgggcgcggcgttgcggttatcgggcccgccagcctgggcaagagggccgatctgcacgtggtgcctgatgcggccatccattgggtcgcgttcaacccgtttgccacgcccgccggatcaccttggccacgcaatatcgactactacggcaatgacactggcttcttcgcttggtcacagcaacgcgtgatcgagcagttccgttggactcctgtatttgccgaccgccgcagtgtcgatgccagtgcggccaggatccagacgctggtgatccgtctggagcacgtcagcggtcatctctcgattgtcgtcccggcggcaggcagtctttaccttgagggggatctttcgcggatcgcggtcggcggccatggtcctgccatgctgtcgttgcagcccgcactggggaggcggccggggcaggcgccgtacgagctgcctgcgttggacttcctgcagaatgtgacatcgttggcgctcgttggcgtaccgcttgggcaggccatttcgctgttgggtatcgagcgcttctcctcgttgaagagtctgtcgctgtcgggcagcttcaccgactgggcttcgcttgccatgctgcagcatctgagcaatctggaactgcggttcgttcctgatctgcaagatttgcctacgctcgagacctggccattgctggacaggatgatcgtctggaatgtggacgaggctgctggaaagcggctcagggcgcagatcggtgcgcgggcaaaggtgcgtgcatgggctggacatgcatcggtcagcaagctgcgcaaaccgacgtggtggcagagcgagtatgggcgtccgttcgcgggttggaagagccgtcaggccaaggctgcaaatgcagcatatgacagagcacgggaggcgctggaagacgcggtcgatgtcgcagcggtgcaagcggcggtcgtcgccttctcgaagcagttcaatgcgatgaaaggcatcgaaactacgcagcgggaagatatcggtgaggcggtctggcagctcagccagctggccagggtggaggtgcttggactgggtgaagcgcagctgcagcagtggttcgatgcggtgcgggattactga

SEQ ID NO: 532282 - DNA, 438 bp, Stenotrophomonas maltophilia
atggcatttcgagaagatcgcgagtctctcattgatctgatggagagcatctatcactgggtcggagattcacacaacgaccatcagttttcccctcgggccgactggctgacgatacgaccgttcagatttgtcagaacccaagcagctaacgcatggatggagttccaagagacaaatcctcttgagcgtttcatcggcgctctgcgtgaaacccgtgaagaagcgctgatccaggtcgggctctggggcgaacagctgagatacaaacttgatctgctgcggtatcttgcaatccgcgccttgggcggaaagcgtcgcgccatggagaaatttacagaattgctagaggtgcttttggacagcctgctggagctcctcggatttggtgagcctatcaaagagctcgtcggagccctgaagtcccaggcaagatga

SEQ ID NO: 532283 - DNA, 2382 bp, Stenotrophomonas maltophilia
atggaggcgcgccatcatgcgctgttgctcgaggcgttcgttacgcgatccaccgcgctggaccgatttttgaatatgaccaagaagcgtaacaagcgtagaaggaagaagggcaggcccgtgacgaagccacgaccggtgggcttcggtctgctcgagcaccccttcaatcgcgttgaccgcgaagcgctgcgcgcggcattccatgagcggagccaaggtctacgcgaagaactgcctgctgtgcttgcacgacttgtaggctatttccgtgaccacgacccggccaccatcctgtcgatcatcgcgttctatggatcgtttcaagccgtcacgtcggagggcccggccggcgagaattttctgccaacccttgaacagcatcatctcgaagttctgcaagcacttgcgctatctattcccgcagctgaggccggccatcttccaccgccgccagggcttgtccaaaatatcattgatgacgcagaacttctgagccaggcgttcgcttggtcgcgcctcctcgtcgcgccggacaccgcgacccaggaagagctcgcactagttgcgctccaggagcggttgcggctccacacacagatcgtgcgcaactggggctatgtccaccaagtgcgtcaggtgtcgtctgaactctacggttcgatcgaccccgagttcgaaaaagctgcgggtttcactaccaaggatgtcatcgaagttatctatcgcatggtgaagctctacgaggagcgggcatcacaccgtatgcaactgcttggccggttcctgaccgagccaacgccggagcgcatggtgcaggcatattacgccacattcccgcacatgatcggcaaaccagaagatttgcttcgcgacatcggccatctccccaaggagaacgtgaccgctctgctgttgtcccattccgagttgtccctgccgcaactcgcgcgcttcgacgcgagcaccctctcgcagcagtctggcgtcccggaaacgcgcgtggaactcatcttgaacaacctgtgcatggaggccggggatctatccaaacgcgatccgatgcacttcttcatggataacccggtatggaaccggccgggcatgcggcacggtgcggaatacgtgttccccactcctcaatcaggcttgagccatgtgcaccggatcatgcgccggctgatcgagacttatggggttaaggcaacttatgagctgcgacgcgctaagtatctggaagacaaggttggcgaactcttgcgacgcgcgttccccacaggaacgattctcccgtcggtgtcgtggtcccttggggatagcaggtatgaaaccgatcacatagttgtgctggaccgagtcttgatgatcgttgaggccaagtctgcagctctgacgcccgaggccctcaggggcgcgccgatgcgcgttaagcgacacctcactgacctcgtgttcgatcctgctcagcagtcccagcgccttgaacaggtgattcgtctttcgcgcggcggcgatccggcgagtcaccgcatcaccgacgagatcggcatcgacgtcagtctggtcgacacgatcatccgcctctctgtgaccctcgacgacttttccatgatctcgatggctgaggatgaactcagggcggtcggctgggcaccggacgatctggtgctaccggcgaccctcaatattgccgacttcgagaccgtcctcgagatccttgagcgcccagccctcattctgcactacttcgctgagcgcccccggttccagcgctctgtaaacctcctggccgacgagatcgacctgctcggcgtttatctgagctcgctattccattttccagaaatcaacaccgagaagattcaactccttgcatcgggcgagtcaaagccgatcgatacctactttaatcgattggaaattggcctctccgctaccaagccgagtgttgctgtcgctccagccttcttggccattctggatcgactcgccgatcggcaggtgtccggctggatcaccattagcttggacctgctcagcaccggtgacctgcgccagcaaaccgcattctggaaaggtgtcgaggctctgaggcgtaaggtgcccaataccgaaggcgatccacatcatctgtgcgcgattatcgcagagcccgcaaatagcgatgcggtgatcgccgtgtacgtcttcacgagcgcacgcgccgcgcagcgccgcgaaacgatcgagcagcttgcagcagagcttctggagcgcagcggacgccagcgtctcaccgtcatcgggaagcaagttgagttctgggacgagccctaccgaattgccgccgtggcctacacgcgcgccgacgatagtcaaggtgagccgacggcggacgggtaa

SEQ ID NO: 532284 - DNA, 1071 bp, Stenotrophomonas maltophilia
ttgcaggccggtcgtgaaaaggcgcatgcgccggtgacaggcggtcaacgggttcgagggggtagaccctttcgggagttcgtgacgcggatcggcattgacgggtcgggtcgaaactttagcctctttcgtggaaccgtgaggtgtgagctgtggtgtagacccgggagaagcgacgtctttacagttcttgatgtgaagacatttctccggcccactccacagcagctacgtaaggcgctcaagcgcactcctcaatgtcttcgatgggcttgtcgtggggcttatcgcctttcggtgcgactgtccgatgtggaagatggcgctctacagaagcttcggtacgtaaaggctatcgcttggaggcggcggcgcaagatgcgcagctgggccgcgaagcatccccggtccttactgctagcctttccgctttggggtgatcctcggtcatttgctgagatacccgaacagaagcttttgcagcgcattcttggtgttctcgcgctggtcagtgcggcggcaagtccctgggcgaccgcatgtctcgagctccaggggtggctccttgacatgggtgaggctaaagcggtcgcggagagcgggcaagttgcatttgatcagttccaaactgcactcgagttcgcttgccccgtttatgtggcgcttgttgcagctttgatcctcttcactgcaactattgccatgctgatgcatcggctggaaatcatggtcacgcacttggatgtaagggctcgaccgaaagttggtttccgatttcacgtcgtgcagatcagctcaatcgccttgtacttgggccttcctgctgctggtttcgcatggttcctcagccatcgctccgccgttgagccattgcttccaaaggcattggcctcgcctctaatcctgctcccggcatgtttgtggctgctgttgcgccctgccctgcgacggaatcgcaggtcgctgcagaaaaggatgtttggcaatgctgcgcgcgccctggtcgcatcaaccttgtcaactgctttgtgtatcggagtcctgtttgtgctacgtgtcaccatgaagtag

SEQ ID NO: 532285 - DNA, 246 bp, Stenotrophomonas maltophilia
atgagcacgaccaagaaactacggcttggtcctttgccgcgccatgacatgacgaagctgaccttttcctgcccgaccagcctgaaagccgacctcgactgctacgcggcgctgcacgcgcagacctatggcgagatggtcgatgcggccacgctgatcccgcatatgttggcggcattcatggccggggatcggggattcaggaagggaggtgcgggcaaggccgcacctccgacgccgagctga

SEQ ID NO: 532286 - DNA, 339 bp, Stenotrophomonas maltophilia
atgcgatgcgttcccgttctgtcggtgtcgctgctggccgtgctgctgaccgcgtgcggccagcagccggccgaagacctggccgccaccttggccgccgatcccgtgcggctcaaggcgttgcgcgcccaatgcgcaaccgaacggcgagccgcaggcgaagacgcctgccgggccgccgccgaagccttccggcggcgcttcttcgccggccagaccgggccagacgaataccggacgctggccgaactgccgccgatcccgcccagcttcgacacgcccgccgacgacgcgccggaaggcgatgcgtcgctcgccgctatggaggacacgccatga

SEQ ID NO: 532287 - DNA, 264 bp, Stenotrophomonas maltophilia
atgaagaaatctttctggctcctgctgattctgctgttgactgcttgcggcccatcggacacacccaggcaggccagcgtgcccaccgtggatgaactggctgccgatccggtacggttgaaggaactgcgacagcaatgcaagaccgaccgcgtgacgcttggtgacgtgctttgcaatcgagtcgctgaagccacgcgcaagcggttctacggagatgggaagacgccctatacatcgtcggagacaccgccgaagttctga

SEQ ID NO: 532288 - DNA, 945 bp, Stenotrophomonas maltophilia
atggaattacgtcatttgcgctgttttctggcggtggcggaagaactccacttcgcccgcgctgccgagcgactgcacattgagcaatctccgctatcgcgcaccattaaggagttggaagatgacgtcggtgaaaaattgttcgtccgcaccagccgaagtacacgactgacaccggcggggaagctgtttcttgagcatgtgcctcgcgttttcacggccttgcagcaagcccgcgacagcgtgaaagcagcggccaatggcttccatgggcagttgcgcattgcattgtccgacggcatcacgccgtcgcgcctgccggccttattggcaatgtgccggcaggaggaacccgaggtagatattcggctgttccaggtgccgctatcgcagcagataaaggggctgcaagacgatctgtacgacgtaggcttcgcgcagtcggatgaagtgggtgaaggcgtggctgcagaagctgtatggagtgatccgttaatggtggcagtgcccgcccgacaccatctgctcaagcacaagcacatcccactggacgaagttctgcaattcccattggtgttatgcgatccattgacatgcgaaggtcacgcgcggcaggtcgaacgtgtgctacgtcgctctgacagagaaccactggtggttgagcgcgtcgcttcgttcgagctgatgatgatcgtagtgtcggccggcttcgccttggggctggccggcggcccgcacatcacggcaagtcgggagtctggcgtcatagcgcgtcccttggccggacgtgcgccgatgctgacgacctatctgctgcggcgcgaagccgacgtttcggaagtgctgtctcggttcatagagcgagtgcaggccatcgacttgcccgaaggcactaggcccgctttgccgcccgaacctgatccccaggaggaaatcgagctatga

SEQ ID NO: 532289 - DNA, 978 bp, Stenotrophomonas maltophilia
atggcacgaaatgtccacgctcctgcatccagccaggctggcttccttgtcacgctttttgcatcgaccttcttgatggggtccagcttcgtcgcaggaaaaatcctgctacagcagggtttcacgccgatgatcctggtcgggtggcgcttctttgccgcggccttggcgaccttgccgctagtgttggccggcgagcgaaatattgtggcggcgctcctgccggccaaagcagggctgcgtgatgttgcgctggtgatcctgattggtttgcttcagacagccgccgtcatggggctgcttttctgggccatgcagttcatctccgcatcgaccgccgccatcctgcttttcaccaatcccatctgggttgctgtcctgggtcgcatcttccttggcgaaagcctgcaccgagcgaggctcgtcgggttgcttcttggcgttgtcggtgttgcgcttgccattggtatcagcccatccatgttttctggcgggatgacgctggctggcgagatcatcggcatcgtctctgcgctttgctgggcaagcgcgacgctcatcaataagcgggcagcattgccgctctcgtcctgggccttgagtttctggcaaatgctggtgggcgcgatcgccatcttggccatcgcctatctcgatggcgaacaatggccgagcggtgtgacgcgagagcaatgggcttggtttctctggctttccatccccgcgtcaacaggctcatttggcctctggttcgtggcgctgaaaagaggtggagcaacgaggactagcggatttctgttcctggccccgctcttcacggtcatccttgcgtatttcatcctgaacacggcaatttcctggatgcaagctgcgggaggagtactgatcggcctcgcgctttggctcgtcaaccgggaacttccagcaagaaatgatcgcgaaaagatcgatgaggtgatcgcggaaggcgaaccgtga

SEQ ID NO: 532290 - DNA, 852 bp, Stenotrophomonas maltophilia
atgaataacgaaaatcttgaaaatggctttcttgacgtggccggttaccgcatcgcctacacgcgccagggccacgggagtgccatcgcccttgttcacggcattcccacgagccgccatctttggcgcaacgtcatgcatctcctcgccgcatcaggccatgaagtgcttgcgatcgaccttctcggctatggcgattccgacaagccttcggacacggaccttggaatccatgcgcaatccgaaatcatctttcaggcgctttcggccctggggtggaagcgcgcgaccatagtgggccacgacatcggaggtgggattgcccagctcctggccatcaaccatcccgaaattctggatcgcctcgttctgatcgactccatcctctatgactcgtttccagagcctgggattgcccgcttgaaggagccggcttgggacgaaatccttggcgcagcagatttcgatctgaagaagggcctggcgaaaggcttttcacgaggcatgttccataccgatcgagttaccgctgaactggttgatgcctatgagcgtccgttccatggcatcgacgggaggcacgcatacctgcgtgcagcccgggcgttgaggacagaagaactttcctcgcgcatggaggacgtcgagaagctggccgtgcctacgctcatcgtctggggcaagctcgacacattccagccgttgcacttcgcagagcgcctggccggaaaaatgcccaatgcccaaatccaggtatttgatgaggctgggcatttcctgccagaggacgtgccggaagcgctggcgtcccgtatcgctgaatttacaagtacccaaaaaggagcacgctga

SEQ ID NO: 532291 - DNA, 930 bp, Stenotrophomonas maltophilia
atgaaaatcgcgatcatgggcaccggaggcgtaggtggctatttcggagccaaactggccctcggaggcaacgacgtcagcttcattgccagaggggcgcacctggctgccatcaagtcccaaggcctcactgtgcgcagtccgctaggggacatgcatgtccccacgcccagagcaaccgacacgccgtcgaacgtcgggccagtcgatgtcgttctattcggtgtcaagctttgggataccgaggcggccgccaaagcgatcaagccgctgatcggacccgaaacgatgatgatctcgttccagaacggggtgatcaaggacgaattgctgagagccacgctcggagaaaagccggtagcaggtggcgtttgctacatcgcggcaacgatcgaggccccgggcgtcatcggtcatgccaacaacttgcagaagctggtctttggcgagtacggcggccatcgcagcgcgcgtatcgagcgcttccatcgggcctgcatccagtcggggattgatgccgaaatcagcgacgacatcgccagagtgatctgggagaagttcgtcttcctggttgggctgtcggcgaccaccgcgtccacgcggtgcccgataggcgtggtgcgcagtaattcggtttcccgcaagttgctcgaaggcgttatgcaggaggtggtggacgtcggccgggccgaaggcgtcaatctcgccgccgactttgccgtggaccgacttcgcttctgcgaccaactacccgccgatatgaccgcttccatgctgcgcgacctggaacgcggaaaccggctggaagtgcagtggctcagcggcgacgtcagcagcagaggccgacggctcggcgtgcccactccgcgaaattcagtggtctgcgaaatccttgcggttcatgcggatggggcgcagcgccatgaataa

SEQ ID NO: 532292 - DNA, 591 bp, Stenotrophomonas maltophilia
atgggccgaatacgaaactttgaccgcgatgcggtgcttgagagcgcggtggacgtcttctgggagcggggctatgacggggctggcatgcaggagatctgccgggtcaccggtctcaacccgggcagcgtctacgccgccttcggtgacaagcacggcctcttcattgaggctttgaagagctacatggcgtccatgtcgcgagagacgatcgcgcgcctgaacagcaatccgtccggtcgggccgggattgccgactactacgccgccctcatcgaagcgatgctggacggcaaacggcgctggggatgccttgtgacgaactcgatcgttgagttcgccatgaatgatccgcagatcagcgaagccttccaactccacctggccaggctggaaacggccctatctggcgcgatcgagcgggcaaagcaagcgggagaactatcgcgggacgtcgatgcggccgaagcggccgcattcctcgtgtgcacgacgcaaggactcaatgtcctggccaagacccggcccagccggcgcacgctggaggcgatcacgcggcatgctttcacggcggttggattcaaggcctga

SEQ ID NO: 532293 - DNA, 861 bp, Stenotrophomonas maltophilia
atgcagcccggcaccatcgcaatggttctcgccgcagcggtagcccatgcggtgtggaacctggcctcgaagtacaagcggggcgacactttactgttcgtctgggcgtatagctgtgcttcgacgcttctgtgggtcccgatcggtctcgttcttatggttcaggaccaaggggcgatagattggcggctcggggtgggagcggctgtttcggcggcattgcacattgcgtactccctgaccttgcaggttggctacgatcgtgccgaactcggggtggtttacccgatcgcccgtggcacagggccggtgctgacgatgctgtttgcgattcttattttgggggagcggctctccgtcgttgcgcttttaggggcgctcctcgtcgtctcaggcattcttgtcgttaccggcaacccgtttagaagcggaacccgccgcccactccagggaatgttttggggaggtgctacgggggccaccattgcaagctataccgtctgggacagctacgcggtcacgtcgctgcatttggcgcccgtgagctactacgctggcacactgtttctgcaaaccctgatcctgacgccaagcgcactgcggcgacggcatcacattcacacagttatccgtgctgatgccgtacctatcctcatcgtggccgcattctccccactggcctacatcctcgtgctcaccgccatgctgacggcaccgctcgcgctcgtcgcccctctgcgtgagtcgtcgatcatcatcggctctctcttcgcgtacagactctttcgtgagggtcatctcgcgcgccgcgtggttggggcggcaatcgttctggcagggatcgcggcgattagttcttga

SEQ ID NO: 532294 - DNA, 885 bp, Stenotrophomonas maltophilia
atgaaaaaagaacttggtaatagcgtttcagagggcgagcaacggttgcagcaatggatcggcagcattcaagcccgaagcggcgacctcgccgcaagcgaggccaaagttgtcgatctcctgctcaccgaccctttgtttgtcggagcaagcacgacggcccaggttgccgcccgtgccggcgtttctccgccgacggtgattcgcgccgcgcgtgcgctcgggttcggcggattcaccgaactcaagatcgagatcgcgcgtgctcgcggcacagcccggttcttcgcgcctcctgaagcactcgccgcggatgcgacgtcggcctcagtgctggaaacatccattcgtgcgggtaccgatgcactgaccgcgctcggtggggccatcgaactctctgcgctggataaggctgtcggcttgatccagcgcgcgcgccaggtgtttgcgttcggtgctggaccgtcctccacggttgccgccgatgcagtcttccgtctgcgtacgatcggcgtgatgaccgtgggcatcacggatcatttgtcggccatgatcgcggcacggctcctgggcgcagaagacgtcgtcatcgcggtcagctcgaccggccgcacatcttcaacgctagccgtcgcggatgcggcctcctcggctggcgcctcgctgatcgccgtcaccaatcagtacgacacgcccctggcgaccctcgccgacgtcgcgctcgtcgtcggcggcgtaccgctaccggcacagatggccgctgcgggaagtcgattggctcagctcgtcgttatcgatgcgctggtcgcatccctggcgctgcgcgatcaagagcggacccgcttggcggagcgggcgggcatcgatctgcccgacatttcctga

SEQ ID NO: 532295 - DNA, 897 bp, Stenotrophomonas maltophilia
atgaatcctgaaatcaaccctggcgtcgctgtcgtcggtcccggtgccattggcaccacgatcgcggtggcgctacacgaggtcggccgcacgccattgctgtgtggacgtcgcccccgcgatcacctgaccctgcaagatggcgaccgcttcatcaccgtacctggtccggttcggacgaatccgacacaaatcgctcgcacggctgatcttgtctttttggctgtcaaggcaacgcaaatcgaggcggcagcagaatggctcgcggtgttggccggcccagaaacagtggtgtgcgtcttgcagaacgggatcgaacaggtggacagggttcgcccgcactcgccacatgggcaaatcgttcctgccgtcgtgtggttccctgcgcaggcgcaatccgacggctcggtacgcttgcgtggcgaagcgcgcctcagcctgccggacacgtccgcttcccgcgtagtggccgcggcgctgcaaggcacacggtgcgccgtagatttggccgcgaacttcagctcactggcttggcgcaagctgatgcagaacgcggtggctggcctcatggcactcacgcatcgccgctcaggcatgttcggtcgcgctgatatcgccagacttacgctggcttatttgcaggaatgcctggccgtggcacgtgccgagggcgctgaactcggcgacgaagtgccgcaagagatcctcgacaagttccaggcggcgcccacagacatgagcacctccatcctcacggatcgagaagctggccgaccgctcgaatgggatatccgcaacggcgtcattgcgcgtcgcggccaggttcacggcattccgaccccgatcagcgacatcctggtgccgcttcttgcggctgcgagtgacggccccggttga

SEQ ID NO: 532296 - DNA, 726 bp, Stenotrophomonas maltophilia
atgatcgcgctgttacttctcttctttctcgccctcggtgccggcgtgctcagcggcatcgtcggcaccggctcgtcgctcatcatgctgcccgtcctcgtcacgctgtacgggccgcggatcgcggtacctgtgatggcgattgcgtccttgttcggcaacatcggacgggtgattgcctggtggcacgagatccgttggcggccggtgtttgcctattcgttggcgggagttcctgcggctgtgctcggggcgcacacgctgctgacgatctctcctgccactgtggacgtgttcctggcagctttcttccttgcgatgatcccgctgcgtcgcctcatcagacgatcgaacctccatctgaacctctggcacatgagttttgccggggcgattgtcggcttcctgaccggattcgtgctgtccaccgggccgctcagcgtgccggtattcaccgggtacggaatgagtggtggcgcgtttctcggatcggaggcggcaagcgctatcctgctctacgcaggcaagctgggtacgttcggagtgtcgggcgtacttgcaccgcccgtcatcacacgtggacttgccatcggcatcgcgttgcttgccggttccatgattgcgaaacgtctcgtccagcgactccagttgcacacgttcgagcttctcattgatgtggttctcgtcgccggggcggcaggaatgatcctctccctcaacggatga

SEQ ID NO: 532297 - DNA, 807 bp, Stenotrophomonas maltophilia
atgaagccatcccgtccgtatccgaccgatgtttccgatgaagagtgggcctttgccgcgccctacctgacactaatggatccagaggctcgacagcgcagatacgatcttcgcgtgatgttcaatgcgttgcgctggatggcccgggccggagcaccatggcgcttgattccccatgaatttccgccatgggaggcggtctaccagcagactcagcgctggctgcaggccggttgcttcgaagcgatggtcaacgacctgcgctcggtgttacgcgtggcccaaggcaagcaaggccagcccagcgccgtcattccggatgggcgcaccgtgcagtccacctgtgaaagtgggccacgcgctggctatgacggctacaagcgcaagaaaggcagcaaggtgcatatggccgtggatacgcttggccatcttctggcagttcaggtcacgcctgccaatgagcaggagcgcgcccaggtgagcgccctggcacaggaggttcaacacgtgacgggccagaccgtaaagcttgcgttcgtcgatcagggctataccggcaaagatccggcggaggctgcaagggaagaaggtatcgaactgcatgttgtgaagctgcctgaagcaaagaagggctttgtactcttgccgcgtcgatgggtcgtcgaacgcagcttcggctgggtcaaccgattccggcggttggcgcgtgactacgagcgtcttcctgaaaccctggcaggcttgcactacgtcgtcttctcaatcctcatgctcggaaatgctgctgcgcttcttcaaggttcataa

SEQ ID NO: 532298 - DNA, 2757 bp, Stenotrophomonas maltophilia
gtggtggcaccattcttgaccaggctgccgttgccgccgatcacgcccgagagcgtcagcgcgttgctgccaggcacggtcagcgcgacacccgagcccagcgtgaccgcattgccgagggtgactgcggcgcctgcatccagcgtggtgctggtagtcactgccagcgtgccggtacccagcgcaccatccgcaccgacgaccaggccaccaccgttcagggtcaggccgccaccgaaggtgttggtgttgttgagggtcagcaggcccgtaccgttcttgaccaggctgccattgccggccaccacgccaccgagcgtgacatcgttgctgccgcccagcgtcagctgcgtgcccgcaccgaagttcactgcattggccaggttcaacgccaccgtgctgtccagcgtggtggtgccaccgatgcccagcgcaccggtgccgagcgcgctggcattgccgaggatcaggccaccggcgttgagtgcaactccgccactgaaggtgttggcaccggacagcgtctgcacgccggtacccgtcttgaccaggccgccagtgccaccgatcacaccggcaaagctgccgttgccggcgccgccaaaggtcagcgactgcgcgcccagcgccagttggctgccggcgacgccgttgagtgcgccgatggtctgcgcggcaccggctgccgagatgtccagcgtcgcaccggcgccggcaagatccaccgcaccggccgcggcaaggctgccaccggcccccagcgccagcgtgccggcgttgacggtggtgccacccccgaacgtgttggcgccagacagcgtgaggcgcgccgcgccatccttgatcagcccgccggcgccgaacaccggaccggtcagcgtcaggtcattgctgcccagcacggtgaggttggcgcccgcagcgaggccgagggtgttgcccaccgaaagcgccgcagtggcatccagcgaagcgttgccgcccacgtccagctggccggtacccagcgcctgtgcgttgccaagctgcagtacgcccgcgttgagcccgacgcccccgctgaacgtattggcgccgttcaatgccagtgtcgccgcaccgttcttgaccagcccgccggtgccgctgatgacgccccccagcgacacgttctggctgcccagcagatccagcaccgcacctgcgccgaggttgacgctgttggccaggtccagcgccaccgaactgtccagcgtggtattggcccccaccgacaatgcaccggtgcccagcgcgccggcattgcccagcagcaggccgccgccgttgacggtcagcccgccaccgaagctgttggcgccattgagggtcaaggtggtggcaccgttcttcaccagcctgcccgcaccggacaccaccccacccagcgtgatcgcctgcgaacccggcagcgacaacgcggcgcctgcacccagtgccacgttgttgcccaggttcagcggcgcactgccgtcgagcgagacgttgccaccgatgcccagcgtcccggtgccgagtgcgccgctgttgcccagcagcagggcgccagcgttcgcgctcagtccaccactgaaggtgttggtaccgttcaaggtcagcgtcgccgcgccgttcttgaccaggctgccggtgcccgcgatgttgccggccagggccaggttctggctgcccggcagggtcagggccgcgccgaggttgatcgcattgcccaggttcagcgctgtcgtggcatccagcgagccgttgccactgaccgtcagcgcgccgcttcccagcgcaccggcattgcccagcaccaggccaccggccgcaaggtccaggccaccactgaaggtattggcgccggtcagcgtctgcacgccggtgccctgcttgatcaggccaccggtgccgccgatcacgccggcgaacgtctggttggtggcatcaccgaaggtgagcgtgctgctgcccagcgtcaccgtgctgccggcaataccggacagcgcgccgatggtctggttgccgccgagcgagatgtccaggtccgcgccaacgccggtcaggctgaccgcaccgccggcggccaggcttccgccgctgcccaccgcaaccttgccggcattgatcgccaggccgccggtgaaggtattcgcgccacccagcgtaagcgtggcggcaccgttcttgaccaggctgccggtgccaccgatggcgccgccgagcgtcaatgcgttcgagcccagcacattgagcgagccacccgcgcccagcgtgatgccattgccgaccgcaagcgccgcgctggtgtcgagcgacaccacgccaccaacattcagcgcaccggttcccagtgctccaccgttgcccagcaccaggctgccggcattgaacgccacgccgccgccgaaggtattggcgccattgagcgtcagcgacgacgcaccgctcttgaccaggccaccggcgccaccgatcacgccgttgaacgtgagcgcctgtccgccaagcagattgaggctggcacccgaaccgaggttgaccgcgttggccagtgcaagcggccccgtggttccatcgagcgtcacgttgccaccgacactgagcgcaccgctgcccagcgcagcagcattgcccagcagcaggccaccggcgttgagtgccacgccgccactgaggttgttcacgcccgacaaggtctgcacgccggtgcccagcttgaccaggcctcccgtgcctgcggcgaacgtgccgctgtag

SEQ ID NO: 532299 - DNA, 1011 bp, Stenotrophomonas maltophilia
gtgcggctgcccaggttgaccgaaccgccgaggcccgccagcgaaccgatggtctggttggcggccgccgacaggtccagggtggtaccgacgccaaccgtgatcgcaccggtgggcgacaggctgccgcccgcgcccagcgccaacgcgcctccggccaggttgaaactgccggtcagcgcattggcgccgttcaaggtgagcgtgccggcgccgttcttggtcaggttgccggcaccggagatcgaaccattcaatgacaacgcattgctgcccagcaggttcagcgagcccccgccattgatcaccagattgttgcccagggtgaagcccgccgtcgtatccagtgaggcgctgccacccacggtcaggttgccgctgcccagtgcaccggcattgcccagtaccaggccgccggcattgaggttgacgccgccggagaacaggtttgcgccgccgagagtaacgatgccggtgttgttgaccgtcagcccgccagtaccggacagcacgccccccaggctgaatgcattggtccctgccagggacagattgcccccaaggctgaaagcgttggccaggttcagaccggccgtggaggaggcgatggcaccgccgttggcggtgaacagcccggtgccgaaggaaccggcattgttgaaattgaccaggccatcattgagcgtggtcgtacccgcacccgcccacgcaccctgcaggttccaggtaccgctgttgacggtgagcttctggaagttgaggtactggttccagcccagcgtggtcaccgcgccgccggtgccggaccccgggccgctgacgacgttctgcagcaccagcgtgttgttggccgcaccactgccggtaccggcgtcgaccgatcccgcagccgcaacctttaccccggtgacaccggtaatcacgccggcaagagcggtgccgccgccgctcacaacgctggaacccgacactgcggtgaaggtgttgccgccggttgaatcacccaggtga

SEQ ID NO: 532300 - DNA, 213 bp, Stenotrophomonas maltophilia
atgttggtggtgctgtcgcagttcacggttgtggtgcccgtgcaagctgcgaatgccgatccgctggccagtgtggcggccaaagccgccgccagctggtgtgcccgcaatcgcggcacccgccctgcgctgaccgcgcttccgccgggattctgggcgacctccgaagcaacctgcattaccccaagggcacgattgaaaaccagacggtaa

SEQ ID NO: 532301 - DNA, 1923 bp, Stenotrophomonas maltophilia
atggccaccatccagttccgcccgaacaacagctggaccagcaccttcgatgcgttccacaccgaagccgagcagatcgacaccgccaaccagttcgagctcaacctgagcaactacaacggtggctatacgccgggcctgctgatcagcaacccgcagatcaacgccaacggctcgttcaccggcggcaccgccagcggcgtgtatccgctggtgcgtggcatgtacaacaagcgcaaggacaagatcgatgcgttcggctggaacaacgagttcaacttcggtggcgtcaagctggtcgccgacctgaactactccaaggccacgcgcgatgagctgaacctggaaaacaacctgcagctgaccccgatgccgcagctggacacgatcggcgtgacgatccgccaggacggcttctcgcagatccgcccgggcctgaactactccaatcccgatgcgttgttcctgaccaacaccatctacggttccggctatggcaaggtgccgcaggtggaagaccgcctgaagggcggcaagctggccgccaccatcgccctgcccgatgccatcgcctcctgggcgccggacatcgacatcggcgtgaactacgccgaccgccgcaaggtgaagacccagtccgaaggcaacatcctgctcggtgcgcagggcgatgccaacatcgcctcggacctgcagtaccgcccggtcaacctcggcttcgccggcctcggcaccatcccggcctggaacgtgccggccgcggtcggccgctacatgaccttcaacccggtcgacaacctggactacctgattcccaagtcgtggacggtgcaggagaagatcaccaccgcctgggcgcgcctgaacatcaacaccgacatcggcgaagtcggcgtgcgcggcaacatcggcgtgcagatgcagcacaccgaccagagctcggattcgcgctactgggacagctcgcagtcggccggcaacaacgtgcagccgtactcgaacggccgcacctacaatgactggctgccgagcctgaacctggccttcatgttcccgcaccagcagaccctgcgtttcgccgccgccaagcaggttgcgcggccgcgcgtggaccagatgcgtgccggcctggagttcggcgtggataccgccaccggccgccccggcggcagtggcggcaacccgttgctggacccgtggcgcgccaccgcactggacctgtcctacgagaagtacttcggcgagaaggcctacgtggccgccgcgatcttctacaaggacctgaagagctacgtctacacgcagtcggtcgacaactacgacttcaccgccctgctgggcagctacgtaccgccgccgggcatgaccgtgccggtgctgaccaccggcaccttctccgcgccgcagaacggcaagggcggcacgctgaagggcctggagctgaccgcgtcgttcccgctggacatgctgaccgacaacctgcgtggcttcggcctgcaggccagcgcgaccttcaacaagagcgacatcaccatcctggacccggaaagcgcgtccagcgtcggcagcgatccgatcagcctgccggggctgtccaagcgcgtgtacaacttcaccgcctactacgagcgcagtggctttgaagcacgcgtcagccagcgccgccgttcggacttcatcggcgagatcggcaacttcaacggcaaccgcagcctgcgctacgtggtcggcgagaacgtgaccgacgcgcagatcagctacaccttcagcgacagcagcaccctgcgcggtctcaccctgctactgcagggcagcaacctgaccaacgagccgtaccgcacctacgccggcagcaaggaccgcccgctggaatacatcgagtggggccgcacctacatgctgggcgtgaactacaagttctga

SEQ ID NO: 532302 - DNA, 1722 bp, Stenotrophomonas maltophilia
atgcagtcccacctgccagaagccatcgatctgccgaggccgcacgccgccgtcgcggcaggcgaccacgcgcgcgccaccggcccagtgtggcagcggaccgtccaggaccaggtcaagcagtaccgcagccgctggcaggcccgtggcgctgtcttcccggtacgcgacggcgtgcgcgccgcgctgctgcaggcgctcgcacagcgactgcaccagctcgcgcacattgccgcgcacctgtacctgcagccccgccggcaactgcggtgccgggcattgctgcggatccgccggcgccggggacagcggcagttcgacgctgaaactgctgcccaggccactctcgctgaccacgcgcagctggccttccatcaacgccacaaggtgcgcacagatggccaggcccaggccggtgccgcgcatcgcgtcggtgcccgggttggcctggaagaagggctcgaacagatgcgcctggtgttcactggcaatgccgatgccggtatcggccacctgccactgcagccagcagcgctgtgcctgccagcgtgccgacacgcgcaccaccacgcgcccgctgtcggtgaacttcagcgcgttgctgatcaggttgttgagcacctggcggatccgtgcggcgtcaccgcataccctggagggcacgtcggcatcgatgcaggcgtagaactgcagccccttgctggcggccgcggcggcgtacgagtcgagtgcatcttcggtcagccggaccggatcgaacgggctgggctccaggctcagttgtccggcctcggccttgctgacatcgaggatgtcgctgatcaactgcatcagggtcgaggacgaacgctggatcgtggcgaggtactcctgctgccgcgcatccagcggcgtgagccccagcagttcgagcgtaccgagcacgccgtacagcggcgtgcggatctcgtggctcatggtggccaggaactggctcttggcgcggttggcctggtcggcagcgcggcgcgcctgctgcagtacctgttcggcctcgtgctggctgctgagatcgatgaacaggcacaacaccgccggctcgccgcgatagcgcgccggtgtcgccgtcaccagcaggtggcggtcctcaggcgtggtgtaggccagtccgtcgccgagggtagtgccgccagcggccagcacgctttgccgccaggggccatgccagccgcctgcgttatggtcctcgcccagccagcggcgggcgagggcgttgtccagcagtaccgtgccatcgtcgcgccgcagcaggcacagcccgatcggtgcgttgtccaggatggtgcggctgaaggcctcgctttccagcaggcgcgcgtggtggctgcgcagcggctcgatgaccgaacgccggtacgcgcgcagcagcagcgtgccacccagcgccagcagcagggccgccaccgtcgcgccgagcaacggcccttgcgggtgctggaatacctggcgccagctgacgtggtagaccgcctgccagccgcgctcgctgcgcatgcggaactgcaggccgtccaggccggcccgcgtggcggtgccggtgtcgctggcgtctgcggcatcgcccagcaggcgctggccctcaggatcgaacagcgacagccgctggaacaccgggacacccagcacctggcggtagtcatcaacacgcgccggatccagcaggcacgccagcgcggcctgtga

SEQ ID NO: 532303 - DNA, 414 bp, Stenotrophomonas maltophilia
gtgcagcagttgttcgaggcgccgctggaagccggcaagcggggccgcctgggtcgccaggtcagcgccgcccgccagggcacgttcgatctgcaggccgcggtccaccagggctggcgcgccgacgatcaccagtgcgccgcggatgcgatgcagtacctgcaccacgcgtgcggggtcggcggcggcgatcgcctggcgcaggctgtccaggtcgccctgcatggtctgcacgaacagcgcctgcatcctgtccggaacctgcagtggcgcatcatcatcatcgcgcgcatcggcggagtccgggctctccggcagcgcctggacgcctgcgtcgccctggctgatccgggtcagcaggcgctgcagggcttccagcgtgatcggcttgaccagtacgccctgcatgcctga

SEQ ID NO: 532304 - DNA, 159 bp, Stenotrophomonas maltophilia
atgaaccgtccgttgcgcatcctgcacaccgaagccgccaagggaatgggcgggcaggagatctacatcttccgccacatgcaggtgatgcgcgcgcggccacgaggtggccctgctgtgccagcccgaagcccgcctggccacgctggcccgcgatga

SEQ ID NO: 532305 - DNA, 279 bp, Stenotrophomonas maltophilia
atgtcccgtcgaaccccccggatcatcgctgcgtccgctgtcgccctgctgggcgtgggcggctatttcgcctacagcctgttcgcagcgcaagggcagggcgatctcgcccaggcaccgcttaacaacaccacggccatcccgcccgccttcatcatggcggttgatgattcgaactcaatgacgttcgagcgcattttcaagggggggggatggtcgcatgcagtggacgggcagcagtttcttcagctcggcgggtgtgttctacaacgtcggtga

SEQ ID NO: 532306 - DNA, 1302 bp, Stenotrophomonas maltophilia
atggagtttcacgacatcctacatggtcacattcaggtggatgaccgtgaaatggcaagatttctcggagatcttctcgagagccctgaggtgcatcgccttcgcaacatgaggcaaatgaactttgatgtacctctgattcaggagctcggtcggtcaaggcgtcttccccattcgataggggttgcgcatcttgcttaccgcctaactgttggaaagatgcttcaccgcggaacgataaagtctctggtcgctgcggcattgctgcacgatgcggccatcccgccctttgggcatcttgtcgaatcggagctgaaagcaaaagacccgacattttcccacgagcatcgcctcaaaaatctcatgtttgggcttgatggaaagtcaaacaagtacggggacgttgttcatggaaaatcggccggattggtcgacataatgcgcaggcatggagttgatccattggatgtgctgagggctgtctgtcccgagccaggtgttggaaatttcatctctgccgacgttgatattgataatatcgacaacgtgcatagaatggcttgcatgcttggttggaagggtgccgcgaaaaatgtcgacgatattatgaatgtgtctcgagttcgagatgatctccagctagaattcgggcgaggttggcaggagtatctcgggcggtgggctgattttagaaatcgaatttatacaatgataattgcacatccgcagtgcatcccacacaatgcgctacaggctgatttatccagagctgcagtcaaagagggaatcataacttccgaggactggagaatgactgagccagagtttgaagaggcgcttcgcaaccacccgagaacgaaacgccttgcctggcagctaatatctggatgtgaatatgttcttgaggattatgtgtgggccaaggagctggccaatcctatcgggaaaagcaatagtgctattttggaggagatgacagccatgggcgtggctgttgatcctcttcatagcctatttatttggaacgagaatggattaatatctcgctgcgttgatattcgcctggctaatggtgaagaggtgagttttggagaaaggtcaagaagctgtatggtcgcattgattaagactcgacgggctgggcgaggcatgactaagcgggaccgtgagttgtggcgtcaaaagaccatcgatgctgtggcaaccatgtcgggcagtgatgatttttccgtctcgttccctgaaggctactcggggcggtataaatctcaggagctggggttggagcttggatatcattaa

SEQ ID NO: 532307 - DNA, 750 bp, Stenotrophomonas maltophilia
gtgaattgtaataacgaagatggatgttcgtcttgctatgtgtttgaaggaagaattccagtatggattggtggagaaggggagccgccggaggtcaaagagttttctggcgttccatattaccgcttcatgaacaaattctatgtctcaaacaaggagctagatcgcctgtcgatggacgaggtgatccgtctctgtcgcgccagggataagtacagttcgtcaattgatacaccgaacggcagggtgaagcaggtatttcgtgccgttacgatgaatctctcgcctcgtgttgtagtggagatcggtgcggggtcacgcccactctatcgcgctgaagagactccttttagatatgtggtgcttgacgcagacttggaagccctggccacatgcgagggaagtaaggcggagttttcaaacgagatctttaggatcgacgcctcagacagatccatcgatcttatcctcgctgtcttcgtattccagtttgagatctacaggagtcagattgaagaggtggcacgaattctttctgacgatggcgtgcttctcgttaacatatatcgtcgaagtcaggaatctaggcgcggacttgaggccctttttcgggagagtggcctcatcgtaaatgccctggttgatcctgagggtctatgcaaagaccatgagtactgggtcgtttcgaagatcgccgagacgggagggcgcgttataaacattctaatagaggtgatcggccagcattga

SEQ ID NO: 532308 - DNA, 903 bp, Stenotrophomonas maltophilia
atgagtaacgtgcctaacgagcatactgagccgccgcccacatatagagtggagcttcagaagacctttgttgccatgctttttgcgtttgtcgcggcaacagtcgcacagcaacttggtgaaatattggtcgtagccaccaaggcttggaagcttgcaaatagcgcgcctgaaatgctgatcgcagcacgcggagatagctggctgcttatcgtcgcggctagccacgccttacttgcgttgacgatggttacagtcagctggttctcatggtctcgatcgcaagccaccatgcacaaaagcgacatcgacaccgttttttccaggaaatttataattttcctgattgaaatcttcctggttacgctctatttttcgatctcaaaatcagccgaaactgattatgccgcctatctaaaagatgggttgacaacttcctttgtcaaaaacccgtcagccagaccagaagcactccagctactttgggtcttcatggtctttgcggcgtgggactacctagtagatgtactgaggcctttcaactggaagaaattgaaattctctactccgttccttcaccttcgtcgtgtactggcgttctgtggagtttctctgttctgtgcgtcgattgcatatctgatatcagcggcgacgccagctaccggcggcagcgcatctcagattatatttggcgataccgcacttattctcgcggtttttcttttcattgcagccaagccatttgagcactttcttgcgcgcggaatgacaagtgagatgattggcggggtaaccgtccgagagcaaccgacatcaaaccaaaaacgaaggttctggatacttctttcgttaactctcgtctgcgtggtcatgacgaagcattccccatgtttactcggatag

SEQ ID NO: 532309 - DNA, 201 bp, Stenotrophomonas maltophilia
atgcagatcggcatcgtactttcggccctgcgccggcaccgcctggcgaccttcctcatcgcgatggagatcgcattggcctgcgccgtgctgtgcaacgcgatcttcctgatgatcgagcggaacgctgcaatgcagctggtcagtggcctggacgagtcacggctgggggtgatccagctcgacggcatcgcggcttga

SEQ ID NO: 532310 - DNA, 663 bp, Stenotrophomonas maltophilia
atgaatgaggtcactgcgcttgtgaaggccatccgcgccattccttccactcctggcaagccgtggaatccgcgggttgcattcgaaacgttcgttcagcacgcactgatgtcgatggcacatatccacgcagacaccaagggtcacctcgacaccaaagtccttgcttttggacccttgaaaaaaaatgtcgaagaagcgcctgaagtggtagcagccatcaacgcttacatcaaagcggtcttcgcaagcaggccgtttgacgatgtcctgggacgggtccatgccgagctgctggccaggaagggtggagaagggctgggtcagtctttcactcccggcgatcttctcgatctggttcaagcccttgccaccaggcatcggcctggtgggagcggagccaaggtctacgacagctgttgcggcgcgggttcgcttgcccttgccgcgatcaggagtcaactgaaacaccttccaagcgaaaaaatcctggtgctggcgggggacatcgatccgttgtgcgcagcgatgacggctttgcagatccacgcgaatcaaacgtttcatttcttgccgcttggggcggtcaaagtcacggtggggaacgaactgatcggtcccaggcgccccgggttttggtctcacttccacctctacgagtag

SEQ ID NO: 532311 - DNA, 576 bp, Stenotrophomonas maltophilia
atgcaacacgattccacccaacccatcagcgcacgcgaagcccttggtctgaagctctgcgaacaagagcgcgacctgctcatccaagcggtgaagaacgattggtcagtagacgagctttacgacgagctgcggcaagcggccttcgaccattactacgacggcaagaccgatgaagaagagtggaaggaagagacctgggtaaccagctacaaggactacgtggccttcctgaccgctgccaccgagtatccgctccacttcgccgtcgcatccggcgatgccgaatgggctggtgacctgctcaagtcgggacgcacgccccaggacgcggactcggagggaacgaccccgacagatttgttggggcggcacgggaatgatcaatcggatcaggtcatccgtgcccacaaccgagccaagctcctcgacagtatacttccgcctgccaacgcttggaagccaccggaaggcgggtttggggccgacgcccaacggcaggtcggtgcggccatgaaggcccatgggcaggacggccaaaccctggaagcccctcgcttgcgagcgcgcttctaa

SEQ ID NO: 532312 - DNA, 564 bp, Stenotrophomonas maltophilia
atgctgcccctgccggacctcatggctgccaagaagacccccgccaagaacgcagttgccaagaaggcaccggcccgcaaagacctgtccacggctgcgaaagtggttcatgccaagccgcagcgggagtatgcgccgctcgtcgacttggaccagttttccgaggagcagctggcagagctgatggtggctgcaggggacgcgcctaaccgcaagacttacttcgacttcagcgaagaggcgccgtatacccgggccgggaaaaaggttcacttggaggtgggccggggttcgcaaatgttcgactaccgggacgccaagggccgccggatcgagcgaacgatggtcaccctgccgcccaagctgcgggagcaaatccaaggcgcaactggggagcaggatcccgtggtgaccaccgcgctcatcgcgctggcgtcctgggcctgccaagagctcaagaagtcgaagaggcgcttggtggtcaccacggcaaccgacgacctggatccggtgcgccggcaggtgaggaaggcgattgtgggccggcaacgaaaagagaggtaa

SEQ ID NO: 532313 - DNA, 1383 bp, Stenotrophomonas maltophilia
atgcgctggctcgctcgcgtgttcgcttccgcgattgctcgtcgcatcgcatacgtccttgttgcgctgatccttgcatgggctggcatcgggaccagcaaggcggcgacgtaccgttgcactgaccttggcgccatgtgcgacgaaggcgaggcctattccgaggcgtgggcgcatgcgcgagacgctgcgcagaatcccgcctacaacgtcccgtgtgtgtacaagtcgggcacccagacatttgttgcggcgggctacagtggcagttgcagtggctcacgcgtttccacgaaagagttctatttcactaaatcctgcgaaagtcgacccgactggaatggcccttacccctacttgaacggtggcaagccgaagaacggctctgtcacctgtaatgccgggtgcaagcaggcgtggtattcgaatggcgacgggtacttcaatggcaagtactcatcggttccaggaacctgcaacaactatgacgacaacgagtgcaaagctcagttcggtgatggttaccactggaatgctggcatgtctgcgtgtgagcccgacgacggcaagtgcaaggatgggggaaagcagaattcgctggggcaatgcgcgccagaaccttgccctgatgggatggcgcagcaggctgatggcacgtgtaagaagaaagacaacgagtgtccggcagggcaggtgcgttcaccggatggcaagtgtttgcccggtgatggtcaatgtgccagcggcgaagttcgcggcccggatggcacttgcaagaaggatggagacggggacggtcagccagacgaaccgggcgacaaagatacattttcgggcggtgacgattgcaattcgccgccgtcgtgcagtggctctcccatcatgtgcggtcaggcgcgtattcaatggcgtatcgactgcaatacgcgtaagaaccgcaatatcgctggtggcatgtgtaacaccatgccggtctgcacgggtgagaagtgcgatgcgatggagtatgccgggctgttgatgcagtggcgctctgcttgcgccctggagaagatggcgagcgactccgggaacagtggcgggaatgccgacgtaaaggcgattcgtgacgcgctgaccgggtctggaggttctgttacgactccagctgatcggcctgcgtcagatgtgtggtcgccgagcagtggtcagccaacgcggcctgacacttcgggttacggctggggcaggggatgcccgcagccgccagcgattgaggttatggggcaaaccatcgctttcgacattacgccgctgtgccgatggctcggcctcggcagctacttcgtcgtgggcctcgcagcgctgttctgcctacgaatcattgccagtaaggatgcctaa

SEQ ID NO: 532314 - DNA, 231 bp, Stenotrophomonas maltophilia
gtgctgtggctggagaggcgctcgcaccatctgctgttgcaggtctcactggactccgagcagcgggcgcccgccgttgtgcagcttggtacgttgcttcaatggcagctggagccggtgggctatctggagcaggtgctggctgacgtgccggaacctgttctgtcggatcgggtgctgcggattcttgctagtgatgtgcctgatggggcgcgatgtggcgtgccgtag

SEQ ID NO: 532315 - DNA, 1113 bp, Stenotrophomonas maltophilia
atgattgattcgggccatcaagcagatcttctaggcgaggcagttaaagttctcgagaaacaatatgaggaaaataaagatttcaactcatttttcgatgaagaaggtccgctctatttgggagaatatgagtatgagcgcagcaggactcttttctggctggaccgtgaagcgtatgaaaacgagcggagagtctgggaagataactcgtatcaggagctgcacaaggaaataattgatcttatcagcaacagtggacttgttgcgccattccaagatttactggccgctgtggaacgtggacgagtcgttccgttcgtaggcgcaggtatgtcaagacccatgggaatgcctctttgggcagaagcacttgagaagctcgtggagcgaattcctggcgctgataaagtcaaaatattaaaactcattgaggaagggcactatctctatgctgctcaatatctttatgagtgtgatgccgtgcaagttaagaattttattcgcactgcttatagaaggaataaattaaatccttcggaatcaatgagacttcttccccgcattggcaatggatgtgtaataacaactaattttgacgatgcaatagagcaaacctatcatcttgaggggatggaatttcgtgcttatatgcacggtacacaagaacacaatttctttcctcgactagctaggggggagcgttgtcttctgaagttgcatggcgatgctgatgacccagctacgcatatccttacgcaggaacagtatgctgaggcttatggaagtccattcgattttaaaaaaccacttccaaaagcattgcggcaagtatttatttctcagtctctccttttcttgggttgtagcttggagcaggattggacgctcgagcttctggaaaattcgattgcgacggaagagtatgtggtgccgaatcattacgcaatcattccagaggttgttaacgctcaagaaaaggcaataaaagaaactcgcttgcttgcattgaatattcagccgctatggtatccaactgatcggcatgagtatgtagaacggtatctaaaactattggttgatgcagcggaaaaacgcgtttccttcgctggataa

SEQ ID NO: 532316 - DNA, 1335 bp, Stenotrophomonas maltophilia
atggggccgtttggctcatcaattaaagttgaaacattcacagatacgggtattcccataataagtgggcagcacctgcgtgaagcagaactaacagatagtgagttcaatttcattacggaagaacacgctgactctcttaaaaatgccaatgttcaaaggggggatgtgatttttacccatgctggaaatattgggcaggtggcgtttatttcgaatcattcaaaatatcagagatatgttatctcgcagcggcagttctatttacgctgtgataccagtattattcttccggagtttgttgtctattatttcaaaagtcctgaagggcagcacaaacttcttgccaacgctaaccaggttggtgtgccatcaatcgcacgtccctcgtcatacctgaaaacaatcgaagttcccgttccctcaatcgaagagcagcaaattgtcgtccgaaacatcaaggcgcttgatgccaagattcgcgcgaaccgccgcatcaaccaaaccctcgaagccatggcgcaagccatcttcaaatcctggtttgtcgatttcgatccggtcaaggccaagatcgcagccatcgaacaaggccaagacccgctacgcgcctccatgcgcgccatcagcggtaaaaccgacgccgaacttaaccagatgccccacgagtaccacaaacaactcgccgccaccgccgcgctgtttcccgatgcaatggaagagtcggagctgggggagattccaaaggggtggaaggctggaatattggctgaaatatgccatttgaaccctgaaagctggagtgccaagacactaccgaatacggttaactatgtagatttggcaaataccaagagtggtgagatttcagaattgcaggtagtaagcggaaaagacattcccagtcgtgccagaagaatattgaggtccggggataccattgttggcacggtgcgtccagggaataggtcttttgccttagtgggaaaggagaacctaaccggaagcaccggattcgctgtgctacgcccgattgctcaggaatggttggaatttgtttatcttgtggcaacctccggatccaatattgatcgcttgactcatctggcagatggcggtgcatatccagctgtgcgccctgaagttgttgtgcaagggaatattgttattccagatggaatgcttgcgcaggcatttcatcagtacgttcggcctttttgggtcaatattcttgcgaatagaaaaagcacggaaattttggctgaacttcggaatgtgcttctccctgatctgctctccggaaacatctatattcagcgcgaggaagatcgatga

SEQ ID NO: 532317 - DNA, 2631 bp, Stenotrophomonas maltophilia
atgcgtgatgagtacctgccgttgctggtttttcctgagaagcgaattctccagccagaaaagggcaatggttttccaccggggaagcagaatttgcccggccatggcgcccaggtggcccgtattggaagacagatcgagcatctggaagaagacttcgcacgctatcaggccagcctgactggggcactggccgggctcgaacctgaaatggtcctagtcatcgagatcgttggacgcctggacgacttcagacaagccgttgaagcggctggcctggagtggctgggagagacggaaatcgacgacctggaggctgaggatgagggcttccatgagcgagatgctgccggccaaccggcggttaagccgctgagcggtcgcatgtttctcgccatgagtaacatggctggcttgcaagagattctcgcgctttgggagcaatggaaaaccaatagaagcctgccccacggaaaaacaaagtggaaagccgttttcgagcaattgaatgtgctgaggcgctggggcattgaggagacattggtcgaaacaggaatgatcgaccgctggcaggacctgcttgaaccccttgatcccgaagagaaggtcagatttcagattgagcttttctaccgcaagagggctgagaagcgtcgaaataatgaagcagtaattcgctcattgcttgaaggcctcggaggccaaatgctttcggcgttccttgatatgcctcagatcgcattccatgcggtcaaggccgaactgcctgctcacgccattcaatcgctgctccatcaagtagccgcagatggagctgatatcgacatcgaactgttcaaattcgccggcattatgtatttccgtcctaccgggcaaagcctggcggcttctgaagagggcgagggagagccggctgcgttccccgaaggtgtcagtgacctccctcctgtcgcagcgctccttgatggcgctccattgcaattgcatgaagcgttgaaagaccgactgctggttgatgacacctttggcttggaggccacttatcaacctggcgagcgcaagcatggcaccgccatggcttccttgattcttcatggagatcgcagtaatcccgagtccgaactgctaccgcataaactgtattgcatcccggtgatgcagcctgaccatcggacccgtgaacatgatgaacatatgccggatgacgttttctttgaagaccgcatccatattgccgttcggcgcatgttcgaaggctctggcgacgttcccgcgcaagcgcctactgtcaaggtcatcaatctttccattggtgatacagcgcgggaatttatccacacgccgagtccctgggcacggttgctcgactggttggcctatcgccaccgtgtgctgttctgcgtcagtgcaggaaactactgcgacgagatcgatatcggactcaatcaacagcagttcgccgctctttctgatggagagaagatcagcgccaccgtcaaagcgatatcaaatagcctgacttcccggcgtctgctttcgccggcagaagcgatgaatgtcattacggtaggagctgctcacgccgatgactctggagacgcatatccgcaatttggccagcgtgtcgatgtgctgccttcgcaagcacttttcagtcctgccacccgtctgggttttggttttaaacgctccataaagcctgacatcctcatgcccggagggcggcaactctacaacgcccctgtgctagctagatctaccctgtacagcgtcgacaactccatcgtcgggccgggtcaaaaagttgcgctggacagcagacagcagggcgttttgaacaacgaagccttctggcgtggcaccagcaatgcgacggcgcaggccacacgaggtgcggtgcggctgtacgacatgctggacagactacgcaacgaggagggagaggatattcccgagacgttgatgtcggtgctgatgaaggcgctactggtacatggagctaagcaagacgacgctagcaagcaacacatcgaacaagcgttgaaagacgcgcgtaactctcgtcagttcaagcaggtaatcacacgctaccttggctatggagccgtggatatcgagcgtgtgctgacctgtactgcccagcgagcaaccgtcctaggctgtggagagatacgggaaaacgaggtgcatgagtatgcctttccgatccctcccggattctcttcccaaaagatttggcggcggctggtagtgaccttagcttggctgacaccaatcaatccggatcaccgcaatcttcgagaagccaagctgacgctagagcccggcgggggaaattggtccagtcagatccttaaactggaccgtcaggacggtgaccacaatcaggtggagcgtggcaccgtgcagcatgaagtgctggaaggcaagaagcagatccaggccttcgaggatggcgagaccttgcgcattcgcgtcacctgcaaaaaggacgcaactgcacgccttgatgctgtcattccctacgggctcgctgtgactttggaggcaaaggaagacattccgatctaccagcaagtccgcgctcgtatcaagcagccggtgcgtattgcaccgggcgtaggccggtga

SEQ ID NO: 532318 - DNA, 1014 bp, Stenotrophomonas maltophilia
atggcgcaagctgatactttggtcgccctggtaagagcagccagtggcggcgaccagccttcttttcggaagtcgaccgaagccttgattcaagaggaacgtggcaagggacaccgaatcttggccgaccgcctggaaaaggcattgggagcggctgcccatcagtcgactttgttccagccttctgcagcggtgacgcgatcagcccaaactgggggcatcgcgcagaaagatctgattgccgagttgacgccagagtgttcgctggaaagtttggtgcttaacgacagtattagtgggcagttgcgagaagttgtcgaagaacagcatcgtgctgagttgctgcatgctcacggcttaagcccaaggcatcgaatcctactggccggcgcgccagggaacggcaaaacatcggttgctgaagcgttagcatttgagttgatggtgccgctgatcgttgtgcgctatgagtcgttgattggcagctatctgggcgaaacttctatccgcttgaaagccttgcttgactacgctcgaacacggcgctgcgtgttgttctttgacgagttcgaaacactgggcaaagagcgaggtgacacccatgaaacgggggagataaagcgtgtcgttagctctttgctgcttcaactcgacgatcttccagattatgttgttgtcgttgctgctagcaatcacccagaacttttggatagggccgtttggcggcgctttcaggttcgactggaacttccactgcccacccgtgcacagttgaccgcgttcgtcgcctcgatcagcgagcgcagcaaagtcaattttggcttagccgctgagaccgttgcaaaaaggcttttaggcctaagtttttcagaggtggaagagttctgtctgggagtagtccggagggcggtcttggatcaaaaagtggatgacgccagcaccatcgtctcttccaggttagagcagtggaagaaacggttgaagcctgccagtaaagaagcatcagacgagtaa

SEQ ID NO: 532319 - DNA, 993 bp, Stenotrophomonas maltophilia
atggagcgtatgtggatggtgcgtggcgaaggcggcagcctgtacgacgcatttcgggaacgcggcgtgactgccgtgggctggaagcagttggcggctcacgctaagcccgatgtcgggcgcaaacaattgatcgctttgtatcaatctgccgagcccctggcaaaacaaggtacggtggtttcgggcgcatcccaggtctggcgcttcgtcaacgaagtacaggagggcgactgggtcatcacctattcaccagccaatcgcctgtactcaatcggaaaagtcgctggaccagccgagcaccacccggagtgggccgaacaaggcatgccgctagcgcgcaaggtgcagtggcaagcgcaggagctaccacgcgacagcttgggcaccagcactaagaacagcctcggctcgaccttgacgctgttcgaggttccatccaacgctgccgccgaagtgctggcggcgctgaagggtaaaccggcgccgggtttggaagatgaagtcgaggacgtcattgccgatccactggctgatatcgagtcccaggcgctggagcgcatcaaggatcgggtcaacgagctcgattgggacgagatgcagcaactggtggccggcatcctccgcgccatgggctacaagacccaggtctcgccgcccggctcggaccgaggcaaggacatcgtcgcctcgccggatggctttggctttgaacacccgcgcattgtcgtggaggtcaagcaccgcaaggggcagatgagaagccaggaaattcgcagctttctcggtggccgtcataaggatgatcgagggctatatgtcagcaccggtggtttcaccagggacgcccaatatgaagccgaccgcgcccctattccgctggcgatgtggacactggaccatgtggtccgagcattagtcgagcactatgacgcgaccgatgctgaaactaaacgaattgttccgttgaagcggctgtattggccggcatga

SEQ ID NO: 532320 - DNA, 813 bp, Stenotrophomonas maltophilia
atggtggcgatcgctgcgcggctggctgacacgttcgaccgggacggcaccggcgcggctggttgccgcatcccgccaggcggtggccgccgcagccgcaagcctgcagggcgaggcgctgccgtcgccggagatcgccgctcacctgcaacgcgggctgcatgcgcttgcgttgtacccacggctggccggcgagccaacgccggtgcaggaaccaggcctgggcgaggcggtggcgcgcgcgctgcaggaccgcgactgggcggccaggcagctgccccgccggccgcagctgctgccgcagctgatccagaccgtcaacgacgatgccgcctcggcccgggtgatggccgcgatcatcggccaggacccggtgctgaccggcaacctgctgcgcatcgccaacagcccggcctacaaggtccacgagcgcccggtagagagcctgcagcgggcggtgaccctagtcggcaccgagggcgtgcgccagatcatcagtgcggtactggtgcagccggtgatgcaggtgcaatgcgaggtgttcccgcagttcagcgcgatcatctgggagcacgcactgctggcatcgcgtgcagcggccgaccacgcacgcacggtcaccttcggcgatgccttcgccgcgcagtggctgggcctggtgcaggggctgggtgcggcgctggtgatgcgccagctgctgcaggaggcacaggcccgtggcgagcccgtggagccggcgttggccctgcagctgttgcagcagtggtcgttgccgctggcgcagcgggtcgctgccgcatgggagttgcctga

SEQ ID NO: 532321 - DNA, 1107 bp, Stenotrophomonas maltophilia
atgacactgcaacacggatggcaggcttgccgaaactgccacgcttctaacagcgatttgcgcgttgaggggccttggcacctacgcgccaatccaggctactggggcaccagcgaacccaaggtcttggtgctggggttctccaagggcgccacccagatttccgcctctcagtctggcaacttcgacggggttgccttcgccggcatgcgccctcgcctacgccaggtcctggatgcgctgggcatcgacctgggaacggaatcggttgatcaagccctctcggcgtcgagccgttggctgggtgccgcgtcgcttattcgctgcggcctctcgttggacatcgacggcaagctgaccaccagcggcaccatcatgcccaaggcggcctccgcagcattcacccgccaagtcatgcgctcctgcgtggaacagcacttgagcccgctgcctgccagtgtcgaaaaggtcgtgatgctgggaacaacggatgcctacatcaaaggcgtcaaagcgctgatgggcagccagttcgcagactaccgggacatcaacgaggtggcattcactgcgcagggccggacctgggtcttcgctgcgcacccgagccccgccaacggtgagttcaagcactggctgggcggggacatgggatcggcttcgggccgcaagttgcagctggcactccaggccctcggctcaagccctgtgacacctattgcagccgcaccggtcgtcgccgtcgccaaggtcacgcagccagccgtcccaagccttccaaccccaaccctcatcgccaaggacaacatcccgatgacccgcagcaccgatgaccgctttgcccagaccttccacctggtccgcggcgatggaaagaaagtcgttcccgtgatgatgaagaacaaagacacgggacgcgtggctttccgcctggcaaagcaagggaataccaaggacggaacgcttgaagttacggacgaggcagaactccttctcaagtgcgaaagcggcctctatcaggtcagggcgcaacccctggacaagtcgtcgccccctaacttcatccgcccgcagctcaaccaccgaatcgtaaagtcccgtgcctga

SEQ ID NO: 532322 - DNA, 390 bp, Stenotrophomonas maltophilia
atggtcgacattgggctgagggttcggaccgagagcgggtacgtggagacttcggttaccaccaagctgtcgaagaggattgggtcctacacgttccctctctacagccctgtcaattccaacaacaagtgggtcgcgccacccgaggcaaatggagggctcgtcgtcaacgacttccttggcggcgagccttactactacttcacctgcgaaggccaacgatcggtgtacggaatgctcgtcccttcggtgaccatctccgggaacagcatcaactggagctgggatcctgacgtggtgaacttccacgtcaggatggagatgtttccgagcaagcccacgacggacaccgtcggcggcatcacccttcattacggggtatacagctga

SEQ ID NO: 532323 - DNA, 270 bp, Stenotrophomonas maltophilia
atgaccgccgaaatcaccgagatactcgagcgcctccaagcctgtgaggccggactcgagatgcaccgcggctacctcaaggcgatggagtacgcattgcgggtctgcgtattgacccacccagcacccaacgatctcgccaacgcgtggcatcagcttctgccgaacattgcggccaaacacaggcctgacagcagcgatctcttcgctgccgccttcgagcagtcactgaggcttctcaccgagcaaatcggcgacgctcgcccctaa

SEQ ID NO: 532324 - DNA, 612 bp, Stenotrophomonas maltophilia
atggcccgttgctcgtaccgctcccctcccttcgcgatgaacccaacatggagatcatcagcgacctggacgagtccagtcgaaaggcggcgcgccacacagacgttctgccagggagctgggaatctattcttcttatgtggagtgaatgccaacccctccatgcgcttagcctcattctttaaacgcgctaggcgctttcgcgggtattttccttgtcccttcacagcatcccccccttccatttgggcgatgttaagcaatcttccaccgagccggaagggccggtcaggtcagatccccaaaagcgcgtataggcgcttcccgccgcttgtagcggacgctctttccgatccctgcccagcccggcccggcccggcccggcccagcaccggacgataccgtccggccatgtgcggctcagctggccagccccgcgcagcttcagatcgaacccagctccttcaccaccgcctggcccttctgcaggaacccggccagcagccggccaccagcaacttgccgtcccacccgctcattgaggtagccggcctgcagacgcgcatgagccatgagatctgcctgcgccatgctcggcgtcacctcctgtag

SEQ ID NO: 532325 - DNA, 339 bp, Stenotrophomonas maltophilia
atgattcgggaggtcgcaagcgagacgggtgtcagcgtaaagttcgacgtgccggtggtaagcaatttcactgccgatgcccttttccttgcggacactcgcccgcttgccgttgtggtggcccagtccaaggatcgactcatggaagcggagttgatgtggtccaatgcaaagcggctcggcgatccaaccagggtcattgccgtggtggagagttcggacaaggtgggtcgtaaagaggttgaacgtgctcagttctatacggataagacgctgacgttccggaatttcggtcatcaggtacgggagaagatgatcgagtcgctatcttccagttag

SEQ ID NO: 532326 - DNA, 201 bp, Stenotrophomonas maltophilia
atgagcctccgaagcgagcttttgcaggtcatgcaggaagtggacgatgcgaaacgttccagcccactggaggtgactcaggccggcgtcaaggcattcgatttcatcgcaaagcgcggcgggtcgatccttgccaccgtggatgcgttcgaccggctccaccgggaaatctacatgcagaaggaccagcccaatggctga

SEQ ID NO: 532327 - DNA, 1008 bp, Stenotrophomonas maltophilia
atgtgtctacgcctgacgctgtacttcaagggcgcgcacttgacctccacgagagaaaacctgtgcctttgcttcgacgcgttccgcgagttcgcgggagacgcattgcaatggctctggcgcgagaaaccgagggacggaccaccccggcagcgcgtcaaggacagcaaagctcgcgaaatgatcgagcccatgtcggaagacgaccatctcagcttctgctacagcagcggttccaatgctgaggatgccggaacttggcagttccttgtctacggcaagcgcggctggcaatcccgcatgggcaacgacatgagtgtgctcgagttgtcagtcccgactagccagtcctcagcagggctacgccaattcattgaactggcgatcaaatgtgcacgctggttgagcgccgaacatgggcatgcaggctatgcgttgaatctgagcccagtacgccgggaacgcaatgagcccatcgaagcagtgctggcccagcgccttccggatctggatgcggggaacgctgccctcctggcgaaccgggcggagctcaagcatcccaggttcaagacggtcagctggttgaccttgctggatgacacccgcttggcagcggctggagggctcgaccagctccgcggcgccctcccagggcaatacttcaagcttcacacgtatggcaggggtgccttgattcaggctggagcaagacccctcgcctgcgcggatggagaagacgctcgcccccctgaatacgtgctgctcgaccattacctcagggaaattcgagctgcatcactcggcaatctccacttcaatccaaagtccgcagaacccaggctgatcgaccagctcgccgatcagtgggtctgtcgatttcaagtctatgcttcagatattccgacccacgaagcaagacttgcgcggcagcacgcactcacatacgagggcgttcaggccgaaccagccatcgcgacccaactgactgcgcaggcaagtccacaatga

SEQ ID NO: 532328 - DNA, 645 bp, Stenotrophomonas maltophilia
ttggatggatttgcggcgttcgtcgagcagcagagggccgatctgaagcgcgttgcgcggcatacccagggggaatgcagcgaacaggatgtgatcaatgaagcatggctgttggctgcgacatggggagacgaagggagggagccgctggatctggcggcgcctgatgatcggaccctgttgatcagttatctgtaccagaagctggttcgctacaccgatgtgaacgtcaggcacgccgtacgcctggatcacgcacccagcggggaggagggcggtcaccccttgctggcgcggttgagtgcggacgggcaggaccccttgtcctttctgcaactgcgtgaagaggctcccctcccgccgggcgagggggagctgaagtattccgtggcaagcacttatctggtgatgttgcagcaccacaatttccgcgtccccgcactggcccgctttctgcgtttgtccatttcccacacgtaccgttgttgtgccggtgcgagcgcgctgtccgcgtggcaacatgcgctcgttctggctccgccgatcagcatggagagcctgaggccatggcgtcgatgtcgtgcgctgcgtgttccgaggcaactcgagttcgactttgaagacaggcttgagttgagggcgtag

SEQ ID NO: 532329 - DNA, 1572 bp, Stenotrophomonas maltophilia
gtgcaggccggtgccgacggccgccagctggaccgccaggtggacctggccacgctgccggtgttcgtgcgtgccggtgcgatcctgccgatgtacccgtcgatgctgttcgatggtgaaaagccgctcgatgaagtgaccttcgacctgtacccgcagggcgattcgcagtacacgttgtacgaagacgatggcaacacgcgccgttaccagcagggcgagtcgagcacgcagcagatccgcgtgcaggcgcctgcactgggcagtggcccggtgcaggtgcagatcgacgcggtgcagggccagtacaacggccagctggcgcagcgtcgttatggcctgcgcgtgctcagccggcaggcgccgcgtgcagtgcaggccgatggccgcgccttgccggcgctggccgatgcggcggcgttcaacggtgcggctgaaggctggtacttcgatgccaaggagcgccgtggcacgctgcacgtgcgtaccgctacccaggacatccgccagccgctgcagctgcagctggacttcgcggtggccgctgcggccgccgacgatgcctatccggccgcgccggtactcggccgcgaactgcctgcagacagcctgctggtggtcaaccgcccggccgaggagcccggccatgcgctggagaacgccttcgatgacgatcccaacacctggttccgcagcgtgcgcaaccaggccgtgcgcaccggcgcgcacgagtgggtgatcggcttcggcgagcgcaggatgatcgatggcatcgacatcgcgccgcgcaacgacaagaactggaagcacggccaggtgcgcgattacgaggtgtacctgggcgacagcaatggtgagtggggcgagccgatcgcccgtggccgcctgcagctgaaggaaggcgtgcaacgcatcgacttcccggcccatgccggccgcctgctgcgcttccgcgtcctgagcgtgcagaacccggaaggcgatggcgccagcagcaccgatccgatggttacggccgcacagggcagtggccgcgccttcgatgcgctgcagccgcgcgacgtcggcccgatcgcactgtccaccttccacattctcgaacaccaggaaccggagcgaccggcccggcagcgctatctctccgagctgccggtgccggccgcgctggccagccagctgcgtaccgaccagtccttccgtggcgacgccggcatgcgcatgaacggcctgcagttccgccgtggcctgggggtcggcgccaacagccgcatcgatctgcgcctgcagggcggctggcacctgctgcgtgccgacctcggcatcgacgacgcctgccgcaacgccggcggcctgcagttccaggtatggggcgacaaccgcctgctgtacgacagcggcctggtgaaggcgcccggcgtggtcaagccggagctggacatccgtggcctttccaccctgagcctgcgcacgctgggtgcgcagggcagccaacccgcccaggtctgtgccaactgggccaacgccgtactgatcggccaggagggcgactccgccagcatcgtcgccccatga

SEQ ID NO: 532330 - DNA, 981 bp, Stenotrophomonas maltophilia
atgtccacgtattccggcgttcatttgacgtttgggcagcaacttcagaggcttaaggaacgtggcttagaggtgtcggatgacgaagcggctttacaacagctgcagcagttggggtattaccgactcagcgcctattggtatcccatgcggcaatcaggcccggttcagatcgacggcgctttaggctgggaagttaagaacgagttcgcagctggtgcgagctttgaacaggcggtagctctctaccagtttgacaagacacttcgtgtcttgctgatggaggcgatcgagcgcattgaagttgcgctgcgagtccaaatagcatactcgcttggtgcgtactctacattcgcgcaagaagacccgagcgtgttggatggtaactttacctttagatctcccgcgacgggacggtcaaagcacgatgattggcttctcaaactctctggtcaggtagataaatcaaaggaagagttcgtatcccactacaagagaagatacggcctccctctacccatatgggttgtgattgaggtttgggattttggccttttgtcacatttctacgcggggatgcgttacgtagaccagagttcgttcgccgaacgcttttctattccttcgccagacgtggcgaagtcttggctcagaactgtaaactacgtccggaacctagttgcccaccattctagggtttggaacagggggatggttgaaaaccctaagttcagagggctcgatacatacggcgatttgggagcggggctggctgctcttgatgcaagtcgtccttacgctgccttctgcgtaatcgcttatcttgagcgaaaactgttgcctcactcagactggtgcgctcggttttctaagcatctggagagctttccggcaggtggatgtcccaagatacagatgcaacagatgggctgccttccaggctggcgagagcacgcattgtgggcggactacagtggatag

SEQ ID NO: 532331 - DNA, 840 bp, Stenotrophomonas maltophilia
atgcagccgttcggtacagacgaacgcgccgcccaacagcagcgtcgtcaacagcgccagctgcacgcgaccggcgtgcaggccgtactctcccagccacagcagggccagggtcaatgccgccagcatcaggctgaagcccagcatgccggcgatgtccagccgtccgcgctcgccccggctttcgggcaacgcgcgcgcggccagtgcgaacgccgccaacgtcagcacaccgcccgcagcgaacacgctgcgccagcccagcgcctgcagcagcaggcccgcgagcagcggccccagcgccaggcccgcaccgaatgtcgtgcccagcagggcgaagacacgggcacgcctcggtccctgccagccctgcgccagcgcagcggtgcccgaggccagcgctgcggcggcggcaacgccctgcaggccgcgcgccagatccagccacagcagcgtaggcgacaggcatacagcggccgccgcgacggtgaagccggccgtgcccagcaggaacatccgccgtcggccatggcgatcagccaggccaccggcagcgagcagcaggctgccgaaggtgagcatgaaggcgttggtcacccaggccagcgcagtgggcgatgccactgcggagcgggccagcaccggcaccgcgacggcgccggcggtgaaggacaacggcagcgccagcgcggccaggcaaaccgcaagcagcgtccagcgttgcggcgtctgggcaggtacagggagcatcgaaaccggggccatgcgggcctccatccatcaggggcattgatgatgagcgggccgttattcctgaaaaacaggctctatggacgttga

SEQ ID NO: 532332 - DNA, 1311 bp, Stenotrophomonas maltophilia
atgtatcggctttctgcacatgtcttcggagagggtgagcgcgttccgctgctgcaagatgcgcgtggacttccgcttttttatccgacactcttcgcaaccgcgaagcttcgaaacgcgggcattgcggtcaatacgattcgcaacaaactggcggacatcctcgttcttctgcgctggcaggcatccaagaagcctgcgagagacttggaggctgagttcgctagaggcgagttcctcacactcgccgacgtcatgtccattcgtgactttgcatcacgtgacatgcgcgatctggaatccgacagccaaagtcagtgggctgacgactcaggtgtgaaaatgctcgaaggccggattgggacggtgaaacccggcaggaaagtggcgggtcagcagcactacaaccgactgagcacgatcgcggactatcttgagttcatggcggacgccattagcgttaaggatcgtcaaaagcgcgcccaagacattgcacgcatggcgaagctaattcgcaagcatcgccctaaaggggcgtcgctgcggcggcagagtgatcctaatgatgattcgcctccttcggaggtaattgaccaattcctggaagtcatagcgatcgactctccgaagaacccgttcggcgctcaagccgtacgtcttcgcaacgcaatcatgttccacctcgttagatacaccggaatgcggagaggggagcttatgagtctgcggattgaccaagttgattttggcgaagaaccgtacgtctgggtgaggcgcaatcaagacgatccgtttgattctcgacgtaatcagccgtcatccaagacaaaagagcgtccaattccaattccagatggcttggcgaacgatattcatgcgtatgtcatgaagcaccgctcactgatccccgctgcacgcaagcatccctacctctttgttacgcacaaacccggcaagtggtatagacagccattgtcactgtcggcggtcggcgagatcgtgagcaaaattcgtgaggttgatccagcgttcaacgttatccatcctcatgctttgcgtcatcacttcaactacgaactctcgtgtgccatcgatgcgcataacgctagggtgaaggatggcgaaaccgaaggagccctgattcgagaaggaaaggagctggatatgagggccttcttgaacggccattggaataaatcatccggggccgtttacaaccagcgccatgtccgtgaagttagcaatgcagcggttagagaattgcagtctggcttggggcgcgtcattcgcggcaggagagtcgcccaatga

SEQ ID NO: 532333 - DNA, 1569 bp, Stenotrophomonas maltophilia
atgagcgcatcaaaaaagactaaagagacacctcggccgaaagaggccgtctcaaaggctggctatgcttttaatgttcttgatgagtactggcagctcgataaggacgttacggttgcacttggcttggtggcgatgcttccggatgcggttcaatccggatttcgtctgaccttacaacgttatgccgaggagctttcggctcatcacacatacaacatggcggaggcgttcaagagatacttgcgcgacacaggcgcgaagtgcgtaacgccgaaagacctattgaattggcgcgcatcgttgggtgcagatggggagtggcgtctgggagctctgaaaggctttctgttggcctggcatgaattcgggttcaatggcgtttcggaggagacagcagaactccttcgcggctggacaatcaaaggaaacgagaagggtgcagctgtggccaccggctgccccgaaacagggccatacacggacttggagatggcggccctgcttgactgggcaaattcagctgtaatcaagcgcaagatcacgttcaaggattttgtgtacctcttggctctcgcaatgactgctcgccgtacggttcagttggccgcacttcgagggagagacttgaaggggaatccgaaagaagttgcgtctctttatttgaacgtaccacgagcaaaacaacggaatctgagatttcgagggaagtttcgctccattccgatcattgaagatctgtttctcgtgctcgacagtctccatcgcagagcggtggcagatgtggaggcaacaattggagcgaaattggatgacgacctacgcaaagaagttccgatatttatcaacgaggatgcggctgcgaaggtaaagagtgttgcggagttgagagacctgcttgctggctccaagccagacgctctgcacgcaacgactagctctctggactcagccctgctgaggtgcgcgcgtgcgaacaccgcgcgatcagagcgaactggtgagtttattcgcctgtctgccaggcgcttcagacacacgcgtggcaccaagcttcgacgtgagggtttcggtgcgttcgtaattgcggagttgttggatcattccgacattcagaatgtccgcgtatatacggaaaacaccgcgaatgaagtggccatcattgatgagttcattggtccaaagctggctcctttcgcgcaggcctgccttggcaggctcgttcgattggaacgagacgctatccgaggagatgatccgcgtagccgtgtggcgaacgacagatcaaacggtgtcggcacatgcggaaactacgggttctgcgcgagcgggtatcgcgcttgttacacatgcacccacttccaaccgtgggtccatggaccgcatcaagaggtgctagaggatctgtatgcggaaaagtctcgggcgcgtgatgcgggttgttcagatgtagtggtgtcggcaaacgacctattgatacttgccgtcgaacattgcattaccttgtgcagcgaattcaaggacaagctagccattccagactcggatgaggagatggcctgtgtctga

SEQ ID NO: 532334 - DNA, 2004 bp, Stenotrophomonas maltophilia
gtgtctgatgtcatcctattcgttccgaaggcgggtcgagatgccaggacaaatctggacgactttatccgtctggctagagaagatctgacggcttttggtgctgatacttggccaaaggatcgttggcagcaaggaaagaccgttgctgtttttgcgacccagttgcaggagttgacgccatatcggtacacacctctagcgcaaccattcaaggatttcgcaaaggcctacgttcgctataagtacagtcatagaccagtgatctcagtgcagtactggctgcaagcgctacgctgtattgaagccgcgctgatcgagtcaggcttgaaggcagatgtgctgttgctcaatggggcggtgatggacctcagtgcgcagaagtgccgcgagttctatgcttccgaggatgtctatcacaaaaccggcctcaccctagctggggtatttgatttttgccgcgagaaattcgtatcgctgggtctgcctcagtggaggtcgccattcaagaagccggcaattctgaccgaggacctaggagaggctgggcgcgagcatcgtgaaagtaagttgccaagtaacgccagcatgctcgcgttggcggatctcttcgcaggtgccgccgacccacatactcggttctactcttctattgcgattctcttgatggcaacgccaagtcgaatctcagaagtgcttagccttccagtggattgtattggtcgcgagccggatgattcaggcgcagaaaggatgtgccttcgctgggtggctgcgaagggaaaaggtcgtatgaagaagtgggtcctgccggtgatggaggacgtggtcgttgaggctgtgcggaggctggaggagatcggcaggcccgctcgattagcggcgcgatttgcctttgagaatcctggagttttcatgcggagtgctggccttagctccgccgatcaactcagcgatggtgagcctctaagtactaaggaagtgtttgccgccttgaaccttgatgggcgctacgcaaaagatggacatgtcccaagaacgaagcgcctgaagcaattcgtgggtcgggccgatatcacatacggcgatcttgcgaagttcgttaaggagcaataccaaggcggcggcgactggcccttcatcaatgccaagaaggtcgtgaaagtatgggatgcgctttgcctgcatcgtgagtatgaatttcacgcgaatttttcggtcaaggaattttcgtggcgcctgccaacggccaatgacgtaaacgctcgcctggacccggagagcgggacctatctgcttgccggtctcaaggaggtagatggagatcccatcaagttgactacccaccagccacgtcactggctaagcacgatgtcagagcgcgcggggatggatgactttacattggcacaatgggcgggccgggcaaagcccaccgataatcggcattacgaccaccgcagcccagaagaacgcttgtcggaggcaagggccctaatcgtaagagaggcgcctagcttgctggagcgattcaagaatcggcagcctgttacctatcaagagcttggggtcgaccgtctgggcacggccaaggcaacgttatacggcatgtgtacgcatgactatgcaatggcgccttgcatgaagcagcgtgaatgcatgacctgcaaagagcacagatgcatcaagggtgatcatgtcacgctcgacaggattcggctgttggaagcgcaaacgcagaagctcctggagaaggcccaacaagcgcacatcgacggcgattttggcgcggatcgctgggtcgataatcacaaatggaaacttgcgcatacgaggaccatgcgaatcatgctcgaggaggaggcgcttccggatggcacggtgctgcgtattccggacgggcatgacccgtctcctgttcagcgtgctctgatggatctcgggttgattgagctgccttcggatactgtcgccgctgcgacaattccacttcgcttggtttga

SEQ ID NO: 532335 - DNA, 459 bp, Stenotrophomonas maltophilia
atgcccaagaagatcatcacgaaggcgactcttcccaaggtattacgcgagctcgatcgttgggagggaaagctcacatggcctcttttttgtgatcgcgtcgccaaagtcattggcgtggaatccgtctccaagcacacgatgtatctgtatccaacgattaaagaggggtttcagaggagacaaaaggatcttcgactggcagcgcatgcaaagccgagagacttcacgctacagactgccaccagacatatagtgaacttggaggctcaagttgcacggctcgaggcgacgaatgaattacttctcgatcagttccgtcgttggcaatacaacgcgtatgcaaacaatgttcggatggacttgctcgcattggacaagccattacctgaggtgaatcggtcgggccgtcgcgaaaagaaggggcgcaagggtaaagctgccaaagagaacctttga

SEQ ID NO: 532336 - DNA, 9603 bp, Stenotrophomonas maltophilia
atgggtgcggtacaggggaaattcgaagtgatgaagcaatcttgcgcggtggaacgtgtcgctgcgtttgcgcgcgcgaaatttgaattgctccagcgggagcattcgcagcgatccacgtcgacatcctcgctctggcggcgactggcgttgctggcgctgtgctgcgtagcacccacggctttcgcggccgacctgcagatcagcaacctgtccgacaccgggtacgacccgacgccagtcggcggtcccgtcgtctaccacgtggtagtcgagaacggcgatatcgacacggtctccgacgcggtcgccctgttcgacctgccggccggtgccacgccgggcacgttgccggcgttctgcgcgagcctgggcggttcgccggttcgtatccgctgcgacatccccacgctgacgcaggcatcgtcctcggttgcgttcgatatccagatgaacacggcggggatggccgcaggtaccgtgcagatccatagcgccgtgggtttcgccggcatgctgcctgctgcgggcgaggcgctcaacacgctgccgccgtcgcatccgttcttcggcagcgacagcgacaccgacaacaaccagctcagccagggcaccacgctgcagcagtcgggcgacctgcgcctgcagaagaccgcgacgccgtcgccggtaatcggtggcggcgaggtcacgtataccctgcaggtgttcaacgacggtccgaatgcgtcgtccggtttcaacgtggtggacacgttgcctgccggcgtcacgctggtggccggcagcttcatcgggcccggctggaccttcaacgccggcacgatgacggcgacccacgccggtgccgtcgccaatggcgacagcgcgtccttcagcttccgcgccaaggtcaatgtcggcagcggcaacatcaccaacgccgccgtggtcaacgccggtgcgatgccggatccgaacgtgggcaacaacaccgacgaggtgaccacgccggtcacgcccggtgccgacctgatgatcagcaagagcgccaatcctgcgcctgcggtcgccggcgagccggtgacgttcaacatccaggtgcgcaatctcggcccgagtgccgcgaccaatccgcgctggaccgacacgctcccgaccgggttcaccgtgaccggcggcaaccagcccgccggctggacctgtgcgacgacgagtggcgacacggtgcgtggttgcaccttcgcgggcaatctcgccgtcggcgcgatcgtcaatttcaccgttcaggcggtggtgccgtccaacggcaccaacagcagcggcaacgtcaccaatacggccaccgtgacgtccgacacgccggatgcggtatcgaccaacaacaccggcagcaccacgttcagcgtggtgccggatggtgcggatctcggcctggcgaagcgcaaggcgccggcactggtcgcgatctggccgggcagcggtgacgacagcgacagccgcatgacctcgaccatcgaggtgcacaactatggcccgcgcgcagccaccggcaacgtgcgcgtggtggacgtgctggccgcgggcgaggagtacgtgagcggcggcaacgcgggcgagtggtcgtgttccgtcgcgccgccgacgtggaacgggggcggaccggcgcaggtcgtcacctgcgatctcgatgcctcgcggtatccgttggcgaggaacgcggatgcgcccgacctgcgcatcatcacgcgtgcgcgcagcgccgacctggcgctgaccaacaacgcgtgcaccggcggctcgggcggttcgctcgagcccatcaccggcagcatcgacgaagaccgcaaccccaacaacgactgcgcaggcgatggcacgcgcaccaccaacgatcgcgtcgacctgcagatcgaaaagtggaccaacgcgcccggtgccggcgacaacaccatcgcggtgggcgtcaacagcttcacctacaccctgcgcgtgaccaacctggcgatcaccgacgcggtgccggccaccggcatcgtggtgaacgacacgctgcccggcttcgtgccggcgtccggtgggctgcccagcacaggcatcaccgtcagtgccccggccggctggacctgcccggtcaccggcgcgtcgatcgtctgccgctcgggtgccaccgccctcaatccgggtgcgtccgcggacatcgtcatcactgtcgcgcgaccgctgttcgacagcatgggccagagtcccggcagctgcggcgcgggtgcgccggcgaccggtgcgttctgcaataccgcgggtgtcgccgtggatccggcggtaccggattcggtcggtgaaatcaacggcgccaacaaccaggccagcgactgggtgcgcatcgagcgcgaagccaacgtgcgcaccacggcgaagaacatcgtcaccggcaacgtcggccgcgccggcgtggacagccagtacgtgatgtcgtacctcaacgaaggcaccgcgacggtgccgggcgtggtgttccgcgacaccttcaccctgccggcgaacgatgccggtttcgtgctggtttcggccacgcgcacgccgggcacggtggcctgcacggccacgcctgacggcggcctgaccgccaccgccacggcgggcggtacctcgtacgcgaacccgaccggcgcgccgctgcagctggccatcgaatgtccggcgctgtcgatgtcgcatcgccagagcgaggacatgctggtcaccatccgcccgaacgtcaacaccggcaacaatccggccggccgccagttcgacaacgtcgccacgtttggcatcaccggtggcgccaccggcagcgacgccaacggcgcgttcaactacaacagcaacaccagtgcggccgacgaccagaagacggcgtcgctgacgttccagcagggcgtcgccgacctgatcgtcaacaagaccgatctcggcttcaccggtggcgtggatccgctgggctacgacgccctcaatcccgccaacaacctgatcacgtaccgcatctccgtgcgcaacgtcggtccctcggtcgcgaccagcgtgcgcatcaacgacacctaccgcgtgccgagtggccgccaggtgcgtttcatgggtatcgcgcccggcccgatcggcgggccgtccacggccttcagcgccgccggatgtacggtgaccagcgccaatccgttcaccggcacgggcaccacgcccaccgacgcgggtttgagcatcgagtgcgacgtgccgggtgcgggcttcggcggcagcaatgcgcccggcgtgctgggcgtgaacgcgaccagctacgtctacgtccagtaccgctacgagacgccgcccggcgccagcggcgatacggcgcgcaactacgtcagcgtggtgcatgccgaaacggaccccaatacatccgacaacgcggtcgacgagcagacctcgatccgcacgcgcgctgatgtcggggtgaccaagcatgtgttcaccgacctgccggacagcgacccggatgttgcgctgccggcatcgcccgccacggcggtggcgttgcgccagccgttctactgggtgatcgagggcgtgaacaacggtccgggcgccagcctgtcgcgcgaccgcaccggcaccagcccgttgaacggcaccggtacggtgatcaccgacaccttgcccgccggcctggaaatcctgggcgcggccacgtggcagaagaaggggcctgacccgggcggcgacgaagtgcccgatggcaccggcacgtgtaccgctgccggcctggcgctgacctgtcgcctgggcgacgtgaccgtgaccggcaaggtccgcgtcatcgttcccgtgcgctggaccatctatcccggtgccggtgcgcagatcaacaccgccagcatcaccaccgaacaggtggatccgaaccccggcaacaacacggccacggaagacatcctagtcacgcgttcgtcgctggaaggcctggtgttcgaagaccgcgatcgcgcggcagggaacggcggcacgcagcagaccgtcacgggcgaacccggcatcgccggcgtcaccgtcgtgctgaccggtaccgacctctacggcaacgcggtgaacctcaccctgcctaccacggcggacggtgcgtaccgcttcgagaacctgtcgccctccgatgcgtcgggctacaccatcacccagacccagccggccggttacgtcaacggtccgatcgatccgcccgcggccggtggcagtgcgccgtcgctcggtggcacgtatgcggcggggtcgcccaactcggtgatcagcgcgattcccgtcggcgccaaccaggccggcgtgcgctacaacttccccgaggtacgccagccatcgctgtccggcttcgtctacgtcgacgccaacttcagcaacgtgcgcgatgggggcgacagcgccatcgccggcgccaccgtcgaactgctcaatgccgccaccggcaccgtcgtggccaccaccacgaccaatgccagcggcgcttacagcttcaccaacctcgatccgctgaccgtctacacgttgcgcgaggtactgccggccggcagctaccagaaccgtccgacggcggtgaatgccggcctgatcggtggcatggcctgtgccaccggctgcacgccggggagcggcgtgggcggcgatgccgccaccaccgaccgcatcagcgccatcgacctgggcgccggtaccgacggcacgctgttcaacttcggcgaagacgcggtgtcgggcatcagcggtcgcgtctacgtggaccgcaacggcaacggcgatttcgatgccggcgatgcgggcacggtcaattcgcgtccgaatggcggcctgcagggcgtcaccatcacgctgaccggcgccggtgccgacggcatcttcggcaccggtgacgatccggcaccggtcgtgctgcagaccgacgccgatggcgcgtaccagttcaccggcctggtggtcggacagaactaccgcgtcaccgaaacgcagccgaccggttacggcaacggcaccgagcacgcgaccaacgtcatcgacgtcaacgctctgccgtctgccggcgtgtccgatcgcgacttcggcgaaacgctgggttcgctggcgggcgtggtgttcgaggacttctcgacgacggcggccaacaacgacaacggcagtttcgacggcggtgaaaacccgatcgccaacgtcaccgtggtgctgaccggcaccgacgtgctcggcaatccggtcaacgtcaccgtgcagaccgacgccaccggcgcctacgtcttccgcgatctgctgccgcccaccggcagctacaccctcaccgagacgcagcccgccggctacatcgatggccggcacacgccgggcaacgcggcgacgccgggcagcgcgaccactccgaacgtcatcgacggcatcgtcatcaccgaaggccaggcggccaccggctacctgttcggcgaactcgccaacgccgtcatcagcggcactgtctacctggaccgcgacgacgacggcaaccaggatgccggtgaacccggcctgccgggcgtgaccgtggtgatcgaaggcgcaggcccggacggcctgttcggcacgcccgacgatctgccgccggtcaccctgaccaccgacgccaatggcggctacagctatggcggtgcgatcaccggccagaactaccgcatcgtcgaaacgcagcccaccgggctggcggacggccaggaaaacccgaccaacaccatcaccgtcaccaacctgccggcgagcggttccagcggcaacgacttcggcgaacgcgccgcgtcgctgagcggcagcgtgtggctggacaccaacaacaacggcgtgcgcgacgccggcgagaacgggattgccggcgtcagcgtatcgctgccggcgggcaccgtggatgcactgggcaacgcggtggcggcggtcgtgaccgacgccagcggcaactaccgcttcgacgatctgctggccggcacgtacaccgtcagcgagcaggccgcgcagccggtggtgggcggcatcaccaccatcaacggcaccaccgtggccggaaccgtcggcggcagcgccagcggcaccgccacgccggtcgcgaccgtgcccagcgcggtggccggcatcatgctgcccgctgggggcgcgtcgatcaacaatcacttcggcgagacgctcggcgtggcgttgtcgggtcgcgtgttcttcgacgcgaacaacgacggtctgcagtcgggcgcggccgaaaccggcatcgacggcgtgaccatcacgctgaccggtaccgacgacaccggcgccagcgtgtcgctcaccaccacgaccgacgccaacggcgactacgcgttcgacggcctgcgtcccggcacctacacggtgaccgaaccgacccagccgaccggcaccagcaacggtcagaccgtggccggcaccatcggtggcacgccgtcgggcaccgccacgccgatcacgactgtgcccagtgcgatcgcggcgatcgacctgaccacgccgggcgcgagctcgatcggcaacaatttcggcgagatcccgctcaacagctcgatcggcggccgcgtgtggcgcgacagcgacaacgacggcgtcgtcgatccgtccgaggaaggcatcggcaatgtcgtcgtgcgcctgaccggcaccgacccggccggcaataccgtcacgcgcgaagtgaccacgcagccggacggcacgtacgcgttcaccgaactgccgccgggcacgtacacgatcaccgaacccgagcagcctgcgggcacgctcaacggcatcaccaatgccggtaccgggggcggtaccgcgacgcccccgacgtccacgccgtccgtcatcacgggcatcacgctgggcgtgggcgaagacatcaccggcaacgacttcggcgaagtcccggccggtgcgatcagcggccgcgtctacaacgatggcaacaacaacggcgccatcgatgcgggcgagggcggctacgcgaacgtgcaggtggtgctgaccggcaccgacgacctgggccaggcggtgaacgtcaccgtcaccaccgacgccgaaggccgttaccgcttcgacggcctgcgtccgggcacctacacggtgaccgagccgacgcagccggtggaaacgctcaacggcatcaccagtgccggcacgatcgacggcaccgtcgtgggcaccgcgacgccggtgacgaccacgccgtcggccatcagcggcatcgtgctgccgccgggtggcgattccatcgacaacgacttcggcgagatcggcgattcgcccgacctggtggtcagcaagaccgccacgccggccgtcttcaccgtcaacaacactgccacctacacgctgcgcgtgcgcaacatcgggcagcagcccagcgcgggcgactacgtggtggaagaccgcctgccggccggcctgacgctcgccgcgacgcccgtgggcgtgggctggacctgtaccggtgcaccgggcgaagaccgtttccgctgcgccagcagcacggtgatcgctgcgggcgcgacgtcgggcgacagcatcatcgcgcaggtgcgcgtggcggcctccgccgcgacgggatcgccggtgaacaacgcggtgatcgtcgaaggcggcggcgagaacgagtaccgcacgccgacgccggacgaacgcgccgacttcgaaggcaatccgggcgacctgccggtatgcgacccggcgatcacgcagaacgcgtgccgcctgcccacgccggtgcagttgtcggcgtcggtgtcgggcacggtgtggttcgaccagggcagcgacttcggtcgcatcgacggcggcgaccgccgcctgtccggctgggtcgtcgaagtcgtgaacgagagcggccaggtcgtcggcacggcgaccaccggtgtcgatggcacgtattcgatcgccgaccaggtgcccggcgtgctgttgagcatccgcttccgcgatccggcgacgggcgtggtgtggggcctgccggtcagcggcgacacgatcgccggtgcgccggtgccgtgcgatgcgagcaccgccatcgccaacggcaccgccagctcctgccgcagcaacgagggtggcaacacgcacctggccgtcgtgctggcgccgggtgcgaacctgccgcagcagagcctgccgttgaatcccggtggcgtggtctacgacgcgacgacgcgcacgccggtccccggttcgcgcgtcaccctgacgccgatcggcacgtgcgcgggctacacgcccgaacagcacgtgctgaacgccgcgctcggtggttatagcgtgcagggcacgtcgatctcgatgacggtcggcgcggaaggcttctaccagttcctgctgggcccgaacgccccggcctcgtgccgcttccaactggcggtgacgccgccggccggctacacgttcgagtccggcatgatcccggcggagacctcgtcgctgacgccgccgtccaccccgggcgagggctacccggtgcagacgaacgcgaccgcgccgaccggcccggtgggcacgtcgacgacgtactacctggagctgaccctgggttcgggcgtggcggtgccggtgcacaaccacatcccgctggatccgcagatcgcgcccggcctggtcatcaccaagaccggtgatcgcaagacggtggaagtgggcgacagcctggtctacaccatcaccatccgccagaccgcgggtgcgtcgatgggcacggtcaacgtcatcgaccgcctgccgcatggtttcacctacatcgatggcaccgcgcgcgtcgacaacgccggcatcgccaatccgctcggcaagccgggcccgacgctggtgttcgacgtcggcgcgctcgccgtcggccagcagaaggtgctgacctaccgcgtgcgcgtgggcgtgggcagccagcagggcgacggcatcaaccgtgcgcgcgcctacggctgctcgatcgacggcggctgcgtggatccgaccacgctgacgccgtacccgaacgggggcgtggtgccgtcgaacccggccgagtaccgcgtgatcatcagcggcggtgtgttcgccgacgaaggctgcgtgctgggcaagatcttcgtggactgcaacgtcaaccacgtgcaggacaaggaagagctcggcatccccggcgtgcgcatgtacttcgaggatggcacctggatggtgagcgactcggaaggcaagtacagctactgcggcttgccgccgaagagccacacgctgaaggtcgatccgtcgaccctgcccgtgggctcgcgcctgaccaccagcagcaaccgcaacctgggcgatgcggacagcctgttcatcgatctgaagaacggcgagttgcaccgcgccgacttcatcgagggcagctgctccaacccggtgatcgagcaggtcaaggcgcgccgtacgcagggcgagatccgtgcgccggaaaccgagcgcaaccagcagccgctgcggttcgagagcaagccggcgcgtgccccgcagcagggcaccgactcggccaaccagcggccgatcgtcgaacccaggcctacgacgagcgcgccgaccggcacggatgacgcgcgcaacggggaggtgcagccatga

SEQ ID NO: 532337 - DNA, 3411 bp, Stenotrophomonas maltophilia
atgagccgctccgccccgcgtccgtcgaccttcatggaatcccgtgccatgcgcgcatcgcgtccttcgttccaccccctcgcgctggcgctggccctggcggtgacgccgacgctcgtgcaggcgcaggccgtgtccggcgaccagcgtttcacgccggtcctcggccaggccacgccgctctatccgcagtcgcccgaatcgcaggaccgcgcgccacaaccgttgtacgcacagcccggcaacgtcgactacagcgtcaacgtgggcgtggaccgcgtgctggtcgaggtcgatcgcgatggcgtgcccgccgacgggcagtcgccggtgaaggtcgtcgtgcagctgtacggtgccgatggcaagccgatggccggcgacgccttcgccaccatcgagcacagtggcggtcgcatcaagctggccgatggccgcacggatgaattcggtccgggtcggctggacgccgacgaggtcacccccggtatccagctggccgtgcacaacggtcgcgcggagttcgaactgctggccccgcacgatccgcaggacgtgttgctgcgcgtgacctcgggcggccacagtgccgagggcgtgatcggcttcgtgccggagatgcgcgagctgatcgccaccggcctgatcgagggtgtcatcaacttccgccgcaagggcgacagcctgatcaacggcacccagcagggcgatggcttcgagcgcgagatccggcgctgggagaagcagttcaacaacggcaaggccaacggtgccgcgcgtgccgcgttcttcgtcaagggcacgatcaagggtgagtacctgctgaccgcggcctacgactccgacaaggacgtgcgggcgcgcctgctgcgcgacatccaaccggaggagttctacccggtgtacggcgatgcgtcgttgcgcggcttcgatgcgcgctcggccgagcgcctgtacgtgcgcgtggacaaggaccgcagctacctgctgtacggcgacttccagaccggcgacaacatcgccacgcagaccggtgtcgacttcggcacgcaggcgggccagcgcgtgctgggcacctacaaccgcaccgcgaccggcctgggctggcatttcgaaaatgcgcgcgtgcgcggcaacgtcttcgccattgaggactcgctgcgccaggtgatcgaggaactgccggccgccggcagcggtccctacggcctgcgcaacaacgcggtgctggaaggcagcgagcgggtggaagtggtggtgcgcgaccgcaaccagccctcgcgcatcgtctcggtgcgtccgctgggccgcctggtggactacagcttcgagccgttctccggccgcatcctgctcaacagcttcctgccctccttcgacagcgacctcaatccggtgtcgctgcgcatcacctacgaactggaccagggcaccgagaagttcctcgtgctgggcgcggacgcgcaactgcgcgtgggcgaacgcggcgagatcggcggttcctacgtcgacgaccgcaatcccttcgcggcgttcgaaatgggcagcgccaatatcggctacaagctgggcgccaacacctggctggtggccgaagccgcgcgtacgcgcagcgaggtgaacaccaacagcgtcaaccagtacggcacgccgggcctgcagggcctgagcgggctggtggaaggcgatgcgtggcgcgtcgagctgggccatgcgggcgaagcgctgagcctgaagctgttcgccggccagtccgatcctgcgttcaacaacccggcttcgtcgctgtacggcggccgcggcgagtacagcctgaccacgcgctggcgcctcaacgagcgcttcgagctgtacgccgaaggcctgcgcagcgaggaccgcaaccccgatggcggcgaacgcgatgccgccagtgcgggcacgcgcgtgaagctcaccgaccggctgacgctggatgtcggctaccgcgccatccgcgagacggtcggcgcgtactacacgtgggccaccagcagcggctacggcaacatcggcggcctcacgggcggttacgccaccggttccggcggcggtgcgctcggctacggccagcaaccgctggatccgctgaccggcctgccgatcatcagcagcggcaatcccaacgacgtggccagcggcctgccggtgggcaccgaactgtcgtcggacatgctgcgcatcggcctcggctaccgcgccagcgaccgcttcagcctcggcggcgaagtggagcaggacatccacggcgaggaccgcaatcgcgtggcgctgggcatggattaccagttgcgcgaacgcagccgtatctacggccgctacgagaagcagaccggcatcagcggcgtgaacggcctgacccaggacgggcgcgaggcggacacggtggcactgggcgtggacaccagcttcatcaaggacacgcagctgttctccgagtaccgcttgcgcgatgccatcgcgggccgcgacatccaggccgcctcgggcatgcgcaaccgctgggacctgcgcgagggcctgcgcctggatacgacgctggagcacaccaacgtcatctcggggaatatcggtgactccaccggcatcggtttcgcgctggactacagcgccaacccgctgtggcgcggcaacgtgcgcctggagcatcgcatctccgacgacgtcgccggcacgccgaccaacgagggctacaacacgacgctgctgcagttcctggccgcgcgcaagttgagccgcgattggacgctgttggcacgcaactacctgttgcgcaccgagtacgacgcgcgcggcgacgtgctgcaggaccgcttccagatcggcgcggcgtatcgcgacaccgataccaaccgcgtcaacgcgctggcccgctacgagtacaagctggagaaggacgagagcggcatggacggctccggcttcggctcagacaccggccaggacatccgtagtagcgcgcacatcatctcggcgcacgcggactggcacccgtcgcgtccgtggtggctgaccggccgggtggcggcgaagtggcagcaggacagcttcttctacgccgacaccggtcgcgtcgacgacgatttcaacgccgtgctgctgtccggccgcatcgtctacgacatcacagagaactgggacatcggcgtgctgggctcgacgttccgcggccaggacggcgccaaccagtacgcgttcggcatggaagtgggtcgcttgttgcggcagaacctgtggctgtcggtgggctacaacgccaccggcttccgcggcgacaacgacctgaccggctacgagtacacgcagcagggcgcgttcatccgcctgcgcttcaagttcgacgaagacctcttccgcagggaagacgcccgctaccgcgatccggtgcgctga

SEQ ID NO: 532338 - DNA, 993 bp, Stenotrophomonas maltophilia
atgaccactaccaaaacctccctcctgtgcgcggccgtgctggcctgcatcgccttcaccgccggtgcgcagcagacgcagctgacgccggcgcgcgatcggatcaccgacgagacgatccacgccgacctgaccggctacgagcacacccagggccgtatccaggcgctgaacgacggcggccgcccgatccgcgactaccatctgtcgaaggcgcaatgctggctggacgtgtccttccacgagtattcgcgcaacgaccgcagcgccttcccgcaggaagcgctgaccgagtcggagaagctgatcgtgggcatggagcagggcgtcacgccgctgccgaccgatacgccgctggtcaatggtgccgcccgcgtgcgcgaagacctgtggaagcgcctgggcgcgatccatggcacgccgggctttgcgtgtgcgcagcaggccgtggcctgcggcgaggttgaactggtccatgcgggcaacgagttcaaccagcagcagtggcggcatgccaagccgtacatccagatcgccgaagactgggtgagcgatgccgaagcctccacgcgccaatgcggcgcggcgccggcggtgctgccggtggacacggtgctgacggcgaacgtgctgttcgagttcgaccgctccggtcgcagcgacatccgcgcctattcgctgcagagcctggaccgcgaactggcccgcctgcgcgaggaaggcctcaccctggccaaggtcgaactggtcggccatgccgaccgtctgcagggtcgcggccacgactacaaccaagcgctgtccgagcgtcgcgcgcagaccgtgcgtgcgctgctgttggagcgtggcattgatgccgccaacgtcacttacagcttcaagggggatggtgatcaggtgcagcagtgcgacggcgtgaagcctcaggccgcgctgcgcgagtgcctgatcccgaaccgccgcgttgaagtacgcctacacgtcacccgatga

SEQ ID NO: 532339 - DNA, 516 bp, Stenotrophomonas maltophilia
gtggatgccgttaagtaccacgtcgccaacgcacttcagaagctgggactcagcaaccgaaaggcgctgatgcagtggtctggtgtggccagatctagcgcgctgccacaaagcgagatgtcgcgatctatgaacattcaactcggcccagtcgggcaaatttcgcgcagcgtgtccaacatcgaggacgccaagcgctggtacggcgaggtgcttggcctgccgttcctatacgccttcggaaacatcgcctttttcgactgtggtggactgcgccttttcctagcggaaggcgatggcgatgccaattccatcgtgtacttccgcgtgacggacatccacgctgtggtgaagtcgcttcaggcgcgaggaatcgagttcgtcaacgcaccgcacatgattcacaagcatgccgacgggacggaggaatggatggcgtttctgaaggataacgaaggccggcccttgggccttatgtccagcgtcgggccctccactgcagaaggcaagtcttga

SEQ ID NO: 532340 - DNA, 3018 bp, Stenotrophomonas maltophilia
atggcgacgctgcacgagaccgcgtatccgcgcctgaaacctgatcccacggccaaggaactggacgagatttacacgcccagcggcggcgaagtgcgcctcgcacgtagcatggcgacccagccaaccactcagttggctgtgctcattcacctgaagatgttccagcggctgggctacttcgtgatcctagccgatgtcccagaacggattcggcaacatattgcccaggcagccgggctgcgccgggcgctatccatccgagacttgaatcgctacgacgtctccggcgctaaacgcgcccatatggcgcgcctgcgaaagttcctgcgcgttcgtccgctggatgtcagcgggagggaatggctggcaacggtggcccaggccgccgctcaaaccaagcatgtcatcgccgacatcatcaacgtgctgctggaggagctggttcaccatcgctttgagctgccgggcttcagtacgctggagaagattgcggttcaggcccgcgagcaggtgcatgagcagtattaccgcagcatcaatgaggccttgaccgcgccagccaagagcttgatcaaggaactgttggccgcaccggccaatgccacatataccggctggaatgcgctaaagcgcgagcccaaacggcccaccaataaggaagtgcgcttttatctgcaacatatccaacgcctgcaacatctggcccagcagttgccggccgtggatattccggttccgaagctgaagcagttccgcgccatggcgcgtgcgctcgatgccagcgaactggccgaactcaagccggccaagcgctatgccttggcgacgatcttcattcggtcccagtacgccaagacattggacgatgcggccgacctgtacatccggctgatgcagaacctggagaacacggcccagcaaagactgttggcctaccaagtagagcacggcaagcgtgctgatacgcttatcgcgcagctcaaggagatcctgcaggcttatcagatcgacggaacggacacacagcgtgtggatgccatcggactgagtctggtggcggacatttccacactgctggccgaatgcgatgaacatatggcgtacgcaggccgcaactacctgccattcctgatccagccttacagcgttgtccgcccgttgctgttcaactgcctggagatcatgcaactgcgctccaccagccaggacgcgggcatggaacgcatgatcgctgctctgctgtcgctccgcggtcagcggcgggacatgattgaggccagctcgatcggtctggatgttgaaaaggatctgggctggttgtcagtcaactggcgcaggcacgtcttcggccgcaaagcggactcgctggggccgggctgggtgcatcgcaagtactttgagctagctgtgctggcccagatcaaagacgaactcaaatccggtgatctgttcattccccacggggagcgctacgacgattaccgagagcaactggtggatgaggccacattcgcccaggaactggaggcctacggtgaggtatctggtctggccaccgaggccagcgagttcgtgcgccatttgcagcaagagctgagctcactggccgacacggtggatgcacgttttccggagaacgtccacgccgatgtggtggatgggcgcctggtgctccggaagctgcaacggcctgagatctccagcgccattgccacggtcgatgctcttatcaccgagaggctgccggcgatgagtatcgtagacgtgctgatcgatgcggctcaatggctcaagctgcaccgtcatttccggccgattgcgggcaccaatgcgcgcgtggacgatctcatgcgccgggtgatcactacgctgttctgctacgggtgcaacctgggcccgacccagactgcgcgctcaatcaagggcttcagtcggcgccagatttcctggcttaacctcaagtacgtcactgaagacacgttggacaaggcgatcgtgcaggtgatcaatacgttcaacaagttcgatctgcctggctactggggctcgggcaagagtgcgtcggccgatggcaccaagtggagcatgtacgagcagaacctgctctcggagtaccacatccgctacggtggttatggcggcatcggctactaccacgtctctgacaagtacgtggcgctgttcagtcacttcattccgtgcggtgtgcacgaagcgatctacattctggacggattgctggccaacacgtctgatatccagcctgaaatcgtgcatggggatacccaggcccagagttatccggtctttggtttgtcctacctgttgggcattcagttgatgccacgtattcgcaacatcaaggatctgaccttcttccgcgcggaggcgggtcgcccgtacaagaacatccaggcgctgttcggcgacagcatcgactggggcctgatcgaaacgcatctgcacgacatgctgcgggtcacggtgtcgatcaagttgggcaagatcaccgcttcgacgatccttcgccggctgggaacctacagccggaagaacaagttgtacttcgccttccgggagcttgggaaggtcattcgcacgctgttcttgctgcgctacatcgatgacgtggacatgcgtcggactatccaggcggccaccaacaaaagcgaagagttcaatggcttcgtcaaatgggttttcttcggcggagaagggatcattgccgagaacgtgcttcatgagcagcgaaaggtcgtgaagtacaaccagctcgtggccaatatgatcatcctgcacaacgtagaccagatgacacgcacgttggccagcctgcaggaggaggggatggagttgaatcccgaggttctgggcggcttgtcgccgtatcggaccagccacatcaatcggttcggagactacacgctcgacctggaacgtaaggtcgcgcctctccaattcaccgagatcgttttggagccccactggacgcagatcgccgagccgagagggtag

SEQ ID NO: 532341 - DNA, 1146 bp, Stenotrophomonas maltophilia
gtggcccgctatctggccgagcaggcccccaaggcagcaatcaacacgctgaagcaacgactggcagcactggcgcattggcacgccgagcacgggttcgtcgatcccacgcgtacgccgctggtacgcaaggtcctcaagggcattcagacgctacacccccgaatcgaaaagcaggccacgccgttgcagctggcccagctgacccaagtagtcgggtggctggaccaagccacgctggcggcccaggagcgcgccgaccacgcgtatgccttgcgtgccatgcgcgacaaggcgctggtgttactgggcttttggcgaggattccgcggcgatgagttgatccggctgcagattgagtacttggaactggtacccgagcagggaatgatctgcttcctgccgcgcagcaagggcgacagacagtcggcaggcaatacgtacaaggtgcccgctctgtcgcgcttgtgcgcggtcagtgccacgcaggcctgggtgcaggcagccgcgctaactcaaggcccgctgttccggcgtgtcgatcaatggggcaacgtcggcagccaagggttgcatccgaacagcctgatccccttgctgcgcgacctgtttcagtccgcaggtctggaggccgtgggaggctacagcagccattcccttcgccggggctttgcgggctgggccaatgacaacggctgggacgtgaaagccctgatggagtacgtcggatggcgagacgtgcactcggccatgcgttacatccagggccgcgatccgttcgcccgccaacgcgttgaagccggcctccaggccgcgccgccccccgcgctcgcctcggcggcgctgccagcgccggccgcgaccgtgagcctgacgctgcgcctgctagtgagcccgtttacgccccgaggcaggggcgctggccgcgctcgggcacgcattgaggcgatgtgcctatccccgtttcaagcccatcggcttgatgccgagggaagcgagtaccgactcacgatgccggtggtcgacgccgcggacatggacgagaggatggccatgctgctggatgagatgcatcgcgttgccgataaccaccactgctttctggaagcctccgtgcgcgccgaggacgggcgtcactgggattga

SEQ ID NO: 532342 - DNA, 315 bp, Stenotrophomonas maltophilia
atgcgcgccgcgcgcgttgcgcttgatcgcggcgagggcttcggcacgcgtcgccgcttgggtggcccggcgatgccgaacaccagggccagggcgcaggacaaccagcaggatcctggcatcgcaatctcgtccaatgagtgtgcgcgcagtgtgactacatgtgtagtcacactgcagtgcctgaagtcatggcgcgcttgcgtgctgaacgtgggctgggcgccacccccggcccacctgcaacgcggtcgtccgcagcggtcgccatgcagcgccgcacggtatgatgcggcgacccggaacctgcgatga

SEQ ID NO: 532343 - DNA, 858 bp, Stenotrophomonas maltophilia
atgatcacacgccccgcgctccggtaccacggcggcaagtggcgtctggccgactggatcattggccacatgccgcagcaccactgttacgtcgagccgttcggcggcgcaatgtcggtgctgctgcggaagcggccatccgcgatcgaggtttacaacgacctcgaccagcacgtggtcgacttcttccgcgtgctgcgggatccaacgaaggccgagcagctgcggctgtcgctgatcatgacgccctattcccgcgcggagttcgtgcaggcgtgggaggaccacccagagcctgtcgaagccgcgcgccgcatggtgatccgcaccgcccaggcgatcggcgccaaaaagcgcttggcccggaacggttggcgtgcaggccccacccaccacacgcccaccagcatgtggcgcggctggccgcagcacatccccgcctatgtcgatcgcctacgcgacgtgctgatcgaccagcagcccgcgatcgacgtcatcgcgcagttcgattcgccggaaaccctgttctacgtcgacccaccctatgtgctgaagacccgcgccggcgaccaccggaaggtctacacgcatgagctggaagacgccgagcatgtcgccctgttggaccagctgctgcagcttcgaggcatggtgctgctcagtgggtaccggcatccgctctacgacgaggcgctggtgggctggcgccgggtcgacgtgcacgcgcgtgcccagtccaaccagccccgcatcgaatccctgtggatctcgcctgcagctgcagcagcgctgccgcatcccgcattggagcttgaaccatgcccgaccagcttttcccccgcgaaccgcgccgcatga

SEQ ID NO: 532344 - DNA, 174 bp, Stenotrophomonas maltophilia
atggtgccgaatatgtcttgcacaaaggaagaaatcgcccgtgacattgtcgtggcggcaatcaaccagagcactgtaccgatggacggaaagcagctcgggcagctgtacaaagatgtcctgcttggggttcgtgaggcttggaagactttccccaccggcaatggggattga

SEQ ID NO: 532345 - DNA, 186 bp, Stenotrophomonas maltophilia
atgtcgctgcagatccgccgcgccacccttgccgatgtcgacgcgctgtcggccatcgccatcaccacctacaacgaaacctggggcgactcgtatccggcgcaggagctgcaggatttccgcactacagcagcgaaccgcagcgcaccgaactgtccgacccgcgcagcgcgatctggctgctga

SEQ ID NO: 532346 - DNA, 522 bp, Stenotrophomonas maltophilia
atgaacagatacgacgcgcgtttcaaactgcaggtcgccaaagaggcctgcaagacctccacatcggtcaaagccgttgctcgtcgctacggcctggagttctccacggtcaggcgctgggtggcgacctatcggctgcatggttggcgcgggtttcgccgccaggcccagtcctatgacctcgcattcaagctggctgtcctgaagaagatgggccaggacggcatgtccgggcgggaggccgccacttactttcaaattggcgatgccggcgcggtgggtcggtggcgtcgcctgtatgctcaaggcggtgcccaagcgctggcaccacctccgccgccgccccgaaagccgatgaaaaagacccgctcgtccaagccacctgaggaaatgagccgcgatgagctgctcaaggaagtcgcctatctgcgtgcggagaccgactacctaaaaaaactcgatgccttgatccgggaagagcaggcggcgcaggacgcaaagcgcaagccatccaaggattga

SEQ ID NO: 532347 - DNA, 1104 bp, Stenotrophomonas maltophilia
atgcttcgggttcgcataagcggcgcggtagcggtactcgctggcaatctccacgctgcacggcaggccggcgatggcttcgatccagtagcgcgcggtcaggcctgcgtagtagctggtgccgcaggcgatgatctgcacgccttcgatgcccgacagcaccgcctcggcgttcttgccgaacagctcggccgggaagccaccggcgtcgatcgccgcttcgatggtgtcgcccagcgcacgcggctgttcgtggatttccttctgcatgaagtggcggtacggacccagctccagcgaggccagcgacacatcggacagatgcacgtcgcgctcgaccggctggtcatgctcgtcgaagatgcgcacgccatcgcgacggatctcggcggtgtcgccctcttccaggaagatcaccttgcgggtggccgagatcaccgccgagacgtcggaggcgacgaaattctcgccctcgcccaggccgatcagcagcgggcagcccatgcgcgcgcagacgaagcgctccggctcggcgcggctgaccacggccagcgcataggcaccggtcagctctttcaccgtgtgctgcagcgccaccagcaggtcatcgccgtccttcaggtggtggtggatgaggtgggcgatgacttcggtatcggtctgcgactcgaaggtgtagcccagcgcacgcagcttctcgcgctgctcctcatggttctcgatgatgccgttgtgcaccagcgccacgccatggctgatatgcggatgcgcgttggcctcggtgacaccaccgtgggtggcccagcgggtgtggccgatgcccagcaccgcattgaagccctcagcctcggccgccatggccatttccgacacgcggccggtacgacgcacccggcggacttccggacgctcgctctggtcgatcacggcgatgcccgaggaatcgtagccacggtattcaaggcgcttcagaccctcgatcagtaccggtactacgtcgcgatcggcgatcgcacccacgattccacacatgtcacgcgtttccttgaagacgattgccgcattctagcctgcgtgtccggcttccccctcctgtccgcttaa

SEQ ID NO: 532348 - DNA, 234 bp, Stenotrophomonas maltophilia
atgaccagcaccgtcgacaacgacaacgccaccactaccacaaccgacgacgcgctgattgctctgcgcaaggtcgaagaggactgcggtttctccaaggccagcatctaccgcatgatggcgcgcggcgaattcccgaagcctgccaaacgcgccggccgcagcgttcgctggttgaagtccgaagtgcagcagtgggtgcgcaacgaatggcgcccgcaggcaccggcctga

SEQ ID NO: 532349 - DNA, 378 bp, Stenotrophomonas maltophilia
ttgaacaccgaactactcacgcagaccaggccgtccccgctggcccaccagcatcgcagcgcgatcgcggttgcggctgcacttgaaaccgccctgaccagttcggagcagaccgccgctggcggatggtcgctgaccttcaccttcgtgggtgagccgcaactggaggcagcacgcgacgcttggcgcgcgtacgcatactccacgatcgacgcacccgtgccgctggcggcaacggcaagccagaggctgacggcccagatcgggcaggcgctgttcaacgatcccagcatggacctgctgcagattgccaaccgcgtagagtccgcgcggagggcgctcggcgtgccgctgctgacggctacaggcagcagttag

SEQ ID NO: 532350 - DNA, 846 bp, Stenotrophomonas maltophilia
atgattacgcgccccgcgctccggtaccacggcggcaagtggcgcctgcccgattggatcatcaagcacatgccgcagcaccactgctacgtcgagcctttcggcggcgcaatgtcggtgctacttcggaagcggccatccgcgatcgaggtctacaacgaccttgaccagcacgtggtcgacttcttccgtgtcctgcgagatccagagaaggccgagcagctgaagctggccttgatgatgaccccctacgcccgcgccgagttcgtgcaggcatgggaggatcacccagaaccggtcgaagccgcgcgccgtatggtgattcgcaccgcccaggctatcggcgccaagaagcgccttgcccggaatggatggcgcgcaggccccactcaccacacgcccaccagcatgtggcgcggctggccgcagcacatccccgcctatgttgagcgcctgcgcgatgtgctgatcgaccagcagcccgcgatcgacgttatcgcgcagttcgatacgccagaaaccctgttctacgtcgacccaccctacgtgctgaaggcccgtgccggcgaccaccgcaaggtctacgcgcatgaactggaagacgccgagcatgtagccctgctgggccagctgctgcagcttcgcggcatggtcctgctcagtgggtaccggcatccgctgtacgacgaggcgctggcgggctggcgccgggtcgacgtgcacgcgcgtgcccagtcgaaccagccccgcatcgaatccctgtggatctcgcctgcagccgcggcagcgctgccccacccctctctggaattcagccctctaccgagccaaggccgcgctgcatga

SEQ ID NO: 532351 - DNA, 252 bp, Stenotrophomonas maltophilia
atggacgagtacgagggcgtgtttaagctggtggcggtggcggggcaggacatttgctcgccgaacctgtggaaatcgatgggcctggtctatgcagccggggaggctgtctttctcgagcaggtccacgccggtgccgacttcaccagtcaggcagatgccatggctgcaggtttctcggcggcgcgagcagtagcccggacccttgatcccgcagagtgccgagctaaccgccccgcgagattctggtaa

SEQ ID NO: 532352 - DNA, 228 bp, Stenotrophomonas maltophilia
atgaagactggtggctaccaccgaacaatgcggggcgtgatccaaggtcacagctttctgctgaccatcaccagccaggtcgatgacgttttcctctactcggccaccgtggacggtgttgccgttgagatgcgcatcgagggagtgatccgtaacaagggcgatgcgatgcagctgggaatgaccgcggttgagcggcacatcgctcgacttgttccgcgcgcctga

SEQ ID NO: 532353 - DNA, 450 bp, Stenotrophomonas maltophilia
atgaaacagcctcagcccagcgcctcacccacgcccaacccaattcccgacagcgcggtcgaagcattccgcgccgcctacgccgcacatggcagccagaaggggtacgccgatgccatccgcgccggcctcgctgctgcagcgccactggtcggccaggacgcgatgctcacgctggagcaggacgcccacaactaccagctgcggcagctggatgcagccctgaacggtgaagagcgcgcggcgtgcaatccggtacttgccgacctgctgagccagtgccaggccgaggcacggcgccggaatggtcccgtgctgacgaccctccccatcagtgcccagcaccacctgcgggaggtcttcaaggacattgcggacagcgcgcggcatctgagcgacaacgccgtccggcaggtcgtgctgatcaacgcgaaggaggccaccccgtga

SEQ ID NO: 532354 - DNA, 207 bp, Stenotrophomonas maltophilia
atggaccacaggaaccagctcgacatcttcgacaacgacccagcccggctggccagggccaaccgcatcgccgccgagaacgccctgactgacccgttcttctccggaaaggtccgtcaggagcgtcacgaccactacatcgccgaagccgtgcgcctcgagcgcctggcagcaatggccgcgccgccggccaccaccacagcctga

SEQ ID NO: 532355 - DNA, 246 bp, Stenotrophomonas maltophilia
atgcccggcctgcactgtctgggcggcggccatgacgcggtgatcgtcagcacgatcacgccgacggcagagcaacgcctggcgcggtatcggtcggcactggccgcgcaccccgaccgcttccactcactgcgcgtgagcttcggcgagatccagcagcgcgtgattaaagcaggccaccgcatcaactacgccgcctggcagaagcgcatgtctgccctctggccacctatcggccgcgactga

SEQ ID NO: 532356 - DNA, 315 bp, Stenotrophomonas maltophilia
gtgagcgcccgcaaggccgtccgacaggtcgagttcaccgccaagtgcttcggtgcacacctcggcctctctcgctccgacgacaactcctggcgcatgtcgctctatgccttcgtgggcaagaacaggacccatcgcggtatcgcttttgcctgcgctcctcccgggcagatgccgcacgtggacccgcacgatcccggcaccgacaccccggccgctctgtggcttggttctgcctgcttcgatctgccggccagcctcgctccgaaggtccaggcgttcctcgctgagcacgctactggcggtgcgccgtga

SEQ ID NO: 532357 - DNA, 519 bp, Stenotrophomonas maltophilia
atgcacctgacaaccagcaacctgcgctcggcccgcctcggccttgtcgccctcgcctgtttcatcgtcctggccgttgcggcctgggcctctcccggcgacgagccggcggctgatgccgctggtgacgccccggatggactggtgatcaccagcccgcgcatctgcgccgccctggccgtgtacgagctggccgccgccgacgattggggcctgcgcgccaccgtcgccaacaccagcctcaacgccttccgcaccgcagagcgcgtgcccgactgcgcccccggcatcacaaaggccctcacccacagcttccagcctgagcgctggcagctcgccctggacgcggccgacgccgtgctcagcggctcctaccaggtatccccggcagcatgcgtccgggccaatgcggttgtccccctgtcgaccgcagacggcaaagagccgagcacatcccccgtgctggcccgggcgcagtgcgtgatgtacgacctcgccttcatcgaggtggcgccgtga

SEQ ID NO: 532358 - DNA, 408 bp, Stenotrophomonas maltophilia
atgcgcaggatcatgttggccatcgcccttaccactctctcactgagcgcttgcgccgatgctgggagcgacaacacggccgcccgcgctgcagcggctagcgcggcagcttcagcaaacgaggctgctgcagaagcgcagaaagcgatagacatcctccgctcgtccaccgctgagctttgccagggcgagtcgacagctgcagagcgaatcatgtctgcaaggcaggccggcatcgccatgtccacggtgatggcagcggcaaccaagcaaggcgagccctacgtcggtatggttcgcgcagcctacgaaacgccaaggctttccaccgattccgccaaggaacttgtccaaggggagtttcgggacaccgcgtacagcgagtgcttaaagcgttgggagttctaa

SEQ ID NO: 532359 - DNA, 390 bp, Stenotrophomonas maltophilia
atggatctcgatcaggaaatggacaagctggcgcagctgatcgcgctgcgcgcgcaacggaagatgggcgtgaagcccaagcttacggcggtcggaagcgcaaagccggctgagccggagccagtgccggaacccggcgccaggcccgccatgcgcatggatgtcgtccttcgcgagtcccattaccgcatgattcgtcacttccatcgcaggtggggtgcaccgatgcaactgcttatcgaccaggcctgttttgggtacatgggtatagagcagatccccgatgacgatctgatccaacttcacaaggatctggaacgtgccgaggattgcatgcgagacggcatcagctttgaagatgcagggctgctccgcagccgctatggatga

SEQ ID NO: 532360 - DNA, 267 bp, Stenotrophomonas maltophilia
atgaacgaagccactcagaccgtgacaccgatccagaaggccatcgatgcggtgggcgggcagggctcgcttgcgcgcctgctcaaggttcacccggctctggtatcgcaatggagaacgggccgcaggcctgtcgccgcccaccacattctttcgattgaggccatgacgcaggtgtcgaggcatgaattgcggcccgacatcttcggcgtgcagccggagccggatcccgactcggatcgaatcgtccgcatcgacgttgcctga

SEQ ID NO: 532361 - DNA, 660 bp, Stenotrophomonas maltophilia
atgagcaccttcgagatgatggtcgttgcgttaactggaaacgcggctgcactcgcagttttaggttggcttgccaaatctctgatacagaacttgctcaacaaagatcttgcagtgcaccgcgttcggctagagcttgagaatgaacgcgcctcgcaggctttcggtcacgagcttgcgcttgccgctcgggaacatgacataactttcagcaagcttcaccaacgtcgagcccagacaatcgcgaaactttatagattattgtcgattacggcggacaagggaattaactactcgacgcccatcacctactctgacgaaccttccaaatccgagctttataatatttttgccagcgcattcaatgaggccgcacattacttctactcaaacaagctatttttgccagaagaatcgtgcgaaaagatagaaaagctctttaagggactgaagtcgcacccatcaaaaatgaatacatacatgaaccttgcagagatgcacaagacctcggaaatcgaaattaagagccttgatgcgtggaatgacgcctggaagtacttctcaaatgacttcaagcccgccatggcggtgctcgagcgcgatttccgtattcttctgggggataaatctccctctgcacagtcacagcccgccccttag

SEQ ID NO: 532362 - DNA, 711 bp, Stenotrophomonas maltophilia
atggccaagatcaccgctcaacaggctggcggcatggtctatgcgctcgtcgacccgcgaactgacagcgtctgttatgtgggccacaccactcagtcactggataaacgactttccaaccatatgtcagccgcgaagcgaagtccgggtaggccggtttgctcgtggatcaacgaactcaccgaacagggctgcagcccactggctcgcgtcctagaaatgatcggtccgggttcggactgggagagcagagaaagggggtggattgcgcattaccgcaaggttggatggctagccaacctcaccgacggcggccttgggtggagtgggcattctcatacggctgacgagcggcggcgaataggccgggcgcatcagggcaagacgatttcagttgatcaaaggaggaagcttcgcgcttcccggatcggctcaaaaatcagtgatcacacaagatcgaagctctccgcagcactgagtggtcgggagttgtccgcatgcacccgcaacaggatcagtgaggcgaagcgcggcaaagcattaccggccctagcgggaattctaaatcaccgagcggtgcttgatgaaaaggccgtgcgggacattcgaagcggtctcatcgaccaggcatcagcacaaagccgatatggcatttcccgcacccagttctacagggttaagcgcggtgaacaatggagatcgatagcatga

SEQ ID NO: 532363 - DNA, 210 bp, Stenotrophomonas maltophilia
atggctgataccccaaagcagttcgtgctttacaaggacaatgtcggcgagttccgttggcgcctgtttgcaacgaacggcaaggtcattgcagacagcggcgagggatacaagaaccgagtggattgtgttgctggagctagatcagttgcttctaccgcgtctaacgcaggaatctgggacggcgataatcagcggtggattgactag

SEQ ID NO: 532364 - DNA, 333 bp, Stenotrophomonas maltophilia
ttgaaccagagagctttcatgcaggccttcgacgcagctgcgttcggtgccttccgtgcagccggcgtcgccgatgctgcccactacaaggattcggccagcacggacgaggtgccgtgcacggtgcttctggacgagacagtcgagcagttcacaccggatgacgtagcacctgttgcgaccaacatcatccgggtcacgctgcagctggccgagatcaccccaagagctggcgccgtggtgcgcatcgacggcaccggccggcagctgaagctggtgcagaagatccgcggcgatgaatcgacagcggtgtgggaggtggccaatgtctga

SEQ ID NO: 532365 - DNA, 423 bp, Stenotrophomonas maltophilia
gtgtcggacctggacgtgatcattcccccggcacgcacagtgccgttccgcggcgagcagttggaggtgacccctctccgcctgcagcagattggtcccttcatcaccgccagccggaccatcatcgcccgggtggcgatgatcgccggcgcggtcgagggctcaccggccgccgccaccggcgccatcctgctcgacatgctcgagcaggacagcgaggtcattgccgaggccctggccgtagctgtcggccgggaggccgaatggatcggcggtggcaccttggacgaggttgctgatctgctcgaggcagtcgtcgggctcaaccgcgattttttcgcccatcgcctgcggcgcctgctgctgcaggccaggccgccggcggaagaaagcccgaactcggcgacgtcgtccacttcctga

SEQ ID NO: 532366 - DNA, 2766 bp, Stenotrophomonas maltophilia
atggctgacccatctgcaaacctgcgcgtgcgcatcagcgcggatcttgccgatatcaggcagggcttgggcgtgctcacccgccagctgcgcgaggtgcgcacggaggcggcccggcccctgccggccaagaacaacatcagcgacctgggtatctccgccgggcagaccgcgcaggcgatgcggcagctgccggcgcagttcactgacattttcaccagcctgcagggcggcatgccgttcttcacggtgctggtgcagcagggcggccagatcaaggacagcttcggaggcgtggagcctgcgctgaagggcgtctcgtcggcgctgctgggtatggtcaacccgtacaccgtcgctgccgcggcggtcggccttgtggtggttgcttggtacgacgcagagaagcaggccgaggcgtacacgcgagcgctggtgctgtcgcgcaacgaggcggccgcgaccacgctgacgctggtcaccatggcccagaagaccagcgacgcgctggacgtgtccgtcggcgcaggcgcggaagctgcgcaggcggtgggggcgaacgggaagatcgccgcgcagaatctgcaggctgtggccaacgctgccgtggccatgaaggaagtcagcggacaggcgctggaggacaccatcgccctctacgcgaagctggcggaagacccggtcaagggggcgcagaagctcaacgagcaggtcaacttcatgaccgtggctctttacgagcaggtcaaggcgctccaggagcaggggcgcaaccaggatgcggtgacggtgatcacccgagccgcttccgatgagacggtgatggcgttggccagggttcgtgccagccagaacccggtgatcagcgggtggaaaagtctctgggctgaggccacaagggcttggcatgtgatgcaagtgaatgctggtttcggacctcaggccgaccagatgcagaaaatgctggcagacaaccgtcgtgatgttgcgcgcctgaacgcccttgcggcatctgacgatcccatggcaagaaatcctcacatcctggccgcaatcgaaaaagacgttaagaatcgctctgacaagatcaaggccttggcagctgatctgatcaaagagcggaaggatgctgaaatcaaagcagcgcaagctgcctcgaccgacttcgttgctgagatggacaccatcatcgctgcccaagcgagcaaggaggaaaagaagcgcgaagaagtcgagcgcatcaacggtgaagctgaggtttcccgtcgaagggcgcaggcctccggactgatcgaagaggtgaagaagatcgaggagcggcgtgctgcagcggtagccgctatcgagaaaaagtacaaggaaaagcccaaggcaggtaacggctcagcggctcgcggtgctgacctgcagggctacagggatgacctagtggcagaacaggcccagatcaccgccagcacgcagctcctgcgtgctcagttcgcagctcgcgagatctccgcttcggattactacagccgcatgcgagagttggcgcagcgggggactaacgctcagacacaatcggtgcagcagcagatcgactatctgaaggggcagtcggttaacgtcaaggaggccatcaccgtcaaccgtcagctgggtgagcttgaagcccagcttacgaaactgcgaactgagggggcgacggcgctcgagctgctgaagaaggaagaggagagaacggccaaggcccgggaaaacgcgctgcgagcctatagcgatgcactggatgcaagcaacgcggcgctccagaggcagctcgacacgatggtcgccggcgtcgggatgggtgatcgccagtacgagattcagcagcggatcaatgatgcatacgccgatcaggcagagaaactgcgcgagctcacccgccagagggatgccagcgagctgacgggtgctgaatttgaagagcgtaaggccactctgctggccaagacgatcgaccgccttcagctgatcaaggacggttacgaggatctgcgtcaggccgagggcaactggctggcaggggcaagcgcggcgtgggcgaactaccagcagactgcgagcaactatgcccagcagatgggcgacacggtgggcaccgtcatcggtgggttcgaggatgcttgggtgaagttcaccaccaccggcaagttgagcttctctgacctcaccaagtcagtgcttgctgacctggccaggatcgccgcacgacaggcaatcctgggcatcgtcaacgcggtggccagcacgtggggtggcggtgtgactgcctccggcaaccaggctgtcaccacgggcaccagcagcatcaacaacgacctcttccagaagatgaagctcggtggaggctactccactggcggctacaccggtgatggggcagtgaacgagccggcaggcgtagtgcacaagggcgaggtggtctggtcacaggccgacgtagcgcgcgcggggggcgcgggcatcgtggaagccatgcgcttggggctgcgggggtatgcgaatggtgggattgtcggaggcggcgcagccggtagccagttcggtgcggtcaacatccgcgtgctgaatgcacctgctggcacgacggcttcggccagcaggaacatgcaaggcggcttggacatcgacgtgcttatgggtgagatcgacgccgcgctgggtggtcgggtcgcggctggaaccggtgctacctacgccggcatcaagaaccggttcggtctgggagacaacgtctga

SEQ ID NO: 532367 - DNA, 357 bp, Stenotrophomonas maltophilia
atggagaccatgcccagtattgcccgcgtgatgttcgaggggcagaagcgctcgtttgacccggacgtagagcgcgacgaaatggaacgtggcgtggccaagcaacgcatcaggaatacccaggtgacgatgaagcaggcgctcacgctgtatttcagcagcatcgaggacgccacagcgttcgacaactggtacttcgatgagatccgccggatcgggtggttctcgatgatccacccatataccggtaagtcgatcactgcccggtttgagaacggcgccattggcgatctggtgccagacgagaaaacggcaggtgattaccgcctcgatgcagtcctggagtatctgcgatga

SEQ ID NO: 532368 - DNA, 459 bp, Stenotrophomonas maltophilia
atgaccttcactgaacgccgccagcgcgtgacggacaccaccggcacgctggtgttgctggaagtgtccgcgccgtcatttgccgaggtccttcgcatcgtcaatgacacccaggactggaccagcaacggggtcgtgtataccggcgtgcagttcgggttcaagctgccggacgatgtgagcggccaagcaccgcgtgcgcagctggtgctgaccaatgtgggccgggccattacagaggacctggagcggctcgcgccgggagagctggtcacggcgcgcatgatgatcaccgaccgtgctgatcccaacgtcatcgagcaggaccactacctgcccatgaccagtgttctggtcaatccgcagaccgccaccgccgcctgcggggtggactacctgactcgtcagcaggcagtacggctgcggttcaacccgcatgtcagcccggggctgttctga

SEQ ID NO: 532369 - DNA, 396 bp, Stenotrophomonas maltophilia
atgcgcctggccgatgtggagcgattcaccgcgctgccctacgacgccgacacgttcgactgcgccgacctggtggcgctggtgcagcgcgagttgttcggccggtccgtggccatgccgggcaggcgacctcgcggcgcccgcggcgcggcggtgctgggcgagttgtccgcaccctacgcccggaggcgagaggggccaccggaggatggcgacctcgtactgatgatcgaccacggacaacgtagccccggccatgccggggttttctttttcctggcccacgaagggtgggttctgcacagcaacgagcgtaacggctgcagcgttctgcaccgcgtgcgcgagatccaaggcttcggcctacgcatcgaaggattctacgaatgggcctga

SEQ ID NO: 532370 - DNA, 5160 bp, Stenotrophomonas maltophilia
atgggcctgatgaatacccccggcggcgacggccggctgatcgtgaccccgcacccggtgctggtggacggtcagaagaatgtgacggccgacctgcgcccgggcgagtcgctgtaccgcttcctgatgcgccatgtggaggatctggacggcaaccgctgggaagtgaccatcggcggccgcagcgtgccgcgccacctgtggcaccacgtctacccgaagcacggccagctgatcgagctgcgcggcggtgtgggcaaggctgccatcgccatcgtggccatggtggcgctgacgtacttcaccttcggcatcggcactgcagcctcggcaggcatgtggggcgctggcgctgtcgctggcagttatggcgcactggcagctacggcggtctacatggcgggagctgtgctgatcaaccaggtgctggcaccgaaacagcccaaggccagcgccgcggcgcctaccagctactccatcagtgccgggcgcaatcgtgccagggcatatgagccgttggggttgctgctgggctcggtgcgtattgcaccggatctgatcagccagccgtatacccactacgagggtgacgatcagttcctgtcgctggctctcacccccggcatcaatgtcgacagtgtcggcgagctctacaacggcgacgcgccgctctccagctacgagggcgtgcaggtttggcacaacgggttcccggctatggccagcgtggagctgccgctctacagcaacgccgacgtggtcgacggcggtaccctgctggacacctccaacgaccccaagggccgcccgggcgcgtgggtgcagcgctccagttcgcccggtgccgtgcgcctgatggtaggcatcgaattccagctgttcgacaagaccagcaggggcaaggacaagctcaaccaggaacagatcgagatccagtaccgcgccgccggcacccaggcctggcaggtgtacggcaactaccgcgtcaccggttcgacggcaaagacccagcgtgtcagctacaccctcgacgtggccgagggtcagtacgaggtgcgggtgcgcgcggcaggccgcaacaccgacggcagcggcgcgcaggcgtcgttcacctggaccacgctgacgacggtgcaacgcgacaccggcgactattccgggattccccggattggcgtgcgcatgaaggccaccgggcagctgaacggcgcgcccgatgagctgcggtgcgtcgcgtattcgcggccaatcccggtctggaagggcacgggttgggtcaccgagcgcacgagtaacccgggcgcgcagatcctcgcctacgcacgcggtatctatgcgcccaacgggaagctgctggccggcatggcgctgccagaccgccagatcgacatcgagggtctgaaggccttcatgctgcactgtgctgccaacgaattcgcctacgaccactggatcaccgaggtgcgcagccaccagcaggtgctcgacatggtggcgctggccggattcggccaggtgtcctggccgcgtgggcgcctgtcggtggcgtgggccgccgacgagcagccgctgtccggtgtggtcaacatggccaccatcaagaagggccagttccaggtggactacatgctggcgaacgcggccgacggcatcgagtacacctacctggaccgcacgacctgggaggcgaagacgctgcgcgttcccgcgccaggcgtagaagtcatgctcaacccggcccaggtgacgggcgaaggcgtcacgaccgaggctcacgcggcgatgctggcgcggtggcacctggcccagaccctgtaccagtacaagtcgattggctacagcaccgatatcgaacacctttcctacagccgcatgtcgatgctggcgctgcagcacgacatgacgcagtggggctacggcggccggatcatgggcgccgcggtggtcggcgggcgtatggtgctggatctggacgagccggtgcccgcgccgccgcagggtaacgctttcgtgggcctgcgcatcccgggggaacgcgtctaccgggtcatgcgtgtgcagccgttcacagggactgcgcgatcgctgacgctggtcgacccatggccgcgcgatgcagccgtgcccggcaacagtgaagccaacccggcgtgggacacgctgtggatctacgacttcaagcagacgcctggcctgcgcgtgcgcgtgaccagcatccggccggagagcgacctcaagggcgcggcggtcgaggtcgtggccgagagccccgagttctggcattacgtgaagaccggcgaatacattccatcgccgaacgattcgctgctgcagacccggccggtggtcagtgacctgaagatcaccgagcgtcaggtggtgcagggggacaccgagtacaccgagctgcaggccacctatgcggtgactggcccggtgggcgacgtgaaggtgctgagcgacctggacggcaacagtgagctcgaggaagtcgcgcgcacgaccacgcgcaccgcctcttggcgcatccccggcgctggcgtctatccgatcacggtccgcccctacagcccagagggcgcggcaggtattgccgcgtcggtgatctacaccacccgcggcgccgacgcgccgccggtgctggtggacttcttcgatgtggagcagctgagcggcggcgtgcgcaggtacacctgggggttcttcagcgacacgatccagtcggccaacttcgccggcgtggagatccgctacgccgccggcgccgttgacgcgccgaactggagcaccatgaccccgctgggcgacgacggctatcacccgtccgcgttcgaggccgtgttgcccgaggccggtcagtggacgttcgcgattcgctcgcgcaacaccgccgggacgttgtccaccggcatgctgatcctggtgaaggaactgcaggccaacctgggcgaggtgatcggcgggctggacggccggatcgatgagacctacgagcaggcgctggcggccaacaaccgcatcacccaggagatcctcgaccggattgcggaggacctgcgcgtcgccggtgaggccgtggctgcggcgcgtgcctacaccgatgcccaggttgccgcgctcaacggcattctcgaggacatcgtgggtgcggacgagtgggcggccgatggcgagtatccggcgggggacttcgtgcgccgcgccggcgtcctgttccgggcgctggcggacaacacgggggtggagcccggcacggactcggccgtgtggcaggagatcggtgagtacacctcggtcggcgatgcgctggcggccgccatcagcctgtccacgcagaacgccaccgacctgcagtccgaggctgcgcggctggatgcgctgctggtgcgcatgccggccggcgacggcgcgttggccacggcggcgagtgtggccgagcaaatccagctggtggcgaacaatgtagaggcgatcgcacgtcgcaccagcgcgctggaaagcaagctgccggacttggccaccaacgcctatgtgcggcagctggacgaggcgcagaccaacgtgtcgatagcgctggggcggcggatcgatcagaccaacgcggcgctcgccgataaggctgaggccggaacggtgcagcagatccagtccaaggttgaagagcttggaggcacggtcgaagccaccgcacaggctctgtccaatgtgaagtccatgcttccgacaggcggagggaacgccgtccctaacgcagcattcggggcgccgttgactgcttggggcattctgagcgacggctggggcggcgctaccgggccgaggatcaacggatacggggaccagtggcatccggtagggatgacggcaatcaactacgacaggtctggagtcgtcgccgctacggacgcctcgctaatcatcggcgggcacggtattgcagttgtgccgggagaacgttggctattctccgcttatttggccaatcaccgatgccgcggccgggtagtgctggtgtttacagacagcaactacaacaccattggtccaatctacaacggcaacttttcgaattcgtttggcggaaccgacctccgaaactggacgcggtccgctgccgtcggtgtagtcccggagggagcgtccatcgccaatttgtggttggtattcgaccaaccgtctgcaacagatgctacgccggtgatgtggatgctgcggccgatgttcgagcgggccacaccggaccagactgtaccctcggcatggcaggagggagcggcgggacttgatgccaagtacgccgcggttacgcagtctctggagacgcgcgctctgcagctggagaacggacagacccggctggaggccaaggcaggcgtgctgctggacgtcaacggccgggtcatcggctggcgggccaacaacgacggcgcccagggcatcttcgacattgtggccgaccgcctcaatgtgaccgatcccaatggcaccggcagcaccacgttccagcagggcaggtggatcacccgatcaggcggcttcatgtccgtgcacggcaagccgttcggccagaccggcgacctgatgatgtacatcggggtgggatccgatcccaacaccgccagcaaggctaacgggctgttttggatcgacaacaagggcaatgcctacttcggcggcagcctgtcggccggcgtgctgcgcaatgccgtgcagacaggaaccacccagacggtgggcacggagctgctcaacgggccgttccgcaccaatggtggcaaccgcacggtcacgctcagctttgcgcgaactcaccggcgccagcggtcgcagcagggggcgaccggcttcgtggccggtgcaggtgccaataccgcccaggtgcagctgttccggcagatcggcagcggcggctgggtgctgtggcaaacgctgaatgtaaccggctcggtcagcatcagcaacgagacggatggtccggacattgccgattccggctggggtgggtctttcacggtcaacgacagcagcacagcgcaggagacggtcagctacctggcgcgcatcgtggcgttcggcgagcagaacgtgacccaccaggccggtaacttcgatagccagaccatcacccagagcctttccatcatttccgtggagcagtag

SEQ ID NO: 532371 - DNA, 384 bp, Stenotrophomonas maltophilia
atgattgaccaccttgatcacctcgtactgaccactgtcgatgaagccgctgccacccacttctatgtggatgtgttaggcatgcaaatggaaagcttcggcagcggtcgcaaggcattccgctttggaaaccagaagatcaacctgcacgcgaaggggaaagagtttgaaccgaaggcccatacgccagttccaggggcactcgacctttgtttcatatccagcgtccccttggatgaggtcatgacagagcttgatcgcagaggggcagtcatcgtcgaggggccgatcatgcggaccggtgcagtaggtcccatccggtcgatttaccttcgtgatccagacctgaatctcattgagatttccgagtatctcccagcgtaa

SEQ ID NO: 532372 - DNA, 2502 bp, Stenotrophomonas maltophilia
atggaaatttgcaagttcggcattccgcctgaagatgcgaataaaatcgtacgaggagtggcggagggtaagtactcactcttaactggtgcaggattttctctaggatccatatgcaaatatcctggtcagccgacggcccccacctccctagaattagcaaagctgcttgcaaaacagttctccattacgatggttccgcataatgcggcagacctcccatccgcgtacgaggacgccttatttaaagcaaaggatagcggcaaggtatacgactatctacgcagtgtgctgactggcctaaaacctacttggcacgaagtggtcgcgacttttccgtggcggcgactctggacacttaatattgacgacctacctcaggctatatgggggaaaagctctagaaagattaaaaattttcattttagagatggctaccagcccgtcccgcacttagacactgagcttcacgtaatccatctgcatggcagattaagccatcatctgaaggatgcggatgaacagcagctaatattttctttgccagagtacgccgaggctacccgaagtcccggatcctggcatgaagctttcttcgcggagtttagcgaccaaccattcatcctctgcggcgcgtcggctgtcggagaggttgatttgtccagaacacttcgctcgggaaatcagtcaagaatcgcgagagacatgccctcgttggcagtcgtctacaaagctgatgaagccgctaaagagcgatttcgagacaggctcggcctaataccgattgattgcactggggaggaattcttcgaagctcttaaaaaggatgttgaagactatgtccggaagaaccctccttccgtggcgccaagtgcgtcgccaaacgacgcaagaattcttggtgcacagttccaagttctaacgaaccagagaaacccagcgaagggaaaaatgcagcggcatgacttctacgctggtgatgagccgagatgggaggatattcagaactcgcttgacgcttacacgcagagcgcaaaaggaatagtttcttacatcgaggagtgctggtcagacggccagacgcctgtagttgtcattaccggagcagcgggtagcggaaaatccacgagccttctaagaattcttaaggaatgctctagcttctctgaccttgctttactttttagaaatgacgaaggcattgatgttgatgcgatcgcgcggtgcataaaccaaaatgctcgcgttatattcggctttgacatggcagccgactattcacaagaaatttgggagctctcgacagccctcgtaaagcgcggattaacttttggaattattgcggctgatcgctcaaaaagaaataaagcaatgattaacgatctccggcgaactagcccacgcgtgacagaccactcccgtttttccagtaacgatgctggcgcgctctaccagcgcagaaagagtaagcatcgactagggtcattcacgcaatcaaaagaagctgcgtttaggaagtttgttacaataaatcatgacggaaatgttttctcggcaatggcagccttagaaggcggtgccgggcgcggctttgaacagagattaaatgattttgtaagtggatcgatcacgtcgactcacctcctcaggatggcacatgctgttagcctgacccaccgatggggatatccgcttcctttaagaaatgccagtcttgtttctaagatcgatgcggtaacgctaggtgaaatctgcagcgaaacaggtgaactttcagatatttttaccataaatgataagggcattgcgttcaggcacagagttctcgcctcacactttttcgaccaacggagagattactccgtgcgacaaagggtactggtggaacttatttcatccctcgcaccattgattacaaccgcctcaatacgagctaaaacttatccccaccttgtatgtcgcgcaattactcgtcgcgacgctgtacttgatgccgttaaagaccttaatgctgctcgccaagtctatagcgatgtagaaagtgttttcgggcataactctagattttgggagcaacgtgctttgctagagagccaagccggagatcacccaaaggcctattcctatgcccacgaggcggtttccagagagcatcacgccttcccttatacgacccttggaagggtttgcatggctcaagcagtaagcttgggacatactcagccacgatcagcgctcgaacgcttccaagagggaacaggtgcgcttttgcaagccagatctatcgctcgcaaaacggaattagttgcgcatcctttcacagcgtttttcacttacgccgagcaatttttaccaatttctcgagcggtgcccggcggagaaggttatttgaaggatgcgtggggtgactggatgaagcaagcgcggcgcgacaaagttttcgatgacgagactttccaagagctagatcgtgcttggatgagagcctgcacttcaaattaa

SEQ ID NO: 532373 - DNA, 1332 bp, Stenotrophomonas maltophilia
atggcgaagggtaaggggcagctcacagcacgcggcttggccgctcttgaggtaggggaatgggccaacgatgctgccacgcacggcgcgggggtacttcaggcccgcaaactcgcctccggtgcgatcagcttctattaccgctacaccggcccgaaccggaagcaggatcgcctctcgctgggcagcaccctgaccctggccgaggcgcgcgcagaggccaccgtgctggctcgccgctaccaagccggcgagcgcgacttgcgcggcgcccttctggccgatgaagccgctgcggcgcgcgaagtggcactggcccaggccgaagcatcggcccgcagctcagccacgctcggcgcgctgatgttggcctacacccagagcctggaggatgccggcaaggtgtctgccgccgccactcgggcatccatcaagcgtcacatcgaagaaccgtggccggcgctgtgggcacgtcccgcatccgagctggaactggacgacctgcttccgatcctgtcgcgcatggttcgccacaagaagatgcgcgagggcggcaagatacggtcgtacctgcgagcagcatacgcggcggcgatcgcggccaagcaggacgcggccgcgccggacgcgcttcgtgcgctcaatgtgtccaggaacccagcgcgcgacctggccacgctcgacagcgggcagccacgcgaccgggtcctctcggtggctgagcttcgggcctactggcgcaggattgaggccgtgcccgggcggccaggcgccctccttcgcttccatctgctcaccggcggccagcgcatcgcgcagctgatccggctgcaatggtcagatcacgatcacgacgccgacaccaagacgggctccatccgcctgctcgatatcaagggtaggcggcgcctgccgcgcgtgcacctggtgccgctgctaccgcgcatggccacggatctcgaaacgttgcgcggcgacggccaggggccgcacctgttctcgcttacagccggaaaaggcgcggccacctatgacgagttccgaggaatcatggacccggtggtggccagcatggttgccgctaaagagctgacagcgacgttcacgccaggcgacctgcgccgaacggtagaaacgcggctggctgcgctgggcctgtccgaggaggtccggggccacctgcagtcccacggcctgagcggcgtccagaagcggcactacaacttcttcgagtacgacgcggagaagcgcgctgccgttgaggcgctgctggaattgctcaccggctcgggcgccaccgtgctgcagatgcgcaaggggtcaggccgctag

SEQ ID NO: 532374 - DNA, 369 bp, Stenotrophomonas maltophilia
gtggaacggctgtatcaggcgcaacagttgcaggtcaggcggcgcaaacgcaagacggttctggtcggcgagcagcaaccactgctgcgaccggcctgggccaaccacgtggggtcgatggacttcgtgttcgatcgcacggccgaaggtcgggccattaagtgcctggtgatcatcgatcacgcaacatgcgaagccgtggcaatagaggtgtggcgtgcgatttccgggcacgggggctcgtgtgtgctggaccggccggcgtcgctgcgcggcttgccgcaggtgatccgtactgacaacggcaaggagctccgcggcaaggtgatggtgagctgggcgcacgcgcgtggcgtgcagctcccctga

SEQ ID NO: 532375 - DNA, 186 bp, Stenotrophomonas maltophilia
atgaacacaagcgacaagaagtcatacggtgaagatttggtcgcacggctgctgacgccgctggagaccgatgccgttgctggcggcgggttcgagacctatgctcagaatacaggtggatattgcagattcgaccaaaatagcggcggatacgaccagaagtgcgcgacacctagcatttcctga

SEQ ID NO: 532376 - DNA, 693 bp, Stenotrophomonas maltophilia
atgcgcgacgtaggcgtagctgcagagtcatgtctcgaccaagctgagtacaagaagcggccactaaatgacctgatcagtggcggcgagtatcaactcgcttactcctgcggaatggtctacaccttcatcaacctcgtccggatagattctgatccagcagtcgctctgggcaagttctggaaaggcaccctgcaggatagctcctcgtcgcgcctcaatgtaaataccgacttcgatgaggcattcggtgcgcgatcgccggtgcagaacgccatgatcgaactactagcccagaatggctacgcgcttcgcgaaacgattaacggcttgagcaaggaccagcagttccgcatagccgcagaattgatgcgagaggtttcacgcaacgactgccaagggaactacggcctgtttaccggtggcggagtgattgtgcttgaccccaaagtgaagacctgcagctctctgaggcccggaggaaagcccgtggcagtagatgggtttgattttagagagcacgcattggacgctcgatctgcatggatttcagcttgccataatggaggagccgtgagcatcgactattccgacagctccgctaaaccgtggatcgtgtcgtgccaatcccccccaagatccctgtacacgccgtttcatctttctcgaatcacgcctaggggaaaacaatga

SEQ ID NO: 532377 - DNA, 522 bp, Stenotrophomonas maltophilia
atgaacagatacgacgcgcgtttcaaactgcaggtcgccaaagaggcctgcaagacctccacatcggtcaaagccgttgctcgtcgctacggcctggagttctccacggtcaggcgctgggtggcgacctatcggctgcatggttggcgcgggtttcgccgccaggcccagtcctatgacctcgcattcaagctggctgtcctgaagaagatgggccaggacggcatgtccgggcgggaggccgccacttactttcaaattggcgatgccggcgcggtgggtcggtggcgtcgcctgtatgctcaaggcggtgcccaagcgctggcaccacctccgccgccgccccgaaagccgatgaaaaagacccgttcgtccaagccacctgaggaaatgagccgcgatgagctgctcaaggaagttgcctatctgcgtgcggagaccgactacctaaaaaaactcgatgccttgatccgggaagagcaggcggcgcaggacgcaaagcgcaagccatccaaggattga

SEQ ID NO: 532378 - DNA, 522 bp, Stenotrophomonas maltophilia; identical to SEQ ID NO: 532346

SEQ ID NO: 532379 - DNA, 819 bp, Stenotrophomonas maltophilia
atgaagatggacacccaagaatccccgctgcgcctcttgcgtcccctgggcctccaacgaacggaggccttggcggacgcgctcgtgcgcgaagcccaaggccttcacgattcggaagtgttggcgcgggcccacgccctgagcgttgcccctgtcgagggtcggttgggcgatctggtctggcaggtgcgccagcgagagcacgagagggagccccaggtgagcctgcgctggggcttgcatcggctggggtttgatgcgcccgagcgggcctccacccgcgacctggtgcgtgcttacgagagacgattggcagaccgtgacgaaccgatggtttacagcacgctggcagagagagtggctgggctgaccatggctgagcacaccaagctgtttcaaggcatggcggtggcggtggaagaagtccggactcggcagtctgatgcgaaacggttgcgggagaacgcgccttggcaagcctggcttgtgggggcatcccgttccggtcacgaagcggcattgcaggcctgcatcggcatgaacgctgacccccggctgccagatgccagcggcaacacgccactgcatcatgcggcccgatttggtcacgcctcactggtcaccccgctggtcgaagccggcgccgacgtggcggccctcaacgcccatgggtgggcaccgctccaccttgccgcctttcacaagcacgcccgggcctgcctccacctgatggcccacggggccgatcctgagcagccagggtggcgagggcggaccccaacgcgcatgcaccggcatgagcaaacccaagccctttga

SEQ ID NO: 532380 - DNA, 228 bp, Stenotrophomonas maltophilia
atgaatatcaacaacaccaacttccatcgttttcccgacgttgctcccgagcatttgagttctttcgccttggtcggcgggtatgtggatcgccaggttttggcaggaagaagcttggacaatgttcttcaggaactggataacagtagcccagggcagaagatttggcataacactgagatgcttcagaatttcagtgctgcggtggctgctcgcctcaacagctaa

SEQ ID NO: 532381 - DNA, 150 bp, Stenotrophomonas maltophilia
atgagcagtcggcactggctcaagcttcgcgccaagtgcaggagccgctggcggcggtttgactgggaagggtttgaattctggttctatcccgcgctgattttctacatgttggtttggatcctcttcggtccacccgacagcgtttaa

SEQ ID NO: 532382 - DNA, 204 bp, Stenotrophomonas maltophilia
atgtccacgttgaccaacgctctcaaagatttcgcttttgaacacgcggtcccactgctgaccgggttgttcctgctggtcctggcatttgctgcggcctttgccctctatccgccggtcgttccggtgctgctcaaagtggtggccattgccatgatgggctttgtgaccatcggtgtggtggttcagagttctttccgatga

SEQ ID NO: 532383 - DNA, 1287 bp, Stenotrophomonas maltophilia
atgaccccagaagaaaagaaccaaagagtcctgcagcgcaagcgcgaagaattgctgaagcgtgccaacgcaaccccgaccgcttcgcccacgcaggaagagcggctggtttccgacggcgtgaaagagaacctgaaagcggccagccactgggccggggtgatcagcaagcgcactgccgagttcacccggaagggcgttgcggccgctgccgaaaaggccaaggaggtcaaggcgaccgtggacgccaagcgggcaaggagcgcggaggaaagagttcaggcaacagaagccgagtatggacccaccgtccagccgaccgaagccgaggtggcagccgaggacctggtcgacgcattgtccgtccatgagcaagcggcaattgccggtgaaggcgaagcacccttggccaatctgtcgcagcaggacgtggcagacgccctgtccgttcaatcggaatccgattctctgctattcgaggctgccggaacacttgccaaccgagggggcgcctggtctccgtctgcattcttggacgtggcgaatgagctgggcgtccctggcgcaagggtaacgaagactagctggggcgtcgcactgaatacgaaaggcttgccgcctcaagaagctcaggagctcattcaatcggttaaggacgctttctatgatgagctcgcaggtcgtgcaacagaagccgatgaagaagccgaaaaggtgtttgaggttgacgaggcatcaacgggtcccagcgtcttcaccgagacagcggagactttctccccggttcctgaagggtccagcccacgcccggaggccgcgtcagtagagcagcaggtaaacctcagccagcccagctcccgctctcgtttgccttgggtcttgaccggtgtggtggcggtggcattggtcgtgggggcgatctacttcttgcttgggaagaacaaccaagtgcctccaagcacaccggctcccatggcaccggttgccactccagccgcccccgagcagttgcccgaggtggtggaagtccccgtggttgcgcctgctccagcagtgctttcagaacaggccaagccagaagccacgatcgagaaacccgcacctgtcgccgctcccccggtatcgacgacagcgccaattgcgccccagccaatgccttcgccgaaacgtgcaaccgccccattgccgaggaagccccccgcacccgccgccgaaccgcggaacgactggcagcaaaaagccaatgcagacctagacgcttgggcgaagaagtcggggatcgactga

SEQ ID NO: 532384 - DNA, 1206 bp, Stenotrophomonas maltophilia
atggatgagcaaccatcaggaattgctgacgacatatttgatggcaattttgactacgaagcgccagtaccaagccgggagagaaagttccttccatggcacaggccaagaaagcagttcgttcgggatcgtcagtgggtgggtgaggttgatcgtctcttggacgattccccgctgcgtgacggcaagcctctgacctatctcgggttgcctggcaatgatctgcttgatctgcggcattttcacagaaagatttgtagcgtccgacgctgtggcctctattttctaggttttaactccgcggccagaagtaataaggatgatgagtttgaaatgaacttgtctttggctgaagttaagagtttggagatgattgacgaaaggtctgatgtaattcttgacgagttctctctcttgtccagaacgcaatcagtggcatacaggcgtgcccgtgatgtcggcccgtttgatgttatcaatctagatctttgcgacggatttggtgttcacctacccgggcgagagaatggaagctactacgactcgctttcttctctgttggctcttcaggcaagatacgaccggccttggcttctgttcttaactacaagagttgataaggatagcgtgaatgagcggacgcttgaaaagctcattgaaaagtatctcaacaaccttaatgacagtgagcagtttgcgtcgaaatcttcggaactgttcggaattctcgacgatcagacgttgagggaaaagatggaggccgagctgggacacgtgcaggtgttcctcacggggctcgcaaagtggctgatttccatggctcttcaggggcgtccccccacgtctgtaaaattgaagagtgctatgggttaccaagttgcaaaaaagtccacttgcgcagatttagtatctctggcattcaggttcgacccagctcatcaggggctgcccgatcctttggggctcgctagtcatatagaagagcaaatatccgagcctgctttggcggtgagcgcaattcagagagtcgccgccatgaaggatgttgacggaattctttcgggcaacgcagcgctccttagtgaggtgacaagtgatatggctgatcttgtccagctagcaaggtatgatcgaaaccagtttatgagatgggcgcttgggggggagcccaacgccgacgatgttgaggtcactcaggtggcataa

SEQ ID NO: 532385 - DNA, 1980 bp, Stenotrophomonas maltophilia
atgaaagggataaattctttgccgggccaggataagcctgacctgagtgcgtctatacgagccagcactggttcggataactctgttgagacgatccttaggactagcgaaagagtaattgctagagttaccgatgggatatatagacagccttcctctgcaatcagagagttaatttcaaatgcctacgacgctgatgcgaagcgcgttgtggtgcatacggacgcacctcgtttcgaaagaatcgttgttgaggacgatggccacggcatggcgccagaagcgctggcgtatctgatacaaaacatcggtggtagcgccaagcgcaggggggagggatctgggcttgggatgacgtcgtcctctgatccttcgcttagtcctggtggacgcaagttgatcggaaagatcggtatcggtcttttttctgtagcacagctcactaacacatttcaaataatcaccaagactaaaggcgatgggtttagaactgttgcgtctattgtgatgcggcagtattcagacgagccggggaaggcgggtgatgaccagggggaatttgagtccggcaaggttagaatatggcgagaggttgccctggatactgaaagtcaggggactactatcgttctgagtaatattaggcggcaagcccgggatacgctcagaagtgatgatatatggtcggtcattgagcaaaatgagtcagcactcgaagacgagaaagttgaactagatcctcctaagtatcatatcgggcgcaccgaccggtccggagaaatgctgaggtcagttgagggtgagacgtcagcgctgccttggggctcagctgatcggcctgatgagcgttttagaaaacttgtgagttgcgtctggcgagaagtgagcgaggggaattcgaaccctaagctagaaaccctgtttgactattatctgaggatggtttggcaattgtctctggccattccattgccttatgtagctggccacctgtttgacgagccggcgtccgattggactcgaagttttcttttgtccaatagtccgaagggtaaggccatagaggtggaagacgccggggaaagttcaattcgcgaacttttcggactttgttctagcgatacggaggatttcggagttgtatttgatggaatcgagctttctcatccgcttaagtaccgggatcttccaacgacgtcttctgcactgaagcaaccacttgtctttgtgggcaaggtgtcggagccgttttcgaaggtcccattcgagctaagtggcggtcctttggagtttgaggcatatctattctggtcccccaagattgcccccgttgagcatcaaggtgccttggttagaatcaatggtgcgagtggcactctgttcgatccaaccttcatgcgttatcaggtgcaagaaatacagcgattgaagcaggtaacctgcgagatatttgttaagtccgggttggatagcgcgctcaatattgaccgtgagtcattcaatgtggctcatccgcatgcagtgtacattacaaaatgggttcatagtgcacttcgtcagcttgcaaccgctcagaagagagttgcggcggaggtgagggggggggttcgagaagttagagagagagaatcccactctagggtccaagccatcgctgaccgcgtttgggataaaaagaatgtcgggcgcgcgactgaaccaccggctattctactttcagatggttttacacacggcgaggacgggaaagccgactacgttttcagccgagcggcagttctatctccggtcttggatgaggcattcgcccccaagtccacgatcgccaagtccacgatcgaatccaggctggcagaggaaaaggttcgggcaattgcgcaagtgcttgcggcgttcgatctgctggatgtgctgtccaagcctcagcaagaagagctactgagggcgatctatcaaattgttgagtcagggggtaactaa

SEQ ID NO: 532386 - DNA, 1080 bp, Stenotrophomonas maltophilia
atgacacttgattctcgccaggattgctcggcgtcgacggggatggtagatgtggggcgtccaacagcaaacgggggtcccacatgtgcgaaaaagactcaaatcgtgagtctgttcagtggcgctggggggatggacctaggtttccaccaggctggatttgagttggccgtagccatcgatggattctcggcggcgattgatagctattcttacaatttcaaaagcgccctggctcacgtgggtgacctaaacgagattggtcctgacggcgtattggatctcgtccggaagcgggtgcctaaagggggctcaatcggagttatcggaggtccaccatgtcagggcttttcacgagccaacatttcggcagagactgacgatccgcgaaacagccttccaaagctctatttggagatagtgaaggcattgcagcgggagtacgtagttgagttcctggtggttgaaaatgtactaggcattcgcgacaaaaagcacgctgctacatatgcagaattggtatcaggcattgacgaatctggtttcaatgtcaatgagtgggttctatctgctactgattttggagtcgctcaaaggcggagtagagttatccttgttgggatgaataagcatcgtggttacgcagtcccgcgggtgcagccttctcaaggggcgctgaccgttagagatgttatcgggcatcttgctgagccggttctgttctcgaaaggagtcgactgcagtgattttcctgagcatgtgaatcactggacaatgcgacccaagtcgcatcgtttctctcaggtcgtgagaccatcatccaagcgtaggagcttcaaatgtctggactggcataagccgagcccgacaatagcatttggaaatagagagattcatgttcatcctgatggtcaccgacgcattagcatctacgaagctatgctattgcagggatttccaaagcattttgtgctaaagggaaatctctctcagcaagttacccaggtttcaaatgcagtgccgcctcctcttgctaagggagtggcggaggcgatttgcagagcaatggagaatacatga

SEQ ID NO: 532387 - DNA, 522 bp, Stenotrophomonas maltophilia; identical to SEQ ID NO: 532377

SEQ ID NO: 532388 - DNA, 675 bp, Stenotrophomonas maltophilia
atgcagcgagaagccgccgaccttgccggcgtcgccctccagcgagcctgcgtcaccgggcaatgtttgcagcgtgacgaccttgcggccagcgtcgcgaccggtggcgatgcggtaggtcatcgaactcatccgcagcccatccatgccgtcgtcgctacccgcgctgtcggacaggaacacggattcgtcttcgccttcgagccagccgcggcgcgacaggtgccggcacacgcgatgcgcgatggtgttggcgacctgcgtcagttgcgcagaggtgggggcgcggcgcaggcgcggcttgcgccgcgggggctcgacgttcgcgtcgtacacgccgtcgagccacagcatgtggaagtgaacattcaggttcagcgcgctgccgaagcgctggatcagggtcaccacgccgcattgcgccgtatcccgcggcacgccggcttgatcggccaaccagccggcgatcacgcgctgcacgatgcccagcaccgggccaatggcttctggcttgctggcgaacaggaaacgcaaggggtacggaaagctcagcacccattgccgcacaggccgcgggccgaacacctcctcgaccaggtgccgcgccgactcggccatgcgtcgcgcgccgcaactcgggcagaagccgcgcttcttgcaggaatacgccactag

SEQ ID NO: 532389 - DNA, 1032 bp, Stenotrophomonas maltophilia
atggctagtgccgaacaactcaaggcgttggtgaaatcccacatcgagcgggacgatcagcacttttattctattgccatgcaggtcgccgcccgtgaagccaaggtgggccacggcaagctcgctcaggaactgcgcgacatgatcgacgcggccaaggcccgcgtctcgcccgctgatgcgacgggcaatctggtgccgctggcgcgtccccgcggcgagctggcgaacctgctgacggtggcctatccgaagaatcggctggtggacatggtgctcgatacggatgtggccgagcagcttggccgcatcttgaaggagcagaagcaccattcgcgcatccgcgagcatggcttgtcgccacgacgcaaactgctgctggtggggccgcccggcacgggcaagacgatgacggcctccgtgctggcaggcgagcttggcgttcccttgttctccgtgcggcttgatgcgctcatcaccaagttcatgggggaaacggcggccaagctgcgccaagtattcgacgccatcagcgaggttcgtggcgtttatttcttcgacgagttcgatgccatcggctcgcagcgagggctcgccaacgacgtgggcgagatccggcgagtgcttaacagctttctgcaaatgatcgaaagcgaccagtctcacagcctgatcctcgctgcgaccaaccatgtggagatactcgactacgcgcttttccgtcgattcgacgacgtgatcgagtaccggttgccgagcgggccacaagccgccaagctgctgcaagcgcgactcgggaaatttgctcccaagcccttccccctgaaggctctcacggcaaaggcggaggggttgagctacgcggaaatcaggcgcgccgtggacgagtccatcaaggaggcggtgatgcacgacgaggaccgcgtggcgtctgaggcgctggcgcgggccttcgaggagcgccggaaattcagcatcagaatgaacgataaaaaggctgtgcagaaccatgccggatcaaccgcaagctaa

SEQ ID NO: 532390 - DNA, 2355 bp, Stenotrophomonas maltophilia
ttgaagcccgcagcggccgaggccgtgcgcgtccagcaggagctgcaactggaaagcgggctgggcctgcaaatccagttcaccagccagccggatgtcgtgctggcatttgagagcttggcaaacgcgaccaagaagatcgaactcctgagcgtccgcgaagaaggcaatcgcacgctcgccaacgtcttcgttccggatggagggctcgcgcacttcgagcaatatgttgcggactacctggcggagaagaagggcagcaagaatcaggcgctcgatcatcggaagctgctcgacgccatcgaatctatccgggcagcggagatcagggcgttgtggaccgatgcacccgaactgctgccgactgatcccgccacggctttctggtgggaagtgtggcttccggttcgaggtgcgggacagcggcaagccgtggtggaggatttcaagaaactcgctcgcttggcggattgtgtggtcagcgacaagcaggtcaatttccctgagcgcacggtgctgctgatgtatggctcgcagcagcaactctcgcgctcggtaatgaccttgaactgcgtggccgagcttcgctatgccaaagagaccgccgagttcttcgatggcatggaggtggaagagcagcgccaatgggtggacgatctgctgcggcgcgcgcagttgcagcccgcagacgatgccccccgggtttgcctgctggattcgggcgtgacccgcgcgcatccgttgctggagccgttgatggacacggcggacctgcacaccgtagatccggcatggggcgtggatgaccaggctgatcacggcacgggcctagccggtctggcagcttacggcgaccttaccgatgctctatcttctgcggacgcgatcagcgtcccgcatcggttggagtcggtcaagctggtgccggcggaaggcgccaacgaaggcgatgcacggcaccacgcctacctgttctcggaaggcgtcgcccgccccgaaatctctgcgccagctcgcgcccgcgtgttcacttctgccgtgacggcttcggactatcgggatcggggtcggccgtcgtcatggtcggccgccgttgatggcctcgcggcggatgctgatggcgccggcgagaacccacgtctgttcgtactctccgctggcaacaatcgtgatgccaatgcgtgggccacgtatcccgactgcctggctactaaccttgtgcatgatccagggcaggcatggaatgccatcaccgtgggcgcttgtaccaacaagatcgacacgcaggggcatccatccctgaaccccattgccgaagcgggtgggctcagcccgttcaccaccacgacacagacctgggatcgctcgtggccgctcaagcctgatgtggtgctggaaggcggcaacgcggctaaggatgatcttggcgcatcgtggatgaccagcttgagcctgctgaccgcccacaatcagccgcaggggcgcttgttcaccaccagcaatgccaccagcgctgcctccgcgctgtgtgccggcatggcggcccggatcatggctgcctatccgcatcttcgggcggagacggtgcgcgcattgctcgttcattcggcgcaatggagcgatgccatgcgtgcaatgtttttgccggatgctccgaacaaggagcacttcgtcaacctgatccgtcactgcggctggggtgcgccggacctgaaccgcgcactgtggagcgcgggtgattccttgacgctggtggttgaagatttggtgcatccatatgcgaaggttcagggcaaaggggtcgtcacccgcgatatgaacctgcattccttgccgtggccgaaggacgagttggaggcattgcaggacatgcccgtggagatgcgtgtcacgctgtcgtatttcgtcgagcccaatccttcggcacggggcgtcgcgtcgaagtaccactacccttcgcaccgtttgcgcttcgatgtgcagcgctcgctggatgcgtctacggatcacttcattgcacggctgaatgccgccgcacagcgtgaagacgagggtgatggcgatccggtcaatccttccgatccgaactggctgctgggtggccagaggcggcatcgtggctcgttgcatcaggatgtgtggaaaggcacagccgctgaactggccagccgtggatttatcgcggtctacccatctgccggctggtggcggacacggcctgcgctggaacgctatgccttgccggcacgatacagcctcgtggtttcgatccggacgccacagacggacgtggacatctatgctgccgtggctcagaagctccccgtggccaacgtcgttgccgtggagacataa

SEQ ID NO: 532391 - DNA, 393 bp, Stenotrophomonas maltophilia
atgaacgacaaatcacacgtttatcttgaacaacacgtttgccttgtctgcggtactcgcttcgacaccggcgccgtcctactggatcgccgcctgcgcgcgagcatggagcgccacacggcaaccagttggggtctatgcaccgagcatcagaagctgtccgacgatggctttgtcgcgctggtcgaatgcgatccgcagcgcagcggctcgcaggccagtggccgcatgaagccagagcaggcgtaccgaatgggtcggctggactatctgcggcgcacggtgttcgcgcaggtgttcaacgtgccgagcgtggacgagcaggcttgcgtgttcgtagagcctggcgtgatcgagcgggtgcagtcgatgacggcgccggcagcgagctga

SEQ ID NO: 532392 - DNA, 966 bp, Stenotrophomonas maltophilia
atggccatgaatcgtgtgcagttccagccgggcctgtcgctgccggcgttcctcaagcactacggcagcgagcgccaatgcgaacaggcgctggaggcctcgcgctggccgcagggcttcgtatgcccgcgctgcgccggcacggcgcacagcagattcaagcgcgggagcgccacgtactggcagtgctcggcctgccatcgccagaccagcctgcgctcgggcacggtcatggacaacagcaagctgccgctgcggacctggctgctggcgatgtacctgctgggccagagcaagacgaacctgtcggcgctggagctgatgcgtcacctcggggtgagctatccggcggcctggcggatgaagcacaagctgatgcaggccatggccgagcgggaagcaggccgcaagctaggcgggatcgtgcaactggacgatgcctatctgggtggggagcgcaacggcggcaaggcgggccgtggctcggagaacaagcgccctttcgtgatcgccgtggagaccactgaagacggtcgtccgcggcacgcggcgatcgatccggtgcccggcttcaccaaggcagcgttgtcggactggatcgcccgacgcctgcatccgggcgcggatgtctacagcgacggactgggggcgttccgggcactggaggccgagcatgcgcacaccgtaatcgaaggcagcggccgggcccgctgcgaagagcagaatgctcgctgggtcaacgtggtgctgtccaacctcaagcgctcgctcgacggggcctatcacgccttcaggttcgccaagtatgcgcatcgctacctggctgagaccatgtggcggttcaaccgccgcttcggcctgacaacgttggtgccgagcctgttgtcggccgccgctaccagcaagccctggacagagggggccctgcgcaatgtcccagtattctctactgaaagtccgtgctaa

SEQ ID NO: 532393 - DNA, 522 bp, Stenotrophomonas maltophilia; identical to SEQ ID NO: 532346

SEQ ID NO: 532394 - DNA, 324 bp, Stenotrophomonas maltophilia
atgcggcccaccttgcgggcgaagaacagggcagacaacagcacgccgctgagcacacccttggccaggtcgtgggtggccacggtgaccaccacggtcagcagcatcactgccgacgagctgcgcggatgcgtgcgcaggtcgcgcagcgagcgccagctgaaggtgccgatgctgaccatgatcatcaccgccaccagtgcggccatcgggatctgccgcactaggtcgctgccgtataccaccagcaccagcagcagcacgccggccaccaggcaggacaggcggcctcgaccgccggaggtcacgttgatcaccgactga

SEQ ID NO: 532395 - DNA, 324 bp, Stenotrophomonas maltophilia
gtgaccgtgttggccaggccctggccgacgcactcgcggttgcgctcactgggcgtctcggtgatgtcctcgacaatctgcagggtcatcatcgattcgagcaggccgaccaccgccagcgtggctgacaccggcagcaggatgcgcagcgtttcccaggtgaagggcacatcggggatgaggaagtacggcaggctgtcgggcagctggcccatgtcgcccacgctgcgtgcatcgacgccgaagccgatgaccacggcggtgagcacgatgatcgccaccagcggcgaaggcacagagcgggtgaggcgcggcagcaggtag

SEQ ID NO: 532396 - DNA, 615 bp, Stenotrophomonas maltophilia
atggacagctcagactcagaatttgaaagcgcgcttcgaaaagctgaaggcattgtcgctgaagcattcatggatgctttcccgaagcactacatgatcagccagcgcatctttagcgtcccggaagacactgagccatttctgcgcaaactcggtcgctttctcttagattatgatcaggagcttggggcaagcccagcggcagcattggcagatggccgctcagacctgttactgaaggttctggctaaccgctccagcattgaccccgagtcaatccgagtcatctcgatgccgattcatgactcgactgaagaagcagaaaggaaacctgaatcaatctttttggcgtactgcgactattacgcaacgggcgaaggcgtcactctgatggtcggcgctggcaacaccaagaacgcagcacgcgaatcgtttctcagcaatgctcccgagtatttccatcgagggctcatcgaagataagctcgatgacagccctccaccggagacgcgccgcgccgcgcgtttgctatctgatgctatggcagagttgatcgcctcgttgccaagaggcgcgcctcagttttacgcgaagattcactacaacttggcataa

SEQ ID NO: 532397 - DNA, 618 bp, Stenotrophomonas maltophilia
gtggcggaatgggcgccgcggggcgtgcgctccatcgacttgcctaaagccgaactcccggtgtggcaggcatatttcgccaacggcgaacgcgcctacttcgggccggacgacggcaccttgctgctgcgacgtggccccgacaacgacgtgctgatgtggctgcacgaatggcatgtggcgctgctggcccacgacacgggcaagcaggtactcggcattatcggctggatctcgctggggctgctcttgagcggtttgtacctgtggtggcccaagcctgggcgctggcgatcgcacttgaaggtacacgcacagcccccggcgcgaaggtgggcgacctggcaccgcagtagcggcgctttgttgctgccgcttctgctgatggccactgtgaccggtgtagggatggtctatggcaagggtttccatgccgtgctgacggcggcgttcggtggtgccgcgccgcccacgccggtgctggcgggcacagtggagaaagtggcatgggatcctgtgctgaatcaggcgctccacgcacttccaagcgcccgtctgagccgcgcgtccaatgattcctctggcgtgattcgcaagccactttgcgtgatcggctag

SEQ ID NO: 532398 - DNA, 261 bp, Stenotrophomonas maltophilia
gtggtctggttcggcgaggcgctgccggaggacgcgtgggcgcgcgcatgcgccgcgatcgacggttgcgatgtcctggtggtggtcggcacgtccggcctggtgcatccggccgcgtcgctgccgctgcgcgcgcggcaacggcgtgcgcaggtcatcgaggtcaatcctgtcgacagtgcggtgagcgcgtacgccagcgagcagctgcgcctgccggcgagcgcgggcgtcgcgatgctgcgggagcgctttatctga

SEQ ID NO: 532399 - DNA, 354 bp, Stenotrophomonas maltophilia
atgacgcccgaccagatcgccagcttctgcctcagcctgccgggcgcccgcgaagacctcaagtggggcagcaaccgggtgttctcggtagccggcaacaagatgttcgccatcctcgattttctgggcgaggatctggccttcaaggtcgatcacgacctctttctcggctacgtcgaccgccccggcattcgccccgcgccctatctggcgcgagcgcactgggtcagcatgagcgcccgccagctaccgcttggcgaccaagagctgcgccagttgctgacccgttcccatcagttggtggtacgccgactgcccaagcgcctgcagcccggtctgctactggacgaatag

SEQ ID NO: 532400 - DNA, 777 bp, Stenotrophomonas maltophilia
atgaacctgcagatcagcaatgccctcaccctcctgcatcatcatcttggcgacaacctgctggcggtgcatctgttcggttccgccgtcagcggcggcctcaagccggcaagcgacatcgatctgctggtcaccgtccgcacgcccctgagcgatagcacgcgcaaggtcctgatgaccgacctgctgaggctgtcggcctggccggccaccgcgcacctgcgcccgctggaggtgacgctgctggtgcacgacgccgtgcggccctggcgttatcggccgatgcgcgaactgcagttcggcgaatggctgcgcgacgagctgcaggcgggtcgcttcgagccggccatggccgatcatgacctggccatactgctcagcaaggcacgccagcacgctatcagcctgctaggcccgccggctgccgaactgttcgagccggtgcctgaagcggacatgattcgcgccctgcacgacaccgcggcgcaatggaacggaccggacgactggctgggcgatgagtgcaacgtggtcctggccctggcacgcatctggctgacgctgagcagcggcgagatcgctgccaaggacgtggcggccgactggctgctcgagcgcttgccccctgagcaccggccgctgctggaaactgcgcgagacgtctatctgggccaggccagggatgacctggctcagcggccccaggcactggccgctttcatcggttatgcccggcaccagatcgagcggctacgcagcgagtcggtcaaccgatag

SEQ ID NO: 532401 - DNA, 1515 bp, Stenotrophomonas maltophilia
atgaagatctccaggctcggtgtcctcgcggccgcgctcgcgctcgccgcctgcagcacgccgccggtgcgcgagcggccgccgctgccggcggcctactacgcgcccgcgggtgatgctgcgcggccggccgatccggcggcgctcgcatactggtggcgccagttcgacgatccgctgctggcggaactggtcgagaccgcgctggtccgcagtctcgaccagcaggcggcgctggcccagctgcgcatcgcacgcgcgcaactgcggcaatcccgcgcggcgctgctgccgcggctcgatctcggcggtcaggccagccgccagatcatcaataccgatgcgctggccgacacgccgctgggcgaggaattcgatgtcggcggcgacgtcaatttcgacacctggcagctggcgctgcaggccgagtgggaagtggatctgttcggcgcgaaccggctgcgccgcgatggggccgggcgccaggtgcaatcggccgaggcacagctggtggcggtgcgcctgggcgtcgcatccaatctcgcgcagggctacgtgcaggcgcgcgcgctgctcgcccagcgtgcactgctcgacgaaggcgtgcgcatcgcgcgtgaggccgagcgtgtcgccgacgggcgcttccggctgggcgaggtcacccgactggatgtggaagccgccggcgcgcagcgcgcggcgctcgaagcgcagcgcggcgacatcgacgccggtctcgccgaaaccgcgttcgcgctggatacgctgatcgaccggccgcacggaacggtgctgcagcgcctgggcgacggcacgcgcgtgccgatggccgatgccgggattccgcgcggacagccgatggatctgttgcgccgacgacccgacgtcatcgccgcggtcgccgggctggaggccgccgaactggcggcgctggccagccgccgcgacctgttccccaagctgggggtcagcgcggcgctcgggcgcagcggggtcgcgatcggcgatctgtccggtgcttcggacctgcgctcgctcgccgcgcagctcgggtttccgtggctggacttcggcgccagccgcgcggcgatcgatctcgccgacgcgcaggccgacgccggcttcgtcgagctgcgccaggcgctggccaccgcattgcaggaggtcgagaccgcgaccgcccagctcgccgcgcgcggggcgcagcgcgccgcccgtggggaagcgctgtcacgcgccgaacgcacccgggcgatggcccgacgcacctacgaggtgggcctggccaatctcgccgacctgctcgatgccgagcgcgcatggctcgatgcacgccagcaggcgctcgacaccgagcgcgccgtcgcattggcacagatcgcgctctacaccgcgctgggcggtggctggcgtgcgccggacgccgccgcgccgcaggaggccgcggtacgcgacaccatcgagtccgtgcccgatcgcatccgcgcacccgcgtcgcccgctggcgattga

SEQ ID NO: 532402 - DNA, 3105 bp, Stenotrophomonas maltophilia
atggagatcgcgcgttacgccatccgccacccggtcaatgtctggctgctgatcctcgcctgcctggtcggcggcgtgttcgcctatttcaatctcgagcggctggaagaccccgagttcacgatcaaggaagcggtcgtgaccacgatctaccccggcgccagcgccgaacaggtggagcgcgaagtcagcgacgtgctcgaaagcgcggtccagcagctcacccagctcaagcaggtgcgcacgacgtcgcggcccggctattccgagctgcgggtggagatcctcgagcgctattccagcgaggagattccgcagatctgggacgagctgcggcgcaagatcaacgacaccgcggccagtctgccgcccggtgcgcaggcgccggtggtcaacgacgatttcggcgatgtcttcggcctgtactacgcgatgaccggcgacggcctcacccgcaccgagctgcacgaggccgccaagaccctgcgccgcggcctgctgccggtggagggcgtgggcaaggtcgagatcgccggcgcgatcgaggaacggttcgtcgtcgagattccgcaggcgcgcctcgccgcgctgcgcatcgcgcccgaggagatcgccggcgcactggccgatgcggaaaccgaactgcacgccggtgggctgcgcagcgaggacctgtacctgcgcgtcgcgcccggcggcgccttcgatacgctgcaggccctgcgcacgttgccggtggggcgcggcgatgcgcgggtgaccctcggcgacatcgcgcagatccgccgcgagttcgccgagcggccggcccagatcatccgccacgacgggcgcgaggcgctgaccatcggcgtcgccggcctgccgtcggtgaacatcgtcgacgtgggcgaggccgtcgacgcggccctggcgcggctcgagccgaccctgccgctcggcgtcgaactgcatccgatctaccagcaggccgatgtcgtcgacgcggcggtgaccagcttcgcgatcaacgtggcgatgtcactgggcatcgtgatcggcgtgctgtgtctggtgatgggctggcgcgccggcgtgatcatcggcagcgtgctgctgctgactgtcggcggcacgctgctggcgatgtatctgctgggcctgcagctcgaacgcgtgtcgctggcggcgctggtgatcgcgatgggcatgctggtcgacaacgctgtggtgatctgcgacggcatgcaggtgcggctgcgccaggggcactcggcgatgcgcgcggcgcgcgagtcggtccggctgacgcaatggtcgctgctcggcgcgaccatcatcggcatcctcgcgttcgccggcatcggcctgtcgcaggacaccaccggtgaattcctgttctcgctgttctcggtgatcctgatctcgctgctgctcagctgggtgctggcgatcaccgtggtgccgctgctgggctactggtggctggcgtcgaaggacgcgcgcgagcgcgacgacgaagacggacgcgacggcgacggcgatgcgggcgacagcccctaccggggcaggttctacgaccgctttcgcggcgtgctcgatgcgcgactcggtcgtgccggcctgaccgtgaccctggcgacactgctgaccatcggctgcgtcgtcggattcggcttcctgccgcagtcgttctttccgcccgcgtccacgccgatggccttcgtcgacatcaacacccgccagggcagcgacatccgcgccaccgacgccgcggtgcgcgaggtcgaggactatctggcccaggagttccccgaggtgctcagccgggtcgcgttcgtggggcagggcgcgtcgcgcttcatgctgacctacgcgccggcgatgcccgacagcgcgttcgcgcaggtcatcctgctggtcgacgacgccgacgtgctcgaggacatgctcacgcgcctcaatcgcgaagccgcagagcgcttccccgagctgcgcgtgcacgcggcgcggctgatgttcggcggcgcgtccgaggcgcgcgtcgaggcgcgcttcagcggtccctcgggcgagacgctgcgcgagatcgcggcgcgtgccgaggccattttccgcgacacgccgatgctcgagaacgtgcaccacgactggggcgaacgcgagctcgtgctgcggccgcggctggatctgcagcgcatggccgaggccggactcggtcgacaggacatcgcccaggcgctgaccatggccaccgaaggcgtgccgctggcggtgctgcgcgagggcgatgcgcagcgccaggtgctgctgcgcgcgccggacgacgagcgccctgcgccggaggggttgctcgatcgcctcgcctggagcgcgggcgcgacggcctacgtcccgatcgcccaggtggccgatcgcgtcgacgtggtgcaggaggacgccgcgatccagcgccgcgatcgcgtgcgcaccatcgccgtgcaggccgagccggtggtcggcgtggaggcgagcgacgcccacgccgacatccgcgaggcgatcgaagccatgccgttgccgcccggctacaccctgacctggggcggcgaattcgagagttccggcgatgcgcagacggccctgatgcgcacgctgctgctgccgtatctgggcatgatcctggtgaccgtgctgctgttttcccgcgtgcgccagccggtggtgatctggctggtggtgccgatgtcgatctgcggcgtgaccatcgggctggcgatctccggccagccgttcggcttcgtggcgctgctcggtctgctcagcctgaccggcctgctgctcaagaacgcgatcgtgctggtggaggagatcgaccgccggatggccgaaggcggcaatggccgcgccgcgatcgtcgaagcgacgacgagccgcctggtgccggtgacgatggcggccggcaccacggtgctgggcatggtgccgctgctgttcgacgatctgttcgcatcgctggccgtgacgatcatgggcggtctggcgttcgcgaccgtgctcaccctggtcgtcgtgccgtgcctgtacctgctggtcttcaaggtgccgcgcgacgacgaccgcagaaccgcggaggcacgcgcatga

SEQ ID NO: 532403 - DNA, 1053 bp, Stenotrophomonas maltophilia
gtggcgttgcgagtccgtgtcctgttgttactgagcgtgctgctggcggcctgcagcgatgcgcccgacgccccgccgccgccgcgcccggtgatcgtccagctggtcgaaagcgcgtccgccgaccgcacgctgcgcctgcccgggcgtgtggaggccgccgaaggcaccgaactcgcgttccaggctgatggccgcatcacccggtatcgggtgagcgacggcgaacgggtcgaacgcggccaggtcctggccgaactcgacgacaccgactaccgcctgcaactgggcgaggccgaggtcgccctgcggaccgccgaggccgatgtcgcccgccgccgcggcctgcgcgacgaaggcatcctcgcgccggccgcggtggaacaggccgaggcgcagctggcgagtacgcgcgcgaaccgcgatgccgcggcgcgccaggtgggattcacccggctgcgcgcgccgtacgcgggcgtggtggtgcgccgcctcgccgcggccggcgtggtggtgccggccggcgaaccggtgctgcggatgcaggatgcggacttgatcgaggtcgtcgtcgacgtgcccgagcgcgacgccgcgcgcctggcgttcggtcccgcactcgtcgcccgcggtcgcgtgctcgcgttgcccgaactgccgccgatggtcctggcctaccgtgaacatgcgaccgcgccggatgcgcagtcacgcagctatcggctggcgttgcgcggtacgccgccgccgggtgccaacgtgctgcccggcatggcggtgcaggtggcgatcgaagacccggcgcccgccacgctcgcggccggccagcaccgtgtgccggcgagcgcggtgctgagcgcggccgacgggcaggcggtggtgtggacggtgggcgaggacggcgccgcgcagccggtgccggtgcgggtgcacgcgatcgagggcacgcaggcgcgcatcgaaggcgaacttgcgccatcggcgcaggtggtcgtcgccggtgcacgcctgctgcaggccgggcagatcgtcgaaccgcgcatccggcgctga

SEQ ID NO: 532404 - DNA, 732 bp, Stenotrophomonas maltophilia
gtgcgcgagtggcgcgccgacgccggccccgacgatcccgcacggctgcgcgcctggtccggccccggcagcgacgatgcgcccttcgatccgcagctggccggggaggcgccacccgcgctgggctatcggccgctgaccggtgggctgccggcggccgggccgggcgcggccgacatgatgcgctggcaggcactgggccggggccgcatcggtgtcgtcaccgtggccgacagctggcagctgccgctggcgggccgggccgatctgcacggcgagttgtggagtgcctgggccgccgcactggcccgtccgcccggcgcggccgtggctggcttccgcggcgaggcgcgggtcggcgagcgcgtggcgctgtgcgacctggcgcccggcgcgcgcgtggtggcgcccgatggccgcgcgatcctccccgtgcccgatccggccgccgacggctgcgccggcctgtggccgcgcgcgcccggctggcaccgcgtcgacggcggcgacgtgctgtgggtgcgtggcgtcgacgatgcgcccggcatgcaggcggccgcgctgcaggccgggacccgacggctcgcgggcgccggcgccggcgcgcagacgccgccgccccgtgcggtgcctgccgtcgtctggttcttcgcctgcctgctggtcaccgcgctgctgtgggcgctgcaccgcatgcggcgcgggcgcggcggcgtcgctcccatcgcctga

SEQ ID NO: 532405 - DNA, 2787 bp, Stenotrophomonas maltophilia
atgaacgcagtagaaatcgaactagccgtcacagatctcgcggagcggcccttcgaccccgcagagttcccctatttattccttgaagcctttggcaacaaggcaacgaccatcaagcgcttgcgcgcgggggcgtcgaataagtccgacctcggcggtgttctccagaccagcaacatccatattctggcctgtgacgctgggcgggtgacgcagacattggctgcccttaaggccagtcccgcgacggccaaggccaaggcgaagttcatcctcgccaccgacggcacggacttcgaggccgaagacctgaccagcggcgagaccgtcgcctgcgccttcaaggacttcccggaccacttcggcttcttcctgccgctggcgggcatcagcactgtccgccagatcagcgaaaacgccttcgacattcgggccaccagccgcctgaaccgcctgtacgtcgaactgctgaaagacaacccagaatggggcaccgcggagcgccgccacgacatgaacaagctcatggcgcggctgatcttctgcttcttcgccgaggacaccgacatcttcgtcggcaagggccggttcacagaaaccgtcgcgcagatgagcgctaaggactcgtccaacacgcacgaggtcatcgccacgctgttccgcgccatgaacaccaagcgcgaggaccgggctgccgcaaagatttcccgatgggccgaagacttcccctacgtcaacgggcagttgttctctggcggcgacgaagtgccgcaattcagcaagatcgcccggtcctacctgctgcatgtcggcgggttggactggaccaagatcaaccctgacatcttcggttcgatgatccaggccgttgccgaggacgaggagcgcggcgagttggggatgcactacaccagtgtccccaacatcctgaaggtgctgaatccgctgttcctcgacgacctgcgggagaagttggacgaagcgggcgataacgcccgcatgttgctcaacctgcgcaagcgcatcgccaagatcagggtcttcgacccggcctgcggttcgggcaattttctggtcatcgcttataaggaaatgcgcgccatcgaggccgagatcaaccggcggcgcggcgagccggatcgggcatcagaaatcccggttaccaactttcgggggatcgagctacgcgacttcccggcggagattgcccgccttgcgctggtcatcgccgagtatcagtgcgacgtgctgtaccgggggcagaagctggccctggccgagtttctgcccctgcgcaatgaaaactggatcacctgcggcaacgcgctgcggctcgactggttgagcatttgcccgccgaccggcaccggtgtgaaggtccaagccgatgacttgttcggtactccgctcgatcaagctgagatcgacttcgagaacgaaggcggcgagacatacatttgcggtaacccgccgtacctcggttcaaagtggcagacggatgagcacaaagcggaccttggtgcaatcttcgctggtcgcatgaagaattggaagtcgctcgactacgttgctggctggttcctaaaagccgctgactacggcagccaaacaaattccgtgaccgctcttgtcgctaccaactcggtctgccaagggcagcaagtaccgattctgcggccggagattttcaagacgggacacgagatcggcttcgcgtacacgagctttaagtggtcgaaccttgctactcacaacgccggggtcacagttgttatcgtcgggatttccaaccatgcaggaaagttgcgacgcctcttttccgctggggatgatggtgcgacgacgcttcgtgaggcggagcacatcaacgcctacttgatcgccggtcctaacgtcattgtggagggggccagccgtccggccgacagcctcgcaatgatgcagttcggcaatcacccgtactacggcgcatcactgatcttttcgacgtccgaagcgcagcagatgcggtcggccgatccgcgcacagcacgcttcatccgcccgctctacggctcgcaagagttcatctccgctgtgccacgtgcctgtctgtggattgacgacgatgaggctgacgaagcgggggccattccgctgatatctgagcgcatgagcgccgtagcgagcgccaggcgcgctaagaaacaagacaaggcggcccagaagctggccgagactccctatcgctttcgcgaccagcagaccgccaagaatcacattcttgtggttccccgtgtcagctcggagaaccgtccctgcttgccggtcggattgcttgactctgacgccatcatccaagatcaagcattcgccctctacgacgctcctctctggaacctcgccgtcatcgccagccgcctgcacctggtctgggtcgccaccgtctgcggcaagctggagacgcgctaccgctactccaacacccttggctggaacaccttcccggtccccacgctgaccgaaaagatgaagaccgatctgacacgctgcgccgaagacatcctgctggcgcgggagcatcacttcccggcgagcatcgcggacctgtacgaccccgagaacatgcccgttgacctgcgtgccgcccatgatcgcaacgacgaagtactggagcgcatctacatcggtcggcgcttcaagaacgacaccgagcggctggaaaagctgtttgacctctataccaagatgaccgcttcggctgcaccggcccagggcaagaagcgcaaagcgggagccaacgcatga

SEQ ID NO: 532406 - DNA, 522 bp, Stenotrophomonas maltophilia
atgaacagatacgacgcgcgtttcaaactgcaggtcgccaaagaggcctgcaagacctccacatcggtcaaagccgttgctcgtcgctacggcctggagttctccacggtcaggcgctgggtggcgacctatcggctgcatggttggcgcgggtttcgccgccaggcccagtcctatgacctcgcattcaagctggctgtcctgaagaagatgggccaggacggcatgtccgggcgggaggccgccacttactttcaaattggcgatgccggcgcggtgggtcggtggcgtcgcctgtatgctcaaggcggtgcccaagcgctggcaccacctccgccgccgccccgaaagccgatgaaaaagacccgttcgtccaagccacctgaggaaatgagccgcgatgagctgctcaaggaagtcgcctatctgcgtgcggagaccgactacctaaaaaaactcgatgccttgatccgggaagagcaggcggcgcaggacgcaaagcgcaagccatccaaggattga

SEQ ID NO: 532407 - DNA, 990 bp, Stenotrophomonas maltophilia
atgctgagtctgaggcttcaaggaagtagctgtggacggtgtgataagcgcgaaactgccggtaaggctttcattcgaatggtgccaatagctccaaagccgtgggcgctgttggcaaccttgctcatgtgggcactgctcacggcaaacgcgtgggccgggaagcgtgattgcctcgcgtccggccttgaggtcgacacagccatgtcaaaggcgacgttgcgagtgacctcgcggggtacgcccaaactcaacctgcaggagtggcaagcatcgaaacgctcccgctccgacaaacatgtctacaccttggatatcagcaggagcctgcttcccgaaggtagaaagtatccgctgattataaagctggcgccatccactgtcgcgatcaacctccagcccttgatcaatcctgatgattcgcagtatgagcccttatgtggtgacatcgatctaggaacctcacagcatccagcaagctctcaagtgacgatattcgaaggctacgtattcttcagggatgggcggccaatacccgttccaacgctgctggcggatcaaggcgtgccacaggcgtttaggagccaatatctggattggctggagagggcccagaagttctatcggggtgccctgggacctgagccgcacagcgtgagatctgtaatcttcctgcttgatcagggtgccaatactcagcagggctgcggcttcagtggaagctcattgcccggactactgctgattggccttcgtgcgggctgcctggacccctcaaaaggctttccaattgatttgtctcacttcattgcccatgaagcgtttcatcaatggaatcaagatgtgcagatgatggattcactcccgcgagaaagcagaattatgctgctcgagggcggggcggaaatggcagcgagtttgtttctgtcggaggtgcgacgtccccccgctttcagtagcggagctgtttggagcccggctttatcgtag

SEQ ID NO: 532408 - DNA, 522 bp, Stenotrophomonas maltophilia; identical to SEQ ID NO: 532377

SEQ ID NO: 532409 - DNA, 3453 bp, Stenotrophomonas maltophilia
atgagcaatttccagttcctgcaagccgagttcaagccgctgttcgagccggcgcgtggcgcggagcaactggtgcattccgatccccgcgcctgctgcatgcgcacccgccatgcgctggaacaggcggtgcactggctgtaccagaacgatcgcgacctacgcatgccctacgagaacgggctgaacgtgctgctgacgcaggtgcccttcgcgaagctggtaccaccctacgtgcacgacaagatgcggctgatccagaaggtcggcaaccaggccgtgcacggcaaccagcgcatcggcagcggcgatgccatgcgcctggtgcgcgagctgttccacgtgctgttctggttggcacgcacctatacccgcgccagcgaccccaagagcatcgttgccgagtgggatgaaaagcaggtgccgacgttggtgcgggccgacgaggcggtggccttcactcgcgacgagctgaagaagcaggaggcgaagttccagcagcagatcggcgaactgcatgcatcgctggaagaacgggagacccgcgtcgcggagcaggcggccacgctggccgaacgcgaggcactcctggcgcaactggacgcggaactggccgcgcgccgcgcggagctggccgaagccaaggcggccaacatcgccgtgccggacggccacgactacaacgaggccgatacccgcaagcacttcatcgacgtattgctgcgcgaagccggctgggagatcggccggaacgccgccatcgaagtgcccttagtcggcatgccaaacacgccgggcgaaggtttcgccgactacgtgctctatggcgccgacggcaagccactggctgtagtggaagccaagcgcagcttcagcgacccggatgtgggccggcagcaggcgaagctgtacgccgattgcctggaacagatgaccgggcagcggccgctggtcttctacaccaacggccatagcacctggctatgggacgaccggcgtgcgccgccacgcgaggtgcaaggcttctacaccgccgaagaacttgcgctggccgtcacccggcgtgaactgcagcaggacccgcgccacctgaaggtgaacacggatattgccgggcgcgcctaccagttgcgcgcaatcaaggcgatggcggagtcgctggcgcagggccgtcgcgccggcctgctgaccatggccaccggcaccggcaagacccgcatgtcgatcgcgctggtggaccttctgatgcgggccgactgggccaagcgcgtgctgttcctggccgaccgcgtggcgctggtgaaacaggccgccaatgccttcaagacacatctgcccgattccagcccggtcaacctggtgacggagaaggacggacagggccgcgtgtacctgtccacctatccgacgatgatgaacctgatcgacgagatcgccgatggccgccgccgttacggcgtgggccacttcgacctgatcatcatcgatgaagcgcaccgcagcgtgtaccagaagtacggcgcgatcttccgctacttcgacagctacctggtgggcctcaccgccaccccacgcgacgaggtggatcgcgacacctaccacctgttcgggctggaaaccggcgtgccgaccgatgcctacgggctggacgaggccgtggccgacggcttcctggtgccgccgcgtgcgcagtcagtgcccttgaagttcgtgcgcgacggcattcgctacgaccagttgagcgaggaagaaaaggagcattgggaatcactggactggggcgaccgtgaagacgatcacccacccgacgaggtgcatgcctcggagatcaacaagaagctgttcaacgaagacaccgtggacaaaatgctgcagcacctaatgcagcacggcctcaaggtggatggcggcgacacgctgggcaagaccatcatctttgccgtgaaccagcagcatgctgaattcatttcacgacgattcgaccatcactatccgcaatacaagggtgagttcgcacgcgtcatcacccattcggtgagatatgcgcagagcctgattgacagcttcagcatccccacgaagatgccgcagatcgcgatctcggtggacatgctggacacgggaatcgacgtgcccgaagtgctgaacctagtgttcttcaaggccgttcggtcgaaggtgaaattcctgcagatgatcgggcgcggcacgcgcctgtgcccgggcctgttcggtccagggcaagacaagaaagagttcttcatcttcgatttctgcggcaacttcgagtacttcaacgaacacccgaagggtgctgccggtggattgagcgagccactgggacggcgattgttccgggccagactcgacctgctctcgctgctgggtgagcaaggtgatcggcaagccgaggcgcaggcaggttacgacggcagcgacgttcgcacctggctgctagacacgttgcacagcgaagtggccacgatgaacccggtgaacttcatcgtgcgcacggaacacgcgcacgtgacccggttctccgcgcgcgaggcatgggacacactgagcggcgccgatctggtcgacctgcgcgatcgcgtagccggtcttccgagcgaacagacccatgagcacgtcaccgccagactgttcgatctggtgtgcgtgaacctgcaattggcgatcgtccgctccacgtcggacttcatgcgcaaccgcgatcgcatcatcgaactggcctcggatctggaaaccatgcaggcgatcccggccgtgcaggccgagttgcccttgatccaggaactccagaccggagaattttggaaggacatcaccgttgccatggtggagcgcgtgcggcgtaggctgcgcggcctgatccagttcatcgagcgcaggtcatcaaagcccgtctacaccgtgctggatgacgagatcggcgaagcaacgcccatcgctcttgctgacttcagcacaggcatcaacctggcccagtatcgacgcaaggtggaggcatggatccgagccaacgaacaccatgtggccatagccaagctgcgtcacaacaggccactgacgccaaccgacctggccgagctggaacgcttcgtgtacgaggcgcccgaggtggagagccgggaacgattcgagcagtcattcggcaacgagcagccattgccactgttcattcgctccctggtcgggctggaccgaggtgcggcgaaggaagcctttgcccgattcctggacgacagccgctacagcagccagcagatccgtttcgtggagatgatcatcgaccggctggtcagcaatggcgtcatcgagccgggtcagctctacgagccgcccttcaccggcatccattacgaagggctggatggcgccttcggagatgcagatgccgacgcgatcatcggcacgctcgcgcagatcagtcggttcgccgcctaa

SEQ ID NO: 532410 - DNA, 2010 bp, Stenotrophomonas maltophilia
atgagccccttcgacatccaatcgctggccgacattcaactgctgcgcgagtcggtggacctggaatgcaagctggcgcgtggccgcgatgggcaaggtgcgctgccggacgacttctggcccacctatagcgccttcgccaataccggcggcggcgtggtggtgctgggtctgcgcgagcgcaacgacggcttcgaggtggaaggcatcgccaatgtggcgaaggtgcgcaaggaactgttcgacgggctgaacaaccggcagaaggtcagcatcaacctgctgtcggatgccgatgtcaccgagctggcattgccggaaggcacgctgctggtcatctgcattccgcgtgccaatcgtaagcagcggccagtgttcctgcacggcaacccgatgggccatacctacctgcggctcaacgagggcgaccgcacggtggccaacgaagacgtcaagcgcatgctggccgagcaggtcgaggacagccgcgacagccgcatcctccgtggctatggcctgtccgacctgtgcatggagacgtttcgtgcctatcgccaggtgttcgccaaccgcgaaccggcacatccgtggaatgcgctggacgatctggacttcctgcgtcagatcggtggctggcgacaggaccgggaaatcggcgagagcggcctgacgctggctggcgtgctgatgttcggctggatgtccaccctccaggaaaccctgccgaactacatgctcgattatcaggagcggccggaagcccggatcgagcgccgctgggtggaccggatcacgctggacggcaaatggtcgggcaacctctacgatttctatcgcaaggtctacctgaagctcaccgcggacctgaaagtcccgttctcgctggagaagggcgagcgccaggacgagacgcccgtgcacgtggcgctgcgcgaggcactggccaacgtgctggtgcatgcggattattccgagcgggcgtcggtgctggtggtgaagcggccggacatgttcggtttccgcaatcccgggctgatgcggattccgcgcgatatcgccatccatggcggcgaacacgactgccgcaaccggaccttgcacaagatgttccggctggttggcgtgggcgagcaggcgggttccggcatccccaagatctacgacggctgggcgggccagcactggcgggcgccggcgctgtacgagcgcatggagccgtacaaccagacgctgctggaactgcgcatggtcgatctgctgccggaagacctgctggccgggttgcggaagacctttggcgccggtttcgacgcgcttcagcgcaacgagcgcctgacgctggcggctgcggcctcggagaagaccgtgacccatgcccgggtgatcgagatgacggggctgcacccggtggacgcgacccgcctgctccagtccctggtcaaggaaggctttctggaaagccacaatccgggccgcggagccgtctactgcctgcccggggcggcccttccccggccggaggaagtgttcggcgaaggttccgccgttgtgcccaaccgctccgcacatttgggctccggctccggacatttgccgggccgctccggacatttgcccgccggctccggacatttgcagccggcggagcccggccaagctattgaaaatcaaagagatgaagccggacgattgatcagcaggcagttggatgcccctgtcctggacgccttggagcagctcgctccggcattccgcaccgcactggagggcatggccgcgtcgccccggagccgcaagaagatcccgaaggcagcgatggaagacgtgatcgtcgccctgtgcgcaggccactacatcaccggcacctgcatcgcgacattggtcgatcgcgatcccgatgcactcagaaagcattacctgaggccactggtgcaggcgggccgcctacgcttcgcgttcccgaccgcacccacgcacgccatgcaggcttatcgcgccacccagccctga

SEQ ID NO: 532411 - DNA, 1191 bp, Stenotrophomonas maltophilia
gtgagaacagtcccactcggtgacgtttgccatgtcacaacggggcagtccgcaccccaggaaagtaccgcttttggatcgtctggcaccccattcgttcgtgctggaagtctggagcgactttgtgcgggtggcagtgaagaatcattggaacttgtgccttcggatcaggccgtcaagtttcgtctgaagaaattcccaaaggacaccatcgttttcgcaaaaagcggtatgtccgcgaagcttggtcgggtctatcgattgcgccgcgaatgccacgtagtcagccatcttgcggccgtcctgccatccgcggatgtcgatcctgcgtacctgcttcgctggtttgagtacaaccctccgtctcgactgatagagaacgacgcctacccatccatcaagacatctgagctggagaagatcccagttcaactcccggcgattgcagaacaacgccgcatcgcggcgattctggacaagaccgacgtgctgcgcggcaagcgccgcgccgccatcgccaagctcgaccaactgctgcaatccatattcctcgacatgttcggcgaccctgtctcgaatccgaaaagttggccacgggttccgttcagtgaaatccttgaacgcatcgaaagcggcaacagccctgtttgcttggatcgagccaagaacgagaatgagtggggtgttctcaaactcggggcggtcacacgctgtagatttgacccttcagcaaacaaggcattgccgaatgaaacatcgttcgatgaaaggctggaggttaaagtaggcgacttactattcacacgaaagaatacgtatgagcttgtcgcagcatgcgcatacgtgcatagaactcccgaacgcctgcttttgcctgatctgattttccgtctccggctcaaagagccagcactcgctcacccaagatatcttcagtccttgctgacttatccgaggaagagaagtgaagtacaaagcctcgctggtgggtctgcgggttcgatgcccaacatttccaaagcgaaactcaacaatgcgttgattgaacttccgccattctctttgcaagaaaaattcagcaggcttgtcgagcatatcgaacaacataggcatgccttgcaacgccacgccacccaactcgacaccctcttcgccagcctgcaacaccgcgccttcgccggcacgctctga

SEQ ID NO: 532412 - DNA, 1485 bp, Stenotrophomonas maltophilia
atgatgacaggtaccctcaagtcccagatcgaccgcatctgggatgcgttctggagcggcggcatttccaacccgatggaggtcatcgaacagatgacctacctgctgttcatcaaacgactggatgaggagcagacccgccgcgagaaaaaggcagcccgtaccaagagcgaggttgaggatccgattttcaacaagcgccagcagaagctgcgctggtcgaagttcaaggaactgggtgatccggccgagctctatcgggtcgtctccgaggacgtgtttcccttcatcaagacccttggcggccatggcggtgaatccgcctatgcgcggcacatgaaggatgcacggttcaccatccccacgccggcattgctggccaaggtggtggacatgatcgacgacgtacccatggacgatcgcgacaccaagggcgatctgtacgaatacatgctcggcaaaatcgccagtgcagggcaaaacgggcagttccgcacaccgcgccacatcatcaagctgatggtggacatgatggcgcccacacctgaagacaccatttgcgatccggcctgcggcactgcgggctttcttgtggctgccgccgagtacctgcgtgatcaccacggcgtggccatctacaaggacaggaagtccgccaaacgcttcaacgcagacaccttccacggcttcgacttcgacagcaccatgctgcgcgtgggtgcgatgaacatgctgctgcacggcatcgagcagcccagcatcgagaaccgcgactcgctcagcgagggccatgccggcgtggccgggcagtacagtctgatcctcgccaatccgccgtttgccggcagcctggactacgaaagcaccgccaaggacctattgcagatcgtcaagaccaagaagaccgagctgctgttcctcgccctgttcctgcgcttgctgaaacccggcggccgggctgcggtcatcgtgcccgatggcgtgctgttcggctcatcgaaggcccacaaggaactgcgccgcatgctggtggaagaccagcggctggacgggatcgtctccatgccgtccggcgtgttccgcccctatgccggggtgtccactgccattttgttgttcaccaagaccgacagcggcggcaccgacaacgtctggttctacgacatgcaggccgacggctacagtctggacgacaagcgcaacccgctggctcccgacaagcacgatagcaacaacctgcccgacatcctcaatcgctggcaccatcgcaaggccgaagccaagcgcgagcgaaccgagcagagtttcctcgtgcccaaggccgagatcgtcggtaacggctacgatctgtccatcaaccgctacaagcaggtggtgcatgaggcggtggaacacgacccgccgaagaagatcattgcggagttgaaggcgctggaggcggagattgctgccggtgtagccgaactggaagggatgttgtcgtga

SEQ ID NO: 532413 - DNA, 630 bp, Stenotrophomonas maltophilia
atgaacagactcatgccacgcgcggcactgcaagcaattcaacggatcgggcaagcgctggatccgttcttcgccggacgttggtactggtcaatgacgcgctggattgcagaacggcaactgcagcatgcgctggatcaacatggtgaccggtccatgcaggtacggcaggcgaccgagcgatatcgcagagccgactttgcggttcgttactggcgctcggcaccggggcctgtgatgcggattgcggaacaggccctggatgcgggtgttcccatgcatgccatccgccttcttgttctcaacaccgatctgagaattcgggatggacaggttcatctgcgccgccccttcatcgtgactgttctgaacaccgttctcgcgaccatcgtcggtgtgcacatgtttctgatgtgcctgttggctgtcacggcgccgggcccgacgtggctgaagatcacggtcatcttggcggtcgccttcgtctactgctttctttactacggatggtcgctttatacatcacgcccccagcaaatcatcgctgagcatggccagaagctcgatgcgatttgcatcgcaagtacaacgcgatcacgcgcagaagtccgcaacattgcaccgtattga

SEQ ID NO: 532414 - DNA, 411 bp, Stenotrophomonas maltophilia
ttgagctttggcaggcgtctcagggaagctagggatcgactacgcctcacccaggaacagttcgcggaactgggcggggtcaagcgcgtgtcccagcacctctacgagcaggacgcccgggtacccgacctcaattacctcctacgcctcaaggaacacggtgtcgatgtgggccacctcgtcctaggcaatagcgtcagccgtgcatcggcaacgccaaactccacagatctctacgtagcagcgttccgtaccgttgacgagttcgccagggacgacgccggcaaccctcttccctacgccgagcgcgagcgatttttctctttcctctgcgcgactctctcgcaaaccggaaagccggagtcgagcactgagctgaaggaacggctggtgaggtttatgcgtccatga

SEQ ID NO: 532415 - DNA, 285 bp, Stenotrophomonas maltophilia
atgaatgcaagcatacccggggccaaggccgatgcgatacggcaggagttcgcccgccggggtgtatcgatcagcgcatgggcgcgcgcccatggctactcgaagcaactcgtctaccaggtgcttgccgggcggaagcggtgcgtccgcgggcagtgccatgagatcgctgtgcgtctgggattgaaagacggggtgatcggcagcgtagccgacatcgacgcgctgggcgtcggcgccggttcgccacggccctgcactgacaaggagggaggtgctcaatga

SEQ ID NO: 532416 - DNA, 858 bp, Stenotrophomonas maltophilia
atggcgaagcgcagatacgacttcgacgaagccaagatcacccgctatcagaaggaagggcgtggcaccgggaacggcaaggaatacaagccgtggttgaccattcacgacgtcccatcgctggggcttgcctcgagaactttcggattcaagacagggcgggaacaccattgcctgtcgaatctggagtcggggttccttcgtatgttggagtggtcggattcggtgttcgatattcgcgaacagtttccgctggaccgggaagtcacgcgcatgctggccgggaagatgggcattgagcatccgcgcgatccacgtacacgagttgacgtagttatgacgacggatttcttggtggatatccgagtcgatggccgggccagatccgtcgcctacgcgataaagcccgcccaggagattgaggacgacaagacgggtccgaggacgatcgacaagctcgaactggaacgtcgctattggagccgcgaccggattccctggtatctggtgacggaccgggagcttccgaagcaacggatccgcaacctggcatggctgcacgaaatgcgctcgctccaacacgaatttgcgccgcatccggactattggacggaccggtgcgaacagttcctcgtacagtgccagcgagtccgtggcggttcgatcagggacttcttcatgcacttggagggcacgtgccggttcgcggccggcgagcctctgaaggtgctgcgccatctggcggccaacaagcgagtggtcatcgacttggacagggagttttcggatcgagaccggtttgatgtgctgcgtgtctccgctcaggagcagccccggctgcaggtggtgggcgcatga

SEQ ID NO: 532417 - DNA, 2202 bp, Stenotrophomonas maltophilia
atgatgctgaaggtgggagatgttctcgatctagagcctggttcaaacaagtgggtcagaatcgtgtggatggcggccgagggaacaacgctggccatttacccgctggatgcggatcgggcctttccggacctggttccggccgagccgctggtagctggactccgtgcgagagaggtggcgcttgtggaggaccctttcatggtcgttgccatggaagacaagttgaaacaaacgcataggagccggcgcgaccgtgcctggaaaataatacagccgctggtggctgaggtgccgtacatcttcagtgcagaccggcgcggcgccttgatctcggacgctgttgagaaggccaggaagggcgatgaccccgacatcaaacgaatcaccacggcacaggtctatgtgtacctccgacgctactggcaacgtgggatgacggccaacgccctgcttccggattacgaaagatccggtggccggggtaagactcgaaaggcaggagagaagaaacgaggtcgaccacggaaattcggcaagcaagtgggcaccaacgtgacccccgatatccgaagggtgttctctatagcctatgaccgctactacgccagtcaggtccatgggaaatacacgctacgtggcgcctacaaaaagatgatctccgagttcttttcggtgaaaggcaccgatccggagactggcaggatcgtgcatatccggcaggagcaaatcgaggcgcagggaggaattccgtctttcgatcaatttcagtactggtccaacaaggatcaccttcgcctggagatcaagcgcaagcggatgggagcgaagcgctatgacaaggatatgcgtggtctgctgggaacctcgaacgcgcaggtgatcgggcccgggagccgctaccagatcgacgccacgatctcggatgtctacctggtctcgcggctggatccgagcctgatcatcggtcgtccggtcgtttacgttgtgatcgatgtcttcagccgcctgatcaccgggatctacatcggcttggaggggccttcctgggtgtcggcgatgatggccttggccaacaccgcgacggacaaggtggcttactgcgcccagttcggcatcgccatccagcctgaagattggccggcgcaccacctgccgggcatcctgctgggcgaccgcggcgagatcgaaagtgagaaaatcgacaccctgatcaacagcttcaacgtcacagtcgagaatacgagttcctaccgcgccgattggaaaggcgtcgtggaaagtcgctttcgcttgcttccggcgaagttcaaggcgtacacgccgggctacatcgacgtcgactaccggcagcggggcggaaccgactaccgcctcgacgcggtgttgaacctggatgatttcaccgagatcatcatcaactgcgtcctccactacaacaactcgcacgagatcaagtgctacgactatgaccgggacgtcagggccgacggtgttccatccattccctgcgatctgtgggagtggggcattcgccaccgttctggcgcactgaggacctttccacaggaactggtgaagttcagcctgatgccgaagggtcaggcgtccgttaccgaaaccggaatcgcattcaggggccgctattacacctgcaagcgcgcgatggaggatcgctggttcgacaaggcccgccaggatggtcgttggaaggtggtcgtgtcatacgacccgcgcgacatggacacgatctacctgcacccggcgggggtcaagatggcattcgaggaatgcacgttgaccgaccgtagccgcgccgatcggcatctatccgcatgggaaatcgaccaggtcgatcagcgcgataagcatcgccgggcggatggacgcacagatgcggtattggcgtcgatggacaccgacgccgctaacgagcaggtcatcaagaaggccttggcgcgacgtgggccgccgagccaggccagcgcggccagccggaccgcaaacatccgcgataaccgcgcagaggaaaaggatgccaatcgtgccagggagactttcaggctcggcgaggacgtgtccgggccgactgggccgagcgccaacgtggtgccgattcgaggcaggccagcaccgacggacgataccgactacagcctgccgactatcgacgaaatcctgagggacgacgatgaccagtga

SEQ ID NO: 532418 - DNA, 1620 bp, Stenotrophomonas maltophilia
atgaccagtgactgcgtggcgttttcactgcctgagtatgacgacaacccttttattgcccagttgcctccgatcatgggccagaaagatctgtacaaatcgttggtaagtgcgcctatcttccgggaatcggagccgggatttccggcgcacctgcgcaagcactgtatcgccagactctccaagtgtttcctgccgctggcccgtcaggtcgagttggcggatcggttcggcatgcttttgcgacagggttacctcggtcgcaacccactgactcacgactacctgcatcacctgcacaacgggatcgagcggatcgaagccggatcgctggaggtcccggtatcccagccggtgcagaacacagccaacagcttcgcgctgctgggatgtcccggcgtaggcaagacagtggcgatgaaccaggtgctggcgcagtacccgcaggtgatccaacacgatgctcccttcagccttacacaggtcgtctggttgcgactggaagcgccggcgctgggatctcttcgcaatttgtgtatcgatttcttccatacggtcgatcggctgatccacaccgattacgtcaaacgatacgcgaccaagacgaccgtcgagcagatggttgcgtacatggcacaggtggccaacctgcatgcgctgggcgtgttagtcatcgacgagatccaacatctgcggggtgccaaggttggtgctgcggcgctgatgaagttcctggtccggctggtcaacaccattggcgtaccggtgattccgatcggcacgttgagtgccctgccgattctgcagggaagcttcagccaggcacgccgcaacacgggtttgggctccatgctgtgggaccggatggatccgggcgctacttggaacagctttctcgaacaactctgggggtatcaatggaccaacccgcgcacaacgctgacggatgagctgaacgctgctatctatgacgaaagccaaggggtggcggatctggcggtcaagctggtcatgctcgcgcagatgcgactggtcgggatcagtgaaatgcgcaagggccagtccgaaaagatcacgacggagttgattcgggtcgtggccaaggaggaactcgcgatggtcgcgccgatgatcacggcgttgcgcgagaacgacacggtcaaggccgccaagttcgatgacctgcgctcactgaatgagcacgttggactggtactcagcagggcgatcggtggtggccgtgcgcaggacagcgttgaagcgccaccgcctgctgcgacggctgcagcaccggcgtcggcatccatggaggcggtgctcctcacctcgttgaaagggatgggtgtggccgaagacgttgccaaggcactggtggcggaggcagttgccaacaatccgtccggcgacccgctgacgctgatgcagacgatcacggcgacgttgaaggcaagtccgcctgtcgtaaaaccaccgaagccgaagaaggttcctgttgacgagctccccgacgaagatttgcgtcggatcgtcgccaacggcaagcaggcgggtgcggcggcctacgacgcgctgttggctgctggcgtagtgcgtccaccgatgctggatttcgcggcttga

SEQ ID NO: 532419 - DNA, 1731 bp, Stenotrophomonas maltophilia
atgttgggctacttcccgcaggtgtatccgcaggagctgctgtacagcgtactcgcgcgatatcaccggcacatgggtgcgccgtcgttcatccagtccatggaatcgctgtttgggcgcaggctcgtcatcgcgaacccggatctgcccgaacacatcgacgccctcgcggcgcgcattccacccggtcgccacctggccgcggatcggatcatcgacacgatgacactgtatccgtactacacggcataccagagtcaggatgtcaggcagcaggttcgccacgccatgcgggttggcgaagatggcagcgtgctgctgcggctcggaatcgcggcgtttcgcgcggggagggtcacgcagctgcggttctgcggaagctgcctcgcgcaaatgcgcgagcgctacggcgaactgtattggcgccgggaccatcagttgcccagcgcgctggtctgtccggaacacgccaagctgctacaggttggtacggtacggctgactggatgtagccgtcaccgcttcgtgccagcggatcggcagacctgcccttggcgcgcaccggcagtgattcaggacgtcgcgacaccgattgtcgagacgctccatcggttggcggtggctagtgcggcgttgctcgatgatcccggtcctcctgtgacgccgcaggcgctgacggcgttctacagcagtgcggtgcaacggaccggtctggcatcgctgaacggccgagtcgaccaacgccagttcgatcaagcgtttcggcaccactatcgcggtggcctgcccatgctgcccggcgtgatgacgggcagtcggttcaccggggactggctggcggcatttgttcgcaaacaccgtaaggcgcgccacccgctccaacacctgatggtgcgtgacttcctggcgtcgagagactctgcgggacggccgtttggtgaaggcccatggccctgctgcaatccgctggcgagccaccggggtgaggcggtggtgtccgactgtcgatttcaccgcaatcgggcgcattgggtcggcgtgttcacctgctcatgtgggtatgcctatacgcgcagcttccatccggacacgggcaaggttggagcgccgcggtttcaggcgttcggcccatcgctcggatccgtgctgggcgaaatggtcgctgccggctgctccttgcgggagatcgcccgcaggctggagatcgatcccaagacggtcctcaagctggcggccgagtttggcatcagaacccgctggaaagcagtgtcggacagatcacccggatcgcccaggaaaactcctacagccgtcgcgagatcgccagagcccagcaggaggcgatcagcccgctgtccccggaggaactgggtcgagatcgacacgcaagtggccaccaaggttcgggaggccgcggaactgatccgggccgagaccccgttggtgcgcgtcacgacaacggccgtcgagcgtcggttctggaatcgtggctggatctgcaaacgggctaccaagttgccggtatcgatgcaggcgttgggtgacgtggctgagtcgctggaatcgtttcagcgccgacgagcgtggtggacgatcctgaacatggatcgtgccgatgagccgcttcaggtgtggcggatcctccgtaaggcaggtctcaccgaccggcacacctcaatggtagagggtctgctggccacccacttcaatcgggggcaggccgccgcatga

SEQ ID NO: 532420 - DNA, 1626 bp, Stenotrophomonas maltophilia
atgaggcgcatggtcttccgctcgatcgccaagctgggaagcgcgccgatggaactattctggttggcgggcctggtacggaacgagcgcaacgagtggaatgtcctggcggtctataggaacactgagacaggcgagctaagccgcctcgagcaacccatcggcatgttgccgatcatgagcgtgggcattcggttcgagcacggcgtgctgaaggtcgacgagttgcccggcgaagtcatggagatcgtgatcccggatatggggcgcccggacatcatcacttcggccgaggtcccgttcgagctctatcctttgccgcagggaaagtccggaacccagcggctgtttcgttatcgaacgcaaggcgtcgaggttctgatcccggtcattgagctggtccgggcattgttcctgcacaaccggacactggccctggccctgatgcggccgagcggactggagcagttgttcgtgccgcagcatccggggcagcgggagatcgctatggtgcaattcacgcgggagatgcccaagagcgtgatcggaaaggcattggcactggagttcgcctggatcgttctggaccgagatgctcggcgctcctgggacagcgtccagcggctgacggcaggacagcgccacgtcctgttcgacccaccctcgatccggagctcgaactgggtatttcgcggggtgcgtcacggcaaccagtggctggtgcaggaactcaagttcgtcggcggcagacgcctgccgttcgccaaactggaatacagccacccggccttcacgaaggttacggctctgttgtctggagggggcggggatcctgcgccgggtccatcggcaccggaaggcgatgaagaagcttcaaccgtgaaggacttcgacgtcgatgatggcgaagaaggcagcaccagctaccggggcccgcagatcgtggacgccccggcccgaagatctgccttcgagaactctgtgatagtggccaaggcggccgcggaggtgaaacatcatggcaagaagcccggcaataaggccgcaaaacgcccgaagaacaagcgaacccgcatcgtcgaggtcagctcgggcgagcgcgcgggcaccgccaagctacctccgctggagttccgtttgctacatgcggcaccagacgtggaaatgggtgatctcgatgcgctcgatgaaaccgtacgccacatgcgcgaccaactacccgacgtacacttcgcgatgacacttgtgcaactcaaacaaggtcatgcgtcctcgaccattggtgctaggccccgtcctgccatggtggtgacgatagacccacacaaccaagagatcattgttctcatcgacatcgagcgcaccggtgttatagccctgtcgttgatgtccatgagattcccgcgtgggtcgtcaccccacgtgatcgaggatgcagttggcaagatgctcgacggttgggtcgagctcggcggtcactggtctacggagttagagaagacgcttgaagatatctgtgcctgtgagcgcgttcccagggtgctgatcccaagggagaaatttcgacacagcgcaaagatgtgggccaatcggttaatggatcgattaggcttaaccagcagttga

SEQ ID NO: 532421 - DNA, 522 bp, Stenotrophomonas maltophilia; identical to SEQ ID NO: 532346

SEQ ID NO: 532422 - DNA, 522 bp, Stenotrophomonas maltophilia; identical to SEQ ID NO: 532377

SEQ ID NO: 532423 - DNA, 522 bp, Stenotrophomonas maltophilia; identical to SEQ ID NO: 532346

SEQ ID NO: 532424 - DNA, 255 bp, Stenotrophomonas maltophilia
atgcgcggcaggtacagcaccgtcgccgatggccagggcgcgttcggctacaacgccgccaacggcgagttcggcgacatgatcgagttcggcatcctggacccgaccaaggtcacccgcaccgcgctgcagaacgcggcgtccatcgccggcctgatgatcaccaccgaagcgatggtggcagagctgccgaagaaggaagagccggcgatgccgggcggcggcatgggcggcatgggcggcatggatttctaa

SEQ ID NO: 532425 - DNA, 336 bp, Stenotrophomonas maltophilia
gtgaacctggccgaggcaggcgaacacccggccgtgcgcgagcgactggtgttgatggggcgcaggctctcccgcttcgggcacgtgctgttcggcatcgcgctgctgatggggctcacgctgtggctgcacttcggtttcgccggcggctggctgcacgccaagctgttgctggtcacgctggtgttcgtcttcagcatcgtcatcgggcgttggctgaaggctgccgaagccgggcgtccgctgccgtcggcacgtgcattgcgctggatcaacgagatcccgctggtgctcctggtcggcatcgtctatctggtggtcggcaagccgttctga

SEQ ID NO: 532426 - DNA, 1197 bp, Stenotrophomonas maltophilia
atggacacgtccccgcaactgctcgagaaggtcgctcaatatcccgccatcgccctggtgctccagggcggcggcgcgctcggcgcctaccagtgcggcgtctatcaggcgctcaacgaggccggcatccgccccaactggtacgccggcatctcgatcggcgcgatcaacgcggcgatcatcgccggcaaccggccgcaggatcgcatcgaacggctgcgtgatttctgggaaacgatctgcgaacccgcgggcctcgccagctggccggcgatgggcgtgcgcgccgggctttcgatgctgccgatgaacccggctctggaaacctgggccgcgacgatgagcgccctggccgccttgtggcagggccagcgcggcttcttcaccccgtggccggcctcgcccttcatgcgctgcgacggcacgccgcaggccaccagtttctacgacaccacgccgctgttggcaatgctcgagcggctggtggatttcgaccgcatcaacgatgaccgcacggtgcgcctgaccgttggcgtcaccgacgtggagagcggcaacttccgctatttcgacagccgcgacacccggatcgggccgaagcacatcctcgcctcaggctcgctgccgccggccttcgcgccggtagagatcgagggccgccattactgggacggcggcgtggtctcgaacacgccgctggaacacatcctcgacgaatggccgcgcgaagacacgctggccttccaggtggacctgtggagcgcgcgcgggcagcggccgcagacgatgatggacgtgctcgaacgcggcaaggacatccagtattccagccgcacccgccacggcaccgatacggtcgcgcgcacccagcagttgcggaccgcgctgaacgacctcatcgcccgcctgcccgaaggcggactgcccgaaagtgcccgcgaggcactggcgccgtggctggacgatcgcgtcatcaacatcgtccacctgatctaccaggccaagccgcacgaacagcagttcaaggactatgcgttcggccgcatcagcatggagagccattggcagagcgggctggccgatacccggcagacgctgtcacaccccggctggttcgacctgcccgaccgcgaccacggctacgcggtacacgacgtgcaccgcgtcacgcagaagaagcatctgacgcgcttctga

SEQ ID NO: 532427 - DNA, 792 bp, Stenotrophomonas maltophilia
atgtcccgaatcgaacttgatggcaaggtctgcctggtcaccggtgccgccagcggcatcggcaagcacatcgccgaaacctatgccgccgccggtggccgcgtcgcgatcgccgacctgaagctggacgccgcggaagccaccgccgccgcgatccgcgaatccggcggccaggcgatggccgtggcgatggacgtcaccagcgaatcgcaggtggtcgaaggcgtcgcgcagatcgccgccgaatggggccgggtggacgtgctggtctccaatgccggcatccagatcatcaacaagatcaccgagttctcgttcgaggactggaagaagatgctcgccatccacctcgacggcgccttcctgaccacccgcgagtgcatgaaggacatggagaagcgcggtgcgcccggcgcgatcatcctgatgggctcggtgcactcgcatctggcctcgccgctgaaggcgccctacgtcaccgccaagcacggcctgctcggcctcgcccgcaccatcgccaaggaaggcggcaagctcggcatccgctccaacgtgatctgcccgggcttcgtgcgcaccccgctggtggacaagcagatcccggagcaggccaaggagttcggcatcagcgaagaggaagtgatccagaagatcatgctgaaggacaccgtcgatggcgaattcaccacgctcgacgacgtggccaacgtggcgctgaccctggccgctttcgagaccaacgcgctcaccggccagagcatcgtggtgagccacggctggttcatgcagtga

SEQ ID NO: 532428 - DNA, 939 bp, Stenotrophomonas maltophilia
atgggcaagcgcaagcggacccgcaaggagatcttcctggccgagatggatcaggtggtgccgtggaaggcgctgctgaagctgattgagccgcactatccgaagatgggtcgccctggccggcagccgtatccgctgtcaacgatgctgcgggttcacttccttcagcagtggtacgcgctcagcgacccggccatggaagaggcgctttacgacacagcggtgatgcgccggttcgccgagctgagcggtttggacgacatccccgacgagaccacgatcctcaacttccggcgtctgctggagacgcatgacctggcgccgaagatcctggcgcgggtgaacgcgcacctggcacgcaagggccagagcctgcgcgcgggcacgatcgtggacgccacgatcattgccgcgccaagctcgacgaagaacaaggatggcaagcgcgatccggagatgcaccagacgaagaagggcaaccagtggcacttcgggatgaaggcgcacattggcgtggacgagtattcggggctggtgcaccacgtggagtgcacggccgcgaacgtcggcgacgtgacccaggtgcacaagctgctgcatggcaaggaggatacggtgtgcggcgacagtggctacaccggcgccgacaagcgcgaagagctgcagcacgttgccgtcggcttcctgatcgcggagaagccgtcgaagctgcgggcgatgaagaacaagcgtgaccgcaaatacgccgagcgctgggagcgctacaaggccagcgtgcgcgcgaaggttgagcacccgttccgggtggtgaagcgccagttcggttacgccaaagtgcgttaccgcgggctggcaaagaacactgcgcaggtgctgacactgttcgcgctgtcgaacctgtggatggcgcggcgagatttattggcggctgcgggatag

SEQ ID NO: 532429 - DNA, 813 bp, Stenotrophomonas maltophilia
atgtattacagcagtggcaattacgaagccttcgcccgcccgcgcaagccagacggggtcgacggcaaatccgcatggttcgtcggctccggcctggcctcgctggccggcgccgccttcctgatccgcgatggccagatgccgggcgagcgcatcaccatcctggaacgcatcgacgtgccgggcggcgcactggatggacttgagaagccggacaagggcttcgtgatccgcggcggccgcgagatggagaaccatttcgaatgcctgtgggatctgttccgcagcattccgtcgctggaagtcgagggggccagcgtgctcgacgagttctactggctgaacaaggacgaccccaatttctccctgcagcgcgccaccatcgaacagggcaagcctgcgcccgacatgggcaagttcacgctcagcaaggccgcgcagaaggacatgctcaaggtcttcatggccacgcgcgaggagatggagaacaagcgcatcaacgaggtgttcggtgaggacttcctcgccagcaacttctggatgtactggcgcaccatgttcgcgttcgaagagtggcattcggcgctggaaatgaagctctatctgcaccgcttcatccaccacatcggcggtctggcggatctttccgcgttgaagttcacccgcttcaaccagtacgaatcgctggtgctgccattggtgaagtggttgaaggaccagggcgtggtgttccagtactgcaccgaggtgacagatgtcgatttcgacatcgatgccaccaacggacgcaagcaggccacgcgcatccactga

SEQ ID NO: 532430 - DNA, 1374 bp, Stenotrophomonas maltophilia
atgttgaacaagaagaatgcgctggccattaccgtgggcgcgatctgcgccgccgccagcggggcgggtttcgcctcggcgcttgaccgctccggccagtccatcgcgccgttcctgaagccgggcaactacgccgagtacggcggcagcttcctcaatcccaaggtggacggcaaggacaagaacggcaccgacaccggcaacgtggccaacagctacaacttcgtcggcggcgcgatcaagttccaggccaccgacaagttttccttcggcttcatctacgacgagcccttcggcgcgtcggccgagtaccacggcgccaacgcgttcaccgccaacccgcgcgacgtggtgctgagcggcctgccgatcgtgaccggccccagcgtcatcagcaacggccagctggccgcctatggcctcaatgccggcatcaccggcgacaccgacgtggaagtgcgcaccaagagcctgtcggcgctgctgggcttccagccgaccgaaaactggaacctctacgccggcggcgtgtaccaggagatcaagggccaggtgtcgctgcgcggttcgacctactcggccttcaacggctacgacctgtcgatcccgtccaagcgcgactggggctggctggccggcgtggcctaccagaagccggagatcgccctgcaggtctcgctgacctaccgctcggagatcgactacgacatcaacgccaacgagtccatgccgctggtcaccgcgctgggcgccaaccgcgcgcagctggccggcctgatccagcagttggtgctggccggccgcatcccgccggccaccggccaggcgctggccgggacgctgggctcgctgggcggcctgggcggcggtaccacctcgatcaccacgccgcagtcggtcaacctggatttccagaccggcatcatggccgacaccgtgctgttcggtaacgtgcgctgggtgcagtggtccaagttcgcggtgcgtccggcccagttcggccagctcgccgaggccgtcggcccgctgatcggcaagcccgatggcttcaacctggtggactactccaaggaccagtggtcggccaacctgggcctgggccgcaagctgaccgacacggtgtccggttcgttctcggtgggttgggatggcggcgccggcaacccggtgaccaccctgggcccgaccgatggctactggaacgtcggcctcggcctgcgctacagccccacgcccaagatcgacctgagcgccggcgtgaagtacttctggctgggcgacgccaaggccgagaccggcgcgcacagctacgccggcgatttcaaggacaacagcgccatggccgtcggcgtgaagatgggcctgcacttctaa

SEQ ID NO: 532431 - DNA, 726 bp, Stenotrophomonas maltophilia
atgagcttcgcttccgattcgcccttgccgcctctcgcgctgctttacgaggacgcccacctggccgtggtcgacaagccggccgggctgatggtccacgacagcggcctggcccgcggcgaggaggtcttcctggccgacctgctgcgcgcgcagctggatcgtccgatcttcctgatccatcgcctggaccgcggtaccagcggctgcctgctggtggccttcgaccgcgacaccgcctcgctgctgggccagggcttcatgtcgcgcgaggtggagaaggactacctggccgtctgtcgcggctggcccgaggatgcgttcaccatcgatcatgcgctcgacggtggcccgggcaagccggagaagaagccggccagcaccggcttcgtgcgcctggccacgggcgaactggatgtcccgtccggcggtttcgacacctcgcgctacgcgctgctgcgcgcgcgcccacacaccgggcgcttccgccagatccgtcgccacctcaagcatgccttccatccgctgatcggcgacaccagccatggcgagggccggcacaaccgcgccttccgcatgcgcggcgtgtaccgcatgctgctgcacgcgcgccggctggcgttcctgcatccgcacagcggcgcgcgcatcgaggcgctggcgccgctggacgcgcagttcctccgcgcgctggacctgttcggctgggaccgcgacgcgcgctga

SEQ ID NO: 532432 - DNA, 1731 bp, Stenotrophomonas maltophilia
atgtcccgcatgctgctgctgggcctggccacgctgaccgcgctggccgcctgcaagaagccggaagcgccgccggcgccggccgcgtccgcccccgccgccacgcccgagcccacccaggccgcggccgcgccgcacgccttctcgccgaagatcgaggccggcgacttcggtgaactggtcaagacgctgtcctccgacgccttcgagggccgtggccccggcacgccgggtgaggacaggacggtggcctacatcaccgagcagatgcagcgcatcggcctgaagcccggcaacggcgacagctggacgcaggacgtgccgatggtggaaaccaccgccgacccgtcaaccgcgctgaccatcaccgaggccgacggcagcacgcagaccctggccttcggcgaccagatggtgatcggcacgcgcaccggcaagcccgagatcgacgtcaaggacagcgagctggtgttcgtcggctacggcgtggacgcgcccgagcgcaagtggaacgactacgccgggaccaagagctggaaaggcaagaccgtggtgatgttcgtcaacgaccccggcttccacacgcacgacgagcagctgttcgacggcaaccgcatgacctactacggccgctggacgtacaagttcgaggaagccgcgcgcaagggcgcggacgcggcgatcatcgtccacgacagcgaaggcgccagctacggctgggacgtggtcaagaattcctggtcgggcacgcagtacgacctgccggccgcggacgatccgcagccgcgcatcccggcgcagggctggatcaccggcgaggtggcgcgcgcgctgttcgccaaggccgggctggacctggaccaggcctacaaggacgcctccaggcccggcttcaagccggtgccgctgaaggccagggtgtccttcaacctcaagagcaccatcggccaggccaagtcgcgcaacgtgatcggcgtgctgcccggcagcgagcgcccggacgaggccgtgctgtacatggcccactgggaccacctgggcaagcacgacaacgaggacggcgacaacatctacaacggcgcggtggacaacgccaccggcgtggccggcatcctggaggtggccgatgccttcgcgcaccacgagccgaaaccgaagcgctcggtcgtgttcctggcggtgacgctggaggagtcgggcctgctgggctcgaagtactacgtcgcccatccgaccttcccgctgaacaagatcgccggggtgatcaacatcgatgcgatgtcggtggcgggcaaggcgcgcgatgtcaccgtgaccggcatgggcgcctcgcagctggaggacctcctcaagccgctggccgaggcccagggacgcacgctgcacgccgaagcctcgccgcagaacggttcgtacttccgctcggatcacttcaacttcgccaaggccggcgtgccggcgctgtacgtggacggcggcgaggacctgctcgagggcgggcaggccgccggcaaggccgccgccaaggaatacggcgagcagcgctaccactcgccggccgacgagtacgacccggcgacctggaagctggacggcaccatgcaggacctggaactggtctacggcgtgggccgtgaactggccggcggcgaccagtggccgaactggtacgacggcaatccgttcaaggcggcgcgcgatgcgatgatgaaggcgccggccaagcgatag

SEQ ID NO: 532433 - DNA, 681 bp, Stenotrophomonas maltophilia
atgaccgtctccttctcccgccccgccctgaccgcgctgggcctcgccctggccctggccgccggcggcgccagcgcccagcagtccatcgacaaggtcctgggcagcatcaccgcgcaggccggccaggcctacggcgatctggaaacggtcaacggcagcatcaccatcgaggccggcgccacggtcaaggaagccggcaccgtcaacggttcgatcaaggtcgacgacaaggccgtcaccggcgacctggagacggtcaacggcagcctcaagctgggccgccaggtcaccgtcaacggcagcctggagacggtcaacggcagcgtcttcgtcgaccagggcggcaagatcgccaagggcatcgagaacgtcaacggtgccatcggcatcgtcggcaccgaggtcggcggcggcatcgagacggtcaacggcgatctcaccgtcggcgccggttcgcatgtgcgcggcggcatcaagatcgagcgcaaccagggctggtcgagccgcaagcaggagggcaacccgccgcgcgtgatcatcggccccaacgccgtggtcgacggcgcgctggtgttcgaacgcccggtcaagctgtacgtgcacagcagcgccaagatcggcccggtgaccggcgccacgccgatcgcctacagcggcaacaccgccccggccgagtaa

SEQ ID NO: 532434 - DNA, 171 bp, Stenotrophomonas maltophilia
atgtacttggactatgacttgaggccaccgtcccaggcgcagatccagtacgcggttgccattgcgcgacgagaggggctcgagatcccggccgacgtgctgaagaaaaaggttgcgatgggcaagttccttgaccagcacgccaaaggtggtgcccgaagcggtaagtaa

SEQ ID NO: 532435 - DNA, 573 bp, Stenotrophomonas maltophilia
gtggacgcggtcggtttcgtgttcgccgaaggcagtccgcgccgggtcagcgcggccgaggcgcggcaactgcgcctggcgctggcgccgatggtcggcgcggtggcgctgttccgcgacaacaccgtggccgaggtgcgtgaagtggtgcgcatggtgcgaccggcgttgctgcagttccacggcgacgaagaggatgcgttctgcagcgccttccgcatgccctggctgaaggcggtgccgatgggcgggggcgagcgttgggatgcggccgcgctgcaagagcgctggccgaacgccgacggtttcctgttcgacagccacggcaagggcgcagccggcggtaccggccacacgttcgactggagcgcgatccccggcggactgcaccggccgttcgtgctggccggcgggatcacgccggacaacgtgcacgacgcgatccgcgccacctcgccgtgggcggtggacgtggccagcgggatcgaagtcgcgccgggagtcaaggacggcgagaagatgcgccgcttcgtggcggaagtgcgacgtgccgacggtaccggtcccgattga

SEQ ID NO: 532436 - DNA, 1062 bp, Stenotrophomonas maltophilia
atgcagcgagaagccgccgaccttgccggcgtcgccctccagcgagcctgcgtcaccgggcaatgtttgcagcgtgacgaccttgcggccagcgtcgcgaccggtggcgatgcggtaggtcatcgaactcatccgcagcccatccatgccgtcgtcgctacccgcgctgtcggacaggaacacggattcgtcttcgccttcgagccagccgcggcgcgacaggtgccggcagacgcgatgcgcgatggtgttggcgacctgcgtcagttgcgcagaggtgggggcgcggcgcaggcgcggcttgcgccgcgggggctcgacgttcgcgtcgtacacgccgtcgagccacagcatgtggaagtgaacattcaggttcagcgcgctgccgaagcgctggatcagggtcaccacgccgcattgcgccgtatcccgcggcacgccggcctgatcggcaagccaaccggcgatcacgcgctgcacgatgcccagcaccgggccaatggcttctggcttgctggcgaacaggaaacgcaaggggtacggaaagctcagcacccattgccgcaccggccgcgggccgaacacctcgtccaccagatgccgcgccgactcggccatgcgccgcgcgccgcagctggggcagaagccgcgcttcttgcaggaatacgccaccagcctctcggcacgacagtgctcgcagaccacgcgcaggaagccgtgctcgagcacgccgcagcgcaggtaggtctcgaactcctcgcgcacatactcgggcagcgggcggtcttctacctcacggcgcgcgagaaagtccggccaatgcgcctgcagcaggtctggaagcaggaggttgggcaagatttctcgccttgccgagcggcggccgctgaatgcgactgtgcagttccgcaaggggaacgtccgcaccaatgtccagatcctcgacatttccacgcatggcgtgcgtattgccgcgatccaggcgctccgtatcggggacacctgctggataaggttgccgcagctggagccccagcaggcgaaggtcgtgtgggtggatga

SEQ ID NO: 532437 - DNA, 783 bp, Stenotrophomonas maltophilia
gtgctcgagcacgccgcagcgcaggtaggtctcgaactcctcgcggacatatccgggcagcgagcggccctccgcttcgatccgtacaatgaagtccgggtagtgcgcctctacgccagctggtggccggcggtggcgcgcctgctgccgccgcccggcgcgtggatggacacgttcaagaagttcatggccttcccgatgttcggcaccgcggtgtggctgctgtgggtgctgggccagcagaccggcatcgacggcgcgggcgcgctgctggcgctgctggtgacgctggcgctggtgctgtgggcgttcggcctgcagggccgcacgcgcctgctgattgcttcgctttcggtagcgttcggcgctttcctgctggccaccatcggcccgaacgtcatccacacggcgctgcccgccgcgcaggccgcagcggcggcgggcgagcgctggcaaccctggtcgcccgagcgcgtgcaggccgtgctgggcaccggccagccggtgttcgtcgacttcaccgccgcctggtgcgtgacctgccagtacaacaagaagaccacgctggccaacgacgaggtgctgaacgcgttcgacgctgccaaggtgcagaccttccgcgccgactggacgcggcgcgacgccaccatcaccgccgagctgaacaagctcggccgcagcggcgtgccggtgtacgtgctgcaggcgcccggcaagccgcccatcgtgctgagcgaaatcctcagcgtggccgacgtgaaggcggcactgggccagctgtag

SEQ ID NO: 532438 - DNA, 2487 bp, Stenotrophomonas maltophilia
atgactccaccacaccaccccaccgccgccgcccctgccaccctgttcagcggccctgcctggtggctgcagatcgtgctggcctggctgttgctgctgctggcgctggccatggcggcgctgggcgtgcaactgctggcgctgggcggcagcgcctactacctgctggccggcgtggcggcgctggccggcgcgctgctggtgttgcggcgccgggtcagcgccggcctgtggtgctacgggctcaccgtgctggccaccctggcgtgggcgctgtgggagattcacggcaagggctggcgcccggcctggggtttcgacctggcggggcgcgtgggcctgctggccggcctgtggctgctgatggcgctggcctggtggtggatgcgccgccgcgcgggcgaccgcgggccacgacgccggtcaccggcctgggcaccggtggccgcggtgacggtgctgggcacgctggccctgacggcgctggccccgcgcctgtggccggcgcaggcgcaggcggcgccgcaagccgccgcgcccgatgcgctgggccgcaccgccttgaagcgcggtgccgacgagtggctggccttcggcggctccaacctgggccagcgcttttccgaggcggcgcagatcacgccgcgcaacgttgggcaactcgagcaggcctgggcgttccacaccaacgactgggcgcccaacgagcgcgtgtactacgccttccagaacacgccgctgaagatcggcgacagcctgtacgtgtgctcgcccagcagccaggtgttcgcgctcgacccggccaccggccgccagcagtggcacttcgacccccaggtgccgccggccgcgatggagccgctgttcagcgccacctgccgcgccgtcggctaccacgagcaggcgcaggcgcccgctggcgagctgtgcgcgcgccgcatcctgctggccaccaccgacagccggctgatcgcgctggacgcggccagcgggcaggtgtgtcccggcttcggccacggcggcaccgtgaacctggccgagcgcatgggcaaccaggtgatcggcttctcgtccaacacctcggggccggcggtggtgggtgggctggtcatcgtgggccagcaggtcagcgacaaccagcgccgcgacgcgccgggcggcgtggtgcgcgcctacgacgccgttaccggcgcgctgcgctgggcctgggacgccaagcgtgccgacgatgcgcaggccccgctggccgcaggcgagctgtggccgcgcggcacgcccaacgtgtggaacgtgatctcggccgacgagcgtctgggcctggtgttcatgggcaccggcaacgccgccgccgaccattacggcggcgaccgcacggcggccgaggacgccttcacctcggccgtggtggcgctcgacatgcacaccggcaacacgcgctggcacgtcaacaccgtgcaccacgacctgtgggactacgacctgggcgcgcagcccctggtgaccgacatcgacgtcgacggcacgccacgccgcgtggtggtgcagggcaccaagaccggctcggtgttcgtgctggacgcgcgcaccggcgaggccgtcaagccggtgcaggagcgcccggtgcccgccggcacgctgccgggcgagcgctacgcgccgacgcagccgcaatcggtcggcatgcccaacttcgccggcatgcccggccccgagcccgaggtgctgaccgaggccaacagcttcggcctgacgcccatcgacgccgcgctgtgccgcatcgccttccgccagatggagtacgagggcatgtacacgccgcccagcgagaaccccggcggcatcctgctgtttcccggcatcgtgggcggcatgaactggggcgggctggcggtcgaccccgaggcacagctgctcatcaccaaccacagccgcctgccgaaccgcatcacgctgacgccgcgcgcgcaggtggaggaccgggcgctgggcgacggcggcgcgcgcgccgaccagcgcatcgcgccgcaggccggcacgccctatggcgtggcgcggcccaactggatgtcgccgctgcaggtgccctgcatcgacccgccctggggctttctgtcggccaccgacctgcgcagcggccggctgctgtggtcgcgccccctgggcaccggcttcgacaccgggccgctgggcataccgacgcggctgaagatcaccatcggcacgcccaacctcggcggcgcggtggtgacgcgctcgggcctcaccttcatcgccgccgcgcaggacaactacctgcgcgccttcgacacccgaagcggcgagctgctgtgggaagggcgcctgcccgccggcgcccaggcctcggccatgacctacatgcaccaggggcggcagtacgtggccattgccgccggcggccacgcgcgcttcgaaaccaagctgggcgacagtctggtggtgttcgccctgcccgagggcggccgctga

SEQ ID NO: 532439 - DNA, 693 bp, Stenotrophomonas maltophilia
atgatcagcttgtcggtggcggcattgtcgccggccagtacggtgttgaagatgatcgtgccatcggcgccgctgaagttgccggctacgttcagggtgtggaaggcggagccgtcgccgagggacacggtgccgttaccgaggcttagtgcaccaaccgtggagtttccggtcatgttccaggtggcagagtccaatgtggcgctggtgacattcgtcatgacaccgttcaacacggcgccattggacagcttggcgtgcagctgcgaggtggcgtcggcacgaagcgtaccctgcagttgcgacgcgccggcgttcagattcagagtgccgccatcgacggcttcagcaatcacgccattgccgccgctgacggcgctgccgttgagaatgttgatcgtggtaggagcgatcgacccggcgccgctgaccacgatgcccgagccatttcggccggagacgcgtgacttgtcgatggtgaggacgttgtcactgatcggactggtgggggttcccccaatgtccttcacaacgatgccgttttcatcgcccgtgacggaagaaccgttggtgatgctgacatttgaattggagaagactgccagaccggacgagatttcgggtggaaggaggccggctccgatgccggttccatcaatcgttgtgttgctcagcgccagcacgccaccctga

SEQ ID NO: 532440 - DNA, 327 bp, Stenotrophomonas maltophilia
atgatgcaggcgatggcaaggtcgctccgggcggtggccgggttcgggctgctgctggcgatcctgctggccggctttttggccgtgatcctgtggcatgacctcagcaaccgcctggatgcggcgcagcgccagagccaggcgctggtgaccggcgttgaccgcctgctgcagtcggaactggccaccgtcgagcgtgccctggaaggcatagccagcgacggccggcgcctgttcgaccgggtgcccgaagacgccccgtcgctgctgcaggcgtccatgggtataggaagttcaaccgccctttttggcgagtctggcgggtag

SEQ ID NO: 532441 - DNA, 264 bp, Stenotrophomonas maltophilia
gtgaaaaagcgtttcagcgaagagcagatcatcggcttcttgcgtgaggccgaggccgggctgccggtcaaggagctgtgccgtcggcacggcttcagcgaggcgtcgtactacctgtggcgcagcaagttcggcggcatgaatgtgtcggaggccaagcgcctgaaggaactggagaccgagaacgcgcggttgaagaagctgttggccgagcaggtcctcgagaacgaggtgatcaaggacgtgctgcgaaaaaaatggtga

SEQ ID NO: 532442 - DNA, 522 bp, Stenotrophomonas maltophilia; identical to SEQ ID NO: 532346

SEQ ID NO: 532443 - DNA, 405 bp, Stenotrophomonas maltophilia
gtggacttcatcgccaagctggcggcactggtgccgccaccccgcgcgcatctcacccgcttccacggcgtattcgccccgaatgcaaacctgcgtgcgcagctgacgccctcggggcgcggcaagcggcctgcgggcgatgcggcgccggttgacgcaagcgcccacgacgagccgcgcagccccgagcagaagcgccgtgcgatgagctgggcgcaacggctcaagcgggtcttttccatcgacatcaccacctgcgcccactgcggcggcgcggtacggatcgtcgccagcatcgaggaacccaccgccatccgcgccatcctcgcccacttcgagaagcacggcgcgctggagcaagcgcactaccggcccgcagcgcgcgcgccgccgccggccgcgtga

SEQ ID NO: 532444 - DNA, 666 bp, Stenotrophomonas maltophilia
atgttgagtctcagtcgggaggagttcaagaagcttgtccaaattttgctatggttcaacgcaattctcttcaccgtggtctggctgattagaatgtgggcgggggcgacgccaggggcggccgcagttcagtcgatctccatttccattgcccttactacagccctccctctcatcggaatgaacctgacatggaagtggccacgcttggcgcggctggccaatcgtccaatcgttcatggactgtggtggggagagatcaagccgatctaccagggggaagcaattcccccaataccgatcgcgtttgtcatacgacagcagtacgcgtcgttgtccatccagtccttcacttcgagcatccctgcagattccacgatcgaggtcttcgaacggagtgagaagagcaccgatgtgtacctgaagtacgtgtatcacatgacacgagaggcaaatgctgagaacaaagcgacagtgggatatggtcgactccgcctcgaacgggctggccaggaacttggcgggagctactggacgaattcaccaacgtctgggcaaattcggttgaagcttgtcacgcgagagtgtgatgacatcaactgcttcgagtcagccagagaagccgccgataagaagggtttcgtagtcaagcaagagcaggcttga

SEQ ID NO: 532445 - DNA, 1386 bp, Stenotrophomonas maltophilia
atggcaagcgcagcttcactgttccactcggacaacgctgagcttgaaacactgaatcggcgggtaaggcccagcgatgggcagcgagagtatcttctggagcacaagaatgagttggccgcatggctggcgagcgacctagatgacctcggcatggaggtttcccacttcattcaaggttcttacaaattccacacactcatccgcccgctcaagaaaggggatgagtacgacgtcgacctcggcctgtacttcaagggcagaccacacacagacgttgatcctgtggaactgagagaagcagttcagcgcagtctgcgtcgctacagcgccgagaacgaggagatacattctattgaagagccgaaggagcgctgctgtagggccaagtacaagcagtccttccacatcgatgtccccgtctaccaagagacgccggcagggcgcgatgttcggctcgcgacgctctccaagggctgggagcgaagcgacccatcagccatgattgcctggtttgacaatgcaatcggcggcatcgcagccaacagagcgataattcgccgtctgattcgctacttgaaggcatggtccgccttgacgtttcggtctccggccatcggcccctcatcattgatgttgacgatcctcgtcgtcgacgctttcaggcaggtggtcgcagatgacgatgaagatgatgatgccttggcgaaggtcgtaggcgccatctatcagcgccttatctctgacagggttgtgcctaaccctatccagggcgatagcgacgacgatgtcaacagactcagcgagcaagaccacgggcactttcttgagaagcttgccgcactggcgaacgtttcagacagagcagtctgctgcgaggatgtctctgaggccgccacaatctggtcagaggcattcagctatgtcttcccccttcccgaagaccttggtgttctggcagcttcccagaatggtttgagcgtgccgaccccagatattgccatcaagatgtcggcagccaattccaatgccgtggatcggactttccgcgggcaagtcgaccacgcccgtatcggagaggggatgacattcgaaatcaccaaccccgaggtcatccccaacggcgcgcaggtccggtgggtcgttcggaactctggaaatgacgcactttcgaccagtgatctcggtcatgtgacccccgatgatggcaccttccgccagtttgagagggcggcctaccgagggcggcatttcatggactgtgaggtatggctgcacggcagattgcgttcggtgacgcgcgttccagtcacaattgataggatcgcaatgccgccacgtactcgggcaacacgcccggcgtacaccaagttgatgagacgttaa

SEQ ID NO: 532446 - DNA, 1680 bp, Stenotrophomonas maltophilia
atggcccagtctccccaggaatcactaggaagggtgctcagaagcctgcaccagagggggtttgtacagctcccctcccgtggaggtgttcgccagtttgatggggtactcaactgcaatcgaggcgatgtcaaaattcggctctcgattgaagactgggacttcacacgctatccggtcattgaaattttggaggttcccgaaggtgcgccacgcctcattcctcacgtcagcgcctccggatggttctgttacctggcggacggaagtgtagtactggatcgctacgcgccggagggtgccgtggcgcagtgtctgcagattgccactgatgagttgaatcgcttacttggcgatccgcgctaccgcgagggcgagctacaaaccgagtttggcgctagctggtccattggccagcagcccgagccgttaccggctactctcggaaccgttgagcgagccagcgttgtggctgatgcttacctgatgggagacgagcatagcaagtggcttctaatcagctgcgatgcggaggagccagaaagacttgcccgcgtgatgattctgcctccaccacgccgcgtgcaagagtgttgggtgcttcgatccgatgcgcttccaggcgtcggacagaatggggttccaacgacgataggtgagcttttctcttggcttaagagctgggacgtcgggctacatcgtgagtttcaacagcgcttgggaagggagcacttcaagaagcctggggacttgatggtcgttattcactgtcctgcgggttggttcgggttctcttttgagttggacaaaacactggtcttggggtttggtcgtcggccactagaccttcgccaacagctccacacgcgccgccgcgatacgggcctgactaggataacgctgtcagaaataggtccggagttcatccacggacgcaatttgagctttccctctctcaaagacaagaggattgtgttgatcggctgcggcgccattggtggctacttggctgagggcttggtgcgcctgggcgccggcaccggcaccggcgagctcacgctggtggatcccgacgtgcttgcgcccggaaatctcggacgccatgcgctggggatgaatgcactcaagcaagcgaaagtcagtgccttggcctcacgcttggatcttgagttcccacacgcaaaagttacacctcacattaggacgacacgcctcccggcagatctggtcggtgaccttgtcatcaacgccaccggcgaagaggcactgagcgaggccatcaattttcatcggcaagggcttcccgagtaccgcagacctccaacacttcatgtctgggtgaccggcgagggggcctgtgtccagggattgtgggtcgatgagcagaaatatgcttgcttccgctgtctgcggcgaaacgataccaaacggttgaagcgatttgacctgggcctcggggatgatggccttcgggtacttggctgcaccgcatttacaccctatgcggtgtcggcgcccatgggcgcagcggctctagcgctggatatggtcgccgcttggatggccggcgacgtttcgccccgattccgtacccgggccgtcgaaggcgccgaggtcaggttgccgaagaacgccgatgttcggcctcttccgggatgtcctgcatgcaaagcgatctaa

SEQ ID NO: 532447 - DNA, 1179 bp, Stenotrophomonas maltophilia
atgctgaaccttcatagccttttctttaacggcgacaaccccgatgcctttcacaaggctatttccccatctgaagagcagcgcaaggagcttgttcgtgccaagaacaagattcgcgaccaccttcgggaggggatcagcagagcttccacgactgtgctggggatggataagcaagtggagcctaagttccgcacccagggctcgtggagctacaagacctgtatccaaggtgcgcagctgccacctcaggagatggactgggactttggcgtctatcttcccgtaacggtgtgggacgtcagtgctccgcctcgcgcgatggcaaagctgtacttcgccttcgttgaggagtgcttggagggcctgtgccgcagggaaggctgggagctgcaaaagcgcaactcgcgatgcgtgagggttaagatcgccccgtgggcgcatatcgacctcccgttatatgcggcgcccgaggagaagttcaaaaaggtaaaggagagcgcggtgttcgatcacgcgctgtccaaaaactatcttcgcgagagtgttagcgccagccttgaggagtactcagagttcggcgagatgcctgaggacttctgggctgagatggaagacatccacttggcaatgcgcaatggcgagtggaaaaagtcggatcccgagcaggtctcgaagtggttcaatgatcgagttacagaacacggggatcagcttcgtcgtgtatgccgttacctgaaagcatggcgcgactaccactgggaagagggaggacccacttcagtgctgctgatgatcatggcagccaagcagtttgagcgcactccggatcgagacgacgtggccttggagcgcgccgcccaagctgtggaggtgcttgttcgtggtgaggttcgcgaggcaggcattgacctctgcgcagagaatttcaatcgcctcgaagaccacgatcgccagttggcctccgagcgcgccgggcagctgcgatccgccattcgcagagcgagagcgctgcaggttgccatgcgaggagaggctgtcctcaaagtccaggagcagctgggagtgcgaattccgtacgatcccgacttggttattgccgatggcgccggagaggtgaggtcggccgaggctcgagtagtagtcccccctgtcgttggcgcgacccacgcgggataa

SEQ ID NO: 532448 - DNA, 1062 bp, Stenotrophomonas maltophilia
atgcaggcagcaatgggagcggctggtgatgctttggccgaagaggcagttgatggcgggagggacggcgcacagaagtttcgcatcctcgctctttcaggcggaggattccgtggtctgtacacggcaaaggtcctagctgacatcgagcaacacaccggtgggccgatcgctcagcgatttgagctactcgcaggaacatcgatcggcggaatactggccgtggcattggccatggagatcccagccgaacgcatggtcaccctgtttgagcagcacggtgaggacatctttcgatctcgcctctccggatgggggttgctgcgctctccttacacccaagaggcgctcctatcactacttaagagtgactcgctctttggcgatcgactgattgggaattgcatccatcctgtcatcgtcccctcaatcaactacagcagtgggatgccggtgctcttcaagaccccgcatcatcctaatttctccagagatcatcatcatcttgcgactgacgtcgcgttggcgaccagtgctgcgcctggctacttcccccggcatacctttgggagctgccagtacattgatggtggtctttacgccaatgcgccggggttgctggcagtacatgaagctcagcacttcctcggcgcgacacgagaccagatccatgtcgtctcaatcggcacgatgtcttcacgattcacggtgaatccaagccgaaatcggagtggcggaacatacgactggggcggcctgaatccggcaaacactccaaagcgtctctttggaattgccatatcggcacaagaggccctggcaaaccagatgctcgggcatcgcgtggtctcagggcagtacttccacatagatgacgagctgactgacgaacgatcgcgtgctgtcgccttggacaaggcggatcaacacgcgagggaggtcttggttggcgcgggctccgaagcctccaagagggcgctgggtgaccccgcgttccggacgctcctttcaagtaaggcggcgccggcggtctttcatcacggtccaaacaagaacgcatag

SEQ ID NO: 532449 - DNA, 465 bp, Stenotrophomonas maltophilia
atgagccgggacgagcgggtgacattgctgagtgcgttcgcattggcgggcgagatcattctcattgggcactacgcaggcaaagttgctgcccggcgcgtcacgacacttcaacttctagcaggtgccctgtttactttatgcgccatgccattcgccggagagtcgataccggccttctcgtgggtgtggctgggggccgcggcgagtttgggcgccgccagcatgttaatccagttcaccatgaactgggcgcagaagaccgtttcacctacccgggctaccgtaatctatgccagcgagtcggtatggggtgggatcatcggccggatcgccggtgagcgccatcctggtctctccattctctgggccgcgcttatcgtgatcggcctgatcgtcagtgaactgaagcccagcaaatggaggcgatggcgaacgcaggaggcagtcgggccgatcgattag

SEQ ID NO: 532450 - DNA, 978 bp, Stenotrophomonas maltophilia
atgaaaagcgatcaagctagcctgcccggacggacacgagtggttgactcagtgttcgaattcgaactgcaaggccgcacgctctacgtggacgctgagcacgtaccccagtgcgtagagctgtggagaaccgggcaatacacgcaactcggcatttcggatcacgagaatcctggcctcaagagtatcgacttcattgaggccttcttccctgtggctgattttcacttgatgcttttcgacaaagtcgatttgtccgttctgggaggaaatgccgagtggctgaagcatttcttcaccaacgcggggccgaatgccatcgacgaccttagtcccttcactaagctcgaatcactaggccaaccatggagtaggaaatttcgcgtcgacgaaagcctcggacgcttgaagggcttggcactgggcggattcagtccagcatcatgtgacatcaccgaattgtccgtcctgcccgcgctggagaagctctcgctctatttcaataagctacagagcttgaaggggctcgaaacaatgcaaggtctgcgcgaactcttcgtcggtttcgcgccgaagctggagtgcatcgacccaatctgcgagctaaacgagctccgtgaactgcgtttcgagcactgcaagaacgtccgcggttttgcggacctggtgaggggcaaacatatggtcaacctgatgtacatgaaatgctcgcctctcgatcacgtgcggttcgtcagccgattgcgctctttgcagaggtttgttttcttggatacgaacgtgctcgatggtgacatggcgccgcttgtggatcatccgacgctggcgcacgtagcactaacgaagaagaagcactttacgctcagtgaacggcagattcttcagcggttaggtgatcgcgaaggtggggttagggctcggatggcaaagttgaatctcaagaaggccgccgctgaagctgcagcggaagcgcagtag

SEQ ID NO: 532451 - DNA, 426 bp, Stenotrophomonas maltophilia
atgtcggaggccgtctacctcgaggcgactgtggcgaccctggaaggggtcattgtgggccatgccgcggccaatcaggccggctatgtgtccttcatctccggcatggcggccgatcccggcagcaggatgatgcccctgcaggtcaaggggcaggcagaacaggtgctggctcgctcggggctggcccataccagcctgcgtccgggcgtgttgcgtccggtgctcggggtgtcctcgccgcatcggctacgccgtggcctgtatgccgtgggaagccccgtgctggcgccggccgcgggtatctgcccacaggttttcaccagcaccgaggcgattcgccgatgcgtgccgcggctggtgatcaatcggctgcagcggccggacttaatcaagaacgccgatatcgcccagcaggctggctga

SEQ ID NO: 532452 - DNA, 579 bp, Stenotrophomonas maltophilia
atgcgcctgtccttccccttcgtcctgccgccgctggtggccgcgctactcggcggctgtgcccaggccaagcactcccctattaccccggtcgagtcggtggactttccccgtttcaaggggcgttggtatgtgagcgggatcatccccacacgcttgaagcgtggcagccacaacccggtggaaacctatcgtctggacagcaagggccagatcggcacctggtatcggtaccctccagacagcttcgatgcaccggtcaagctgctggcctccaccggcctgttgcagccgggcaccgacaatgccgagtggaaagtatgcttcttcggcctgttcaagacgcagtacctgatcggctggctggcaccggactacagggtggtaatggtggtacgcgatgcccgcgactacctctggtgcatggctcgcaccccggtcgtgcctgcagccgactaccaggtaatgcttgatctcgcctcggcgctggactatgacgccagccggatcgagcgcgtcccgcaacgctggcaggaaacccgccaggacaaggacacgttccacggagagtgccaatga

SEQ ID NO: 532453 - DNA, 396 bp, Stenotrophomonas maltophilia
atgaaatggctggtactgctgttggccttgttgatgccgctggtgggctggctctccaataccggcctgcctgggccgagtagcggcgagatacccgcccgctacccgaccctgatcgttatcgccggctgtgcgttcgcgatctgggggccaatcttcccgcttgatggagggttcgcccttggccaggcgctcaagctgcgcggcaacccgtggtatgcgctggccgccgtccgggggctgctcggaatgtatgcccggcagcaggcctcggcactggcaggggctggcgtagccgcagtcatggcactgtcactggcggtgctggtggtgttcatcacgctgatcatcggcctgtcccactggcagccccgacaactggaaagtgagccgtga

SEQ ID NO: 532454 - DNA, 1530 bp, Stenotrophomonas maltophilia
gtgacttgcctgcgtttggtgctgggcgaccagctcaatcccgagcatccctggttcgccagcgtgcgcccggacgtggtctacgtgctgatggagatccgtcaggagaccgactacgtgctgcaccatgcgcagaagatcctggcgatcttcgcggcgatgcgtcgctttgccgaccagctgcgcgcggccggtcacagggtcagctacctggccatcgatgcgccggacaacagccagtcgctgaccgccaacctggatgctctgctggcccggcacgcggccggcacgctggagtaccagcccccagacgagtggcggctggatcagcagttgtgccagtacgccgcgcagcagtcgataccggtgcactgtgtggacagtgcgcattttctgaccgagcgggatgaggtggcgcagtttttcggcagccgcaaacgctggacgatggagctgttctaccgccacatgcgccagcaccatggcgtgctgctcgaaccggacggccagccgctgggcggacgctggaacttcgatgccgacaaccgcaaggcttggcgtggcgacccacctgaaccgccggacctgcgcccacgccacgacctacgcacgctgtggcagacgatcagcgccgccggggtggccagcttcggcgagccgagcgagcaggcgctgcgctggccgctggaccgcggcgaggcgctgcagcagctggaagccttcatcaaatacggcctgccgcattttggcgactaccaggacgcgatcagcgcaaaggcgccgcggctgttccactcgcttttgtcctttgcgctgaacgtgaagatgctcagcccggccgaggtgatcgcgcgggtcgaggccgccggccgcgatggccaggcgccactcgctgcggttgaaggcttcatccgccagatcctgggctggcgcgagtatgtgcgcggagtgtactgggcgcagatgcccggctatgccaacagtaacgtgctgggccacacccgacccttgccggactggttctggaccggcaacgtccgcatggcctgcgtgcgcagcgcggtcaagctgtcattggccaatgcacatgcccaccacatccagaggctgatggtgatcggcaacttcgccctgcttgccgggctcgccccgcaggccctgcaccgctggtacctgggcatctacatcgacgcctttgagtgggtggagctgcccaataccttgggcatgagccagttcgccgatggcggcctgctggcgaccaagccgtatgtctccgccgcagcctacctccaccggatgggcgaccattgcggccagtgcccctaccgccgcgacctgcccaccggtgccaaggcctgcccgttcaatgcgctgtactggggttttctggaccggcatgcagacaccctgagtcgcaacccgcgcctggctatgccctaccggcaactggcacggatgccagcgagccggcgcgaggcgctggcgcagcgggcctggcagctgctggccaacctggacgcgctgtga

SEQ ID NO: 532455 - DNA, 711 bp, Stenotrophomonas maltophilia
atgtcccagcccctcactgattccacgacgctgcatcccctgccagcttccgagcgcgtgcgcgagcgcctgcgcagggccggccaccgcttccatgccaatgacaacattgccgaccacctgcaagagggcgagttggccgcgatcgagcacgaggtcgcgctcaaggcccaggagctgctgcgggcgctggtgatcgacgtggacaacgaccacaacacccaggacaccggccgccgtctggccaagatgttcgtgcgtgagctgttcgccggccgctaccagccggccccgacagtgaccgagttccccaatgccgagcacctgaacgagctgatgatcgtcggcccgctgcgcgtgcgcagtgcgtgctcgcaccacctgtgcccgattatcggccgggtctggatcggcgtgctgcctgatgccggctccaacctgatagggctgtccaagtacgcccgtctgatcgagtggatcatgggccggccgcagatccaagaagaagcggcgagccagatcgccaacctgcttgagcagcggctcaagcccgatggcctggcggtggtgatggaggccgatcactactgcatgcactggcgcggggtgaaggacgacggctcgaagatgaccaacagcgtgatgcgcggcaagttcctcagcgacccggcgctacgtcgcgagttcctgtcactgcgacaccaggattaa

SEQ ID NO: 532456 - DNA, 762 bp, Stenotrophomonas maltophilia
atgaagtctgctgcctttgtcgttctcgctgccggtctggccgcatccgttacagctcacgcgtccggtgtcgaagctggcaagtggagtttttccgccttcggtggcgttgacatgccgaccagcggcaacgtgcacagcggtgcaatcgcgccagtgcccgacctcggaccgctcaaccctgcgctggcaggggtcagtgccgagctgcgtatccagtcgcgcagccatgaccgcatctatggcctggccgacacctacggtctagaaatgggctatggactgagcgatcgcgccgagctgttcggacaggtgcgttacagccatgcctcgcccggtcgcgtgcaggtgggtggcgcctacgtgccggcgctggacaccgagctgccggtgtacggccgtttcagcgcctacaagagctacggcgccgagttcggctaccgccgtttcttcatgcagccgggcgctgcgcgtcctttcctcgccgcccgcatcggcgcgacgcgcactgacgcaatcaacgcctcgttcgatattccggatgccgccatttccattcccgatgcacgcttcaccaagaagacctggtccgcgtccggtggcctcgatgtgggcgtgatcattccggtcggcgagaccttagctttactgcgcaggccggcgttcgctacgtcgacaagctcagcggtgatgacgccgacatcggtgggctcggcttgggcagcatcaacaacgatgccaagcggatttcggtgccgatga

SEQ ID NO: 532457 - DNA, 246 bp, Stenotrophomonas maltophilia
gtgaccgatgtcaccgacatcaagacccagaagggcaagctgtatctgtacatcgtgctggagctttacgaacagcggatcgcggggtggtcagtgcatgatcggctggaccgtcagatggtgattcgagcggtgcagatggcggtgcggcaacggcaaggaagtcatgcggtgatcctgcattcggagcgcggcagccagttccgcagcggtgactatcagggattctggccgccaacggcctga

SEQ ID NO: 532458 - DNA, 450 bp, Stenotrophomonas maltophilia
gtggaggaaatcattttccgcggctggatgctctcgttggtagcgcgcaaggccaatgtcgcggcggcagtgctgctggtgtcgctcgttttctgcttcctgcattttagtccgcaccagccgctccgggttacgctcggcatcttcctgttctcgctgtttacctgcgcctgggcgctgcggaccggcaatatctggggcgtgatgggctggcacgcggggtggaacgggttgctcgcgacgggcttcgaattgcccgtcaccggcatggatgcacacttgccggcgctgctggtggcgctgcggccgcaaggcttggacgccctgaccggtggcgcgcaagggccggaaggtagttacctctgcagcgttttcttcgtcgccgcgatcgcgtggatccagtggcgaaagacgcgcggagctcaggacttcttcccgaccagaaggtag

SEQ ID NO: 532459 - DNA, 435 bp, Stenotrophomonas maltophilia
atgattaaaaatcatagcgttacgaaatctcacgcggtatcacaacttccaaagttggaacgggtttcactgtcccatttgagtgaagtcacccttgtaccggcggcgagccttctcgcatcggctaaccaggcactgccaccgcctctgtccggcccgctgtcggctgggcccgtcgcagtccaggtggatggcgtccggtgctttacgcccactgaccttggccggcgcaagggcctgtcaccccagaagttcaaccgtctcctgatggagcatggtcttcaggagaagcgcgacggacagtggtgccccactgaggccggtaaggccttcagtgtgctgctgcaggtacacaagaagcagcttgctggcacggacgtgcagcagctgaagtggaaggagagcgtgctggcgaagctggacggcttggcctga

SEQ ID NO: 532460 - DNA, 1800 bp, Stenotrophomonas maltophilia
atggccgcgcgcatctacgaccgcccggacctggaccaggacgtctaccagccggcgctctacgtcaacggtaggtttgcccgtgccaagccttcgctggcctacgagggccgcctgcagattcgcaacagcatcggtggttgcagcgttctgcagatcggtggcgacaagctgcccaacggcacgcaggtacgggtcgaccaggccaccaaagaggtcgttgtggcttggccggcctacctgaccgcgcaggcgccgatcgccaatcctgatttcgagcaaggccagacgggttgggagctgggcccgggctggaagatcaccaccgagaacccgccatccggccagtggtcggcgggatactggggcaactggggcacgtcccggatctcgaacgctgcccgctacacggtccagcccggccagatcaccaccgcgaagtgcgacgtgcgacagggggcgtcgtcggagggcaacgccggtggctcggtcatgctcgagtaccgcaacgccgccggcgaagtgatccacacggtcgaaggcaaccaggtcatgtcggccagcaagaaccgcgtgtacccgtcgtcggtgttcggcgctgcgccacctggtgccgcgaccatcaatgtggccgggaatggcattcgctaccgcgagaacaagattctctttgtcgacaacttccaatgggatcacacggttccatctgtcggcatcaacttcgaaacggtgtttaacgtcgttcttcgtgtcaatgattccatcgggcgctcgtttgtgtggagcggccagatcatggttgcagcccgaccggtggcctacagggtgttcgcatcgtccatcagcaacgccatcaactcgttgaactatcgccatgccgcgaacgtgttggagcgggccggctatcccgacaatgccgtaacctcgaatcagcgactgatcggggttacggacgatggttctatcgccgccaccacgtactccactttcccgtatctgtcggtctacccggtgagccaggaagggctgttcggggcaccgttcgcggccccagttccgccaatcactgagcaatgtgagtgcgtggcgttctcccggtcgggagcggcaatggtggtgggccacggtaacagcccctatctgcgcgtccacgcggtaagtccggcagggatcggcgcggcctatccgccgccagcgaccgcgctgacgagcagggtcatgttcgctgagttcaaccccaagggcgatgttctctacttggtgcagcagtcgccgccgtacctcgttgcctaccggtgggacgatgtgaatggcctcggcgcccggttgaacagccctgccgtctcgacgccgtcggcggtccaggccatttccatcaacgagtcaggaacacacctagctgcaacttgcggcgcctcgccgtcctgccacattttcaagatcggccccaacgggtttgaggatcgcgtggccgcattcggcgaaaacgcgcagggcatggtcgccttgtccgatgcggcgcgcgcagtcgtgttcggcagctcgtggatgcagcagctgcacctctacctgtgggatccggccaacggcgtcggcgctgcgtaccctgtcccgcccggtattggtggaggcacctacggtcgcggcgtttccttctcgcgtgacgggctggcgctgtacgtgggcgtgaccagcaattccggtgtgctggcctatgagtggacacccggcgtcggtaccacgcgtggacctgtgcaatgggggtccacggccaccaatcggaccatcccgatcgactga

SEQ ID NO: 532461 - DNA, 279 bp, Stenotrophomonas maltophilia
gtgaaactcgtggtcgcaaccgcactactgcttgtaagcgctacggctggcgcaaccgtgttcggcggctccaacttgggattctcggggtatcccgaaccggattgcaggaaaccgtacggtccatacagcgaatcccgcatggaccgcgaaatctatcgcgacgaactggaacggtattttcggtgcgtgaaggagtacctggagaacgccaacaacgacattgaacgcatccgcgaagctcaggaagaagctatcgcccaggcgaagcggctgtag

SEQ ID NO: 532462 - DNA, 186 bp, Stenotrophomonas maltophilia
atgttctacaacgtcaaatccgacgaatacgtcgcagtcgtgaatgcactcgaagtcgtactccagttccccggctacgacctttccccctttacaaaggttcgccttgcgcatttcctcctgttcacccctgagccgcaccgcgacaccctcatcaacctgatcgagcggtaccagaagcgctaa

SEQ ID NO: 532463 - DNA, 465 bp, Stenotrophomonas maltophilia
atggatttcagttcaatcgccacggcgattgcctcgctcaagagcgcccaggagttggccactgccaccttggccgttcgcgacttcaaccaatcggccgcggctatcgcgcagatcaacgaaaagctgctcgcggctcagcagggtttgctcgctcacaacaccatgttgttgcaacttcagagcgactacgtggacaccacgagagagctcagggagctcaaagaagctgcaactcagaaggctgcgtacaccctcttcgatattggaggcggagtcttcgtctatcggaagaagagcgagcccggcgatggcggtgctgtcgctacgacctcgcaagaaccggagcactacgtttgccagccttgtttcgacggcggcaaaaagagcgtgctccaacattggggcgacgactggcgttgcagcctctgcacggagatctactacaggcgcgtcgactactga

SEQ ID NO: 532464 - DNA, 522 bp, Stenotrophomonas maltophilia
atgatttccccgtttcagtcaatcattcgttacatgactatcggtgcccgactcgaagagcttaggaagtcagcacagctgacccaacagcagatggccgacattgtcggcacgaccaagcagtacgtcggtcgattggagaagggacagaacaccaccccaaacggggtgttccttacggagtgggcacgacacttcgctgtgaaccctcgctggttgtctaccggtgaaggcccgcgatcggccgccgccgcctcgtctcagtctgcgcgaccggatttcgagaagcttgccgccgcggtgaacgtgctccggcactatctggaaatcatgggcgacccggccgaatgggtcggcgacgccctgctcctggaaaccgcgttcgtggtggtcgaagagttcggcggggatgcacccgcaagcaacatcatcgacctgaccaaggttctggcaagacggatcagagggacagacgatgcaggaaagcaggttcgaggaactggcacagcggctggcggctag

SEQ ID NO: 532465 - DNA, 354 bp, Stenotrophomonas maltophilia
atgcaggaaagcaggttcgaggaactggcacagcggctggcggctagaacgtccgcattgcgcgccgaagcgcctcagcgccccagtttgcgcttggtgcagaagcagcccgagccctttatggacgctgtgctgcgagagtcccattgtcggatgattcgccactaccgaaggcgctgggggcaagccatgcagctgctcatcgaccaggcctgcttcggatacacgggaattgaagcgcttccggacgatgacttgatccaactgcaccgcgacctcgagcgagcacaggagtgcatgagggacggagtaacgttcgaggatgccgggctgctccgcacccgttacggctga

SEQ ID NO: 532466 - DNA, 687 bp, Stenotrophomonas maltophilia
atggctatcgaaatatgtccactggctgcggacgtggggaactgggccgattgggctgccgtcgtggtgggatttggcgccgcagccggcacaatatgggttgcttcggtagcgaatcggacgtccaaacgggcggccgaaatcgcggaagatgccaagggcattgccaagcagcagagtgaccaagtgctggcgcaacagcgcgcgaacgcagagatactcgggcgcctgctcttgcatgaggtgtcgagcttgccggcgcgactcaacgcgatgcttgcgcccatggctagagctgtgcgggtagtcgacggacaggtacttatcgaagaccgcgatctgctcacagaggtcctggacgatgcaaagttctcggtggtgccgcagtccgagagtgtcctcgggcgaatacacgatctgcctgatgatctcggccccgatctcgctacgctgatcggtcacagcgggaccatgcgggacattgcatatcgcatgcagggccgtgtagtggaaagcccgcgacagttcattggacagaactatcggttctcctacaaagggcggcctgacgacttccagctcttcgatgagcacttgagattcttcaggggcctcagcattgagtatgcgaaccgcttccggacattcgttggggtcgatgaagaagactattcccggttccagtga

SEQ ID NO: 532467 - DNA, 1086 bp, Stenotrophomonas maltophilia
atgtccaatccggatctcaagacagtcgcggttaaggatctgcatttcgatcctgaaaatcctcgtttgcccgagaagctgaagcatcagaacgatgacaaggtcttggagtacctgctcctagaatgcaacttgatcgagctgatgatgtcgatcggcgagaaagactacttcgccggcgagccgctgatggtggtgccggagcagcagtggggtgggttcaccgtagttgagggtaaccgccgcctcggtgcgctcaagctgctggcaagcaatgacgaccctccggtgctagtcagtcaagtagctcaaattcgaagaacggcaaagttccgtcccacggaagtgccggtcttggagttcggcaagcgcgacgagattcttacctatcttgggtaccgccacatcactggcatcaaagagtgggacgcgcttgccaaggctcggtacctggtccagttgcgcgcgatgcatgcgacagaccatgagacggcgcacaaggctctggccaaagagatcggcagcaaatcgactcacgttgctaagcttctaaccggtcacgctctacttaagaaggctggcgatctcgggattctgtctcggctgaagctggaggaggacgatattcccttctccctcctcacaaccggtatcggctgggagaacgtcgctcattttattgggctgcgcggcgctacggatgttgagctccaggacgtcaagcctgaagagttggaagagctgttcaagtgggtttttgacaagtctcagcgtccctacacagtgttgggtgactctcgaaattttgcaaagcttgctcgcgtggtggcaaatgagactgccttgagtgcgcttcgcagaggagatccgttggatacggcggacctgctcacatctgggccgctcgaggcggttcgacaacacatcggtatggcggagaactcaattaagctggcgctggaaactctgaacgtcaccgaagggctgcaggcagaggatgtgggtcaagcggagcgccttcgtaaggctgcggtctcgctgcactcaacaatccgcgagtttgtagagaatcgagacgatgcttaa

SEQ ID NO: 532468 - DNA, 900 bp, Stenotrophomonas maltophilia
atgcttaagattgaaaagcccagggattcggacatacacacggtcgctgatttcgcggagctgctctgtctggcgacggaagatcgggtgtcaagtgctgattacttgcaggattttattaaggaccacgaagggcctatttatccgcaagaggtattggatgacgttttcgcgcatatgcgatggagggccgcggcattcggtcaagattatcccttcgccgtagacggtgcgcgtaacactatggaaggagtcgccgcgctgaatgcggggcagaagttctacgtttttatgctcttggctgcaaatcttcccatgctggagcgagccacctacaagtctctgacggatgcatttgagcgagccgcattagtggtgcttaaggcgatgtggccatcctctggtgtgaccaggccgttcgggaaaaacgagaccgactacaccggggagaagtgggagcgtctcaatcagctgagccgggatattggcggtagggcacatctaactgaaagagctttccgcgcaaaggacagtggcgacggtggtgtcgaccttgtgtcttggttggctttggatgagtttgagggcgagaacattccctcgctgctggcacaatgcgcttgttccagggaagaatggtcaaagaagcaaaccgaagtgtcgggcacgatgctccaacaccacctagtgccgacgcatccttggatccaggcaatctttataccgatctgtttcagagacaacttcgggcgttgggcattcacgggggacgtcgcgagctccgttgtcgttgatcggcttcgtatggcacgattcttcgactccaacgaacaacttaacgatctgccgctacccgaaatcgtcgaggggttcttggattacaggatggagctggtgtag

SEQ ID NO: 532469 - DNA, 1191 bp, Stenotrophomonas maltophilia
atggcacgccctcgcaagcttccctctaacctacccacccatatcgactacttcagagttccccaaggcgtctattgggacaaaactgggcgtggtcgatggttcgttatcgatccccacccggaaggatatggtcagaagcgccgaacagtcgcgggtccaagcgctcgcctgtcagagctgcatgcaattgctgaaagccggaagggccaagcactgcggggaactgtcgcccatgtcatcgatcttcacgcaaagagcttggccttctcccatctgggccctatcacacagcagcactatcgcgactatgcaagggcaataaaggcgtacccgcttaacgatggaacgaccctgggcgaagccgttgtagatcgcctgtcgcccgggttcatccgcaaactgatcgatgtaattgcccaaggtcgatcagcgcggaagcaaggcgaacccaacactcccggctacccgacaaaagcgaatcattggctgagctacctgcgcagagtattcggttgggcacgcgagcacgatcacgtgtcaaacaaccccgcggcaggcatcaagaaggtcaaggagaagcgcaaccatcggatgcccgagaaggaggtcttccgaagggttcaagagtacgcgcgcaactgcagccttcgcgctccccgcgcgaagggtgcgctgccaagctatctctgggcagcgatggagctagcctaccaggcacggctacgtggcgtggaggtcaggacgctcaccgaccaccatgtcgagggacaagttctgcaaacgaatcgtcgaaagggcagccgcgacaacctggtgcgaaagggggaacagacccagctagcgattcaggttctgcaggagcggcgtgcgtcgatctgggcaagacgtggattcaccccagacatcctccatccccctcccaaggcaagaccgctatttgtcagcgaagacggggaaatgctgactgctcacggctggcacaccagctggggaaggttgatgcgcaatgcagtgcgggacggggtcatcaaccatgaggaacgctttgcccttcatggcctcaaacaccggggcgtgaccgacaccaaaggggacaagaaggcagccagcggccacaagacggactccatggtccacctatacgaccactcactgccttcggtaccggcaacagatgaccctctatag

SEQ ID NO: 532470 - DNA, 192 bp, Stenotrophomonas maltophilia
atgagcgtgcagcgggttgagcgcgagcgctatggacgtactggtgatgacatggatctacccgaaggcaagacctgcggcgactgtgcgcattgccagcgccgcaccacgatgttcggccacattgcgacagacgaatgctgtgactggtcgccgtctcgattccgggcggccgaaggagcaacgtcttga

SEQ ID NO: 532471 - DNA, 1008 bp, Stenotrophomonas maltophilia
atggctgacggctccctctcctttagcctcccctcgacgccgcacacccaactgcgtcatcgctcggccccagccacggcacgcaactcatcgtcgtttgccattccgtcgacgtttcttcttcgacttaccttttcctgcaggcacaccgcgcaaggccccactcttcgtcactccggcgcccgcatggtgcggctcatcggaacgggcctcgcccgcccgttggccaagcaccgcgccttcaacacccttgccagatcgaaaaagggaatcgaccgcctccttagcagcccgacctgccgactctttcgcccattcttgaagatgtggtggcaagtcccgtacagcagcttcattccggaattgagaggcgactacggcagccccttcgcgaatatcgtcaaagttccgccttccagcggccttgtaaagcgcctttcttgcattatcgatgctagtgagcactgtttgaaagacatcccgaattggttttgtaggcgcacattgtcctggtcccggattcggggctcgcttcagaacccggtgaccgacctgaatattcgcgatcaccgtgctcaatggagatcgaagggagttaggcaggcaatccaagtagggaagaacaagacggcagctgctggaatcgagtgcgtgcatctgagcgatggctttctgaaacaaaccatgcgatgccgtttcctcttgcaaaagttccaagccagcgcccagataaatcgcttggctcgtgaggtcggttgcggcaatgagagcctcagcctttcctgctttggatctccgccaccgatcaaaaaccctcggcaaaaaacctacaatcaaggcaacgaacgcagccgcggctgtcgcaatagcactccagtcaagaacacacgtttcactcagcggatagcaggctacccatccggtccaatccacgttcacgtcactcctccttgtgcggtcagcacattctgtcacgcctcgctgcgcacggtgaaagcgcatggctaa

SEQ ID NO: 532472 - DNA, 342 bp, Stenotrophomonas maltophilia
atggtcggcggcggcggtaccggtacggctccctggtgggccgcaggcagtgtggtggcgctgtggctgcttcgcgagacgtggacggcgttcctctcgcgcaggaaggaacgtacagagaccgacgccaacgtggatctaatcaagggcctgtccgagcgcatcgggttcctggagcagcgtgtcactgctcaggacgagcgtctgcaggcggagatgcagatgcgcctcaaggcgcaggaggatgcaagcgcgctgcgcattcgcgtccggcaactcgaatcgacgctccgtggccttggtgcagtcattccccctgaagacccggtggtgtccgcatga

SEQ ID NO: 532473 - DNA, 204 bp, Stenotrophomonas maltophilia
atgcgcagaccgcatcagatcgtctcatcgctgatcttcgcgctggcaaccagcgcctgcaccagcgttggcaagctgccgtcgcaaccgcagacttgtccgcagccgccgccgccggcagccagcctgatggtcgagccgacgaccgaattgagagtgcgggcagagctattggcgccgcagcccagtgcgacgcacaggtga

SEQ ID NO: 532474 - DNA, 924 bp, Stenotrophomonas maltophilia
atgaatcacgacgtgatcgtcgtcggcggaagctactcaggcatggccgcgaccctgcaactggtgcgcgcacgcaggtcagtgctggtgatcgatgcgggccagcggcgcaaccgcttcgccagccattcacacggatttctcggccaggatggtgtgccgccaggtgaaatcgctgcaaacgcacgccgccagctcgaggcctatccaacgctgacctggcttgaaggtcgggtggaagcggtcgccgggcagacggatgaattcaccgtcacgacggccgatggcgagtcgcacctggggcgacgcattctgttggcgacgggggtgaccgaccagcttccagccatcgacggactcgcccaacgctgggggaagacggtttttcactgcccgtactgccatggctatgaacttggacagggacgcatcggcatcgtcggtgccagcccgatgtccatccatcaggctgagctgctgacggattggggggatgtcaccttgctcgtcaacggtgcactggaactcagtcaggagaccagatccaatttggaacgccgaggtgtggtcatcgaagaggctcgcatcgacaagatcgagggacatgccgacgtgacgatggtggatgggaggcgactgagctttgcgggcctgtttgttgcaacgcgaaccgccccctccagccctttggccgagacaatcggttgtgcactggaagaaacgcccatgggcatccagatccgcacggatgccgagagcaagacctcggtgcctggggtctttgcctgcggcgacgcggcacggtttcctcattcggtgtcgctggccgtgggcaacggggccatgacgggatttcacattcaccgatcactgctttggcccgagacgatcgagccagcgcaagcggaaagccgcgctctatga

SEQ ID NO: 532475 - DNA, 675 bp, Stenotrophomonas maltophilia
atgacgtcgttctccgacccggcggctgtatcgggctatgcggaaagaaccgcgaggatcgtgccgggcctgtgcgacctgcaccggatggcgggcgtgctgctggccgaacgcgcaccggccgacgcgcgcatcctggtgctcggcgccggcggcgggctggaactgaaggccctcgctgaaatgcagcccggctggcagttcgacggcgtcgatccttccgcagagatgctcgaactcgcccgcacgatcctgggcccgatggcgcctcacgtgcgcttgcacgagggctatatcgacagcgcccccaaggggcccttcgatggcgcgacctgcctgctgacattgcatttcctgccgccagccgagcgcctgaagacgctgcagcagatgcacctgcgactcaagcccggtgcgccccttgtcgtcgcgcatcacagctttcccggcgaagatcccggtcgggacagatggctctcgcgcaatgcggcgttcgcggctacttccggcgtacccgtgcgtcaagccgaaggcagcatcgcggcgatcaaggaacggctgcccgtgctttcgcccgtgcaggatgtcgatctgctccgcgaggctggattcacggacatcgaccttttctattgcgcgttcaccttcaagggttgggtcgcccatcgagcatga

SEQ ID NO: 532476 - DNA, 3375 bp, Stenotrophomonas maltophilia
atgggcttgatgtccgacgaacaggaggcgcctggcgacgtagatctgctcaagcttttgctggatacgacttcgagccgaaacgatgatgaagcgacggcacggcaggagtacatgcgcattcgcttggaggtgggagccgagctgccggacttcgatgaagcgctggcgaggggatggtttcggctcattcagggacgggtagttcctgctgctgcgttgagcgactattaccttcggcacgatgtgccgtatgcagaggcgctacggtctttcgtctactggctgagcgacgtgaaatatcaaatcgcgcagccaggcgcccatgccagtgcaagtacctttgaggactacttcgtcgctggagcccaatcggggcacaagccgcccgtccagacgccgacctggattgcggcgcgactttgggatgacccgccaccagtcgatatcgcaacgtgggccatgcgctgggaattgctcgattgggtccccctgattccttctgccgtttggtctgagcaggatgcacagcggttcagggaggcttcacttcaaatcctacgcaatgccaatctccccacatgggaccatgtgtccgttgccgaaagcctgcgggcctccggggacatgcgagagctggcacctatcgaagtgaagcctgatctgctggggcgcgtcctcgctcgtacgcgctctcactacggaaccgacctctatgaggcgcatgcgctctgtgcgctcatgagggtactggtgcttgagctggcgcatgtcgaggctgggccggtcccttccaagatggcgcaggaactggtcgcgctggcgacgtgccatcctgagctttgcgacgtgctgaccgactgctgcttgcaagcgccgcaggtccttgccgacctcattttctgtccatctgcagcgggcctcgtctgtctcctggtcgctacatggcatgtgcagttccagatcgaccgggactatcgcaatgaggctgccgactcggtgcaagcgtcattgttggcggactgtctggaggttctccggtatcaccttgttcagggcgacgtagctccgactgaatccgcgcgcttgctgatcgtgatgcaggagcacgattgcggggggagtgatggcgtgcctttgctgcccatcggcctcgaccacctgcgtggactgcccgtggatatcaagcggcaagttcgccagtcacttatagaaatggcaagcgcccaggccacctccctggagtttgcggtcatgctgaaggccgttgccgtggtgggtgagtcgttgcctcctgcagaagcggagaccgtggcttctgtttatcgaaaggcattccatgcaaaggaacgggccgatacacgatgggtagacgttacgggcgcggccgcgctggcccggctggcaatggatcacggccacctccaacccaggatcttctatcccctcgacttgcaggccgaactggctcgtcgaccggacgatgtcgtgggtctgggtttgtccatgcgtgagcagatacgaatgctgagccgtgcggtggtgggctaccccgaaagcgtacctggcgacctcgtcgaagcattggctgtggcgatccaggctggggcgagtaatcgcccagacaggggccgggtcgacgccttcacattccagctggacaaccaggtccgaggtcggcaagggccgcgcctggagtcagatttgatcgaggccgtgaatcggccggaggttcctgctcaacaagagcgcctcgtaaaggcgctcctgctggtcgaggatcctctgatactggccatgttgttgccccgtgtgccggcggtgtaccgagagcgcattgttgcccggttgcgggtattgacacccgacgaagctagccgtgcagcattcgtcacacaagcgtcggagcgcgggcaagcgcttctggatgcagggcttcctgagcttgccagtgcatatctgcgagaggcccaagaagcgcaacgtggaagaaatcttcccgcgttggccgtgcagaccctgaatcagcaattgcagatccactacctgagcggcacgtttgatgcggttgcatccgccaagattccagacggtctgcggccggaacaccaggccgaggcgcagagaacactggatttcttccgcgcgctggtgtgcctcaagaacgagccacccgaagccttgaaagctgcagggatttttcacagcctgtatcggcagcacccgttgcctgcatacgcgatcaacctgctcgccgcacgtgtggtcaagctcctcggggagaacctgtttcgtgtcgtggtcggggaggatgctgagatggcccgcctcgcaatcgatgaggctgaccgggccattccttctatcaagggactcagcgacatgtcccgcgccatccatgtgccaaattgcgcagccatgctgctagccgttgggcgccccagggaggccatgaatcgcctcaaggaacttgcgtctgcggagcgcaccgccgagagcacggcattcgaggcggtggccagcgcgaggcttggcgagccggatcgtgcccgtgcgttgattcggtcgggcagggagcgctacggcgacgcatcgctgctcgtcggggccgagagccacatcgatcattcggccggctttggcgcgcctcccctcttgcttttcaaacaggaggcggcggtccagttgcgcgcagccatgcgttcattcatggagctccccgcttcggagcaggcagaagttctgatggggccacccttggcattggagaagctgctgacggcagcctttcaggacgcgctcgccgcttttcagcgaacgctgtcattcctcaagctcgacaggcatacggaattcgatgaagacgacttcaatggcattgtcgccgagttggtcgaagcgcgactcgaaggaagtttgggttggcaggcgcacgagcagtcaccgggcggttacacagagaagggcaatgccggaaggcgtgacttcgtggtccgtcgccgaggcgtagacattaccgttttcgaggcgctgaaagcatcgcagccaaacgacaagcggatttctgcacatctccacaagctctttggctactcttgggccgacatcctcttccatgtcacctacagcaatcgcaaggacatctcagagatgcgcactgcagtcgaagaggtggcacggcagccacctccgggcacaacgtatcaatgccaatcggcgatacccgccgacggggcaaggcccggcgctgtcaggggaagctatcgtaggaatggagaagatgtcacagtcattttctttgtgatcgacatgcggcaggaaggccagcgcgcggcggtgggggcgccagcattgatcgagaacgctgatcagtga

SEQ ID NO: 532477 - DNA, 729 bp, Stenotrophomonas maltophilia
atggtgctgacgaccgtcagcgacacatgcgagaaggatggaagcgcggcgccgcgccgtcgccgatcaaacggaaccgctcgccgtccggtttgccccgagtgctgggtgcaggaaccgatgcaccttccggctgcccacgaccaaggcgccgaagccccgcagggctttggctggagagaaatcaatccacctgtgggctgcaagcaggccaggtcgtcgtcaaagccattcgctgcttcagcaatctcacccgacccgtttcgtggctggggccggcatcctctggcatgtatccacacacaaagggagcccgttgttccgccggcgggcaccggcaccgaataccgtcgaccgaaagcggtctcctggcacctcgcagccttgcgggccaaggcgtcaggagaccgctcgcggatgggcggaagcacgtcgatcagcggaatcgcggcgagcgcgactcgacgaagcaatgaccttctcgccctgccagccgtgatcggcctgtgcaggacgcgcacaccgttgcagaagggaacgcgcgctggggagtcccgcggggcgcgggaggtttgccccgccgtcggcaagagccggcgtggcagagggagacatgggcgtcagttcgccttggggcgccgacgcggtgtgctggaggtgcggctagatgcgccgcgctttcctgccggggcatcttcgaccggctgcgtacccttgcagtccgggtag

SEQ ID NO: 532478 - DNA, 855 bp, Stenotrophomonas maltophilia
atgaaattttctcagcgccttggtatttcgccgatcgataaacttgctcagcgcgagagtatcgatgaagaacttcgctcatctctttggagcgccttgtgtattttctattgggatacatatcttgcgccgcgtaatgtgatgtatggaagatccgactatgttcgagaatcgaatatgcatccgctcatcgcctcactttggttgaattattttaagagtccgatagatacgattgatgattactgggaggattgtcgatcgcgcttgaggaagtacttctttaaagcgagctggcacgaggtgtacgactttgtagagtttgtcgcttataatggccctgagcggcagcgcgataattttattaaatgcgtaaacgtgtacttggaaaaggagaattccgcgtatagatttgtggcggggaatattgctgaagtcacgtcggctgaggagatagcgtcggtagaggacgcactttcgcttgctgatgagtatcgaggtgctagaacgcatcttcgaactgcccttgctttgctgtcggatagggtgaatccagattttaggaattcaatcaaggagagtattagtgccgtggaatctctcgcccgaaaaatgtccggcgatgagagttccacacttggtgcgattcttaaagagctggagcgatcaaaaaagctccatccagccctcaggagtgccttctcatcgctgtacgggtatacaagcgatgcggacggcattcgccattcgcttctcgatgaaggaaatcttacaaaatcggatgcaaaattcatgctcgtctgctgttccgcgtttttgaattatgccgtcgagagtatgagcgccaaaaagtga

SEQ ID NO: 532479 - DNA, 1182 bp, Stenotrophomonas maltophilia
atggatcgcttctgtgtagaatgttttgccaatcgcgaattgaaagagatcgttagaaggatgggctcgacagtagatgagtgcactgtctgcggttcaaagaatgtgccttcgctgcagtcttcaaattcggttctgagggaggttgtgcgcgccttgattcgaataaactattctgaatttgactacaatacccatttggggggtgagtcgctaagcacgattctctttggtgtaaacgccatttttgatctgccgaatggggctagtgaagagaacttcgaatcggccttttacagcattgaggataattggtatccgccgagtgaaaatgagattagcctcgggggcgggtactcggagggcggaatcttgctgtcgttatcaaagtttcagcatgatcgcgtgtacgacttggccaagacggcgctcagtagaaattctcacgaacttctaaaagaggcggtggacatatttaaagaagtgtctccccttgtgaaggaaacaattgatcccggttcaacttggtaccgcgctcggatcggattccagaggaaatatcgctcggttgctggattctggggaatgaattatgtgtacgagccctactcggagggtgctgttggggctcctcctcctcatgtcgcttccgagggtcgactaaatcgccaccgaacttcaatgctctacttggcgaccgatgaactgacagctatatcggaagttaggccgcatccggggcacattctaagtgtgggtgaattcagggcctctaggaatatcgtagttgccaacttggcttcgcctcgtcttgaaaacttcgcgaaggacaggttgcttgatttgctccatatggctatcagtcttggggttttcgccaacctcccggtgactcctgagacccgtcattggtacatggcgactcagttgattggtgacgcagcccgagtggcaggatttgatggaataatgtttagaagcacggtttccgatggaataaatttggtagtttttgatccgagttcatttggtgcggctcatgaagttaaacctgtcgaggtaagggctttgttctatcagatagcgtccgttccgagctctatcggaatggatatggatgagtacgaattggatgaggaccagtttctcttcaacgaaatgcttagtcgctcgcggaagtag

SEQ ID NO: 532480 - DNA, 255 bp, Stenotrophomonas maltophilia
atggcatcgatctacgagcgcatcctgcaggcagcaagccacatcgacatcaccggactgggacgcggccgcctgggccagcgccagtttccctattggccgatgctttcgctgccgttcgacgcgtcgatgctgtgccagctttcctgcagtgaccggtccggattctcacggagcctgcagcgcgatcgttcggcaccgacgccagtggacctgctcgatcaggtggtgcagccggcgctgcacgcaggctga

SEQ ID NO: 532481 - DNA, 123 bp, Stenotrophomonas maltophilia
atgactgccgaattcgagacagacgatctgcgcggtgaaagcatcgccccgctgccgcagtacacgcgcggcagctgcacgatccaggcggtctacccggcctccagccaggcgtcgaactaa

SEQ ID NO: 532482 - DNA, 825 bp, Stenotrophomonas maltophilia; identical to SEQ ID NO: 422641

SEQ ID NO: 532483 - DNA, 1260 bp, Stenotrophomonas maltophilia
atgggtctgcaccggccaggccttgcccgtgaagtcatcgatcgcgatcggaccgatgtccccatcaatcacgaccaactgccggccgaattcagcggtcggcgattggtccaggtcaggccgttgctcaagtaccggtcgaccgcgataggtgaccgccggcgcgacagaaggccagtcgcaagtttctacggccgtcaggcgaacggtggagcgcacagcctggtcggtcaggcgctccaggctgggtgtttctgcaaggcgcgctgtcctgcagggcaacacccgcgtgcctggcgcccaggcgttggcagtaggtcgagccagctgcagggcgttgctggcaatgccagcgacctcgaccagttcataggtggtgacgtcccgccagagcatcgccaggccgccctgccgatagtctcgctgggtggcggccggtaccggaatggactgcacgcccagtgccaggcgcgactgcagccaggacacgtcattccagatgggcagcgcccaggtacgtgccgaccagtcgaacaacgcgtgctccagcacttgacgctcgcggcgatcggccaggacgctgaattcccaggagcgtcgcggggagccgcgaagggggaagcgcgcctcgccaccgctggcggcctgctgaacgtcggttgcccacgccagagtctccgacaccggccgggaccaatctggcggcaacatccacgccgacatgcgattgccggtgattgtgactgtgcggctgcccagggccacgaagtcgtaggacagcgtggccgcgatgacgggcggcccctcggtagtgatcgacagctgccacctgcgcagctgcagcggcgcgaacgtcagcggcggcgtgcctggccccaccagttcgacaccctcgccattctccagcaccaccgaggccaaggtctgaggctgcagataggcgttccagacctgcacaaatcgcacctggttggtcaccagattaccgaggtcaatgcgcagcggcaggatgtggattcggtggtaccagtcatcgaaggaggtgcgcagcgcgggaccggccgagcgctgttcgggttcgacaatggtggcctcacgtgccgggcccgccagcacgcgagcgctggcaagcgcgccacgaaatggcactggaatccgcgtgcgtgcgatgtccaggttccggcttcgccagttcggccccgcgctgatcgaggtggaaaggagaagcgccatcaggacttccggactgcccagccatag

SEQ ID NO: 532484 - DNA, 975 bp, Stenotrophomonas maltophilia; identical to SEQ ID NO: 509562

SEQ ID NO: 532485 - DNA, 975 bp, Stenotrophomonas maltophilia
atggcctgggtaaccgacaccgccgccaacatcaccgacctcatggcccgcctgcgggacttcctgactaccaatgcctccctggttgcggcgaaccagcaatggcaggtcgtgggtggcgtggccagcggtccgatcgcggccaacgattttgtgtcactgaagggccgaggcctggcgggcgaggatgagatctacgtgtctctgcaggcatgggtggtgcccgccagcgccttctacaacatggcggtctttggtcacaccggctacaacccggcgcagccgcgcgtggatcctcctggctccaattcaaatccggtagcgctgctgggcgtcaactcgccgatcaagtactggttcgttgccaatggccgttgcttcaaggtcatcacgcgaatcaacggccgctacgacgccgtctacgccggcttcatcttgaccgaccatctgccagccgactggagctacccgcttttcatcgggggatcgtgcctggagcggaactacctggcctcgtcggatggctacgagcattccaatttctggagccccaacgcagacggtacgaacaacaccaatcgcagccaagcgtatctgttctcgccaatgcaggcttgggttccgatccgcaacctcgctctgaacggatctctcactaccgggcgtatgagcctgccgtgggcaaagacaatctgcaaccagaacgtgcgcaactgcctggacgggcagcgctgggtacagcgcggtcagttggcgggctttgcgtggggcggcagcctcaccgacagatcttctcccgacagccaaatgcctgagaagggacagttctatggcagcttcgacggcgtcttctacaccccgtccttcggtgcaacggcggagcaggtggcagcggtgggcggtgttgaccacctggtggtgcctaacgtgtaccgcaccggctctggcgagttcgccgcgttttccttggagtga

SEQ ID NO: 532486 - DNA, 384 bp, Stenotrophomonas maltophilia
atgaaacggattctcttcgctgctctcgtagctctcctgctcacggccgccacgtcgaccgtcggacgaccctttgaagctggcaacctgagcaagttggtcgttggcgaaaccaccatccacgatgctgagaggttgttgggtggaagccctcagcacgcggtggccggtgccagcggggccatcggctacacctgggagtacatcgaatcgaaggtctcactgtggtcgggaaaaggtgcggttaagtcgcagcgcgtcgttctcattttcggaacggatggccgcttccagcgaatcttccagctcgacggaattgtgcttcctccggaagatcaccagcgcctgttcgcagggccaaagaaagcagaaccaagaacctga

SEQ ID NO: 532487 - DNA, 447 bp, Stenotrophomonas maltophilia
atgcgcgaatttgatcaacagctgttgcggctgaaacaggcgcttcgggtcacggaagaccgcgaagccgcaaacgtgctgggcatgaccaaggcggccttctccgccaggaaatcgaggggtgtgtttccccgcgacaagctgtttgctctcgcagcggaacgccccgagctcggcgtggatccccacttcgtactgacgggggagagcgctgaactgcagcggcgcttgaaggctctgaaaaccgcaaccgaggtcgccgcgaaagccccgaccgcccaagcgagggaagagattcaggacgcggtgttcgaggctgtcgtccagcagctcgcccctgacgaagcccaattgctgcaccactaccgttcgtccagtgacagtggtaagcgggccatcttggccacggctgtcaccatgagcggtgttgccagcgacaacgactag

SEQ ID NO: 532488 - DNA, 918 bp, Stenotrophomonas maltophilia
atgaccaagaaagaaaccgcaggccgcaaggcagtcgcgcaggccgaggcagtcgggccggagttcatcggcaagaccgacgccaatgacgcggctcagatggagcagatgcgcgagcgccagctcgcgctggtggagcagtttggtgatggcctgccttggcaccctgatcattacgagaacgccatccgtagcgaactgcgccgaggctgcgaagccttcctgcgtgcagggcgatacctgatcgtggcgcgcgaatgcgccgcgcacggtgaatggatgagcatgcttcagcgccttggcattgggcatgagcaggcccgccgtatgatggaagcttcaaagcgtgtcgaagcgctgccaaattcctcgacgtcgaggaacttgctcgaggctgccaagacggggagcaagcttatcgagctgctttcgctgccggaggagcagttcaaggagctggcggagaccggtgagaccggcgagctggaactcgatgacgtcggcaacatgtccgtgcgcgaactgcgcgaggccgtccgcaacgctcgtgctgatatcgaggcaaaagaccaacgaatcagcaagttgtccgatgacctgaacagggaacatgagaagacgaccaaggcgcagcggcgctggaagaccgctgatgccgatcaacagctgatcatcctcaagcaggccgtcaccgaggccgagcaggccgtcctggccacgctgggcaatggaaaggccgggctgatggcggcgttccgcacactcgccgcgcacgcctccgagaccgaccaggacaccgacgcagcggtcttcctcagcgacaccatcggccgcctgctcaatgcggtgcgcaccgtgcgtgacgacgaggagctgccgctctccctgccgctggtacatgacggctcggaggcctga

SEQ ID NO: 532489 - DNA, 1290 bp, Stenotrophomonas maltophilia
atgaaccgttaccagcaaattgttgagctatccgacgactgcatcaaagagatcgatctcgatggcgtcgtgcgcgcggtcaacggaaagggtttgaatctgctgagagcgtctactttctctgacgttttggacaaatcttgggtcgagttgtggcctgttgcagcgcacgaccgggtgctaggagcgcttgagtgcgcgagaaacggtgagagctctaccttcgaagcttcatgccctgttttcgacggtgagcttcgtgattggtgggtgcgcgtcagtccactcgtggaaaacggagcggtcgttggaattttagccgttagctcagacgtcacggcgcgaaaccgtgcgatgaaggctgctgaagtgttgcagcttgcgctggcggatagggcagaattgctgcgtaaaagggatgcatttggcagtgactctaacgccgggacgatcagagacttggagtctaggctcttggccaccaacttggcctatcaagagctcgaagtgatgcatcaccaggcagctgaggagcgtaagttcgccctagctgcccaacaagctgccgaaatgatagccgagcaggctcaaaagggtgaggctgttggtcaattgctcgcgggcgtggtgcacgatctgaataacattctgcaatctgctgtcgctgcggtggatctggtgctgggcagtggcgagctgagcgaagcaaacgcacgctatttgaaggtggctgaagcctcactggagcagggcggcgcgttgtccaagcgccttatcgggtttgcgcggcgccatccgtatgagccggaagtgttgagtctttccgagctcgttcagagcatgacacctcttctgctgcaggcggtgggtgacaaggccgagttcgtggcagacatcactgagcaggcgtgctgcgctatggtggatcgaaacacgattgagcgtgcgctgctgaacttggtgatcaacgcgcgtgatgcttgccgaccagaagaccagatagtggtcaggactgggacccagaggctccagggcctcgatccatcggacgaccgtgtcgaaggtgactatgtgactctcagcgtcatcgatacgggggaggggataagcgaagatgttaaggagcggctgttcgaggtctacttcaccaccaagcctgtcgggcagggatctggactgggtcttgcacaagtccatagcgccgtgcgtcaagccggtggatttgttaccgtcacttctgcgcttggggaaggggcatgcttcgagctcgctttgccgaagctgagttga

SEQ ID NO: 532490 - DNA, 207 bp, Stenotrophomonas maltophilia
gtggcctccgccgccgaggacaccgtggtggtcggtggcctggccctggccctggcacacccgtggatcgcgctgatcgtggtgctggcctgcagcctggcgggcgcgctgctggtgtggctggtctggcgcaccttgtggaagggcgtgcgctggctggcacgcagtgcgtcgcccgacagtccacgccagcccggcaccggttga

SEQ ID NO: 532491 - DNA, 1395 bp, Stenotrophomonas maltophilia
atgatttactcatttcagtatgaaggacgatttgtaaatcttgtgcctcttcccgtcagggagggtcgtgcttggaacgttttcaatgcacactccatgtcgctacttgttggtgccaatgggtctgggaaaacggagcttctctccaagctgtgcgagagcattcatacagaagataattcggccatcgaggtcgatggcgtgctatcggactatggagtgatttacttcaccccggccccactttcaaagtctaggtttccgagaaatggtaagcggttcaaggttctagacggaaccaaggtgaattcaacgccagaccatgatgttgtcgctactctcgctagagaattccaattcgccaataccgtggttgcacgactagcggtgccgctagagagaggtcttgatgcaatcttggcggcggccatggaaattccagtccgtctagcgcccgagctgaaggattatctagggtcttcccttagagactatactctcgcatcacagagctggcgcgaacttgcgggcaaacgaggcgggggggctggaggacgccagagagaaatgctgaggactcaaggaaaccttcgaacttcaatcagacggtacatgcgtcacagatatgggactggctattcaaatattgtcctcgctgccattgcgtttgaatcaaatggtgtgcgtactcgagcttccgtagcacggaagctgcgaaattcgctcgagacagggttggacgatgttgatcgtcttttcccttcttttgagagctttcgctgggtatttgatgagcttggtagcaaggtggcgaggacgggggccccggtcagtgatgcctggcgggcccgacttgatacggaggttgaagaactcttgcatttcgagatatcaggcctaagctcaggtgctgaggcgcttgtgcggcaattcatcgacctgcggtccgccatcgatgagcttcaggtaaatggagttcgtaacgtagttcttatgatcgatgagggcgacgcatttctccatctcgcttggcagcaaaaatatatcaatttccttaacaggttcatttatagggagagggggaaatttgagaccattcaagtcatagtcgcgactcattctccagttctgatgtcggactttccaagggatttcgtaattagagtgggggagggcgacttggatgcatctcataagtgctttggtgcgcctctggaaactataattgaaagcactgccggggccgggactattggtgaattctctgctcgagtaatgaagaggttggtgtcaagcggtgggcataatgctcgcgacagatatttggtcggtcaaatcgacgatccggttgtaaggaattttttggcgcggaggcagggtgataatatcaattaa

SEQ ID NO: 532492 - DNA, 918 bp, Stenotrophomonas maltophilia
gtgataatatcaattaaaaatgcttggccggctgctgccgtcaaaagtcatgaggcctatgtgaattcccttctcagaaaggaagctgagaggccagatccttggggtagtaagttcttgagtgagttcttctcgaatcacgaaaaggcgatttccgtggggtctgttgctgaaattaaggatgctgtttccagtttcgaaaaaataattgatggacgccctgatggggccgtacgccagattttcgacagaataaaatcagttgttaaatactcatcattctgcgataaggagagggttggatggaatgcctactctctttgcgaggcgtttcagtatgtgatgtgcccttactgccagcagtctctcgcaataactgtttataagggagaggatggcgcatttcggcccaccctagatcatttctatccgaagcataagtttccatttcttgcgctctcactttacaatctcattccttcatgtcagtcatgcaacagttcgctgaagggatcattggatttttcaaagactgagcatctacatccctatgatagtgacgagagcgtatctttcgtcatcgacgtgaatgagtacctgaatagtcgctcccaaggaaagaagaattggagcttcagtgtctcttgcgcccccgacagcgcgtcggtgaattctgtccggacctttgcaatcaaggaaaggtatgcgatggtcggagcgtttatcgataggttcgctgagagcgcctatctgaggttcagttctgacaaggggaagtatagagagatccttccggcggctgatgttgaagcggagttggatagcttgatgggcttcaatccttctgagtacaggaatgaattcatgggaaaaatgaagttaaatgtttataatatggttagagatcattataagtaa

SEQ ID NO: 532493 - DNA, 990 bp, Stenotrophomonas maltophilia
atggctagaaatgccgcagaacttgttcgcagcaaagctctcgggccgaattgcagctttgacctcacccagaagtcggttgtagaaaaaaaacttgtacagcctaagctcgagtatcggtcaaaggtcacagagagcgctcagatatctgagctttgcggctgtcctaagtacgcagcaaggtacagaagcatgcagcgaagcatagactcgagttcactgaccgaacttcagcgcgcgtatcgaggcgaatacggctcgtttaccaacggcaagtacaacaagcgaggaatactcttcgatagagaacatctcggtgacttccgagacttcctgttacacctggggccgcgcccgacagatgaatcgaccgtagaccggataaataacgagaggggctacgagccgggcaacatccgctgggcaggaaagagggagcagactgagaaccggagggtgaccaaatggatttcgtggaacggcacacgctatagcagggcccgcttcgccgcgatgttgggcatccgccccgataggcttcgacaacagctggccagaggttggagtgtagtcagaatagtcgaacaaaccagccatatcagcgatccctggaggggttggcagtttgatatggacgatagagatgaattggagaggctgtatcgcgccagaggaagctatggcaagccacggatagactttctgatcgagtacctccaagaacgcctaaacaaggagccccgctcagcgcaacgtcgctcgttgctggcactgatcgacatgtattccaggaagcgccgtgagttggtatcgctatcgtctgggttggagatggagaagaatgaccaactgctttccctttttgacgctcagctaaagagcactgaaagtgcacctaagggcgtgcctgccgagcctcgcactgactgtgaggacggagcggtgcaactgattgcaaagaagaagatcaaatttgtgtacgaggactag

SEQ ID NO: 532494 - DNA, 2727 bp, Stenotrophomonas maltophilia
atgactaaaaacatcctttgcacggacaaggaccttagaaacgaggccggagtggagacgttcttcatgacgaggatgttgaaggacctgctcggctacaaggacaccaacattcggctgaaagagaccatcgagacgctctccgttagcgctggtcggcgacgcgtactgtatcggcctgatttcgctgtcactaagggcggccacgttcgttgggtgtgcgatgccaaaagcccctcagaggggattgagaaatggcgaggccaatgtaagagctactgccatgaactcaacgaacgatacgggccaggtgagaatcctgttctttattacatgctcacaaacggcaaagaaacccgtgtgtatcactgggactcgagccgcccgcttctcgtcatggatttcaaggacttcgttgagggcaacccgaagctaaaacagctcaaggaattgctgtctaccgatagcgataagctgaatgtagagctcaatgaacagttgcccagcctgacaatacgcaggaagagcgctaatgacctaaacgctgattttgcttggtgccacgatcagattcatagaaaagatgcgcttagctacaccgctgcgtttatggagtttgtgaagctgatcttcatcaagctgctatcagaccgagaagtgcacgaaaagaatccggaaatggcagagtccggagttttccaagtgatcgagcctgcacgcaatgtcaagttctcggtggccgcaatcaatgcggcggaagaagccgggattgagaatccaattgctgtccgattcgacgagcttcgcgagagcctggaactccagatcaagcagcaaaacaaaaagcgcatcttctccgaaaacgagaagttggcactgagcaaagatctgacaaaggacatagtacgacgcctggagtccgccgatctctacgggttggatgccgatatcaatgggcgtctattcgagacgttcctgaacgccactctacgaggcaagtcgctcggtcagtacttcacgcctcgaagtgtcgtcaagctggcggtcgcgatgtctgatctgcaagtagggatcaaacatgaggggtgcgatgtagtgatagatggttgctgcggaagcggcggcttccttatcgaagctttagcggctatgtggaagaaagtcgacagctctccgaagctgtcgaacgctgcaaagaatgaactaaagaacgacatcgcaactaagtgcatctacggaattgactcggctaaagaccctgcactcgctcgcattgccagaatgaacatgtatcttcacggggatggcggaagcgccatctatcagttggatgcattggacaaagggctcgcagaggaaaataatgccagccccgagaccaagtccgagctcagggatttcaagcgtgtgctgaaggataacgcggagggctttgctgacgtcgcactgacgaatcctccctttgcgcgcgattacgaacgtaagaagcggggcggaggacgtgcgtatgcgccgtcggttttggatgcgtatgagttgtcgtacgatggtcccgccgagacgcttccgaaagccaagctcaagtcaagcgcaatgttcttggagcgctacctagacttccttaagccaggagggcgtttggtgagcgtgatagacgacagtgtactaggcagtaaagctttcgcgaccacccgtgcttggctgtctcaaaaatacgtcgtagaggcggttgtatccttgcctggcgacgccttccagcgatctgaggcgagagttaagacctcgattctgatcatgcgtaaaaaagttgccgatgacgaagcgcagggcgaggtattcatgtgctactcccagttcgttggtatcgatgatccagcgcgcgaaagagtgctccctgttgatgaggacaatcataagaaggctcaggcagaaatagagcgtatctccaaattgttcgcacggttctcttcgggagaccgtaagaaggatatgagcaagtgggttgtaaaagctgacgccctgtcggatagatgggacgtaaaagcttgcttgcttaagccggggaagcaggttccgaagtggaaggctgccaaggtgaaagtctcccctctttcgcacctcgtcactcccgtttttgtcgacgggcggccggctgactctccggaactgctgaagcgcgtgatacgccccagagtggatgactcgaagaggatcgtgcatctgcgcatgacatataggggcgtcgcagaacgtggagaagaaaagttcagcgccgataccgaagcggcaatactcttccaagtcagcgaaggcgatatcgtcattagccacatcaatgcggtacacggagcgattggaatcgtcccggcttcacttgagggctctgtggtcaccagcgagtacactgttctgcgtccgaaggacggcatggattcgagagtgatttgctcaatcctgcgcaacgaggatgtgcgggcagacatcctactcacttccaccggtatcggaagaactcgcgctacctggaaggagctatccggactaatcgtgccgatgcctccggcggctaagatccgcgcgcttgtaaagatctttgatgagttggagttgctctcaaagaagatggatcgtgcgaacttgcttgcccaaagcacgctcaagtcttcgtgtcatttgggcagtaaggattcttcggacattctccaagccttcaagcccccgcaataa

SEQ ID NO: 532495 - DNA, 318 bp, Stenotrophomonas maltophilia
atgaacgtgggtcagaggcttatggccttaggggcggggctgttggtagccgtcggcgtttactttgggatcgaccgccccagcgcggcgaagctggaaactgacaatttcattcaggaagtcaacaatcgagcgatccagagcggcctcaggcagggcaagcttgtctactcgactgctgaggaacggctatacaaccgtcgttggatagccgtgggaccggccgcgttaggcctgttgcttttgggaataggctgggcggtgagtgggaggcctgcctcacaaccgtcccgctccgccgtggaagacagtgactaa

SEQ ID NO: 532496 - DNA, 339 bp, Stenotrophomonas maltophilia
ttgtacgcaatcactgatagcggctaccgagccgtcaccgatgaaatggccttggcgccagatgaaacgctggtggccgaggtgcccgcgtctgtccttagcaggatatgggcccagcaggtgagggtggagcgcaaccagaagctgcgcgcgaccgattggacccagggcgaggattgccaattgacgcctgagctgaaggcggcactggccttgtatcgccagaagctgcgcgacctgcctgcccagccgggattccctgactgcggttggccggtgccgccgcccctcccggccggggctgccagcgtgtcttcaccgggcgtcagtaccaactag

SEQ ID NO: 532497 - DNA, 648 bp, Stenotrophomonas maltophilia
atgtctcatcgtacgagaccggaatttgatatgagtagctcatggaagagggaccccaatctccgactcaagggcttgggcctcatttcattgatagtcgtgtgtttcctcctcttcttcgcccaggtctggagggttcatgcattcgatctccaaaagcaattcgagtcgcagatcccagtcgcagaaaagataaaaaagccggtgcgagtcatcgacaaggcgcctgagagttcctcggcagcttctattccggaaaggaagccggaccgatggagtgacggcgaagttgtttctgcacttagcagcttctatcagacgattattacgatgatggggttattgctgggcgtcataggaatactggcagtagtaaccttgaggtttttgtcgaaatcagcggctgaagatatcgctcacggtgccgcgaaagaggcgatggctcattaccttgagactcgccagtttggcgatagcgtaaaatatgcaatcgaggaaaccggcttggcgtatcagttggaaagattagaaaaagatcttgatagcatcaaagaaagcttgaagaagcgacgtaagagcagactcctgagtagtgatgacgaagatcttgatggggatgtgatttcagacttgactgaggataggtga

SEQ ID NO: 532498 - DNA, 675 bp, Stenotrophomonas maltophilia
atgtccacgatgaaacaagcagtggcacggcgcgcaaagatgtcggagcgcgccgagcatcaacggttaattcacttctccggagtggatgatgcctggatctggaaccgtaagaagaaccacggcttctccactgtgccgagaacccttccgattgtcatgcaggtggcagacgaacagtctaagggccagccacccggtcacgtccttttttgcctctgggcgcgagcgccggatcacccggttctggtcatcgataatccggtcacgttcgctgcagaggcgggattcaccggaccgagggcggtagacacttggcgccgtcgcatgaaacgcctgcaggaactccacctaatcgtcgcaaagcccgggcccgcaggtgacttccactacgtcctgctcacaaatccaaatgcagcagtggaattcctgaggacagagggaaagattcaggacgtactttacggccgcttctgggatcggctttccgaggttggcggaatcggcgaaatcgatgcaattcgcgctcactgggcagaagccaatgcaaaagcggaagagccaccgccccctccccttctcccgcctccgccaccctctacggatgctcccaacgaatcagcccttacgaaggtgaaggcacggaagagcaaacccaaaagcggagaaaaatga

SEQ ID NO: 532499 - DNA, 216 bp, Stenotrophomonas maltophilia
atgagcaaccgtaaccgtccctttggcttcatgatcaactcgcccgccacgcggattgctaacatccgtgatacggctgcgcctgcgcagtcgatggcgccgacctacgatccccttaatgggcctcgtcgctttactccgtccgatctgacctttgggcccgaccttcagaccctcgaagaacttcggggtgagctggaaaggaagtttcgataa

SEQ ID NO: 532500 - DNA, 1017 bp, Stenotrophomonas maltophilia
atggctagtgagggtggaaaagctgcaggtggtaaagcccgggctgcggccttgagcccggatcgccgcaggcaaattgcaaaacagggggcggcagccaagaaggaggctgcgaatttgccaaaggccacacacggttctgctgatcgtccattgcgtatcggcgaagtcgagatcccctgctatgtgcttgaagacggcacccgcgtgctgtcccagcgcgggcttgtatccggtatcgggatgagcttgggctcgtcccgatccggcgatgctcgacatatcgttttgttcgaatcggaggcgatgaaatcccatgtaagcagtgacttactggcgatgctgaggaatccgattaagttcaggccacctcatggcggcgcaacagccttcggataccctgcaacgattctggcagacgtctgcgaagctgtgctttccgctcgagtgttcggtgacttgccgcctcgtctggcccacatcgccgagcaatgcgagatcctggtgcgcgggttcgcccgcgtaggcgtcatcgcgttggtcgacgaggccaccggataccagaaggaacgtgcccgcgacgcgcttgctcagatattggaagcgttcgtggcaaaggaactgcagccttacgtcaagacgttcccggccgactactatgagcatatgttcaggctgcgcggtcttccgtatccgccagagaaggcgcagtacaagcctcagtactttggcgttttgaccaatgacattgtgtacaaacgacttgcgcctggcctgctcagcgagctaaagagccaagccgcaaaggacgacaagaagggaaagcttcaccagcgcctcacttccagcatcggtcaccccaaactcagggagcacctcgcttccgtagtcaccgttatgaagctgagtcgcgactacgaggacttcactgcgaagttggacatcgtgcaccccaggtatcaggagacgatggccttggacctgccgacggtaggcgctgaagacgagtctccgtag

SEQ ID NO: 532501 - DNA, 741 bp, Stenotrophomonas maltophilia
atgacaactaacgttcttgacaagcgaaattcgcgtgttgcaagcgactcacgctggtctattcagaagggcgatgagctcttctacgtcgatgacaccagcttcgagaagattgttgatcgcggccagatcgtgatgatttgtgctgggaacgctcatctaatccgcgtctggcgtgattggttctccaacgcactcactcttccgtatccgccaaccttggtccagctcggcaacggaaagttcgacacgattcatctgactatcgtggtcaaggaagggtttcagacgttcttcacccgtggtgagtacgctaaccatggcgacgatgcacgcttcgcaggaagtggccgcaatcacgccaacaactgctactcgcagcacggctgcagcgatcgatgcattgcgacagcctcgatgttcgacccgtgtaccggcggtcgcgtcaactacgtgaacttccgcgacggtgcaacgaacctcaactatgtcgacatgtctgtcgacgagctctatcagaaactcaagacggatgggaatgtgatgaacatcaggacgaaaagtcagaccaagctctcagacttgccggccgattacctcgacaacgccactgcgtccggcgcatttgctctgtcagctccaacaggtgtgcctgctcaggagtggactgagcaagaacacgacgagctcaccaaagcgattcagcggatccatcagctagaagcagctgcgaacgactag

SEQ ID NO: 532502 - DNA, 678 bp, Stenotrophomonas maltophilia
atgcccaccaccggcagcaggccggaaatcatcccgccgttcaccagtacgtacacgaagaacgccaagcccaggctgccggccagcaaccgtgcgtgcgtgtcgcgggcgtgcaccgcgatccacaggcagcggccgaccacgaacaggtacagcgcaaacacagtggccacgccgatccagccgaactcttcggccagcaccgagaacgcgaagtccgtggtgtactcaggcaggaagtccagcgtggcctgggtgccctgcccccagccgcgcccgtcccagccaccggagccgatcgcgatgcgcgactgcaggatgttccaaccggtgccaagcggatccgccgacggatcaaggaaggtcagcacgcgatccttctggtactgccgcagcaggccgaaccaggccagcggcgcggcaacggcaaggcccgtcgcgccagtggccacccagccccagtgcaatccggccagcagcagcgcgaacacgccgctggcggtaaccagcgtggcggtgcccaggttgggctgcatcaggatcagcacggcgggtacaccgatcagcacggtggtggtcagtacggtgcgcggcgacggtggcagcggttgccgatgcaggtaccaggccatcatcagcggcaggctgagcttgagcagttcggacggctgcaggtag

SEQ ID NO: 532503 - DNA, 981 bp, Stenotrophomonas maltophilia
atgcctagtctcgtgggctcggagatgtgtataagagacagaccacagcagcagcgccgcgcccagtgcgatgcggtagatcgcgaaggcggtgaacctgtgcgacttgatgtagcccatcagccacttcactacgacgaagccggtgatggccgcggcaaggaaggccacgcccacgtcggcccagtcctcgctgcccagctgccctgccttggccatttccaggaaggtgtaggcgctggcggcaaacatggtgggaatgccgaccaggaacacgaactcggcggcggccgcgcggcggctcaggcccagcagcatggccaggaagatggccgaggccgagcgcgaggtgccggggaacacgccggccacgacctgcgccaggccgacgccgatcgccaccgtccaggtcacctggtcgcggtcgggcaggcgcgcggtgtaggcctccaccagcagcatccagacgccaccgatgatcagcgcccaggccaccgggctgaccgtttccggcagcgaccagccggccttgcgtaccaccaggccgaccaccgcggtgaccaggaacgccgcgcccagcttgaacacgtactcgcggttcccgcgctggttgaagccggtggccagctgcagcaggcgctggcggaacaccagtaccacggccacgatggcgccggcctggatgacgatgttgaagaagtccgaacgggcacccagccagtgctgggcgatgagcaggtggccggtgctggagatcggcaggaactcggtcaagccttcgaggatgcccagcagcagggcggagagcaggtcggacatggacggtgcgtgcacgcgcggcggaaggaagaagggcgagaggatagacgatccgcgctgcaccaaacgggtgcgtctggtggtcggtgcactcgtttggtgcgccgcgttctgcacccgcacggggcggccttcatgaaatcaatgacttgcggcatctga

SEQ ID NO: 532504 - DNA, 477 bp, Stenotrophomonas maltophilia
gtgatcaagcacggcatcaaggccagcggcatgcccgcgtggggcggcagcatggacgatgagttcatctggaacatgtcggccttcctgcagaagctgcccacgctggacaaggccggctacgatgcgttggtggccagcagtgatggtcattcacacggcggtggtgagaccggcgggcactcgcacggcgaggaagcgggtgcagatcagcatggcagcggtgatggagcagagatgggtgatggccatgaccagggtcatcaagccggtggcatggacatggacatgagcaaagctaaggaaggcaccacgcacgtgcatgccgacggcaagacgcacgtgcatgcggccgagccagccaagcaacccgcgcaggccagatccgaagctgagcacgatcagcactcctccatgccagccaaatcagccgagccagctcccaaggccgatgacggccacgaccaccagcattga

SEQ ID NO: 532505 - DNA, 1356 bp, Stenotrophomonas maltophilia
atgtacttcaagcgcaatcctttggcggtatccgtcggtgcccttctgtgcgccggtttttccacggtggctctggctcagcaggctgaacagggcgccacgagcgagtcggccaagacgctggacaccgtccaggtcaccggcagccatatcaagcgactgcagctctccggtgttggtccggtcagcgtggtggatgccgaagccatcgagcgctccggcgccacttcggtggagacgctgctgcagcgcctgccggcctcggccggctttgccggcagccagtccaatgcctactgggccgagaacggctacggcactactcaggtcaatctgcgcggccttggcattaaccgcacgctggttctgctcaatggtcgtcgtgtggtcaatggtggcaccggtgccaacagctcggtggacctgaacatcatcccggtagcgctgatcgagcggatcgaggtcctcaaggacggtgcctccgctatctacggtgccgatgccgtggcgggcgtggtgaacatcatcaccaagaagaactacgacggtgccgaggcggcggtgcgatacggacagaccttcgaaagcgatggcgaagaaaagtcgttcgatttcgcttggggtattacgtcagaccgcggttcgttgatggccggcatcaactactcggagaccggcacggtcaacatggcctcacgcgcaccgtgcggcttgggtgaggtcgacgggcaactcgaatgtgtgggcagctcggccaccatcggtgggcgcgcattgctagccgatggctcgcgcgtgaacttcaaccaggatcccaatggtgacggggatttctatgaaccgtattcggcggccaaacataactacaacggcaatccctatctcaatgccgtcaaccccatcaagcgtttgagcttcagcctgttcggcgacagcaccgtgaatgaaaccacgcgcgtgttcaccgagttgatgttcaccaaccgccagtccgaccagctggccacgcccggcagcctgggtgtctatcgcccgatcaacatcgcggccagccacccgaccaacccgaccggtcaggacctgctgctgcagcgccgccgtctggaagaggccggcccgcgcgagttcttccaggaaaccaataccttccgcgtggtcgcgggcattgaaggccagttgggcatgaactgggactggtcggccgcgctgaactgggggcgcaacaccggtgtggatggctcgaccaatgtggccaacctggaccgggtggatgacacgctcaataccgcggtgtgcagagcaacacgcccggcgcggcgatcccctgcggtgactatctcggctacggcgacctga

SEQ ID NO: 532506 - DNA, 657 bp, Stenotrophomonas maltophilia
atgcacccctttctcggtctgccggacctgttctacgtcgcggccacgttcgcaatggaactggcactgatcgagctcatcacgcagcttgcactggatattcgaaaccgtgtggcgaaagccactgcgctgttgattccggccgcgatgggttcgatctacatcgcccagatgtattcgatctggatttccggcggcctgattccccccatcgcgcttgccaatcgagaggttgcgggcctgatcgcgttcaacggcatctacgccttgttgggcagctatcttgcggcattcgcggcgcatgcctatcgataccgcggtgtagcatcacgctactccaggcgcggcatcttcgcctgcgtcggcatcctggccatcgcctacgccggcatgatccacaagcagccgctggctcgcggcattaccgtcgcacgcggcgaatcacccgtgtcctcactggttcactccatgatcatgtacgcgggaatgagctcgcagacacgactcagcagcagcgagctcactgccgtccggacgcagttttcacggcgcaccgtctacgagcagggctttcccgaggacatgatcgccggtctgccgccgcgccccaacgtcattgtcctttttgcagctacggcggagcctatgccgacctga

SEQ ID NO: 532507 - DNA, 687 bp, Stenotrophomonas maltophilia
atgttgggaattggccagggcatcctcggcatcggcgccttcaagcagcgcctgccacgcccggaagaggcgctgccggggcgtgaccagccgctgccgctgcacagcaaccagcacttcgtgaacagccatccgctgaaggaccgttttgccggcctgcagcagatccgtttcgcgctgggctgcttctggggcgccgagcgcaagttctggagcgaaccgggcgtgtacagcacctcggtgggctatgccgggggcatcaccccgaacccgacctatgaagaggtctgttcgggcctgaccggccacaccgaagtggtgcaggtggtgttcgacccggcggtggtgagcctggagcgcttgttgcagctgttctgggagagccacgacccgacccagggcatgcgccagggcaacgacaccggcacccagtaccgctcggcgatccacaccaccgacgaagcccagtacaaggccgcgctggccagccgcgaggcctaccaggcgcagctggatgcggccggctacgccccgatcaccaccgagatcgtgtacccggcaccggcgtactactacgccgaggactatcaccagcagtacctggcgaagaatccgaacggctactgcggcatcggcggcaccggcgtgagctgcccgatcgggttggatgtggaggcgccgcgctga

SEQ ID NO: 532508 - DNA, 189 bp, Stenotrophomonas maltophilia; identical to SEQ ID NO: 514039

SEQ ID NO: 532509 - DNA, 288 bp, Stenotrophomonas maltophilia
atgctccatccgccgcagcaggaagcgcgcttcatcggcgcccagctcgccatcgaccagggccgacagctgctcgcgatggcgctggtccaggcgctgcccggcgggcgattgatggttctgcgattcgttgaacgggttactggtcatacgcggctcttctcacgggtggcgctgccgatgtccaacagcggccggagttcggtgtcgatcgcctcgcgcgcccggaagatccgtgaacgcacggtgccgatcgggcaccccattttctgcgcgatttcctcgtag

SEQ ID NO: 532510 - DNA, 2058 bp, Stenotrophomonas maltophilia
atgactggcagttacagtcagagcctggtcgccatctccctgctggtggccattcttgcttcgtacacggcgctggacatggccggccgcctggccaccgccgagggccgcgtggcccgctggtggctggccggcggcgcggcggcgatgggcctgggtatctggtcgatgcatttcatcggcatgctggccttcgacctgccgattccggtcggctacgacctcggcatcaccctgtactcgctggccgtgtcgatcggcgcctcggcctatgcgctgtggctggtgtcgcggtccagcctgccctggcgacgtctgctggccggcgccgtgctgatgggcctgggcattgccaccatgcactacctgggcatggccgcgatgcgcatgcagccgggcatcgactatcacccgggctggttcgctgcctccatcgcggttgccatcggcgccgccggtgcggcgctgtggattgccttccgcctgcgtgccgagcagcgcaacaccacgcgcctgcgcctgctcgcctcactggtgatgggcctggccatcgtcggcatgcactacaccggcatggccgcggcgcgcttcccggagggcagcatctgcggcgcggtcggcagcggcggcatcgacacgcgttggctggcggtgctggtgatcgtcaccacggtggcgaccctgggcatcgccctggtggcctcgctgttcgaccggcagatgcgcgtgcgcaccgggctgctggccgattcactggcacacgccaacgacaggctgatccaggccgccctgcacgacccgctgacccagctgcccaaccgcatgctgctgcaggaccgcatcgagcaggccatcgagaaggcgcggcggcgcaaccaggcggtggcggtgatgttctgcgacctggacggcttcaaggcggtcaatgatgcctatggccaccagctcggcgaccgtttgctggtggcagtggcgcagcgcatcggcggcctgctgcggccgcaggacaccttcgcccgcctcggcggcgacgagttcgtgatcgtgctggccatcgatgttcccgacgatgcagtggtggtcgccgagcggatcatcgcggcggcaggcgaaccatttctgctggatgcagccgagctgcaggtcagcgccagcctgggcatcgccctgtatccggctgatgccggcaacgagcgcgagctgatggcacacgccgatgccgcgatgtaccacaccaaggagaccggccggaacggctatacgttcttcaccccctcgatgcagctcagtgccaaccgccagctgcgcctgctgcaggacctgcgcaaggccatcgcccgcgacgagctggtgctgcactaccagcccaagttccctgccgccggcgcaccggccaccggcgccgaagcgctgctgcgctggcagcatcccgagctgggcctgctggcgccggatgtgttcattcccatcgccgaacgcagcggtctgatcctgccgatcggtgactgggtactggaccgtgcctgtgcacagctgcgcgcgtggcacgatgccggacattccgaatggtcgatggcggtgaacctgtcaccgttgcagttcgcctcgccggcgctgctggacagtgtgcgcgaggtgctgcaacggcaccgcatcgagccggcgtgcctgaccctggagatcaccgagaccacggcgatgaaggacgtggacgccagcctggcgattctcaacgacctgaccgcgatgggcgtgcacattgccatcgacgacttcggcacgggctattccagcctgctctacctgaagcgcatgcctgccaccgaactgaagatcgaccgcgcgttcgtgcacgatctggaatgcaatgaagaggatgccgccatcgtctcgtcgatcatcgcgctggggcgcaccctgcagttgcaggtggtggcagagggtgtggagacgcaggcacagcgcgagtacctgagcgaactggggtgtgatcaattgcagggttaccacctgggccgaccgatggacgccgaggaattcctgcgccgggtggggtga

SEQ ID NO: 532511 - DNA, 213 bp, Stenotrophomonas maltophilia; identical to SEQ ID NO: 498222

SEQ ID NO: 532512 - DNA, 1260 bp, Stenotrophomonas maltophilia
gtgcgctcaaaaaactttagttggcggtactcccttgccgccacggtgttgttgttatcaccgttcgatttgctggcatcactcggcatggacatgtacttgccggcagtgccttttatgccaaacgcgcttggcacgacagcgagcacagttcagcttacgctgacaacgtacttggtcatgatcggtgccggtcagctcttgtttggaccgctatcggaccgactggggcgccgccccgttctactgggaggtggcctcgcctacgttgtggcgtcaatgggcctcgcttttacgtcattggctgaagtctttctggggcttcggattcttcaggcttgtggtgcctcggcgtgccttgtttccacgtttgcaacagtacgtgacatttacgcaggtcgcgaggaaagtaacgtcatttacggcatactcggatccatgctggccatggtcccggcggtaggcccattgctcggagcgctcgtcgacatgtggcttgggtggcgggctatctttgcgtttctaggtttgggcatgatcgctgcatctgcagcagcgtggcgattctggccagaaacccgggtgcaacgagttacgggcttgcaatggtcgcagctgctactccccgttaagtgcctgaacttctggttgtacacgttgtgttacgccgctggaatgggtagcttcttcgtctttttctccattgcgcccggactaataatgggcaggcaaggtgtgtctcagcttggcttcagcctgctgttcgccacagtggcaattgccatggtgtttacggctcgttttatggggcgtgtgatacccaagtggggcagcccaagtgtcttgcgaatgggaatgggatgcctgatagctggagcagtattgcttgccatcaccgaaatatgggcttcgcagtccgtgttaggctttattgctccgatgtggctagtgggtattggtgtcgccacagcggtatctgtggcacccaatggcgctcttcaaggattcgaccatgttgctggaacggtcacggcagtttacttctgcttgggcggtgtactgctaggaagcatcggaacgttgatcatttcgctgttgccgcgcaacacggcttggccggttgtcgtgtactgtttgacccttgcaacagtcgtgctcggtctgtcttgtgtttcccgagcggagggctctcgcggccagggggagcatgatgtggtcgcgctacaaagtgcggaaagtacgtcaaatcccaatcgttga

SEQ ID NO: 532513 - DNA, 984 bp, Stenotrophomonas maltophilia; identical to SEQ ID NO: 448604

SEQ ID NO: 532514 - DNA, 762 bp, Stenotrophomonas maltophilia
atgccggcatcacgattgcgcccatttctggaactgtcgatcgacggcgccgcgcgtgcagcttccatcatccggcgccattcctgcgcttggcaggcggtgagcgacagccacgccaggtcttcaggcagcagctcgcggccctcaggggtgatcaggcgatcaccgaggaaagaaaaaccggcccaagggccggtcaggtcaatacggtggtgcgggtcgaactcaatcatgccgcgatctcatccttggccggggtctgagggcgcaggcaagagccgagccagaggcccagccattgccatgcggaaccaacaaaggcccagattcgccggatacgacatttcgcataatgtatattatgttcagggtgatccgcgggtggctggcacgcatcttgcctcgaccctcagccctgctgtggcatggagcctgattgtgcgtaatcgcaacctaaccggcccttgggccggtttttcgttcaaggctggccgactggtcacccccgaaggccgtgagctggaaccgcaggatttggcgtggctttctctgctggcggcacaggcgcaggaatggcgccggatgatggagattgcccgaggcgcccagaaacggcctttcgggcgtgcgggcatcgttgacctggccgaggtcgctcatcgccgagcgcaacggtcatccggggcgatggctggtcccgacgccgatcctgtgggaggtgctctaccggtaccggggccgattcctcgccagcgcgtgtga

SEQ ID NO: 532515 - DNA, 249 bp, Stenotrophomonas maltophilia
atgcaggggacgctgcaagtacgtccctgtaagctcgatggcgccatccatggcgccaacgcccctgcatggcctacccgccccacctttgacagtttcctgccgcgtccaaccacggaaaagaaaaaagagaagcagaagcgggtcgctcgctgcgctcgctctgtgtcgaccacggtcgacaactacccaacagccgcaattgcccgtagatccacgccatgcgtggatgattcattcgatatctga

SEQ ID NO: 532516 - DNA, 747 bp, Stenotrophomonas maltophilia
atgcatcagaatgaacaagcgtcaaaggtgttctaccgtccgatcgaagcggctatccgctgggctgggctactacgatacgaacatgtggtcttggccgcgatctcgtcatcgaggcatctgccccagtcgctggactgcccacgctgggatgaggtacggctatacacggaccgcatctatgacggaatcctcaacggagaactgccctttggcaagaacggcatcacgatcaacgacaccaagctgatcgactccccggagctgaccgtccgccatgtcgatctgaaacggtggatgcacgaacactatcccggtcagcggcccggcttcctgttttcgcgcagcgaacgcatcgcccatcccttcatcaccgtagaaaccggccaggccatgctggtcgaacgaatggcgctgaagtctgcgttgcaacagtgcaagcgccaactgctggaactgcaggaacggcacgacgcactactcaagcagtccactgcaatccccgcttgcgcccaatgcccgatcagcgaccgcgccgaggccacctacctgaacatcattggcggcatgctggacttgatgctcggccagtccccttcgggcacaccgtactcctgcttcaagactcaggaagccgtcgtgagcacgttgatcgctcatcacggtggtgtcatgggcatcacggagcggacgttgaacgggaagttcgccatcgccaggcggcggctgcatagcgcggccaactga

SEQ ID NO: 532517 - DNA, 1632 bp, Stenotrophomonas maltophilia
atggctgacctgacctcccaggacatggccggcaagctgctcgctgcgggctttgaacgcagcagcccatcggccaccgctctgagcgacccgatcgccgatacgcccatggtcgtgacgcttgaccagttgcgcccctacgatcacgacccgcgcaagaagcgcaattccgcctacgaagagatcaaggcatccatccgcgagcgcggcctggatgccgctccggccatcacgcggcggcccggcgaggatcactacatcatccgcaacggcggcaacacccgcttggcgatcctccgcgagctctggtccgagacgaaggacgaacggtttttccgcatatcgtgcctgttccggccctggcccgagcgcggtgagattgtggcgctgaccgggcatctggccgagaacgagctgcgcggcggtctgaccttcatcgagcgtgccctcggtgtcgagaaggcgcgcgagttttacgaacaggaaagcggcgctgtcctgagccagtccgaattggctcgccgtctggcagccgacggctaccctgtgccgcagtcccacatcagccgcatggccgatgccgtgcgctacctgctgcccgcgatcccgaccgtgctctatgccggcctggggcgccatcaggtcgagcggctggccgtcatgcgcaaggcctgcgagcgcacctgggagcggtacggcaagggccgctccctgccactggacttcgacagcttcttccaggaagtgctgtcgcagttcgatacagagggcgacgagttcgccccgcagcgggtgcaggacgagctgatcggccaaatgtccgagttgctgggcgtggactatgacgtgctggccctggacttgaccgaactggagagccgccagcgcgcgctggccagcgacccgacgccgcacgcgccgcctccggcgttgcctcagccaacaaccaatacgcggccacccgccgccacccctgcatcttcagtcagtccgccatcggccacccccgccccgcgccaggacagcgcggaggctggcgaggtggttgcaggagatcctgtcgcagcagggaatctggtgcaggagcacatcgtctcgccggcaccgacaaccgaacggctccagtccatccagcgcatggtcgccgaccagttgggcgatgcgctgccgcccgatttttcaacgagcgttttgcagtctattccggtgcaggccggtagcctttatcccatctccgacgtctggtacatcgacgccggcctcgacgcgccggaccgactacgtgtccacatcgcgcagttcgcgcgcgagatcgccggcgaggtccagttggaggcctgcatcgaagagcgtcccgacgggatcggattcgcctgcagcgcgcgcacccaatcccgttcgccgctgggggacgcggtgctgatgctgctggcgtccctggccggtcagtccgccgcagaggtcggcatcgacggcgggcaattcaccaccgagctgccgaaactgctgcacggccagggtgatatggccaggcggttgagcgacaccgcgctagtcaagctctttcgcctgctgcgcctggcccggcgcctgctggacctagaagccgatccttcggccttcgggtcgtga

SEQ ID NO: 532518 - DNA, 1185 bp, Stenotrophomonas maltophilia
atggtggcggatgaagctccgcgtcgccaaggtccggtcgcacttgccgatctgttcgatggtgcgctgaaggaacttgcacccggtcccagcccgccgacacccggcgacggctttctgttcagcggcaaccgacacgagagcgttccgcggcgcctgttccttgatcgccggctgacgccgctggagcgcaatgcctggcaggtgttccggctgatgctcaatgaggacggcgtgacggcgttccctacctacgagcagttgcgcccctggctcgcgtccatgccctgcgcgggccaggcctcgcacgaaaccgtcgcgcgggcgctcacgctgcttcgcctgactcggtggctgagcctggtgcggcgcagacgcgatcccaagaccggccgcctcctcggaaatctttacgttttgcacgatgaacccttgacgccgttcgaggcgatgcagctcgacgccgattacctggcgctggtcagccagtccctgggccactcggccaaggccgtccagatggtgggcctcaacaccctgcaggagatcgccggggacccgatgctgtccggccgcaccttgccgtcacggttacaggtgctcgccgaacgcctgaaccgccagggcatctccacagccaatagttatccacaagaggatgcagctcacgattccgaagaaggggtttcgagccttcttcggaatcacgaacgcccctcttcggaatccgaagcagggctgaaacccgcgtcagacgcctctcttcggaatccgaagcaggaccgtactgtacgtagtaatcgtattgatgaagtacgtactaccgcgcaggtgcgcgcgttgggcgagttgcaatggcccaaacgcttctcggaattgaaggctgagcagcaggcaggcgccagaatggcgttgcaacaggtggatggctctctgcgacaggccgtgctggacgattgggcggcccgctgcggcaaccacacggttcgcaaccctgcggggtatctgttcggcatcattcagcgcgccattcgtggtgagttcaatgcgtgggccaagcaagcgactccctcatcatccacacccgagcgaccgccgccgcctgagccgccacgcaacgtggtgcccccagaagtggcccgacagcacatcgagcggttgcgcgatctgttgcgcaagccctga

SEQ ID NO: 532519 - DNA, 780 bp, Stenotrophomonas maltophilia
atggcaaccaccaacgaaccattgcaactgaatctcgggtcgctacgcagcgcgatgtcactgacgctgcacacccatcacgcatcccgcatctggcacggccgcgccgctgccgaggggcggccgggcattgtcggattgaacggctacatggccgtgatgaacaagatgaaacgcggcgcggagcaggacgacccgtacagcgactggtggatgctgcgcatcgaggaaaagctcgaccagaccaaggccacgctgcaagccctgcgcgaacaggtcgatcaggcactggccggggtgcccgccgccctaagcctgggcgagaacctcaacgtccaacccgtcaagcttccgctgttcgtcaatgcccagctcggctttgccgccgtctacctgctggccgactacgacgacattgcacgcaagcttatcctcgcccaccacaccgcgctgatcgaccgcagcacgctggagcgctggctcaatgagggcgcccatgcgctgcgcagcctgttcagcctggcgcagcagtaccgctactcgggcacgacgcgcgatgacttcgcggcgaagaatgccgcagcgaggaacgcagtcgagaagtacggcgaactgccgcaggaggtccttgaaggcacgcgccgctcgaagttcgcgccgcctattgtccgccgtggcctgcaacagcgcggtgacagtactgccgcagcggcacctgacgtcgatgaagcaacggtcgcggcggcccaggaagaaactgccggggatgagcaggcatga

SEQ ID NO: 532520 - DNA, 447 bp, Stenotrophomonas maltophilia
atgagcacgcatttttccggcgagggcaacatcggttcgccgcccgagtaccgcgaattccccaacggcaatgacgaacccagccgcctgctgcgcctgaacgtctatttcgacaacccggtgccgaagaaggacggaggctacgaagaccgcggtggcttctgggcgcccgtggaaatctggcatcacgatgccgaacgctggcagcacctgtaccagaagggaatgcgcgtgttggtcatcggtcgcatggaacgcgcgccctggacggacagcgatgaccagcctcgcgagacctggcaggtcaatgcccgcagcgtcggcatcctgccgtaccgcatcgattccgtggccctaagccagaagccgcaggaagcggcagagccgaagactgcggccgccaaggaggaacctgcggagccgaaagagaaccggcgcaggaagtga

SEQ ID NO: 532521 - DNA, 2031 bp, Stenotrophomonas maltophilia
atgcggctgtttctatgcgagaagccctcccagggcaaagacattggccggattctcggcgctacacagcgcggtgaaggctgtctcagcggcaccggtgtgaccgtcacctggtgcatcggacatcttgttgaagccgcaccgcccgaggtctatgacgcaacgctcaagcgctggtccatcgagcaattgcccatcattcccgagcaatggcgagtcgaggtcaaacccaagaccgccacgcaattcaaggttgtcaaggcgcttctggccaaggcgacccaactggtcattgccacagatgctgaccgcgaaggcgaattgatcgcccgcgagatcatcgacctgtgcggctaccgcggccccatcgagcggctgtggctgtcggcgctcaacgatgcgtccatccgcgccgcgctcggcaagctgcggccatcggccgaaacgctgccgatgtactactcggcgctggcgcgctcgcgggcggactggctcgttggcatgaacctcagccgcctgttcaccgtgctcgggcggcaagccggctacgacggcgtactgtcggtcggtcgtgttcagacaccgacgctcaaactcgtggtggaccgcgaccgcgcgattgccgcattcgtctccgtcccatactgggccatcgaggtgaccctttccgtaggcggtcaggttttctccgcgcaatggtctccacccgagacttgcaccgacgatgcgggccgctgcctgcaacagcccgtcgcccagcaagctgcgcagcagattcgagccgctgaccgcgcccaggtggtctcggtcgaaaccgaacgcgtgcgcgaaggcccgccgctgccgttcgacctgggaacgcttcaggaggtttgctccaagcagttggggctggatgtacaggaaaccttggagattgcccaagccctgtacgaaacgcacaaagccacgacgtacccgcgctcagattccggctacctgcccgaaagcatgttcgccgaggtgcccacggtcctggatagcctgctcaagaccgatcccacgctggccccgattatgggccaactcgaccgcaaccagcgctcgcgagcctggaacgacggcaaagtgacggcgcaccacggcatcatcccgacgctcgaacccgcgagtatctccgccatgagcgcgaaggaactggcggtgtaccggctgatccgggcgcactatctggcccagttcctcccccatcacgagttcgaccgcaccgaggtaacgctcacatgcggcggacaggacctggtggccaccggcaagcaggttgtcgtcgcagggtggcgtcttgtgttggccgagcccgcacgtgaaggtggagctgacgatgaaagcgacacggcatcccgtgcccaggtgctgccgcccctacgtgaagacctggcttgccaggttgccaacgtcgatttgaagtcgctcaagacgcttccgccgaagccttacacccagggcgaactggtcaagtctatgaagggcgctgcgcggttcgtaacggacccacgcttgaaacagaagctcaaggacacgaccggcatcggcaccgaggcgacgagggccaacatcatcagcggcctgatcggacgcggttatctcgtgaagaaggggcgctcgatccgcgcctcggatgcggctttcaccctgatcgacgcggtgcccgcagcgatcgctgatcctggcacgaccgccgtgtgggaacaggcgctcgacatgatcgaagccggccagctcacgctcgatgtgttcatcgacaagcaggccgcatggatttcgcagttggtcgcccagcatggcagcgcgtccttgtccatcaacgttccccagggaccaggttgcccgctatgcggtgcacctacgcaccagcgtagcggcaagagtggcccattctggtcgtgcagtcgctatcctgactgcaaaggcacgctgccggtcgagtccggtgcgtccaagcggggtggttcacgcacccgccgtggtggcggctcccgcaaaggcgtctga

SEQ ID NO: 532522 - DNA, 1710 bp, Stenotrophomonas maltophilia
atgactacgcaaactgcttgcgcgggtgcactctccggcgactcgggcggatggcacggcattgactggaccaactgccaccgggaagtcaggaggctgcaggcgcgtatcgtaaaggcgacgcaggaaggccgctggggcaaggtgaaagccttgcaatggctgctgacccactcgtttagcggcaaggctcttgccgtgaggcgggtgactgaaaaccaaggcaagaagactccgggcgttgacaaggtggtatgggacaccccggaaaagaaggaaaacgcgctagatgagttgcgacgccatggctataaagccagaccgctgcggcgagtctatatcccgaagtccaacgggaagctacggccgctgggcattccgaccatgagggacagagcgatgcaggcattgcatcttctgggcctactgccagtttcggaaacccaagctgacggttgctcctacggcttccggccagagcgttcagtggcagatgcggtcgacaggtgcttcagggcactcaatggccagcattccgcccaatggatactggaggccgatatcaagggatgcttcgatcacatcagccacgactggcttctgggcaacgtgcccatggacaagcggatgctggaaatgtggttgaggtgcggcttcatggaagcaggtgcatggtcgggaactgaggcggggacaccgcaaggcgggatcatctctccgacattggcaaacatggcgctggacgggctggaacatctactgggacagtctttccgctcaagaatgcgagatcggaagatcaccaacccgaaggttaaccttgtccgctacgccgatgactttgtgataaccggagactcggagaagctcttggtcgaggaagtcaaaccgttggtggagcaattcttggtagagcgcgggctcacgttgtccgcggagaaaaccaaggtgacacacatcgacgatggctttgatttcctaggccagaatgtgcgcaagtacaacggcaagctgctgatcaagccatcggcagcgagcctcaaggcttgcgcagacaaaatccggacaatcatacggtcgaacaaggcggccaatcaggcatcgctgattcacctgctcaatcctgtgatccagggttgggctaacttccatcggcatattgtttccaagaggaccttcaagtctctggatgatcatgtctggcgagccttatggaaatgggctctacggcgtcatcctgcaaaaggcaagaagtggattcggcatcggtatttccatgcgcagcgtggtcgtcaatgggtgttcgcggcccgatatgtggacccttcgagcaaggaagctcgatgggcaacgctacgtaaggcagtggataccaagatcaggcggcatacgatgatccgcatgggcgcgaatccattcgatccggaatgggaggcctattttgaacagcgcctaggcgccaagatgaaggacaacctacagggtcgaaaacgtctgctgcacttgtggttggaacaggatgggaagtgtcctgtgtgcgacgaatcgctgacgaaagaaagcggatggcacgtccatcatatcgtccgacgtgtcgatggtggttccaaccatcgtggaaacctggtgatggttcacccgaactgtcattaccagatccacaaccttggtttgcaagttgtgaagccggctccggcaatggggctttga

SEQ ID NO: 532523 - DNA, 294 bp, Stenotrophomonas maltophilia
gtgcgctggaaccgccagggaaaaaatggacgcacgcaggttgtgtgtctggaccccgccgccgcatcgcgtggcgggtgctcgatgctcaatatttcggtgtcgcccaacgccgcaagcgtgtgtttcttgtggcaagtggtcatcctgacctcgatccctcagaagtactttttgagtccggtggcgtgctcgggaattcttcgccgggcttcgctccgtggcaagaaactgccgccgctgttggaacgggcactgcggcagcaggcgagtgctcaggatatgcgggactga

SEQ ID NO: 532524 - DNA, 768 bp, Stenotrophomonas maltophilia
gtggccgcatgcctgaccgccgcacccggcccgaagaacgacttcgaggtcgagacctttttggcgcagtccgtcaatggcggcatcagccatacgctcggagccgccaacggtggcaagggttgcagcgaggacggtacgggccgaggcgttccgatcatcgccttcactgcccaaggcagcggcgccgatgccacactcggcctggcaccgacgctgcgtgctggcgagcatcgcaacagccatgcgaacgccggggtcgtgcccgctgtcgccttcgcgcagaacaaccgcggtgaagtgcggttcgagtcgggccacggacaggtggcttgcactgtcctgtccagcggcaaaccgggctacggggtgccgatggtggcttgcgttgccctgcggggacggcagcagggcattgccgccgaactgggcggcgacgttgctgcggcattgcgcaccagcggcggtggagcggacaaaccccatgttctagcccccaccttcgaggcacatctccactacgactggaacgaccccgccctcggtggctggtcgcactggcgggtgcggcgtctgatgcctgtggagtgcgagcggctgcagggcatgcccgatgactacaccctggtgcagtaccgcggcaagcccgccgccgatgcaccgcgctacaaggcgatcggaaattccatggcggttccatgcgtagcgtggctcggccgtcggctattgcaatgcctgcacaaggcggaactgtcagtttcggattga

SEQ ID NO: 532525 - DNA, 1578 bp, Stenotrophomonas maltophilia
atgtccaccatacgtcttcagacgaaccagaatcgcctgatcgaaacctatcgctatgcgttcacccaggcctcgatgctgggcgagctgctacagaacgcccggcgcgcgaaagcccgccacatccacatctccgccgaaggcgacacgctcaccgtcagcgacgacggcgaaggcatcgccaacctccagagcctcctctgcatcgccgaatccggctgggacgaggaactgaaggcccgggaaaaccccttcggcatcggcgtcctctcgacgctgtacttcgcccgcagcctacgggtgcattcgctggaaatggcctttcgcgccaccaccgccgcgatcatcaacggcgaggacatcgacgtcatcgccgcgcccgctcgcatcggtaccgagatccgcttgtgcggtgtcgaccccccgtacaaggggccgacactgacccagtgggtcgcccagcaactggtgcggctgtgcgaagccttccccgtccgcgtgacattcaacggcacggaatttgagcgcccgctggcccggcctggtctggcctggcgggatacggaagtcggccaggttctcatcgatctggacggtacgccgtctcagtaccgctgctacctccaagggcttcccatcggcagatggccatcttcgcaacaccaccagatcgtgatgctgcgtgatgacatgatcgctcgcccaccggatcgccagcaccttctgcacgaggaagaggatggcaagcgcatccagactgcggtcgaacgggccttccgccaatccctgatcgaagccaaggaacggctgtccggggccgatttcgtgatgcagtacgcatccacgtgcctgtcttcatcgaacgctgacctgctcagcaacgtcccctttgtgccgcgcagctggtttcgcgactggacccatgagccgccaggctttcgcagtcattggaccaggtactgggatcgtcatcacgccgaaggcgttatcgcccaggaagtactccaggaggccggtgtctggtccatcgatgcagaagacgatgacgatgtgccgaccgccgaggtctatctggcggccaggcaggccttcctgctggaggagcaccgtttcgatggtgaccactggctgttcgatttactccactacgcagaccctgatcaggtcggcattcaccacggcgaggtgatccatgtggacgacggcctgccattcaatagcgacatcagtggcgtcaccttggtcggaactctgtccgccagcattggaggagacacccgcgaatatgcggtatctgccattcgcaggcacgaccgactctacgtgacgccgcacgcgggtgacgtcacccgcctgttatccgactacatcttcgacgaccgctacgaccaaggccgcgaggacgcggatgcgcagaccatcgccacgttcatcgcagtcggctgctcggtttcacctgcccgtgccatcgaggagctgctaccaaagtcctggcgatacaccccgcagcccaagctcgccggtgccaccgtgcgcctgagcttcgacactgagggcaagctcaccagcgtggagtag

SEQ ID NO: 532526 - DNA, 561 bp, Stenotrophomonas maltophilia
atggaaaccaacacccaagaccgcatcacactgaagaatctcaaagtggcagatttcgccagcgaggaaacgctgtgcttcaccgccaccgtgctgttcgacggcaagccggttgccactgccagcaacgacgggcacggcggctccacccgcctgctcgcactgaaaggccagcgcgatcgcttgtccgaggccgaggccttcgcagccagcttgccgccggacgtcagcgagcacgtcgatcccaacgacaacgcgtgccggttcaccatcgacatgacgctggactacctggttgacgggctggccaacaccatgcacgccgatcgcaagctgcgcagtgcgttcaatcgcgacatcggcaacaaggtgctattcatcaaggacggcaagctgctgttcctcaagggcatcaagctcaaggccatcgtcgatcgcaaggcgtacttcgctgcgctacgcagccggcgggcccagcccatcgtgatcctcgccgaactggcgccggacgaggcattcggactctggaagcagcacgttctgggggacaaacccgactaa

SEQ ID NO: 532527 - DNA, 252 bp, Stenotrophomonas maltophilia
atgtcctccgtttcctcgcccatcgtggtggatgctcggcaagcccgtgctgaatccatcggctatctggcgctggcctacacgggcaagcgcttgcctcttgacgtgcaccttagcgccgctggccactacatcggcacggcagacaaggacgggccggtatcgcgtgagtccgagcactacttccgctcgtaccaagccgccagcaaggccctgacgaaaggccgctggcagcagcggctccatccctga

SEQ ID NO: 532528 - DNA, 393 bp, Stenotrophomonas maltophilia
atgaaccagtccgttccccacgacgtgctcgacctgatcgcacgggaagaccggcactttgcccaggcgcccgaagcgttcttccaggcctggaagcgcggggtccagattgccggccacgagtggttcggcgatggcacctgcgaggggctgcaacgcgccacagagaagtgggatctgcgtccgaacctgctgcggctcaatgacgccctcggcgttttgagtggaggtcagcggatgttcctcgcagccatggtgagcttctacaactcccgtgaaggcggggcgatgctcaggcgctgccaattcgaggggctgtccgatttcggtggtctcgacttggaacgccgcaaggtactcgccgacctgctgctcaactacagcggctggtga

SEQ ID NO: 532529 - DNA, 468 bp, Stenotrophomonas maltophilia
atggcccgaaccccatccatcgccgtcgtcattgaaggcggccttgtcaaagtcacactcgtcgaggactggccaagccacgttccactgccgcgcgtcgtcattgtcgactacgacgatgagggtgcctcagatgatgaactaacgacgttcaacatcgggaacgacgttctcgatgcacgctgccatgaagaaattccgagcgtgtatgaatcctttaccaagcccgcgctttcgccgcgtgccgtgcttcgtgctctcggtgtagccgacgacgatgacgacgaacagccgccgctggaggtcgcacgccgcgtccggcaagagattctcgatctggacgcccgcatcaacgtcacggggcaggctccgaccggcagcgattacaacgagctgtacgtcctggccaactgcggcctgatcgaggtgctgaagtccctgggcgattcgaccaactttggcgagtag

SEQ ID NO: 532530 - DNA, 690 bp, Stenotrophomonas maltophilia
atggcaaacaactactacgagggcactggtgttctggtgctggatcgtgtgacacccgtcatcaaggcgctgttcggcgctttcgcgctggatgcaagttatcccggcaacgggcaggcctatatcgcccagatcgccgaaaccaacgatcctcaatgggacgacgtactggaaggcctcgccgatctcgctgccacgctggggcttgatctgcccgatcagcaaggcgattcgccgctgtcgggcgttctcgaagtccttgccgagcacttcggtgccgaccaggacgaagaactggaaaacctgatcgagcatcatcagttcgaggatggcgccgaattggaggcgctgcttctgatcgctacctgcttcgatgacggccatcacctgagcgccatccagttcgaaggctgctggtactgcagcaaaccacggctattcgagttcggcggcaacggctgctttctgagccgcgaagtccgcatcttccgaacgtcgtcggaggcctcgcaactcggccatcggctccgcaacgccattctggcttccgacgccgaagaggcatcggctttgattgcgctggaggccgccaacctgttggcgggcatccatgacgaagcgttccgcctgaaggtgcgccagcgcgttgccgaaaggctggtccggatgccaacgatcggcgccgcctga

SEQ ID NO: 532531 - DNA, 717 bp, Stenotrophomonas maltophilia
atgtccgagtccaacaaccccttcgtccgtggttaccggaatctgcgcaccgtccgcacgttgctcatcacctgcgaggacgatagcccacctgtctggcggccgctgcatgccagccaggcgagcttgcccgacgatcaggtggcacggttcccgtgcctggtcggccaggacttcgcgttgatcacggagggccaggaggttccgcccgagttggaagcgcagtgccaggctgacggcattgtccgctcggtggtttatgccatcgagggtgacaatttcgacggccagcccatccatgtgggtgacacctattccgaagagtcggcccgccaagtgatccagcggctgagctttgagacgggtttctacagccgctgctgggaaatcagcaccgcgcacatcagccacaaaaccgaccagtatctggccagcctcgctgacctcggcacacctgagccttttctgtttatcgcctttcgtgtgccgtacagcccggcgatcggcgtcaagctaatctccacgccctggacagacttcaacctggagcacgccgaaggcatcaccgccgcacagcttcggcaggagcaccgcgacaagggcatgcctgacgacctggcgaacatccttgaactggcgggccaggccgatgtgcgcatcctcatcctggacgctgacgcacctgttctgccaggccttcccctgatcgaactgtag

SEQ ID NO: 532532 - DNA, 270 bp, Stenotrophomonas maltophilia
atgttcatcacacctacacaggacttcgaacagcagcttggggcctgcatcaacgccatgagccaggatgacgccatcggccagaccctggtgttcgagcgcacaagcggcacgctgcacatgcgccacatcgccacgctggacctgattgacaccgatatcggccgttacgagatggtggtgttcgacggcggcagcaccagcggcgacagctggaagcacatcttttttccacggcagcgcgagcactgtttcgtgtacgaagcctga

SEQ ID NO: 532533 - DNA, 813 bp, Stenotrophomonas maltophilia
atggatcgcaacctcatcaaaaccctgatgccttcgttcgtcgccggtcacgtgccacgcaacgtacggacgtacaagtaccgcgtgttcgatggtctgccgcaaccgtctgcactaggcttcgctttcgatcccaatcccttcgagggcaaggtggtcgcagcgaccgacgatgccatcgtcgtgaagctcaagccatccgagttcgcagtacttgatcccaagctggtgaccaccgtccccacggaaggcaccaaggtgcgtgtcgaaccctacgctcggcgccgtttcgacggtctgcgcgcggacacccccgaagtcatcaccgagaagaccgcagatggcacgccgtacaccatcacccggcacatcctcggctccgctcctgccaagctgcccatccccgaaccgcagtgcatggagctgggccagctcatccagcagatggaagaaatgcctgcgcccgatggcttccggcggatcacccacatgctggtcgatgcaggtgccaaggacttcagttgggtcgatccggtcccatcgaagattctcgaaacgcctccggcgatcagcttcacggtctcgaccgcgaagttcgagggccgcgtaacggtgctgtacgaccgtgcgagcgacgtctacgcggtggaactgcaccgcgatggcgaattggtcgaccggcatgacgaggtgtatttcgacatgcttggtgaagtactggagcggctcatcgacgacgggcgctggcgccgaatcggcgtgagcgtcctggacaagaagacaactcggcagcgccaagcggtatcggtatga

SEQ ID NO: 532534 - DNA, 294 bp, Stenotrophomonas maltophilia
atgcacgatcccttcaagatcaccgaaccgacctgcatcagcttcagcggcgggcgcacgagcgcctacatgctgtggcgggtgttacaagccaatggcggcttgcctgccgacaccgtggtctgctttgccaacacgggcaaggaagtggaagcgaccctgcgcttcgtccacgattgcgccgagcactggcaggtgcccattcaatggctggagtatctgcccatggagccgggcttcattcaggtcgatttcggccgggccagccgccagggcgagcccttcgaggcctga

SEQ ID NO: 532535 - DNA, 918 bp, Stenotrophomonas maltophilia
atgagcaccacgtccaacgagcaatcgtatttcgacctccacacctcgggtatcggctacatccagcgtgcccgtgaagtacccgtcaggggcggccgccgtgcgcagcccttcctggcatgcaccatcgccgcgctggtcggctccgctaagaacccgacctaccgctacttcgacgtcaaggtctccggtgccgaggccaagaaactggtccaaagctacatcggcattgacgatcccaagcagcgtccgctggtgcgctttcgtaccggcgatctgcgcggcgatcccttcatccgtgacaagggcgagcgcaagggcgaagtcgccggctccctcaaggcccggctgctcaaggccgagctgatcgagcgaaccgaactggcttcgatcaagcagcacgagctgatcacccgcggcattggctacctcagccgtgtgaaggacgtcacccccaaggatggcgatcccttcctggcatgcaccatcgccgcactgagcgggcctgtcgatgaaccggaatatcggtacttcgacaccatcgtcgcaacccctgaagccgagcacctggttcgccggtgcgtgcaggccatcgaaggggatcgcaaggtactgatcgccttccgtctgaacgacatgaagatcgacccgtacatccgcgccaagggcgagcacgccggggaaccggccgcaaacctggaatcgacgctggtccacatcggtctgatcaagatcgacggcaccaaagtctatccgacgagtcccgcgcaagccgagacgccatcggcccaggacgctccgtcgcccgaagccgaggacaccgccgacgccgcttccgacaagcctgaacagcccgccgagcgcgagcccgaaggcgaagtcgaggagcaggagccggcactggttgcttccttctga

SEQ ID NO: 532536 - DNA, 693 bp, Stenotrophomonas maltophilia
atggcagccacatcgacatccgagacttcggtctcgcccatcgttgtcccaggccagctcacgctgcgcaccattcacggccgcaacggcaagttcaacgtcggcaaactcgaatgccaactcggcaagttcacaatcaaagacgccgaattggagcagtaccccgagggtaagtatcggggggagttcgtcctccgctacatcttcctcaaaggctatccggtcagcgacggcagcatgcgtttcgagatgcgcgccaacctggacggcatgacgcttttcggcatcgacaagctgagcaaggccgaagtacatagttttgccccgcaagaagtcgatccgctggatgaagagcaagggacgcagcctgcggcaacgccggccaagccgaccaaggcatccaagcccgccaaacctgcgtctgtgcaggcgttgtcggacccgctcgtcgacaccacgccgttcggtgtggacgcgccgccaacggttgcgcccacgtcatcgggcagtgccgaagatggcgacgccgcgttgttcggcatcctgtggccgctgggggagtccgtgaagctggattcaaccatcgaccgccgcaccctgcgcgcgcagatcgctcgcctgggcgaactgggctacgcgctggacttcaagacgcaggagtggagccgcgaggccgaactgcaacctgcgtga

SEQ ID NO: 532537 - DNA, 348 bp, Stenotrophomonas maltophilia
atgtcaaccatcgattgcgataccccatcacgtctcatcgatgatcattgcccgctggatgaacccgcctggcgggccgtctgcgacgctacggctgaacaagccgccaagggctgcgggctgtctcacgactactacgtcgaacgcttcagttcgtcaatcggcgcgcaagctcgtcaactgcccgagaaccagcgtgcgcaggccctgcaaattgcacgggaatgggactacgcaacacctgccgaacggcaggagacccaagactggaacgctgcacacggctactgcatgcacggcatcgatcggaattgttgtcctgccggctgcggcgaccttgagtactga

SEQ ID NO: 532538 - DNA, 399 bp, Stenotrophomonas maltophilia
atgggctggtatttctctcatcaatcgcgatccgacttgatcgcagaactcatcgctccgcaggagaccgagcgtgccagcgtgaaggtcatcgcccacgcgctgcgcggcaacgtcctgtggtccgtggtcgaagtaacggccaagaccgaggacgtgcatcgtggtctcgcaccgggccagtccctgcgcaccatccgctgcgatctgcttgaacgcagcggcggccaatggggctacaagccattggacgagtccatgcacccgtactactactcgtgcccgttgagttacctcgacatggcacctgaacagtccgccgactggcgcacaggcgttcgcgcctaccacgcgcgacggcgcacacccacggcatccgccgaggcactgacggcctga

SEQ ID NO: 532539 - DNA, 342 bp, Stenotrophomonas maltophilia
atgagtcagcactacttcgagacttcccacaagggatttcccatcaccgtcattctcggctgggaccggccgatgcagcacttcttcctgctcatccgcaagccggccgagctggaggatgacaccatcgaggtactggacgagaacttcctctacagcaatctgtacgaggcagacccgttcggccatgacttggactactaccgcgcagtcctgcggcgctttcggatcagcgtgcccgaaagcatgttcaaccaggttcagatcgacgccgtgatgaatgcgggcaaccgtttcgtcaagcatacggccgacggcgcgtactccgtactgggttcctga

SEQ ID NO: 532540 - DNA, 327 bp, Stenotrophomonas maltophilia
atgttcaagaaatttctatccagcaagcccatccacagtccgaagacaccccggttttccgtcggcgctatcaagctcagcgagaaggtacgctggctggatgaccacgggttgctcgatcccattgatctggtgcaacggcatatccgtggcgactggggcagcatcggagagtccgaacgacgctcgaatgaagatgcgctttcccaggaaggcatcctcttctcgcgctacatcatcacaccacgtttgacggtatccgttacgactgatgagcatcgcgacctgacgctggtcaagctactcgacgagcaaatcagcatctga

SEQ ID NO: 532541 - DNA, 300 bp, Stenotrophomonas maltophilia
atgtctacctctgcgcaacacgtttttcccagattcaaccccggcctggtcgtcatgacctcgggggtcgccagtctcatcgaacaaggccagttcaatcctagcccttatctattgcggcatttggccgccgactggggcgacctcagcgacaacgaccggcaccagaacgacgacgcgctgaagtcgggcgaggatcgcctgttctcggcctacgaggtcggcccgaatctgaaggtttgggtcatcaccgaatgggatcgcagcgtcaccacggtgctgttgcccagcgaatactga

SEQ ID NO: 532542 - DNA, 1719 bp, Stenotrophomonas maltophilia
atgactacgcaagaaattgattgcgcgggtgcgccctcacacgaatcggtcaactggcacagcatcgactgggccaggtgtcaccgtgaagtgcgaaggctccaagcgcgtatcgtaaaggcgactcgggaagggaaacacggcaaggtgaaagccttgcagtggattctgacccactcgttcagcggcaaagcattggccgtcagacgagtcaccgagaaccaaggcaagaagacgccgggtgtggatggcatcacatggtccaccccggaagccaagtctcaagccatgttgtcaatcaagcggcgcgggtatcgtcccagaccgctgaagcgtgtctatattcccaaatccaatgggaagatgcggccgctgggtatcccgaccatgaaagacagggcgatgcaggcgctttacctgctggctctcgaacccgtggccgagaccacagcggacggacgctcgtttgggttccgaccggaaaggtccacggcggacgccatcgaacagtgcttcacggcgctgtccaagaaggtggccccgcaatggattctcgaaggcgacatcaagggctgcttcgacaacatcagccatgactggctcatgggccatgtaccgacggatcgcgagatcctgaagaagtggctcaaggccggatacatggaagatcggcaactttttccaaccgaagccggtaccccgcaagggggcatcatctcgccaaccctggcgaatctcgtcctcgacggactggaagccaaactggatgctgctttcggaagaaagcggtacgccaacggtgtacagacccgtttgatggtcaactatgtgcggtatgcggacgacttcattgtgacgggacgctcgaaggagctactggaacaggaggtcatgccgatcattaaggacttcatgcgggaacgggggctcacgctctcatccgagaagaccaagatcacgcacatcgacgagggcttcgacttcctcggacaaagcgtccgcaagtacaacggcaagctgttgatcaagccgtcgaaagtgaacgtggcgaccttcttgggaaaagtgcgttcagcggtcaaaggcaataaggcgctggatcagcctcggctgattcggatgctcaacccaatgatccaaggctgggcgaattatcaccagcacgtcgtgtccaaagcgacgttcgcacgtgtcgatcatgagatttggcgtgtgttgtggcagtgggccgttcgtcggcatccgaagaaaagcagcgtctggatcaagcagcgctacttccattccgtaggcactcgcaattgggtgtttgcggcagcaacaggtgaaaggttccctgacgggaacccgatcttgacgtcgctgcggaaagcaacggatacgcccattcggcgacaccggccaatcaagttggaagccaatccatttgacccgacgtgggaaacgtattttgaggagcgtatgagcctcaagatgcagaactcattgaggggcaggaagaagctcatcaacctctggctggatcaggatcgccgttgtccaatctgccagcaattgatcacgcaggagacggggtggcatgtccaccaccttattcggcgggtcgatggcggaaaggacggaagtaccaacctcgtgatggtgcatccgaactgtcataaccagattcacgtcaatggtctcaaggtggtgaagccggttcgcgaaagcgggctttga

SEQ ID NO: 532543 - DNA, 1158 bp, Stenotrophomonas maltophilia
atgggtgtcatcgcatccaaggttcgcaagacggtttcgctcaccggcacgttgatgggtggctacgctgacgacattttccatttgctgttccgcgcgcttccgggccgcatgatcgaagacggctacgtccccagtcgcaacggcagcatgaacgccgccgcgatggccttcatgagggatcacggtgtcctcaaggacatctattccgagtccgatggtccggcccacaagacggccaagggcagcaaggtcacggtcagaacggtcaaggctccgggcttcggccccaagggcgtgttgcgctgcatcctgccgtacaccatcttcctgaagctgcgagacatcggtggcgtactgccaccgtatgacgaggagttccgggacgtggcgatgagcgccgagcaaggcgaggcgtatcagaagctggcttccagcctcacgcaacagctcaaggaggccctgcgcaagcgggacaccactttgctgggcgtggtcctcaacacgctgctggcgtggcccgactgctgcttcagggcggagacggtccgccatccgcgcacgcgcgaggtgctggcattcaccccggcccagttcaacgagctggaggtgatgcccaaggaacgcgagctgttcgacatctgccgccaggagaaggaagcgggtcgcaagaccctggtgtattcggtctataccggcacgcgggacaccacgagccggctgaagatgctgttggagcaggaaggctttcgggtggcggtactgcgcgcgagcgtggatgccagccagcgcgaggactggattgccgagcagatcgaccggggcatcgacgtgctcatcacgaaccccgaactcgtcaagaccggcttggatctgctcgaattcccgacgattgtttttctccaatcgggctggaacgtgtacacgctgcaacaggccgcgcgccgctcgtggcgcattggccagaagcaggccgtgaaggtcatctacctggggtatgccgcctcttcgcagatggcatgcctcgcgttgatggccaagaagatcctggtctcgcagtccacctcgggcgacgtgcccgaatccggactggatgtgctcaaccaggacggtgattccgtcgaagtcgcattggctcggcaactggtcgccgcctga

SEQ ID NO: 532544 - DNA, 528 bp, Stenotrophomonas maltophilia
atggcagcaggtattgcgaacggtgagggatttgtaacttcgacggatgtgcaggatctgacgcccctctattcgcatgtgcgatatgacggcctcgatttcctgcgcaaccacgatggtgcgcagttgtcccagcctgaagatgaggagccgggcatgttgtttgaaattggtcgcctgatggtagaacgtggcgtggctgctggtgttgaatacgttgacccggaagctgccgctgccccatcgatgtcaggtggcgatggttactacaaagtcttgatcaatgggcaggatgccggcgtcgctctaacctcaagcggcgcagcgatggcattgcggcaggcggggctgcaagaaggcagtgtggaatggggcgaggtgctacacggcgcgtcgccatttgtacgttccaattaccaaggccatgaagagcgcatcgagttgcgctggagcattcgtcggcgggtcgtggacgatttgaagtccgtccatggagtcatgtcttgggtcgctgccgatgacgattag

SEQ ID NO: 532545 - DNA, 1149 bp, Stenotrophomonas maltophilia
atgaaacgaagcacaggcacctatgccacatccaccacgctgggcgagccggtacgggctttcgtgccgcatccgctgcctcccgccgagccgcctctggcggcggcgtcctttgccgacctgaaccgtcaggcggaactggcactggcccggctttcgggcgtgtcggggctggtgccatcggtggattggctgctctacagcgccgtgcgcaaggaagccctgctcacctcgcagattgagggcactcaggccacgttgaccgacctgttcgacgaggaagcgggtttcaaggtcagcaataccgatgatgtggccgaagtaagcaactacctgcgggctttccgcctggtccaggaacagttgcgcgaccccaaagggttgcccatcagcgtgcgcctgctgtgcgacgcacaccaactgttgcttgatggtgcgcgcggcgcaggcaagcagccgggcgaactgcggcattcgcagaactggattggcggcacgcggcccggcaacgcggtgtttgtgccgccaccgccggagcgcgtgccggaactgctatccaacctggagcggttcatccacgatacgaaggacgagttgccagccttggtcaagatcgcactggtccatgcgcagttcgagaccatccacccgtttctggacggcaacggacgcatcggccgcctgttgattgcagcgctgctggaacactggcgcctgctggccgagccgctgatgtacctcagcggttatctgaagcaacaccaagccgagtactaccgccgcctgtcggtgatccgtaccgagggcgattgggaatcgtgggtgtcgttttttctggaaggtgtggcggtctcggcagcccaagccgaacagagcatcatcgccgtcgccagcctgatcgccgccgaccgccgcaaactgctgcaatccccaaaggctagtccggccagctaccggctgttcgagttgttgccgatgatgccgcgctttaccgtggaacgggtacggcaacagcttcaaaccacgttcccgactgcaaacgcagccgtgcagatgctggagcaactgggcatcgtgatcgaagtgacgggtcagaaaaagaaccgtagctacagctaccaagcctacgttgacctgctgacgcggtga

SEQ ID NO: 532546 - DNA, 567 bp, Stenotrophomonas maltophilia
atgcccgcaatccatccatccctgagactggccggagccggcctgttggccgcagtcctggccagcggctgcgcgacgatccaggcgccgctgccacccgaacccatcggggaagttgagccagccgtcgagcccgaaggccccgagttcgtgccagtggtgcgctatggccgctataccctcgtggagctggcaccaatggcgcagcagcgcgacctgctgctgcaaaccatcgacgtgtccatgcccgaggacgcccgtgccaccgttggcgacgggctgcggcacgtgctcaagcgcagcggctaccagctctgcgagaccgcgcatgcggtgatcgagctgtacgcgctgccgttgccggcggcgcacctgcatctcggccccatgaccttgcgtgatgcgctgctgaccctggccggcccggcttgggaactgcacacggacgaccggatgcggcaggtctgcttcgagcggccaggtgacagtccaggcgctgaacccgctcccgtgccgcccgccgccgacgcggtgcagacgttcccgattgctgggggccagccatga

SEQ ID NO: 532547 - DNA, 642 bp, Stenotrophomonas maltophilia
atgaacatcccgcaaccagtccagcgctctaccgccgccgtggtggtgcaaagcctgctctggctttggctggtcggtctcagcgtcttcgtcctcctgggctaccaggcgctgaacgatcagaccaatcaggaacgcctcaatacccggctgcaacgcattgaagcgcaggtggccggattgaccgaaaccacccagtccttgcagcggcgtcccgcagcggccaccgccgcaaatctgcaagacacccgccaggctatggaagcccgcattgctcagatcgagcaggaactgagcagccgcgtcgccacggaagacctggacgcactgcgtgcggaggtcgagcagatcaaggcacgccaggccgtcgcgcgcgctcccgccccagcccagccacgctcatccaggccagccgtcgccaaggccgagccgccgccgttgccgttccgcgtcatcggcaccgaactgcgggctggccatcgcagcgtctccatcgcaccgagcaccgggaacttcaccgccagccagatgcaggtgttgctgccgggtgatgcggtcggttcgtggcgcttgcagggcatcgaaggcagtaccgccgtgttccagaccgacggccagacgcgccgcgtggcgatcccttga

SEQ ID NO: 532548 - DNA, 726 bp, Stenotrophomonas maltophilia
atgaaacgccatctcatcccgatcctgctgctggcagcactgcatttgcccgtgtcggcccaacaagcgccccagcaaacctcggccgtccagcccggccgcaccagccaaagccagatcacgcacagccaggacgcccaactggcgaaggcctggggcctgcgcaatgacgaattcgcccgctaccgcgaactgatggaagggccgatcggcacctactcgcccaacctggacccgctgtccgtgctgggcatcgaggcccgctcggacgaagagcggcgacgctatgccgagttgcaggtacaggtcgaggcgcgccgggtagaaaaactgctcgcctaccagcgtgcctacgacgaggcctggcagcgcatgaaccccggaatgccacgcgtgaacctgcccgacgactcgccgagcactgcggctgctcgtggcagcggccgtacggcggtgttcgtgaaggacggctgcgccacatgcggccaggtcgtgcagcgcctgcaaacgtcaggcttgcagttcgacctctacatggtcggcagtcgccaggatgacgcgcgcatccgcgactgggccaagcgcgcgcagatcgatccggcccgcgtgcgcagcggcagcatcacgttgaaccatgacgccggacgctggctgtcgctgggcctgccgggcgatctaccggctgtcgtgcgagaggtgaacggccaatggcagcgccagccctga

SEQ ID NO: 532549 - DNA, 540 bp, Stenotrophomonas maltophilia
atgacgaaaagccatttgcccctgtggggcctgctcgtatcgctggcaggcctgccgctagccgtgcacgccggcgaaccgctgatcgtggtcgaagacagtggcggcacctcagcgctgccgtactacgaggcgctcaacctacaaccgcgccgcaatggtgcggcacagccgcccatcccgacaccccaggttcctgccacgcctgcggacgaggccgccatgctgccagtgcgcagcgccaagctcacgccaggcactgtggcacggcgggtgatcgaggcaccgggcctgcgggcctttgttgtcgtgggtgacgacgaggcttcgcgcgcctggctgcagcgccgtgctgactcgctgcgcgagcgcagcgcggtcggcctggtcgtcaacgtcgagaccgtgcaagccctggcgcggctgcgcgccctggtgcctggcgtgcccctcgcgcccgtggccggcgacgaccttgccgaacgcctgggcctgcggcattacccggcgctgatcacagccaccggcatcgagcaatga

SEQ ID NO: 532550 - DNA, 1050 bp, Stenotrophomonas maltophilia
atggaatgcttccggatcgatgagagcggctacaccggcttcgacctcctgaatcccgagcagcggttccagggcgcgacggccatcgccatcgaagacgatgaggcaaggcgcctgatccgggagcactttcccaagctgcaggcggtcgaactgaagtaccgggccttggcgcgacggccggccaaccgcccccgcctgatggcgctgcaacgcgacttgctcggtggctacaagtgcgtgacctacgtctgcgacaagcgctacctgctgctgatgttcctggactatgccgtcgagccgttctactacgagcgcggaatggacttctaccaggacgggcagaactattcgctggcatccctcctgtacacggtggggccgacacttctggggcaaggcgctctcgaccgcctgctggcgagtttccaacgcgcggtgaaggaaaagagcccggcggcgctcgccgatctggttcaggccgcccgtgcctcgcgttggcgggagttgccggaagcgctggggcctttggcgcagttcgccgcccccgagtgtctgcaagcgatcgccacgccgggtgtcagcacggatgctgccctggtggtgctgcagtccctgatcagccggatggaggtcatggccaatggcgcttatcgggtcgagcacgatcagtccaagaatctgctggcctatcacgacctgctgcagcgctacatccaccatcaggatgtggttacgttccaacagtcggagatcgccagcatcaccttcccgctcaagctccagtcggtgacgcaggtcgactccaggaacagccccgccgtgcagctggcggacgtgatgatcggcgcagccatcgaggcagcaagcacgctgaagggacaacgtgccggtgcgctggacgcccgggaaatcatggcgttgtatgccgatcatcagcttatccacatgctgccgtcgatcgacttcgaggagcaaaagcgcttccgccaagggacgcaggcgtcgcaggtaattgactacttcgcagagaacttccacaagccatag

SEQ ID NO: 532551 - DNA, 147 bp, Stenotrophomonas maltophilia
atgcctaggcgtcgcccgcagcctgtcgcggagcacgagccggctaccgcgccgtcatcggccacgccggagccggcgggcgacctgcacgcctctttcaccgaactggccgagggcacggttcccatcattccggggaagagttga

SEQ ID NO: 532552 - DNA, 675 bp, Stenotrophomonas maltophilia
atgagcgtcgttgcggaccaccccggcgtgtcgaccctggtgggcacgcccaaagaagttcaggcccggctcggccgttcccaggccgaccgcgtgctggtggtggcgttcgaccacatcaagcccaatgtcttcgcggcgctggcggagaacttcaccaatgtcgcgtcgtccatgttcgaggtgttgcttgaacgccaggatcgcgaatcgctcgaacggctggccgaggtgttggtgccgcgcaatccggcatcgcccaggctgctgaaggaagcgagcatgctggtgcaggcgcgcaaggcggtgctggagagcggcgattggctgacggcggcgcagatcgcgcagttggcaggattgagcacccgcaatccgagcgcacagcccaacaagtggaagaagcaaggccagatcttcgccatcagccacggcggcatcgactactttccgggctacggtctggacgccgatgcggactttcgtccgctgaagtcgctggccaaggtcatcgaggccttcgccggccacaaggacggctggggcatggcctactggttccgatccgagaacagctttcttggcggcaagcgtccgcaggacctgctggcctcggtgccacagcgcgtcatcgcagccgccgaggacgaggtccaggaagtcgcccatgcctag

SEQ ID NO: 532553 - DNA, 903 bp, Stenotrophomonas maltophilia
atgcgtcccatcacgctctacgtcatcggcaacgggttcgacctctggcacgggattccctccggtctctgggacttcaagcagtacgtcctgggcgccgaccgggatatctaccgggaggtcgaggactacctgccggccggggaggactggtgcgacctggagcaggccctggccgagctggacgccgacatgctggtcgacaacttggggcacttcatggggtcttatggggccgaggactggagtgattcaggacaccacgacttccagtacgaagtcggcaacgtcgtcgagcgtctgtccaccggcctgcggacgcgctttgccgaatggatccgggcgctgcccatccccacgccggagaccgccccgcggcggctggccaggctggaccccgaggcgttgtttctgagtttcaactacacggacacgctcagcaggctctatgggatcgatccggcgcgggtcctgcacattcacggccgagccgatgcgccagaagaggaactcgtcctgggccacgcctggaatccccagtcccgccgctcgctgaatgagcgcgcggatatcgaagagatcgatacgcgcctggtcgaggccaacaacgccattgacgactacttctcgaccaccttcaaacgctccgaggagctgatcgcccggcacaggccattcttcggggcgctggataccgtcgagcacgtggtcgtgctgggccactccctgtctccagtcgacgcgatttatttccgaacgctccttcaccaacctggcgtcgccgcagcgcagtggacggtcgcctgccgcaacgcgcaagagtggcccgagaaggaacagcggctgatcgacgtgggactgcggccaggggcgtaccggccggtgccgtgggacgcgctgtaa

SEQ ID NO: 532554 - DNA, 903 bp, Stenotrophomonas maltophilia
atgctgtcgatcgatgaagcttttcgcaagttcaagtcgcgcctggaactcaatgagcgcgaacagaagaatgcctcacagcgccagaacgaggtacgggactacctgcagacgaagttcggcattgcgcgcagcttcctgaccggctcctacgcccgatacacgaagaccaagccactcaaggatatcgacatcttcttcgtgttgaaggactcggagaagcactaccacggcaaggccgcatcggtggtgctggatgactttcacgctgcattggtggagaaatatggcgaggcggccgtgcgcaaacaggcgcgatcgatcaacgtggacttcggtgttcatatcgacgccgaggacaacacggactaccgggtggtcagcgtggatgcggtgcccgcatttgacaccggcgaccagtatgagatacccgatacggcgtccggaaagtggatcaagacggacccagagatccataagtccaaggcaactgcagcgcaccaagcctatggcaatgagtggaaaggtctcgtgcgcatggtgaagtattggaacaacaaccccaagcacggtgatcagaagccagtgaaaccatcgttcctgatcgaggttatggccctggagtgtctttacggcggatggggaggatcgttcgatcgcgagatccagtcgttctttgctacgcttgccgatcgtattcatgacgagtggccggatcccgccggcctcggccctgcgattagcaacgatatggacgctgcgcgtaagcagcgcgcgcagcaactgctgtttcaggcgagccaggacgcaagcaccgcgatcgatcacacgcgccgaggtcgcaatatcgaagcgcttcgtgcctggcgtgcactgttcggccccaagttcccactatcctga

SEQ ID NO: 532555 - DNA, 939 bp, Stenotrophomonas maltophilia
atgaagcatcacgcattcgccttgctggggctgatcgccgtgacgatggcacctaccgcccaggccgtggaaatcctgcgctgggagcgcatgccgctggctgtgccgctgcaggtcggccaagagcgcatcgtgttcatcgaccgcaacgtccgcgtgggcgtgccggccggggttggcgagcgcctgcgcgtgcaaagcgcaggcggcgcggtctacctgcgtgcgagcgagccgatcgagcccacgcggctgcaattgcaagatgccgacaccggcgcgctgatcctgctggacatcgccgccgagcctgccaaggacggtgagccggcattggagcccgtgcggatcgtcgaaggcgccaccacgcccgcgccgcgctatggcgatcagacggcaggtgccgacgagacgccagtgcggtctgatgcctcggggatcgcccgagccgcccgccgtgaaaccccgctccccgttgtgctgacacgctttgccgcgcagaacctctatgcgccgttgcgcactgtggagccgctgccgggcgtcgcgcgggtcaacctgcgccgcgacctggaactcggcacgctgatgccgacgctgccggtgagtgccgtcgcgctcgcctcgtggcggctggaagaccagtgggtgaccgccgtgcggctgaccaacgacagcagcggctgggtcacgctcgacccgcgcgtgctgcaaggcgattttctgaccgccaccttccagcatgaggcgctcggcccacgagggacaccggaggacaccacggtcctttacctggtgacgcgcggccgtggcctggcgcaatcgctgctgccggcgatccaccgcttcgacccggctgcacatctgccacagccggaaacagaggcccgggctgtcgagggcagcgaggacagcaaggaggccggccatgcgcagtaa

SEQ ID NO: 532556 - DNA, 774 bp, Stenotrophomonas maltophilia
gtgtccaagctaccgcccattccgattcagttgcagacgtttcgcaagcatctgcgtgaccgacgtgctctgcgctgggcagttgtcggcgtgctgatcgcggtgccggcaatctggttcctgatgacttcgcaggacatgcctagcgcaaggcgttcctcagctgcgggtaccgcgcaggtatcgggtccgccttggcttctgggcaatcctgacgcgcgcttcaccgtcgtcttctatgccgacctggagtgcccgtactgcaaggcgtattcaccgcagattcggcagtgggtctccgagcacgaggacgtcaacctgcgatggcaccacatgccgctgaccgtccatgaacccgccgccggccaggaggctcgtctggtcgagtgcgctggtctggccggtgggcatgaggcgttctggtctgccgtgcagtgggtctatgccaacacgcgcggtgatgggcaaggtctggcgaacctggaagcgttccccggcgtgtccgccgagatcaagtcgtgcataagcagcgaacagaccgcaagcatcgtgcagtcccaggccggggaagcggccaagtcgggaatcacggcgacgccttcgctgcgccttgttgatcactccagcggcaagagcgtcttgctgcctggccctgtgcctggcgatgcgctgctgtcggcgatcgatatgctcgctgccggcgacgccgccgaaccgccagcagatgtcccgtcgtccccgtctgacgcaacggtcacgggatcaccccagtga

SEQ ID NO: 532557 - DNA, 498 bp, Stenotrophomonas maltophilia
atgaccgcgttttctgaatctttccgatcggaagtagcccgaatagcgcgcaaggagaacaagggggatatcacttccctgcgcaagttgaccgccagccagcgtggcgaaatcgccgcgctcaagcgagacgtcaaggcgctggccgggcaggtgcgcgggctggccaaggcgctggaaaagtcactggcatcgatcggtcgtcagccttcaggaagccaggccgccgatgcgtctcgagttcctggcgccgcaggcgcggcggtatccccgaagcgaggcggacgccccttcgttttcagccacgaggcgttgctcgccaagcgaaaggcgttccagatgagccagaaagagatggcccaactgctcgatgcgtcgcccctgagcgtctacaagtgggaaaccggcaaggtcacgcctcgcgcggcccagctcctgcgcgtgcgtgaagtgctcaagatgggagtgcgcgaggctcgtaagaagattgccgaataa

SEQ ID NO: 532558 - DNA, 447 bp, Stenotrophomonas maltophilia
atgccagcatccttttccaaattcgcatcaggctggcgaaccctgggcctggccgttgcgctaccggcgtcgctggcggtcttcagcccggcgacgtacgccgccgacgtggtggtcgtcaccgacagccattatccggtcaagaccatgggcggcgagcgtttgatcgagctggacgaagcgtcccgtatcgaagccgagctttccgcgcaactgcccgccgatgccgagcaggcgtccgccatcgtcaagggccggctggacaagggcggtgctgacctccagcgccgcgccgcgtccgcctaccagggcgttgccgacgcctggagcctgggcatcaccaccattccggccgttgtggtggatcagcgctacgtggtctatggcgagacggacgtggcccgcgccatcgcgcgcatcgaacggcaccggagggcagcgccgtga

SEQ ID NO: 532559 - DNA, 369 bp, Stenotrophomonas maltophilia
atgagcgcggtgcgcatgacctggcgccccttgcgctggctgttcagccggcgcgcggcgaagacgctgctgtggacggtgatcatcgtcgtcgccgcggtgggggccaacatcgccggcatctatctggtcggcagcgtggcgggctgggaacgttggctggccgcggccgcagggtacttcttcatctggcggctgtgcctttacggagcgacggcctatggctgggtctggatgcgccgccggttgctggcgcgcgaagaccaacaaggggcagattcacaggcacggagacgcctgatgcgcagcgagatcgcgtgcgtcgtggccatcgtggcgctggaagccagcctgtggatgcagggctga

SEQ ID NO: 532560 - DNA, 1548 bp, Stenotrophomonas maltophilia
atgacgctcttcacgaccgactacctggagtactacctgacgctggtttcgtggatcgtccataacggcatctgggccgtgctggtgtccagcggcgtcttcgcgctgccttttctggcgatcatcgtgcaggagtggctcaaggcccgctcggaaggtgcggacgagggcaacaagggtgtgctttcggctgcccgcatcgagaaccgggtcttcgtcgccatcgtggtggtgatgttcgctggcatcccgttcatcgacgtggatctcaacaccatccagtacgacagctcgcgctcggcccagtgccaggtcaacgtgccgcagccgaccgacacgggctggtcgcagtcgttctccaccctcaacaaccaatcggcgaaggtgccggtctggtgggggttcatgcacgcgttgtcgcgggcggtgaccggcgcctcagtggccgcaattccatgtggtactgacctccggcaaatgcgtatggagatcaacgccacgcgcatcgacgacccgttattggcccaggaagtggccgatttcacgcgcgattgctatggccccgcacgtgccaaactgttcatgggtcgccccgatctcgatggcgaccagatgcacgacgtcacctggattggctcgcgtttcttcaccgataccgcaggctattacgacacctatcgcgcccagacaccgcgcgacggctgggcgtacgacagcgaccgggatgccggcctggcccaggtgccgagcggtgcaggctatccgacctgccgccagtggtggagtgacggtggcaacggcctgcgcgcccgcttgctggctcaggtcgatgccagtttgctcaaccgcatcgccggctgggccggattcctcagccgcaccgaggtggatgactcggtgatcagggctatcgctgcaccgggccggcagaaagtcaacctgggtggcgtctacaccgactacagcggccagatcaatatgaccgagccgaacctcatcacccgcgtagcaagtgacgtgggcctggcggtaggctcgcttgcttatttccccgccatggatgcggttcgccaagcgttacccatggtgctgtctctgctgaaaatggccgtggttatctgcaatcccctggtgctggtgttcggcacctacaacttaaataccgtgatgacgatcagcatggttcagtttgcgttgtttttcgtcgacttctggttccaactcgcgcgctggatcgacagcacgattctcgatgcgctctacggctggggacttggattcaatcggccgcacatgaacttcaacatcacgatgggcctgaacaacacattcggcgacatgctgctgaattacgtcatggcgacaatgttcatcgtgctgcccctgttctgggtgacagccctgggctgggcgggctattccgtcggaaatgtgttgcagggcctgaccggtggaacagagggagcgaaagcctctggcgggaagggagcagaactggcgttcggcaatgcaatgaagtgggcatctacgccgagcaagaagaagtag

SEQ ID NO: 532561 - DNA, 372 bp, Stenotrophomonas maltophilia
atgaccatgaacacgacaacccgccctagtcccacagaacgctttggccgccggctcggccgtggatggcgtgcgtacgtgcatcgtgagcggagcgtggccggatggctggtctccaagggcgtgccgactgctgtcgcggccacactattgtggatcgtcaagcttgctgtcctggcggtgttgttctacgcgctgttctggtttgcgctgctgctggtgtttctgatgtttgttgcccgaggttacgaacccgtcgatttgacgatgcccgaagcggaatggcgggacgggtacgccggctatggtctctactccagcgatggataccgtatcgaccagcacgaccccaatgatccccagaacacctag

SEQ ID NO: 532562 - DNA, 759 bp, Stenotrophomonas maltophilia
atgagtggaaatagcagacatcaagtaatcaaacgcctgcaggcggagcttccccgtggagccccgttcgatctcgccgtgctcgaatccttcggcgtatcgccccagttggcggcccgctacgtggagggcggctggctggggcgcttggcccatggcgtctacgccttcccgaacgacgacttcgacgtcagcggcgccctgcgctacctgcagagtagggtcgctggtctgcacgtcgggggcaagagcgcgctggccctgcagggggtgcgccacaacctggccacgcgggacgcgcaggtgctctggggcgatgcccgctttgcgctgccatcctggttcaccgtgcgctttccagcccgctacgtcaacgcccgactgttcgactggcccgacgaaagcctcgccggcaaaaccttgcacacgcctcccgggcagcccgacgggctattggtggcggtgccggaacgtgccgtgctggagctgctctacgaggccggcacccggcaaagcctcgaagaaacccgcaacctcttcgacggcttgcgatcaccgcgcaaggatctgctcgggcgactgctgtcctgctgcaccagtgtcaagaccgtgcgcctgttcctgacctgggcgcgcgagaccagcgtggtcgacgtcgatgcgctgctggagcagtaccccgtacgcaccggcagcaataagcgctggatgagccggctcgacgatggcaccttgctgagcctgaatccccatggatag

SEQ ID NO: 532563 - DNA, 813 bp, Stenotrophomonas maltophilia
atggataggcactacgccgacaccgtccgtctgctactggccatcgctcccgacgtgttcgacaacacggtcttcgccatgaagggtggcacagccatcaacctgttcgtgcaggacatgccccgcttgtcggtggatatcgacgtggtttaccggccatgggacccgccccgggatcaggcgctgcaggccatcaaccaggagctggctgccattgcgcagcgggtcgagcgccttggcgtgcagtcgcgtctgatccgtagcaaggatctgggcgacaccaagctggtggtcgagaacgacaccagccaggtgaaagtcgaggtcaatgtcgtcttccgcggcaccgtgctgccggtcgaacgccggcctctgagcgccaggaccagcgacctgttcggcgtggagttcgaggcgccgaccctggccccggatgaactctatgccggcaagctcgtcgccgccctcgaccgccagcacccgcgcgacctgttcgacgtgtggcagttgttcgagactggtggggtcaccgacgcgatggtcgaatgcttcgtggtctacctggccggacacaaccgcccgacccatgaagtcctgttcggcaacgacaaggacattgcccaagagtaccaacgcgccttcgtcggcatgaccgaggtgggctgcccattggagacgctgatcgatacccgcgcccgactgcgccaggaacttgcgcagcggttgagtacccctacggcgcgcaccatccggctctggacttctttcagcgcgatcgagcgtttcgtgtccgggagccactggtgcttgtga

SEQ ID NO: 532564 - DNA, 627 bp, Stenotrophomonas maltophilia
atgcccactgccatcgaattcattgccgaccggctaccgcgcgtcacggtggaggacgtgcgccgcttcgcggataccgtcgaaatccgggatgccccggctttcgcggccgagttgcaggcgttcatccacgagcgcgtggaggcggtgaaactgcccgccaacctcgaaggcgaaacggtggagcaggccttaaagcgcaaggcggccgcgctgcgcgccgagacgcgctgggcaccggccgaaaccgacgtccagcgaggccgcgccgtcctgctggaggccttcaaccagccgcacaacctgccgatccccgagtacgccaagctggcggacaagtcgcgccagcaaatctacaaggacatcctcgcccgtcggctgctggcgctgaacgtggggccccgcggccagaaactgcccgactggcagctcgaccccgtgaagcagcagttgacccaagccgtgcttcaggaggtcgagggcatcgaccactggacgatctaccgcgcgctgtccgaaccgctcgaaggcttgggcggtcgctcgccggtggatgcagtgacgcatggcacgatcgacgacgtggccgaggccgtgttcaacgtgctgggcgtgcaggtgcattga

SEQ ID NO: 532565 - DNA, 399 bp, Stenotrophomonas maltophilia
atgaacacgctcaacgacaccatgaaagccatgcttgccaagcagttgccgatccaggcgaccgtcagcaaggaaggcttgccggacatcggccccaagcgctcgctcaggctctatgacgaccacaccctcatcttcaacgagaacaccggcgggcagaccttgcagaacgtccgtgacggatcacacattgccgttgccatcattgaccgagaggcgttggatggctaccgattcatcggcaagccggaaatcttcggcgaaggcaccccgccttatgacaacgcgctggcctttgcggagaagaacgggatgaagccgcccaaattcgcggtgctggtacacatcgagaacatctacacgctgcgctccggcgcggatgcgggcaagaaactgtaa

SEQ ID NO: 532566 - DNA, 471 bp, Stenotrophomonas maltophilia
atggctgcaggatctgaagatttcgcgcgctgggaacaagccatcgaggcggcgaacgccgctttcgagcaggaagacgatgctcgcgcccgtgttttgtatgagcaggcgatcgcattggcctgccatttgctggcgaccaagccgtggcgtgaggccggtcggcaagcggatgcccgcgtaccagtgttcgatgccgccgtggcggccttcgtggtgtcgcatcacaatgccgcgaacttgcacaagcgctgcggtcggcgcgaggatgtggcggcgctgtacaggcagacgcacctgacggtcagtgatctgagcgttgcgcctgatctggaggatgagttgcgtgccatagcggcacgccacatcactcgcacgctgggagaatttactcactacctccaatcgtgtagcgcgtttctgcccgccggccttgagacatcagttgccccaggacatggcgcgcactga

SEQ ID NO: 532567 - DNA, 831 bp, Stenotrophomonas maltophilia
atgctgcggcagacgcagcgggtgacgctgcacacccctgccgaaatcgaacagtgccgcattgctgcgcaactcgccgcgcaagtgctggccatgattgcaccccacgtgcgtcccggtgtcagcaccggcacgctggatcgcatctgccacgacttcatcgtgaatgacctgaaggcgattcccgccaacgtcggctaccaaggttttccaaaaacgatctgcacgtcgcgcaaccacgtcgtttgccatggcatcccgtcattcaccgagatcctcaaggatggcgacatcctgaacatcgacgtcgccgtcattcgcgatggctggtatggcgacaccgcccacatgtactgcgtgggcgagcccaaggcgcgcatccgcgccctcgtcgataccacctacgaggccatgcgcgccggcatcctgcaggtgcgccccggcgccacgttgggcgacgtcggccacgcaatccaatcggtggcgcattctcgaggcttcagcgtggtgcgcgaatactgtgggcatggcgtgggccgcgagtaccacgccgaaccccaggtgctgcatgtcgggcagcgtgggcagggcttgcggctcgaaccgggcatgatcttcacgatcgagcccatgctcaacgccgacaaggccggcaccatgacgcgcccggatggctggaccgtggtcacgcgtgagcgctccctgtcggctcaatgggaacacatggtggccgtcaccgaacaaggcttcgacctgctgagcgcatggccggatggtacgggtagctacgcctcgattacggcagacacgcccactgccgaagaggcttga

SEQ ID NO: 532568 - DNA, 264 bp, Stenotrophomonas maltophilia
atgggactggtaaaaatctccgatgccctgcatgagagtctgcgcactggcagcgcggcgttcagccgttcgatcaacgcacaggcagaacactggatgcgcgttggcatgctctccgagctgtatccggatctgaattattcggagctatctcgcctgctgttgcaggccgagcagacagagggcggcctgcatgagttggtcgcccaattggacgagcgccacggcccggcggcagcgcagcgcaagaagcgggtggcgtga

SEQ ID NO: 532569 - DNA, 288 bp, Stenotrophomonas maltophilia
atgacgacaccactcgacgctgatcttcagcagatgacccgcgagcaactcatcgctgaagtgaagaagctacgcgccggcatccgagcgcatcgcgactgttccggccacgacctgtgctggtaccacccgcacctgtgggccttgctgcctgagcgggtcgatcaacaaccggatgtacccgactggccgcagttcatgcgcggttgcatcaagtaccgcgaatcactggatgggcaactgccggatgcgccgcgcagccagaacgagttcagcagtgaaagctga

SEQ ID NO: 532570 - DNA, 1221 bp, Stenotrophomonas maltophilia
atgcaagacggacacattgacatgaccaacgtaacgagtgccaaggcaccgcccaagtcactggccgcctcatggctgttgtgggcgggtttcatcctggttgcgctgaacctgcggctgatcttcgccacggtcggaccgctgctgcagaatctggcgctggggtttgcctccaccctcctggtaaccgccctgccactggccttgctgggtatcttctcgattcctggtgtccatctgcggcgctggttgggagaggagcgggcactgtttctggcactgatgctgctggtgatcggctgcggcattcgcggcttcggtgaaacggccttgatcctcggcactgtcatcggcagcgcgggcattgccgtaatgaacgtgatcatgccggcgctggcgcgcaagcgcttcggcccgcagcgcatgggcatggtcatgggcatctacgcgttgatgctgggcgtgggtgcggtactcggcgcggccggtgccttcccgctgttccagtggatgggcggggatacgcaagcggcgtaccgctcgctgggcctgtggacggttcccgccgtcctggcgatggtggtctggctgccgcagatcggcaaggcggccgcgcccatgcccgtggccgcgcgaggcgcacccgttgtcgtcaacgtttatcgcagcggcatggcctggtccatcaccctgttcttcggcttgcaggcgctcaacctgtacgtcttcctgccgtggatgccgaccatcctgatggatcgcggcagcagccaggccgcggcggcgatggtcttctccgcatcgcaggtcagcctgatggtgggcagcttcgtgaccccgctgctggccgcccgcaagccggaccagcggccctggatcgccatgacggtgctcacctgcctggtcggcacgctgggcctttggtatgcgccgggcggcaccgccatcatctgggcgctggtgctgggcttcggccagggcgcgggaccgtcgctgggtgccttcctattcgtggccaaggcggccagcgtggataccgcgacccggctctcggccatggctcagaccgtgggctacctgatcgctgtggcggggccgttgctggtgggtgcgatctaccatcacacgggtgactggaatgtgccgatcctgatcctggcgacgattttgttcatcgagttgatggttgcactgcctgcagggcgagacgccaggctatga

SEQ ID NO: 532571 - DNA, 1233 bp, Stenotrophomonas maltophilia
atgaaccgttcctggtggccgcagcaattgctgctgggctggctcaacctcatgctgaccgcgccggtgatctacctgttcgtaggcctgccgctggtcatgcgccagcacggctggagcggcaccgacatcggcctgatccagatggcgggcctgcctgccatgctcaagttcgtgctggccacacccgtcgatcgctggcggttggggcagatggagggcagctatcgcaactgggccatcctgttgggcctgggctatgccggtgcgttgctgctgctgggcatgcacgacctgcgcagcacaccttacgccttgctgttcgcgctggccatgctggtcagcctgttcggcacctgggccgacgttccggtcaatgcgctggcgatacgggtactgcctgaatccgagcgcatgcgtgccggggcgatccgttcggctgcaacttcgctgggcgccatcgtgggtggcggcctgatgttgatgctgcaaacccggctcggctgggcctggccgttctatgtgctggcgcttggcatgcagtctgctgtcgtgctcgtgccatggctcaagccacgggaaggaaaaatcctggccgcgtccgccgtcgttgtgcctcgcgcggggctgcgcgagtggctgggctggttcaccgttccccagcatcgcgtctgggcagtgctgctggtgctgtattacccgctgatcggcgcggtctgggtgtatctcaagccgctgatgctcgaccagggattcgcgcccgagcggatcgcgatgatcgtgggcgtcggcggcgggctggtggccgccatcgccagcatggcggggagctgggtttcccgcagaagcggtgccttgccgctgttcgctgtttgcaatctgctggccctgggcacgctggcggctgccgtcgtgctcaacctgggctcggatgctctgatcgcagccagcatggtcgtcgccttgatgatgggggcatcggccgggctggtgttcgggctgatgatgcaccacacccgcaccgggctgtcggcacttgactatggcatccagtccagcctgttcgtgatcggccgcacgctggtaccgatgctggcggggatgctgctggatgcgggtggctatccgggcatgctggcaagcctgatggcaggactggggctggtcacgctgctggcctggttcgtacgaaaccacatcttcacccacgagccaacccggacgcatcggtga

SEQ ID NO: 532572 - DNA, 1029 bp, Stenotrophomonas maltophilia
atgcattttcatacctcgcaccccttgcagccgttctggaacatcgcagcagcgccgatccagacccaggccgtcgaacaggccatcgagtaccgattgttcacgctcctggataagccaacgtctgcggatgccgttgcgcaaaagctcgacctgaaccctggcgcgactgtcgtgtggctggatttgttgtggagcctcgaactgctggtacggcgggtgcccgcggcagctccctcggacaccgagtacgtgacatcgccgctggcggcacgcttcttcgtcgagacatcgccggagaactgcgcccaggcctggctgtaccgcgcccgcttcctgtcgcgcttcgctagtcagtgggacaccctgctgcgccacggcttcgacccgcagggcgaggccgcgcccaaaggcagttgggcgcaggcagcgcgcgagcagatcgggcaggaacagcgtgtcatcacggttcctgcggtgctgcgcctgctgcaaacgcttcccgccttgccggaaacaggcaggctgctcgatctgggcagcggccccggccatgtcggcatcgcgctcgcccagcgcctgccgggctggcggggtgtgctgtgcgaccagcccgaaaccgccgaagtcgcgagcgagaacatcaccgccgccgggttgtcgcagcggttgcaggcgctgggctgcgacctgaacacggatggcatcggccatggctacgacctgatctggtgttcgtcggtgctgcattttctgcgcgacctgcgggacgccgtgcgcaagatgtgggatgcgctcaatcccggcggctggctgctgctggcgcatgccgaactggccgacgatgccgaactggcggcgcgtgtcatgccgttctacggcacggtgacgctgcgcggcaacaggctgccgcgtccgggcgaagtcgccgggatgatggcggcggccggcttcaccgatatccgctcactgggccgcgtcgacttcccgatggcgccggcctggcttcacctggggttcaagacatga

SEQ ID NO: 532573 - DNA, 2025 bp, Stenotrophomonas maltophilia
atgaaatacgaattcagcgcgtgccatcacgctatcctgcttgctttaccgatactcgcgttacctgtcgcggcggttgccgaaaacgcctctgaagcggtcacagacaacaccgccaccgagctgcctgccatcaccgtcacagccgacaaggttgagcggccaatagaacgggttcccgccagcgtggcggtgatcgacgggttcgagctggagcagtccagcatcacgagcatggagcaactggaaggccgggtcgctggcctgtccttccagcccttcggccagccaggcatgaaggcgccggtgatgcgcggcctgacggccagcatccactcgttctcgacctcggtgctgatgctggtcgatggcgtgcctacgctgacggcacagagcttcgagaacagctttctcgacgttgatcgcatcgaggtgctgcgcggcccgcagtccacgctgtatgggcgcaacgccgagtcgggcgtgatctccttccacagcctgccgatggacaacacgtcacgcgccagcgtctcggccgggctgggcagccgcagcaaacgggatctgcgcttctcgctgagccagccgctggtcgaagacaggctgtatgcgagtatctcgggctcgtggctgaagcaggatggcttcatcaacaacacccacaccggcggcaaggacgacgacaaggcgcatcgggatctcaacatcggcctgcgctggacgccttcgagcgccaccgacgtggtgctgcgctacgtgcggcaggcctatgacgatggtgccacgctgtggggcaacgtcggcacgcccagggcggaagtcgcatctggcacgccaagctggaaccgctcgctggggcagacgttatcgctcaatgcctcccatgaactgtcttctggcctgcgcctgcgctccatcaccgcgtacaaccagtacgaagacaagattctccaggacaccgacttcatgtcggccgagagcttgtacatcggccgggacaacaagctgcgcacctggtcgcaggaactccggctggaaggcaagctgggacgctcggattggctgatcggcctgtatggcgaccaaggcgacaacacgctgcgcaactacacccagcgcgggccgatgttcctggactatcgggccaagctggagacgcagtccctggcgttgttcacgaactggaacgtcccgctgaccgaggcatggagcctgacggctggtgggcgcatcgagcgcaattcggcggaggccagtcccgccagcggggtcaggaagaaggaggactggacgcacttctcgcccaagttggcgttgcagtatcaattcgcgcccgaacaccagtggtatgccagtgtcagccgaggcatccgtgccggtggctacaacatcttcgtttcggcgctggactatccgtcctacgaccccgaggaaaactggtcctacgaaaccggcttcaagggctgggcgctggacaagcggctgcgctactcggtggcggcctatgtcatgaaggtggacaacatgcaggtgcagatgcagcccatgccgggaaccacctacatcgccagtgcagccaaggcgacgtccaaggggctggaactggatgcagactacctgctgggcagcggctggcgagtgacgggcggactggcctggaacaagacgaccttcgacagcttccaggatggtgccgccaactacgcgggcaagaccaacaacttcgcgcccaggctgaccggatacgtcgggctgcgctacgacgcgccgcagggctggtacgcccaggccagcatggtgggcagcagcaagatctacctggatgccgccaaccagtatcagcgcaatggctatggcctggtgaacctggtcgccggctaccagtacaagaactgggagatcgccgcctacgcccacaacgtggccgacaagacctacgacgcggtcggctatcagggcggctacgtcaccgtctacagcccgccgcgcgaagtgggtgtgcggctgacctggcggatgtga

SEQ ID NO: 532574 - DNA, 969 bp, Stenotrophomonas maltophilia
atgacctaccgtctcaacgcggcggacacggccgagccgacacgcctcggccagggcatctggctgcgcacgcaattgccgactgagcttggcgactgcaccagtgacgtgtgccgcctggacgacggactggcactggcctacgcccactatcgtccccgatatgacctgctggagcagagcatcatggaaaggcagggccgttccatgaccattaccgtggcgctggaaggtgaatccagcaccctcggcatcgatggccagcgcttcgacttcatcgccggccacagtaccgtggctgctttttccagcgtgcgcggtgaacgccgctttcctgctgatcgctcgatccgccagttacgggtgattgccagcgaaccgctgttgcagcgctaccgtcttgggcacctgctcgatggtgtgtgcaacgactatagcgcacgccaccttcatttcggccggcatggcggtgccacccagcggctggcccaggcattggtgcatctgcacgaccgcgatgccggcctgctcgacctgcagatcgccgcgcttggcctgctggccgaacagacccgggaattccagccacccactgttgtctccggcaagctgcgtgcggacgatcaggggcgcatgcttcaagcccgcgacctgctgatgcgcgagtacggccggccgctgaccgtcgcctggctgtgcgccaccgtcggcaccaacgagttcaagctcaagcagggtttccgcgaactgtttggcaccagtccccaccgcatgctcaccgacatccgcatgcaaagggcttgggaactgctggaaacaggccagcacgtctctaccgtggcctaccaggtcggctaccagcacctgtccagtttcagtgccgcgttcgagcgctactacggccgtacacccaaatccgtggcgaatccgcccaaggacatccagccaggcccacacgatgaccaatga

SEQ ID NO: 532575 - DNA, 1902 bp, Stenotrophomonas maltophilia
atgaccaatgaatccccagcgctctccgctgttccctccacacttcgcattccgctggccgcacgggcgctggggggcaagctgtttccggagatggcggtggacgaccggtatgccatcgaggccttggcccgcatgggcgacgatggcagccaatggttgagcgaccgcaagagcatctatggcacgctggcgcgcacccggcgctttcgcgaccaggcccgcgacttcgtggcccgccatcccgatgcgcaggtggtcaacctcggctgcggcctgagcgactacctgcaatggatcgacaacgaccaggtgcgcatgctggacgtcgacctgtcggaagtgatggcgattcgccgcgagatcctgccgccgcggcacgaacgtcatgtgctggccgaactcgatctcaccgcacccgactggtgggagcgcctcggcctgcccgccagccgcgacgcggccccggtgttcctgatgagcgaaggcgtcttcatgtacctgcagccgcctatcgtcaacgccgcactcgccaccttcggcgagcgcgccccggccggctcggtattgacctttgacgcgatgtgctggctggccgtgggccgcgccaaacaccatcgctcggtcaagcacactgaagcggaatttggctgggggccgcgcaggttggccgatctcaccgctgcgcatccgcgcctgactttgcaggccgcgtatcaggtcatgggcggctacagcctgttttacaagctgttgcaatccacgttcaaggcgctgatgggcgtgccgttctatgcggtatacaccgtcgaagcacaggatgcggcggtcgcccgagcaggcaagctcgcggccattcggctctccctttccaacggctcatcagaccctcccatgaacgaccgcattgacaccgtgactgcgctggaagcccgggtgggtacccgcccagaggccgccaacctgaaagtcatcgaccatctggacgcgcatgcacagcgctggctggcggcttcgccgctggcgtgtctgggcttcagcaatgcggaccggatcgacgtgacccttgccggcggtgcgccggggttcaccgccaccgtcgatgctggatcgcttcgcctgccgcgtaccgccctggacgatgccgaaccagcccaggttcatcgcggcgtcggtgtgctgttcctcgttccaggtctgggggaaacgctgcgcgtcaacggcatcgtccagggcgtggatgatcaccatgtcacgatcgccgtgcgggaatgctatgggcattgcgccaaggcgctgctgcgctcgaacttctggcatcccgcagcagggagcgttccggcgaccgatgaggggacgttcctctcggcggcgcgcttcatggcgctggcctcctgcgatgccgaggggcagaccgatgtcagccccaagggcgatccggcaggctggctggtgcagcggcacggggacggcatctgcttcgcggatcgccccggcaaccggcgcacggacagcttcaggaattttctgacgcgcccgcatgccgtagcgctgctgatcgttcccggctgcgcccaggtggctctggtgcaagggcctgtccagttgcttgccgatccagacctctgcgcggccttcgcggtcaatgagaagacgcaaaagctggtcacgcacatcgccgcgcctgcggttgaactgcgcgaaagcgccgcactgctgcgcgccgcgccttggactgcatcgacaccatcggccgacatcgacccggcagcgctgtttgccgcgcatgtgaaactgaaccggacacgcggcctgggcgcggcgttagtccgagccgcagtttccgttccgggtctgatgcgcaagggattggaaaaggactacaagcgtaatttgtactga

SEQ ID NO: 532576 - DNA, 1365 bp, Stenotrophomonas maltophilia
atgacatggctggcctttgaatggcgcctcatcctgcgctcgcgactgtcgatggccgcgctgttgctgctgctcggcctgtccagttgggcggtgtggtcgggcctgcacgaggtggcgcgccagcagcagaccatcgcccggctggcaccgctgcacgagcaagacgttgcggcggtggctgcccagtacccggacggctcggatgcgggcagccccgcctatcacaccttctacaatacctgggacccgccctccgacagcgccttcctggccttgggtctgcgtgatgtcgcgccctatgtgctgcgcgtgcgtgcgctggggctgcaagcccagctctatgaaggcgaaaccttcaaccccgaactcgccctgccgggccgcttcgatttcgccttcgtgctgatctacctggcgccgctgttcgccattgccctgctgcacgatctgctctccggcgaacgccagtcgggccgtctgcgcctgctgctgtcgctgcccgctggcagtcgggtctggtggcggcgcgcactgctgcgctacgccctgctgttcgcctgcctggcggtgccggtgctggttggcgcggcggtgtcaggtaccgcggccggcaccctgggcccagtgctcgtggtggtggccagctatctggcgttctgggtgggcgtgtcgctgctggtggccgcgtgcggctggcgctctgtcgccaatgccacggctctgatggggacatgggcggtgctgacgctggtgctacccacgctggccaacgtggcgctgacccgcgccatcccggttcatcagggcgtggacctgatgctggcgcagcgccaggccgtgcatggcgcctgggagattccgcgcgaggaaacgatgcggcggttcttcgccagccatcccgaatggcaggatacggcacccttgccgaggggctttcactggaagtggtacttcgccttccaccaggttggcgacgagagcgtggccgaacaggcgcaggcctaccgtgaaggactgctggcgcgccaggcctggacgaaccggctgggttggctgctgcccggcgtcggcgcgcaggcgatcctgcatcgcttggccgacaccgacctgcaggcccaactggcctaccaggagcagatcgtggccttccatcgccagattcgcgacttctactacccctatctgttcaacgaccagccgttcggcacggaagactttgccaggcgccctgtcttcgagccgcgtgtgccccaggccgcattaccggacgacactgcttggggactgttcatcgtcgcatggctggtacttctggcgggaggttggaaccttgggcgcttgcgtttgaagggatgggcttga

SEQ ID NO: 532577 - DNA, 1431 bp, Stenotrophomonas maltophilia
atgagtgtggtcacgcgcatcgcccgcgaggaatggcgatccctgttccgcgaccgggtcgcggtgttcggtctgctgctgttggtcgtgctgacgctggtggcggcgctcaacgcctgggaacaccagcgcaacgccaatgccgagcgggcgcgctaccaggcccaggccaaccaggaattcgccacgcagcccgaccgccatccgcaccgggttgcccactatgggcatttcctgttccggccactcaatccgctggcagccttcgatccgggcatcgacgcctacaccggcaacactctgttcctggaagcgcaccgtcagaacagcgccaacttcggcgatgtgcgccagtcctcgctgctgctgcgcttcgggcaactaacgccgggcttcgtgctgcaggtgctggcgccgctgctgctagtcttcgtcggtcatgccggcgtggcccgcgagcgcgagtcgggcacgctgcgcattctgctggcgcagggcgtgggcagccgccagatcgtgctgggcaagctgctggcgctgtcgggcttcgcggccctggtgctgctgccggcgctgctcgcgctggcctggctggcgataggcggtcaagccccctgggcgctgaccctgctgctggccgtcggctatgccgcctggctgttgctgtggtcgctggtcgtggtgctggtctccagcctgttcgcccgtggccgcgatgcgctgctggccttgttggccgtctgggcggtgctggtgatcctgctgccgcggatcgtgcccgatgtggcgaacaatgccgtggccctgcccacgcgcttcgagaacgagatccatgtcgagcgcgaatatctggcgctgggtaacgcgcacaatccggacgatcccaagttcgcccagttccgcgatcaggtgctcaaagagtatggcgtcgagcgcatcgaggatctgccggtcaacttcaagggactggtgggcatggaaggcgagcgccagtcgagcgagctgttcaaccgctatgccaaggccgcgttcgagctgcaagagcggcagagccggatcgtcgatggcttcggctggctcagcccgaccttggcgctgcggcgcctgtcgatgacggcggccagcaccgacctggcgagcttccggcgctttctcgaacagggcgaacagtaccgctacgacctggtgcagggcctgaaccggctgcaggcagaacacctgcactatgtggacgacagcgacccggacaaggaaaaccgcattgcgcacacgcactggcaggccttccccgacttccactatgaggccgcaccgatcggccagacgcggtaccgggcggcaccggccactgcaatcctactggcttggctgatgctgctggtggcgctggtctggtggctgggcggtcgcctggggggtgggacgcgatga

SEQ ID NO: 532578 - DNA, 756 bp, Stenotrophomonas maltophilia
atgggcggtgcaacaattctggccgatgaggccggcaagattctggaggccgtgtccgtcactgccgggtacaacgccaagatcattttgaacgggctggatctgtcggtacgcgccggcgaaatctatgcgctgctgggtgccaacggcgcgggcaagaccaccacactgagcctattcctgggcttcgtagtgccttcatcggggcaggttcgcgttcgggaggtcgatccggtcgcgcagccggccgaggcgcgtcgtcaactggcctacatccctgagaacgtcgcgctctacgagcatctgagcgcgcgcgagaacgtcgcctacttgctcgatctggccggacagaacgcaggacacgaggcgatcgatcaggcgctggcgtcggcggggctggctgccgaggccttcgatcgccgggtcgcgggcttctccaaaggcatgcgccagaaggtggccatcgcgctggcgctggtgcgcaaggtgccggccatgctgctggacgagccaacttccggcctcgatccacaagccacggccgagttcaaccgtctgctgggcctgctgcgcgaacaaggcgtggccatcctgatggtcacccacgacctgctcagcgccgctgacgtggctgaccgcatcggctttctcgatggcgggcgactggtggaggaagtggcggctgccggcgacgagcgctttgacgtgcgggccctgcatcgccgttatgcggggcaggcggagcgagcggcatga

SEQ ID NO: 532579 - DNA, 2166 bp, Stenotrophomonas maltophilia
atgcgcgcccgccagggtacccctgcccatttcaaaaaaacactgctggccagtctggtcatgaccctggctggagcggcctccgccttcggccaagacgcctcgcaggaggacgtgaccgtactggatacggtcaccgtgactgcaccgcccttgaacaaggcgttcgaggtcaacgtgggggcctttggcgccaaggacacgatggaagtcccgctggcgatccagagctacggtgccgaactcatcagcgaaacctccccgcgcacggtgcgcgatgtgctggcgctcgatccctcggttctgagttcgtcctatggcggcggcttcgacaacttccgcctgcgcggcttcgcgatggacaacttcaataccatccggcgcgacggcctggccctggctccgcactacgacgttcccctggagctggtcgagcgggtggatgtgctcaaggggccgtcgggcttcctgtacggcttcaactcgcccggcggcaccatcaactacatcccgaaacgcccaacgctcacgccattcacgaccttgagcctgcaggggacgtctctgcgagggcgctacgtcgcggtggataccagcaacgcgctggccgatggcgcgatagggtaccgcctgaacgtcggctacgagaagatcggcgatttcgaccatttcggcgacctggagcgcaagttcgtcggcctggccaccgacttccgcttcaacgaccgtgcgctgctgcagctcaatgccgactggaactggaagagcgccatgtccgatccgctgctgcgcgcagaccagagcggccgcgccgatccgctggatccgtccagctacgtgctgccgcccaggttcgaccgccgcgatgcgctctcgccctcgtggtatcgccacaagaccgaggcctacaacctcgaagccaagttcgactacaccctgacggacaactggacgtccgtcacccaggccaactactcgcgggtcgaacgccacggtggctacgtcgatctgttcgacattcagcccaatggcgacatcggctatgccgatctgtaccagtcgcgtggcgaggtcttcagcacctggtccttgcagtcctacctgtcgggcaagttcacgacgggtggtcttttccacgatctgttcgttggcgcgtcctaccgccagttccgcgacaagagtccgtactgggacttcgtgaaaagcgcggacggcatcagcgtcggcgacatctcggtgggcaacatccgcaatccggtgcagccgccgcgttgggatttcggccccgagcaggagatcgacttcaagtccagcatcaaggaaagctcgatctttgccagcgacctgatcacgctcaacgaccagttccaggtcctgctgggcggccgctacatctggtacaaggcgcgcaacctgtcggccgacgcattgccccaggacaagaatgtcttcgtgcccaccggcgcgctgatctatcgccccactgaaagcgtgatgacctatttcagctactcgcgcggcttcgaaaaaggcgactacgcgccttacaacgccaacaatgccaaccagcccaccgatgccatcgagtccgagcagtatgagatcggcctgaaggcggacatcaatcagaacttcaacctgggcgtggcgctgttcgacatcaagcgcgatgccagctacctcaacctcgcgaacgacttcgtcagcaatggccgcctccaccaccgcggcgttgaagtcaatgccacggccaagctcacccgcggcttgacggtgctgggcaacgtagcctatctggacaccgaactgaaggacgtgaccgataccaccacgctgggcaagcgcagcgaaggcgtgccgcgctggaaaggggccttgggggcacgttatgcgttcgcggcggtccccggcctttcggtggacagcatgctgagttatgtgggcagccgtccagtggatgcgcagaacagtggctttattcccagctacaccctgtgggacgcaggcatcagctacgagaccaaggtcggcagcacgccaaccaccttccgtctgcaagccaagaacctgaccgacaagtactactacgcgggggtctactacagcggcggcctggaagtcgggcgcggtcgcgaagtcttcctgtcggccaagttcagcttctaa

SEQ ID NO: 532580 - DNA, 1383 bp, Stenotrophomonas maltophilia
atggatatccatgacagtcacgcctgcgctccaacagcagcttcttccagcttcacgttgcgcgcccaccagcatcccgttgtcgcctcgttgctgaacaactactccgcccgtctgggcgagttggcgcaggggctgggttcgccgctgcatgtagtcctgcctcagatattcatccagaacctgcaccagatgcaggacgtctttgccgaggccggcgtcgcgggcttgattctctttgccaagaaagccaacaaagcggattgcttcgtgcgcgcctgcgccgaacacggcgtaggtgtcgacgttgctagcagcggagaactggccaaggctctggccgccggcgtgagcggtcacaagatcggggtgtccgggcctgaaaagacggatcggctgctgactgagtcgctgcatcaccgctgccttgtctcgatcgactcggtgcatgagctgcagcggctactggcactgtcttcccgcttgaatgccagtgcgcgggtattgctgcgctggcgtccagccattcaatccaccagccgcttcgggctgaggccccaagaacttgatcaggccctggacgtctgccaacagcattttttttctatagaacttgaaggattctcattccatatttcaggctacgccatcgaagagcgggcgcattgtgccaacgaggcgatcaatctgtgcctacaagcacgtgcccgtggcctgaccgcgtgccgccgagtggatatgggcggcggcctgccggtgcagtacctctcgccccagcagtggaatgcctttctgcgacaggacagacgtgaacactaccacgccaacaagtcgtttggcgggttctacccttacggtgcaccctactccggggcgcaagcgctcaaggcgcttctggcgtacccggtcgaaggcggcagcagactggctgacagggcccgcctgcacgatatcgaattcatcgcagaaccgggtcgggcggtgctggatcaggccggcatcaccctgttcgacgtcgtggggatcaagaaccgcgagggctatgcaattgtcacggtccagggcagcagcctgagcctgtcggagcaatggttcaacagcgagtacctgcccgatccggtattgcttgatcaccgcgaaggcaccgtattcacggcttgcgtgggcggttcgacgtgccttgaaagcgacatgattacttggcgcaaggtcgctttcccgcgtgccattgagccaggcgatcggctcgtctatctcaataccgccggctaccaaatggactccaatgaatcgcctttccatgaggcggcgctgcccaacaaggtagtggtcgaactggatggcgatggggcggcgctgcgctggcgcctggacgggatatga

SEQ ID NO: 532581 - DNA, 1002 bp, Stenotrophomonas maltophilia
atggcgcaatccacgcagcattacgggcaaccgggagagctttgtctgctctcccagcccgatcttgaagacttgggcgcgagttacgagcaagtcattcaagtggttgaagacgcgtttatcgccctgcgcaatggcgattcgcgcaatccactcaagaccattgtgcagcccgcggatcagcgctcgatcggctattcaatggttggccgcgatggtgccagccagacgctgggcttcaaggtggtctacgagttcgacccacagcgcagccgcgacgcctaccgcttccactccttcattttcctgtgcgacgacgccacgggcgagcccattgcgctgatggatgtcgtcaagctcgggccgctgcgcacttcggcaacctcggcgctgatggcgcgcgcggcgcggcccgatgcgaagacggcgctggtcgtcggcaccggcgtgcaagggcagattgcgctgccgatgttgctggccgcactgcctggacttgagcggctgctggtctacgggcagtaccaggagggtctgaaagccgtacaaaatgaggtccgacgcctgcatccgaaccgcacggtcgagattgtcgaagacctgcaacaggcggccggcctggccgacatcgtcattggcgcttccggcctcacgtccaggcagcaggtgcgccgagcctggctcaagccgggtgccatcgccattttgccgggctatggcatcgacgcggatgtgctgcatggcgcggactaccgcatcgcaacggacatcgagcagatgaaagtcacctgcggggatctggctgcaccggacggcagcatccccgccgtggacgccgaactgcccgacattctgctcggcaccgcagccgcccggcgcgacgcatccgacctggtctttgcgtacaacagcggcatggtggtgacggacgtggcacttggccggtatctggccgatctggccctggcgaagaaccgtggtgtgagggtcaagctatggtga

SEQ ID NO: 532582 - DNA, 1419 bp, Stenotrophomonas maltophilia
atggtgacgcccggccacccccaggcacagccaacaccgtggtggcgcacggaagcgcgcgccatcatcctgctggcgataccgctgatcctcaccaacttcgcccatgtagcactgaccacgatcgacatcgtggttctcggcaccctcggtgcgcgggagctcgcagccggcggcttggccatcgtgctcttcaaccagctgcgcacaatgggcacaggcctggtgactggcgtcagcaatctcgtggcacaggcgcatgcgcagcagaatccggcgcgtgtgcaggaactgctggtcgcgggtctgttctgggcgaccgtctcagggctgctgttcattgctgtgttgctgctgctggaacgtcccctggtatggatcggccaagaacccgaggtcgctgccatgacgttccagtacctcatgctggctgccccaggattgcttccgtgcctgtggttccagaccctgcggcatttcacgacgggactcaaatatcccggcccgctgctggcgatcacgctgatttccatcgtgctgacggccggcctgaactacaccgtggtctatggcaagttcggggtacccgcttttggcttccctggcgtcgctttgacgacttcgctggttttcctgctgtcgtttctaatgttcctcggtgtcgtcatcaagaatcggacgctggcaccgtacttcgtggcgtcgggcctgcgctggtctggcgaggcggtgcgcgcggtctggaagctgggcctgcccatttctggaacctacgcgtccgaagccggcttcttcagtgtcctgacgctgctcatcgggacgctgggcatcgaagccctggcagcacagacggtgctcaaccagatcatctacatcgtgttcatgatttcggcgggtatttcgcacgcggcgtccatccacatcagcgaagcatgcggcgtggccaactatggcagggcgcgccggctgggctttctcggcctgggcctgggggtggtggcgatgctggtcgtggcggtgccctatgcactgatcccggatgcgatcgtgtcattgttcatctcggccgatcagcgcaccaatgcaacggctctggcgctggccgccacgggcctgctcgtcgccatcgtgctgcagatcttcgatgccagccagaacatcggcaacggcattctgcgcggcacaggcgacaccgtcggtcctttgcgcatttccctggtgggttactggctggtgggcttgccctgcgcttacctgctgggcgtgactgcggcatacggcgtctacggcgtgtgggtgggccagacgatcggcctggcagctactgccgccttgttgatcgtgtcctttcgcaaacgcatagcgcgcttgtccagacaggccggcaccgcggctaccgccggagcccgcaccgtgtaa

SEQ ID NO: 532583 - DNA, 1137 bp, Stenotrophomonas maltophilia
atgggtgagtacgaatgttcagatgccgtgcaatcactggtgcgtccggaagtcctgggtctgcctgcctacgatcctggagcagaccccgatgcggtgggcaggcagtacggcctggagcgagtgatcaagctgtccaacaacgagaacccctacggaatgtctcccttcgccgcgcaggccttggggcgacgcctggcgctggggctcgggcgctatcctgatccggcggggaaggacttgtgcagtgtcctggccgatcgccacggcacgcgctgcgaccatgtcatcctcggcaatggttccgagaacatcctggaattgctgtgccaggcgttcattaggccgggcgagcgcgtcgtgacgcaagcgccatgtttcggcctgcacgagatcttcccgctgatgatgggaggccaggtcaccaaggtgccggtgaccggctcgttcgcctgcgacctcccggcctggcgccagacactggaccagccggccaagatggttctcatcagcaacccctccaatcccgtggggtcggcctttacctgggccgaactggaagcgatcgtccacgcgacacctctcgattgcctgctggtcatcgacgaggcttacttcgagtacgccatcggcgatccgtcttatccggacgccttgcggctgctgaataccctgcagcgtccgtggatcgtgctgcgcaccttctcgaaggcccacggcctggccagcctgcgcgtgggttatggcgttgcctcccatgccggcctgatcgacgccctgcatcgcgtgcgcacgccgtacaacgtcaatcagctggcccaggaggccgccatcgcggcacttgaagacgtccagcatctggtaacgagtgtggcgctggtgcgcggcgaacgggcgcggctcagcgaggcgctggcccaggcggggctccgggtcgcgccatcgctcaccaatttcctgttcatcgataccggcatggatgcggcgcaggtggtccagcgcctgctgcgagaaggagtcatcgtcaaggcctggcgcgagtccggctaccggactttcatccgagcctcgctgtcattgccggccgataacgacatgttcctgaaagcgttgcttggctcgctctgccagccctag

SEQ ID NO: 532584 - DNA, 1029 bp, Stenotrophomonas maltophilia
atgcaaaccgctgagtcccgtcctcacatcaagacccgtgtttctgacctgatcggcggtgcgccgctgttggaactgccggtggcgcccggcagcggccgcgtcctgctcaagcttgagcaattcaacccgaccggtaccgccaagatacgcatggcgcgccagatggtcgatgaggccgaggcacagggcaagctcaaacccggcggttggatcgtggaatccacctctggcaacacagggcttgggttggcgttgatcgcggcggaacgcggataccgcttcaccgccgtggtcgaccatcactccagcacggacaaactgcgtggcatgcaggcctatggcgccgagttgattcgggtcggcagccccgacgggggactggcgactgcggatcgggatgccactgccgcacgcattgcggccgagcatggcgcttactggacgcaacagcacaacaatccgggcaatgcgaacggctacaagggtttggccgacgaactccggcaagtgctcggcaacgatatgcattttctattcggtgccgttggcaccggcggctccctgtgcggaacgggccgagcgctcaaggcgcaccttcccgacctcaaagtgatcggcgtcgaaccggagggctcggtcatcttcggtggcgagggggcaccctaccaccagtcggggaccggaacgcctgccggcgcggagatcggcgtgctgatcgactacgaactgatcgacgaaggactcaaagtcaccgatagtcaagcattcgagaccgcacgctacctggctcgccaccacgcattgctggtcggcggttctgctggcggggttatctacaaggcgttgctgcacgcgagaaccaccccctctgattgcacaaccatcgtactggtctgcgatggcggggagaagtacctgaacacggtattcaacgacgaatggatgcaggccaatggcctgatcagtgaaagtgtgacgcgggaattggactcgctattacaatccaggaaacttgctgtctcctaa

SEQ ID NO: 532585 - DNA, 2151 bp, Stenotrophomonas maltophilia
atgtcgaaccaaataccggccagaggcattctggcctgcgcggttgccaccgccttcagccatcccttattcgcccagacgacaccaggcaatgacgaagccatcgtcgagttggagaccgtgacgatcacggctccgctcaaccgggcgctggaagtcaatgccggcgcattcggcgccaaggatccgctggatatcccgctgtccatccagagctactcggcccaaaccatttcggagtcgtcggctcgtacggttcaggatgtgctcgactacgacccctccgtcaccggcgcgtcctatggcggcagcttcgacaacttccgcatccgcggctttgtcatggacaacttcaacaccgtgcggcgcgacggcctgtcgctggcgccgcaccatgatatgccgctggagctgttcgaacgcgtcgatgtgctgaaggggccatccggtttcctctatggcttcaactcgcccgggggcaccgtcaattacctcaccaagcgcccgacacgcgagcccttcacgcaactgagcctgcaaggctccagtttgcagggccgctatgccgccatcgacaccagccactcggctttcgacggaaagcttggctggcggttcaatgccggttacgagaaaaacggcgacttcgaccatgcctatgacctggagcgcaagttcatcggcctgagcgcggatctgcggatcagcgaccgggccttgctgcaactgagcgctgactactcgtcaaagaccaatctggccgatccgctgctgcgcgccgaccagagcggacgggccgatccgctggatccgtccagctacgtgctgccgcccagggtggatcagcgtgctgccctggcaccctcgtggtttcgccacaagaccgaaggacagaacatcgacgccaagttcgaatacacgctcagcccccgatggacctcggtcacgcaggccaacttctcccgcgtcaaacgcgatggcggtttcaacgacctgttcgacatccagctcaacggcgacattggctatgcggactactatgtctcccggggcgaagtgttcagcacctggtcgctgcaaagctacctggcaggccaattcctcgcgggagatatgctgcacgacgtattcttcggcgccagccacaagcagttcagggatcgcagtccttactgggatttcgtgaaaagcggcggtgccctgacgccgggagacgtatcggtggggaacatcctgaacccggtacagccgccacgctgggatttcggcccggagaacgatgtggagttccacaccacggtcaaggaaagctcggtcttcgccagcgatctgatcacgctcaatgaccagttccaggtgctgctcggtggccgctacatccagtaccgtgcgcgtcagctctcggccgatgcgctgccgcaggataagaacgtgttcgtgccgactggcgcgctgatctaccggccggccgaaagcgtgatgacctacctgagctatacgcgcggcttcgagaaaggcgagtacgcaccgttctatgtccacaacgccaaccagccgtcggacgccatcgcgtccgaacaggtggaaatcggcctgaaggcggacatcaacgcctggttgaacctgggcatcgcggccttcaacatcgagcgcgatgccaactatgtgaatctggacaactacttcgtcagtggagggaagtaccgccaccgaggcatcgaagcgacgggcacggcaaagctggaccagcaatggacgctgctgggaaatctggcctatctggataccgaactgcgcggcgtgaccgatacgagcgtgctcggcaaacgcagcgaaggggtgccgcgctggaaagggacgttgggggtgcgctatgccttcgcggacgttcccggcctgtcggtggacagcaccctcagctacaccggcagccgcccggtggatgcgcagaacagcggcttcattccaggctacacgttgtgggatgccggcgtcagctacgaaaccaggctcggtggcgtccccaccaccttgcgcctgcacggcaagaacctgaccaacaagtactactatgccagcgcgttgtaccaaggcggtctgctggtggggcgcgggcgtgaggtgttcctgtcggcccaggtgcgtttctga

SEQ ID NO: 532586 - DNA, 1236 bp, Stenotrophomonas maltophilia
atgttcaaacacgttcgaggggcatgcctgcgactgcaccgatggttcggcctggccggcgcggccttcctggtactggtcggcctgaccggcagcgtgctggctttctatgaggaactggatgcctgggtgaatccgcagttcctggcaccggccaggccggatcaggcgcccctggatctggcggcgctggccgcgcgtgcgcaacgcctcgcgccggaggcgcaggtggtggaagcgacctggcgcaaccagggccgccaggcggaaatccgcgtgcgcccctggcctgacggcatgccgcccgatctcgccttcgacagcatcctgctcgatccctggactggcgaggaattggggaggcgcacctggggcgacatacggcaaggaagggtcaatctgctgccgttcatctaccggctgcactatgaactggccgtgggacagcccggtttgatgctgcttggcctggtggcgctgggttggacgctggattgcttcatcggcctgctgctgaccctgcccatgcccgcaccacgcacaagtccccacaagcatgccaaaggcttttggtcacggtgggcgcccgcatggcagatcaggcatccggcctccggcacacggcggctgttcgatctgcaccgggctttcagcctgtggtgctgggcagtgctgctggtgtttgcctggtccagcgtgtcgttcaacctgccgtcggtctatgagccggtgatgcgcgcgctgagcggttaccaggctcccgcagcggtggccatatctcacatggaaaccaacacgggcctgagtgcccccgcgtcatggccgcaggcactggcccgggcgcgtgctctgatggccgaacaggccacacggcaaggtttcgccgttgacagggaggtcatgctgcgcttccttccggatgacgcgatatggctgtatcgcacccgctccgagcgcgacgtgttggagcgccgtggcgcgaccgatttgtacttcaatgcggtcaccggagatttggtcaagcttcgattgccaaccgggagccaggcaggcgagacggtcacgcactggctctatgccctgcatgtggcagacgtctggggatggccatggaggtttgccgtcgcggcactgggcatcattgtggtaatgctgtcggtgacggggtgcatcatctggatgcgcaagcgtggtgccagacgcgggcgcccaggtcatggggtcaaacaggagtga

SEQ ID NO: 532587 - DNA, 432 bp, Stenotrophomonas maltophilia
atgcatcactatttctcgctggcttgcaccaagcggctgtgcctcgtggcaggagtcaccacagcgcttttctctgtcggcgccttgcaggcacaaacctgggtcatcatcgatcaggcccatcccgttaccggcactgcggatcggcagatcctgctggacgctgccacgcacatcgaagcggaactctccgcagacctcccggcggatccagcacgggccaccgcgctcgttcagcaacgcctgacgcacggcgatgttgagttgcagcgccagatcggcgcgacctatcagggcgtcgccgacgcctggagcctggggatcaccaagattccagccgtgatcgtggatcaaagctatgtggtttatggcgagcctgatgtcgtccgatcggtcgcactgatcgaggcgcaccggagggccaaaccatga

SEQ ID NO: 532588 - DNA, 936 bp, Stenotrophomonas maltophilia
atgaaacgcctccgccgtcggcgcatcggtctcgccgccattctgttggtcaccgcgacatcgtcgttcgccctcaacaccgccaccatcgtcgcgtccgcgctgtcgcctgactgcctggagtatcgggtgacggggatctgctactggctgtactgcacctggggcggctgcaccgtgcgcacgccgatcaaggtgcggcactacgtgcccgatgcggtcgtgtcctcgtacagcaacatcagcgagaacccgtggatcgaggtgcgcgcgatgagcctgcccaatcccaccgcgcaggccggtggagatggcaccactaacgagggccacgagaacaacctggcgaagttcaagaatgccgacgccatcggccacctcgccgccgaggtgttcgcccagttcgccgcgggcttcggctatagctgcgagggggcaggcaccgccttcatgccgtatctgctgagcaccctggacacggtgggctggcgctacaacgtacccgaagcggtatacccggagtcgttgatcccgggcatgcgcgaaatcggcgcgcgcagcaccttgaacctgtggggcaacgtgtatcccaggggtggatttctgcaccaagccgatgaccacaaggccggagccgtggtctcccagcgtgctggtgacatcgtcacacggcgcggccaactgcacgtctatcagccgctgctggccagttcgcgaccgggatattggccggctggggcgttggtggagagcgatgcgtccactggcaagtggcaagagctgacgccgcgactgtcgtcctcgtgcgcggtatttccgcataacggtgtcctgactcaagcccagcgaggcgactacgcctggactttgtggcgcccgtacaactgctgccagcgccgtgggcagaccttcctgtgcagcgtggatttcaactga

SEQ ID NO: 532589 - DNA, 1395 bp, Stenotrophomonas maltophilia
atgatgcgtcccgacggctctacccatttcaggctcacggatcgttcctggcgtaccgttgccgtggctggcacgcttgcgctagccagtggctgggcatggtcccagagcggtttccagaccagcggcggtgtgattggcgacgaggtcatgtactcgatcggcggcggcaacgcggtctcgatgagcggtgccgccggcatgcgctcgattggcgttggagtcggctggaacagcaacctgatctgtggcgacatgtcgatttccaccacgatccagaaccagctcaacgggctgacgaacgggttccagaacatcatgtcgtcggtcatccaaagcgcgacgagtgcggttgcatcgctgcccgcgctgatcatccagtgcgccgaccccggtttgtataacctgcttacgaacggggtgttgcaggcccggctcgatttcgatcgttcgaagctcacttgccgtgcaatggctgagaggatggcggacgcggccggcggccagcttggctggaatcagctctccgaaggcatggctttgcgccaagccgtgtcgagcaccgacgcggtgtcggccatcgagcaagccgaagcggaccgcggcaatgccggggtgccctgggtcggcagcagtaatgctggcggtgccggccaaccatcaatcaaggtggtcagtgacgtcacccgtgcgggttacaaccttgtcaacggccgcggcgtatccggcacctcttcgatcgacccggcaagctgccaaagcctgtcctgccagacctggtcatcaccgcagcaggccatcgactgggccacccgcgtgctgggcgaacaggaacagcgtacctgcgacgcctgcacgaagaccgagacggtcccgggtgtggggctcacgccactgatccagaaagaatacgacaccaagctgcaagtgctgcaggagttggtcagcggcgcgcgcaacacgaccttcgagaatctgcgcgaagccggcagtacctcgctgccgatcacgcgcggcgtcatcgaagtgctgcgcgacgagcctgatcagaacatcctggcacagcgcctggcctcggaggtggcgctggcctcggtgctggaaaaggcactgctgcttcagcggaccttgctgacagggcgcaaggagccgaacgtggcggccaatcaactggccgtcgaggccgtgaatcacgaaagcgatacgctcgatcatgagatccgcaatttgaagacggaattagagttgcgccgcgagttggccagcaattcaccgatggccatcatccagcgccatggcacacgggcggcgggctcgcgcggcatctatgagggcgatccggtgcctgaccgccttgatcagttgcagaagggcagtccaggaggtcagccatga

SEQ ID NO: 532590 - DNA, 351 bp, Stenotrophomonas maltophilia
atgagtgcggcctggatgcgcccgcgctggctcttcaaccggcgcgtggccaaggtgctgctctgggtggcactggtcttgtctgcggccatcgccgccaacgtcgcgggcaactggtttcttggcggcattgtcggctgggaacagtggctggcggacgcctccggctacttcctgttgtggcacctgtttctgtatgcagcgacggcctacgggtgggtgtggatgcgtcgtcggttactggtgcgcgaacccggcacgcaagcaaagcaccgcctgatccgtgccgaaattgcaggtgtggtggcgatcgttgcgcttgaagccagcctactcgcgcaggcgacatag

SEQ ID NO: 532591 - DNA, 1521 bp, Stenotrophomonas maltophilia
atgacgctgttcaccacggactacctggagttttacctgacgctgctgagttgggtcattcataacggcatttgggccgtcctcgtctccaccggtgtattcgccattcccttcgtggcgatcatcatccaggaatggctcaaggcgcgcgcagagggcgccgatgaaggcaacaaaggcgtgttgtcatctgcgcgcatcgagaaccgcgtatgggtggctatcgttgtggtgatgttcgctggcatcccgttcatcgacgtggatctcaataccatccaatacgacagctcgcgctcggcccagtgccaggtcaacgtgccgcagccgaccgacacgggctggtcgcagtccttctcgacgctcaacaaccagagcgccaagctgccggtgtggtgggccttcatgcacacgctctcgcgcgcggttacgggcgcttccgtggcggctatcccttgcggcactgatttacggcagatgcgcatggagatcgacgccacgcgcattgacgacccggtgttggctcaagaggtcgcggacttctcgcatgactgctacgggccggcccgcgccaagctgttcatgcagcgcccgaaccttgatgaggcgcagatgcacgatgtcacctggatcggctcgcgctttttcacggacaccgctggctactacgacaactatcggtcgagcacgccacgcgatgactggccctacgacagcaaccgtgatgcagggctggcccaagtgtccagcggcggtggctatccgacctgcaggcaatggtgggccgacggcagcaatggcttgcgcgcgcgactgctcagccaagtggccccaaatctactcacgcgggtggcaggctgggccgggttcctgagccgcgccgaggtggacgactccgtgatccgcaccatcgcttcaccgagacagcagaagctgaatcagggcagtgtctatacggactacggtggccagatcgacaagaccttgccgaacgtcatcacgcgcgcggccggcgacgtaggaatggcagtcgggggaatcgcggcattccctgccatggacgtcgtgcgccaggcgctgcccatggtgctcgccttgctcaagatggcgctggtcatctgcatcccgctcgtgctggtcattggcacctatgacctgaagatggtcattacggtcagcgtcgtgcagttcgcgctgttcttcgtggacttctggttccagctcgcacgctggatcgacagcactatcctcgatgcgctctatgggtggggctggggctggaaccggccgcacagcaatttcgatccgctggtgggattgaacaatgcgttcggcgatatgctgctgaacttcgtcatggggacgatgttcctggttctgccgggattctggctggcgagcctcacctgggttggaattcgggccggacatgccatccagggactttctgacggcagcaagagcgccggtcaagcaggtggcaagggcgccggggcactcacaggaggaaagctgaaatag

SEQ ID NO: 532592 - DNA, 366 bp, Stenotrophomonas maltophilia
atgagcacgacaacccgcgccagcaccgcagaacgcatcggccgcagcttcggccgtggatggcgcgcctatgtacgcggcgagcgacggttgtcgagctggttcacctccaaggggatgccgatggcgggcgtcgctgtgctgttgtgggtggtcaagctcgttgcgctgggattgctcttctatgctgccttctggttcgcagtcgtgttgctgggcgtggcggcggcggggtgggctactgctgccaatacctcggatgaggaagagtggcctttcacagacctcaccgaactgcgtaagacaccgggctacgatcccaatttgtacaacgacacgtcgcacgagttgtacaccgacgactga

SEQ ID NO: 532593 - DNA, 1809 bp, Stenotrophomonas maltophilia
atgctctccctgttccagcgaaagcggcccccggccactgccgctccggtgccagcaccgaccatcaatctcccgaaagggttgacactgccgcagtcggccgcgtcgctcttggcgacaccacgccgacagaagctgctggaacacatctggcagcgcacatcgctctcgcgccggcaattcgccaccctttaccgcgcaccgctggagcgctacgccgagctggtccaggtcttcccagcctccgaggcgcatcaccatgcctacccaggcggcatgctcgaccacggcctggaaatcgtcgcctatgcgctcaagctgcggcagtcccatctgttgcccatcggcgccagccccgaggatcaggcggcgcagtccgaagcctggaccgccgccgtcgcctacgcggccttgctgcacgacatcggcaagctcgtagtcgatctgcacgtcgaactggttgacggctcgatctggcacccctggcacggcccgctgcgccagccgtaccgcttgcgctaccgcgacgatcgcgagtaccgcctgcacagcgccgcgacaggtttgctctaccggcaactgctcgatcgcgaagtcctggactggctcagcggttatccgtccctgtgggcaccactgctctatgtcctggccggacagtacgagcatgcgggcgtgctgggcgaacttgtcgtgcaagccgaccgggcttccgtggcccaggagctcggcggcgatccatcgcgcgccatggcggcgccgaagaatgcgctccagcgcaagctggtggatggactgcgctatctgctgaaagaggagttaaagctgaatcagccccaggcgtcggacggatggctgacccaggacgccttgtggctggtgagcaagacatgctccgataagttgcgcgcgcacttgttgtcgcaaggaatggagggaatcccctccagcaacacggcggtatttgacgtactgcaagaccacgctatcgcacagccgaccccggacggcaaagccatctggcgtgccacggtgaccagcggcgagtggtcccacagcttcacaatgctgaagctatcgcccgcgctgatctgggaggccggagagcgtcccgcgccctttgccggcacggtgacggtggaagatatcgcgcatgctgacgatgtgcacggcaccatgcatgaggatacgtcttcacccgcaccggcatttgcggccatcgcagcgcagccaaccattgaaacgccttcaccagcgatggacgatcccgttgccgatctgctttcgatgtttggtgtcgacgctgcgttggccagcgaattgccggccagcgccacgcacacagcagccaaagcctcgcccccgcagcaggcgagcacgtccggacaggccaccgagccgacaccggacacggcgtccggcgaaaggtccttcggcgcgcagttcatggcatggttgcggacaggcgtaagcgcccgccggctgatcatcaacgacgcgaaggcgctggtgcataccgtcgatggcaccgtctatctcgtcagccctggcgtgttccagcgctacgtgcaggagcacccgcacatcgcagcactggccaggcaagagaacatcgccgactggcaatgggtgcagaagcgtttcgagaagctgcaactgcatcgcaagcaggccaacggcctgaacatctggacttgcgaagtcaccgggccacgcaagaccaggcgactgcatggctacttgatcaaggagccggattgcctgtttgatgaagttccgccgaacaacccctatctgcgtctggtgtaa

SEQ ID NO: 532594 - DNA, 246 bp, Stenotrophomonas maltophilia
atgacgttactgagcgatgtcggctggatggcgttcgtcatcgtcattttcagcctggctgtcgccattgtcattcccgctgtactgatcgtgtttcgtcagattggcgcgtatctggtgtattggcttttgtcgcttgtcccagttgagtggtcccgtcagcctccctaccagcgttcgctggggtatgtgcttgcgcatgccatgcgaaatggtgagcagtttctttacaccagacgcagatag

SEQ ID NO: 532595 - DNA, 528 bp, Stenotrophomonas maltophilia
atggcattgatatctgtatctcctcataccacccgccaactcatcgaccaaggtgcggtgttggtggacatccgcaatgacgatgagcatgcccgtgagcacattgcacaagctcgccatatgccgttggatcaactgactcgggacgcaacacagatagtggcgacaagcaccgtcatcttctattgccgctccggcacccgcacgcagatgaatgcgcagtccttgggagcctgcgtggttggtgatgcctacttgcttgagggtgggttggacgcatggaagcgcgctggcttgcccgtggcaactagtgcgcgtcagccgctagagttgcaacgccaagtgcagatcgcagccggttcgctaacgttgctgggcattatgctgggtatctcagtatcgccgtggttctatgcgctgcccgcgtttgttggcgcgggactgatattcgcgggcgtgtcgggcttttgtgggctggcacgcctgctgatgaaggcaccctggaaccgcagggccattgcgggctga

SEQ ID NO: 532596 - DNA, 312 bp, Stenotrophomonas maltophilia
atggacaaaagcaaatctgatctagagatcttgcaggacagcgcggtgcaggccgctgccctacttcaagccgtgggcaacccgcatcggttgctggtgctgtgcctgctgatggccgaagatgaaatgactgtcggagcactcaacgggatggtgaccctaagcccatcggcgctgtcgcaacacttggccaagatgcgcgaggaggggttgataacctatcggcgcgagtcgcagacactgtactaccgcatcgacgatcccagagtggccaaactgatcggcacactcaaggacatcttctgcccctga

SEQ ID NO: 532597 - DNA, 354 bp, Stenotrophomonas maltophilia
atgacgaagcgatacaaagaactcacacaggacatctctggcaacctcgcccatctgcacaagacccagccgggggtgatgcagggttttcgcgatctaggcaaggctgctatggccgaaggcgccatcgatgccaagaccaaggaactgattgccctcgccgtcggtgtggccgcgcgctgcgacggctgcatcggcttccacaccaaggccctggctcgcctgggtgccaccaccgaggaagtgcatgaagcgctggctgtggctatctacatggggggaggccccgtggccatgtatgcggccaatgcagtggccgcgttcaacgagttcaccccatccgtacctgcatga

SEQ ID NO: 532598 - DNA, 375 bp, Stenotrophomonas maltophilia
atgataccgaccgctgatttcgtgtctacgctgttccatggccagagcaaccctgacaaagtgaccgttgccctgaccatggcactgaatgctcaactcaaagggcacacggcctgcctgatcctgatggcagaaggtgtagcactgggcttgcccggcgctgccgacaacatcaacatcggccagccattcgagccagctatcgacctgctgcgccagtacctcgacgctggtggccgcgtggccatctgcaaatcgtgcatgttgcacaacggcctgagcgccgagcagatggatacgcgcttcgaaatcattaccgcgtcgaacgtggtcgacttgctgatgggggccacgggaacgctacaagttgcttag

SEQ ID NO: 532599 - DNA, 753 bp, Stenotrophomonas maltophilia
atgtcgaatcgattcgaaggaaaaacagcactgctcaccggcgcggcctctggcatcgggaaggcggcagccgtcaagctagccaccgaaggcgcggcggttgtcgtcgctgacctgcacgagcaagccgctctggcggtggtggacgaaattactggggcgggcggcaaggcagtcgcgttcgggggggacttcacgttacccgcggtgaatgaggccgctgtggctttcgccatcgaaaaattcggggccttgcatctggcgttcaacaatgcggggatcatcgggccgcaagggccgctgcacgaagtggatatcgaggcttacaagaaactaatcgatatcaaccttgatgcggtcttttacggtatgaagtacgagattcccgcaattcttgctgctggtggcggggccatcgtcaatacatcttccatcttgggcctcgtgggtacgccaggctatgtgccgtatgtgacggcgaagcacgcggtatcgggtttgaccaaaagtgcagcgctgcagtattccgctcagggcgttcgcatcaactccgtgcatcctggctatattgatacgccgttgcttaacgaactcagccgcgaggaatacaactcgctcgttgcgctgcaccccatcgggcgtcttggtacgtcggaagatgtagccaatgtcgtggctttcctgctttccgatgaggcggcttttgtgacgggatcgcaatataccgtcgatggcggctatacagcgcagtaa

SEQ ID NO: 532600 - DNA, 1221 bp, Stenotrophomonas maltophilia
atgactgaagaccatacgatatcggccgcagagagtgaagcattcacaagcggagcccggctcgacatcaggccgctgatggcagcctacatgacctgcaccatggcgatgatggcgtttgtgtcgctgatcgggccgatcgcgcgatcactgcatttggcaccctggcaggctggcgcagtggtcaccgtgggcggcgtgctatggatgttgttttcgcgcccctggggcgcactgagtgatcggcgtgggcgtcgaatggtacttctgatgggcgtgggcggattcatgctcgcctattgggccatgtgcgctttgctgatcgtatcgttgcaggaactgcccgcggcaggactggtttttgccggcctactcatcacccgtggggcagtcggtggattctttgccgcaattccggcggtcagccaggcgctggtggccgatcacgtgccacctgatcagcgtgctggcaccatggcatcgctcggtgcggccaacggcgtcggtctggttgtcgggcccgccgtcgcggccgcactggcccagtatggtttggggttgccgctctatgtaacagccctgctgccttttttggcatttgtcattctgtggcgcctgctgccgcgtaacgagcagaaagtcggcgcggcttccaccgcccttcgcctgagcgatccgcggctgcgtcggccgatgatcgttgcctttgctgccatgttcagtgtcgccattggccagatcacagtgggattcttcgccatcgaccgactgcaactggagcctgcacccgctgctcgggccgcgggtttggcgttgacgttggttggcgttggcctgatcgccgcccagttgatcgtgcgtaagctgcactggacgccgcaacgcctgatccgtgtcggtgccttggtcagtgcggtcggcttcggtgcagtggctctggtgtcgacgcaatgggcattgatggtatgtttcttctttgccgctgcggggatgggctgggtattcccggccttctcggcgatggccgcaaatgctgtagagccacaggagcaaggtgcggcagcaggatcggtcggcgctgcccagggcttgggcatcgtgctcgggccgttggcgggcagtctgttgtacgagcttggtcctggcattccctatgcgctggtgggcgtgctgttggcgtttgtcgcgctgtggacgtcgcagagtgccccacggaactga

SEQ ID NO: 532601 - DNA, 2106 bp, Stenotrophomonas maltophilia
atgcgttttcaactccgcgccctcagcattgcgctgatttccgtgcatgccatgtcatggatgcatgacgccggtgcacaaagttcgccgcgcgccgacgatgaacccgccgttctgccccctgtggtcgtcacggctagcaagcgcggcgaaaccctggaacggctcaatggctccgccagcgtggccgaccgcacgtcgctggatgatgcccaggtgacttcgaccctggaactggatcgcgttttccccgagttgtacacgtcgtacagcgcgaccttcctgttcccgatcatcacgctgcgcggcgtgacgtcggcgcaggatttctacaacccggcgctgaccgtctatgtggatggcgtaccgcagttgccgacctttgccgcccagtccctgttgggcgtcgagcaggtggaattgctcaaggggccgcaaggcacgctgtacggcaagagtgcccagggcggcgtgctcaacatcgtgacgcacaagccggacaacacgccgcagtttgccgcccgtgccggcgtatcgagccgcgatggctatcagttgcaggccgaaggctccgggccgctggtcaaggatttgctgtacggctcggtatccctgttgggcaatgacgtcaacggagatatccgcagcgatgtcattggtagcgaccggctggggggcgtgcgttcgcgggccggcaacgtcaagttgcgcctggcaccaatgggcagcccctgggagatgggactgagcgcaggccgcgattgcgccaagggagaccaggaggtctataccctgtttgacgattacaaatcccgcaaggcgtatgtttcgccgaatctgcccgaggcctaccgggatttctaccagaagcggtgcgcgaacagctttgccctcaacggccaatatgattttggcctctggcgcctgaatgtcatcgccagcagtcaacgagtccataccgcacgtcattggccgttggatgcatatttcccgcagtttggggagcactggaaacagaacacccaggaggtgcgcctgtcgacgcgaccgagcgaggcgggggaggcgtcttcccgtgcctgggatgcggtgttcggtctataccggcaggaagtggacatgtcgcgcagctaccagttcgacatggtgcttcccagtctttatcgcgtaacggactcttcctccagcaaccgtagcgagtcgctggcggcctatggcgacgtgacctggcatctgacgcccaaggcggatctgacggccggcctgcgcttcagccgcgacgaggccagaacgcatttccaaggcaacatgatgggcagcgccttccaggggcgggcatcggccaaccagacgacctggctgggccatcttgcggcaggctaccagttcgctcccagttggcgtggctacgtcaatgtggcccagggctacaagccgctggggtacaacctggcaccgtcgagcgtggatgacgccgagggctatggccgggagcgctcgatcagctacgaggccgggctgcggtactctggccgcgacctgcgcgccagccttgccctctaccgcgtggacagcaaggatgtgcagctctatggcgatggcgatatgggcaaccagacgctgcgcaacgtgggcgacacccgctccgtgggcatggagttcaataccgagtgggatgtcactcgacaatggacgctgagcgccgggggcttcatcaatgacgcgaccttccgccgcttcgaggattccagcgcctgcaccggctgcaaccacaatgatgtgccgatggctccgcgctacgggctgacgcttgcggccaaaggcaatgtgcgtgtggccgataccgtgctaagaccccagttgagcgtgcgtcgtgtcggctcgcattatttcgacagcgccaacacgctgcgccagggggcttatacgctggtggatgccggtctgggatggaatccgaccagcaatctggaattgatgctctatgtccagaatctgacggatgaggactatcgaacctacggattttcctatggcgctacgggcaacttcgcccaagtggcacccggccgcacggtcggcttgaccgcgacctacttgtactga

SEQ ID NO: 532602 - DNA, 1782 bp, Stenotrophomonas maltophilia
atgagcattgcagatcccagccagcggataacgcccctgcgcgagacgtggcggcaattgatgaccagcgcccgcagccgcgcgcccaggctgcgcgccagcctgatcggcctgggcctggccgccattgcgcagggggtggcgctggcgtgcctgatgccgctctttcaggcattgataccgagcgccagttggcaggcggcgctgccctggctgctggcgatgacggggctgatgctggccagcacggtcatccgctggtgggcgcagggcttcgactatcgcggcgacatggtgcgcaacacgcatgagctgcgttccgagctgggcgcgcagttgcgccgcattccgctggaggtgctgcaggacaagcgcgccggtggggtcaacgcgaccttgctggggaacgtggacgagacgctcagctacatcctgacgatcgccaacatgatggccaccgccttgctgacgccgctgacggtggcgctggcggcgctgtggttcgactggcgcatggggctcgtcctgctgctggtgttcccgctgctgattcccctgtaccgctggcggcgcccggcctacggacgcggcatgcgcatgctggccgacgcccacgagcgcaccagtgcggatatcctcgaatacgcccagggtctgccggtgctgcgcgcgacctgccgcaccggggaaaaggcgcagcgcctgcatgacagcttcgtgtacctggaaaaaatccagaccatcggccagcaaaaaggggccaagcctaacctgatcctggcgacggtgatggagctggcgatcctgctggtggtgttcctgggtgcttggttcgtcgtacagggctccctggatatcgccgtactggcggcgctgatggtgatcgccgtgcgctttgccgaaccgctggcaaccttcgtgctgtacgccaaggtgattgacctgatcgaggcggcgctgggcaaaatcgatgccctgctcggcattgccccgttgccacggcaaacgccttcgcaggtgcctgaatggtttgacgtcgccatcgagggcgtgcgctttgcctatgcctcatcgagcgaaccgatcttgcgcgatctgtgcgcccggttgcccgaacgcagcctgacggcgctggtcggcccatcgggatccggcaagaccacggtgacacgcctgctgatgcgccatgccgacccccaggccggacgcatcactattggcggcgtggacatccgcgccatcgcgccggagacgctcaacagcctgatctcggtggtgttccaggacgtgtacctgttcgacgacagcatcctggccaacatccgcatggcccggccagatgcgagcgacgaagaggtcgaagccgccgcccgcgccgcacattgccacgagttcatcacccggctgcccgagggctaccagacgcgggtgggcgacatcggcggccggctttcgggcggcgagcgccagcgcatcagcatcgcccgtgccatgctcaagaacgcgcccatcgtcgtcctcgacgagccgaccgcggcgctcgacaccgaaagcgaagtggccgtgcagcgcgccatcgacgccctggtgcgcgagcgcacggtgatcgtgatcgcgcaccggctgtccaccattgccgccgccgaccagattctggtgatcgacgacggccgcgtggtcgaagccggcaggcatgccgagctgctggccggcaatggccgctatgcgcggatgtggcaggcccagcagagcgtcaagcactggcgtgtgggggaagcatga

SEQ ID NO: 532603 - DNA, 1773 bp, Stenotrophomonas maltophilia
atgccgggtaacgacaagacgcggtccgcgcccggcgtctggtccatcatgcggcccgtgcagggccagatccgctttgccatggggttggccggcctggcggccgccagcgccctgggcgcgctgtgcgccttggcctgggccgtgcatgcgctgctggccgctccgagcccgtggccctggccgccactgctgctagcggcggggctgaccgtgctggcctttgtgttgcgtctcaatgcgttcaaccagtcgcactatgcggcctttcgcctggagacgcggctgcgcaccgatctgtccgagcacctggcgcggctgccgctgggctatgtgcagcagagcggcgccggtgcgctgaccaaggtgatgatggacgacgtgaaggcgctgcacgtgttcgtggccgacagcacgcctttgtacgcgcgggcctatgtgtcgccggtgctcaccttcgtgctgctgtggtggctggactggcgcctggcgctggtggccacggcggtgctggcgctcggcatggcggtggtgtcgctggccatgcgcggcagcggcgagatgatgcagcgctaccacgccgcgggcgagaacgtgagcaaggcggtcgtcgagtacgtgcaggcgatgccggtggtgcgtaccttcgataccggcacgaccacattccagcgctaccagcgtgccctcgatgccttcatggaggtggtgttgcagtggtaccgcatggccgggttttcctcgcgcctgtcggtggcgatcctcaatccgctgccgacgctcgcggtgctggtgtggctgggcggctggctgatcagccatgacacgctggatgtcgccgcctggctggccgtgctgctggtgggcaccggcatggctgaatcgctgctgccgttgatgtcgctcaaacatctggtggccaagacgcagatgagcatccaccgcatccaggaggtgatggccgagccggagctgcgagtcccccaggcggaacgggccaggacaccgatggacggctcggtgcgtttcgagcgggtggattttcgctacaccggcgatgggcctttggtgttgcaggacgtgagcttcgacgtgccgcaagggacggtggcggcgctggtgggcccttccggcgcgggcaagaccacggtggccaggctgataccgcgcttctgggatgtcagcgcgggctgcgtcaaggtcggcggcgtggatgtgcgcgagatgcagcccgacgtgctgatgcagcacgttgcgttcgtgttccaggacacctttctgtttgccgacaccatcgccaacaacatccgcctggggctggagggcgcgacgatggacgaggtgatggccgccgcgcgcgccgcccaggcgcacgcgttcatcgaaggcctgccgcagggctacgacacgccggtgggcgaacggggcgtgttcctctccggcggacagcgccagcgcatcaccatcgcccgcgccatcctgcagaaccggcccatcctggtgctggacgaagccacggccttcgccgacccggagaacgaggccgcgctggtggcggcactttccaacctgatgcggggcaagacggtgctgatggtggcgcatcggctctccaccatccgcgatgcggaccagattctggtgttcgaccaggggcggctggccgagcgcggcacgcatgatgcgctggtcgcgcaaagcggcgtgtatgcgcggctgtggaacaactatgagcaggcgcaggactgggccttgatgggagcacgggcatga

SEQ ID NO: 532604 - DNA, 1281 bp, Stenotrophomonas maltophilia
atgaatacgatcgcttcttcgtcggtcgcgtccttgaagctgcgccatctgttgccagccgttgccggggtctacatcacccagaccctcatcactgccctgatcacgcaggccctgcccacgctgctgcgcagcgaaggtgcctcgctgcagttgatcgggctgaccgcgctgctgtgggtgccctggggcatacgctttctgtggtcgccgctggtggagcgctggcgtttgccggcaggcaggctggagcggcgttcacgcatcctgatcctgacgggccaatggctgatggccgcgatcctgttcctgctggggttggcgagcctggccgggcagctgtcgctgagtgggcatgcgggctggatactgggcgtgctgctgctggcggccctggcggccgcaacggccgatgtggcgtgcgacgggttcgtggtcgatcaattggccatgaaccggcgcggctggggcaatgtggcgcaggtcggcggcagttatgtgggggccatgctgggcgcgggcggctttttgctggtggccgggcaatatggttggccgctggcactgatggcggcaggcttggccgtcgtgctgctgggcctgccgatgttgctgctgcgcgagccgccgcgcgaccgggcgctggccgtcgatcaccgccccagcctgctgcatgcgctgcgccggccgcaggtgcgccatggtctgttgctgctgttgctgtccagcgccggggtgcgcctgacatttggcatgttcggccctttcctgctggatcgcggtatgacggtcgaacagttgggctggttgttcggttcgctatacgtcggcgcggggctgaccggcgtggttctgggaggcgtgctggtgcgctgcgcgcctggctggcgtgcggtgtggatggcggtcggcctcaagacctgcgtgctgctggctttggccctggccgcgccggcggcatcgctgacgctgcttatcgtgctggtcggcctgatgttcatgatactgggtggcctgtgggtggcgttgtactcggcgttgatggggctgacctcgccactgcaggccgggctggatttcacggtgttccagagcgccgacgcgctgctggcgatggcgggcggcgtggccggtggctggctggcccagcacctgggctatgacttttgcttcgggctggcggcggcgctcacggtggtggcggcgctggtggtctggcgccaagcgcgggtcgacgagcgaacggctacgcagtcgctgggaggtgcccatgccgggtaa

SEQ ID NO: 532605 - DNA, 987 bp, Stenotrophomonas maltophilia
atggctgcggacatcccgatcaggagagtgagcgaacgcgcgaagcatgaccccgcccggatgctggacagcatgctgctggacattcctgaagactggcgcaacaccatgcagttggaccgcccgttagaaggcgtgaacatctgctgcatgcatgggcggcccaactctcagtgggcgttcgaggcccagggagggccttcgctgtcgatgagcatcctgctcgaaggccagatggaagccgccatcaaggacggcagcgagtttcgcctgcggtccggacaggccgtgctgatggccatcggccagcaggtcagcggctgggacgtgttctcggccgagcgcgatttccgcatggtcaacatcaacctcacccgcgaggcgctgctgggcatgaccggcctgcagatagaagacatactccagtgcatgcgctgcgcgggcagcggcagcatgccgcacgtcgatgtcagcatggccgcgatgccggtcttcaacgcgctcgagcgcgtggccggcgaaatcagccattgccgctacctcgactgccgggcccgcaatgtgttcctgtgcgccaaagtgaccgaagccattgcagtcctcatgtgcaggagtgggcgcgagcatggcagtgccgccacgctcagggccgtgccgtcggacaggccgcacctagtgcgtgcgcgcaacctgctcgaaagcaagtacagcgagccatggagcgtgccgaccctggcgcaggccgtgggcctgaacgaaaaacggctgcaggccggcttccaggcgctgtacggcttgacggtgcacgaatgcctcacccgcatccgtctggatgccgcgctggctatgctcgtgcacggcgtctccgtcaccgacacggcccaggccgtaggctttgccaatgtcagccacttcagcaaggtctttcgcaacaacatcggcgcctcgcccaaacactggctgctcgaataccgggcaaccgattga

SEQ ID NO: 532606 - DNA, 756 bp, Stenotrophomonas maltophilia
atgtccgacacccctgccgcgtcccaggacgcctacacccaatccgccgagtggtacgacatactttccgcgcagcactggcgggcacggaacgactcgatgctgcaaacgctgcgagcggcccggcccgacgcgcaactggtgatagatgtaggttccggcaccggcgtggcgctgccgctcatcgcacaggcctatccgcaggcagacatccacgccatcgaaccctcggcctcaatgcgcatcggcttgatgacccgcatcctggccgatgcgcacttgcgccgccaggtcaccgtgcatccgcacggcattgccgatgccacgctgcccagcggcatcgacgtggcgctgatctgcggctgcgtcggcttcttcgacgaggccacccgaaaggcactctggccgcgcctggccgccgcgctggcaccgggaggcgtcgtcctggtcgatgtgatgccgctggacaagccgcagccggtacctgaatcgcgggtggccagctccgacgtcgggcggcaccgctacgacatctggctcagcggccagcccgtcgagcaagagccggagctgattcgctggcacatgcgcttcgagcagcacgacggcgagacgcagatccgcagcgtgccgatccagcgcgactggcgggccttcggcctcgacaagatcatcgatgaagccgctggggcaggcttcgcatccgaacgcctgaccaacagccccgtgccggccgccctgctgcacctgcgctga

SEQ ID NO: 532607 - DNA, 2829 bp, Stenotrophomonas maltophilia
atgcagcatttagggaaagaccaaacgggggtgccaggaggcctcgcttacagtcgactatgcgtcgccgtcatgctggcgctgggcggccaggccgcgctggcccaaagcgcagtaccgtcctcaaccgacgccatcagcgaacacgaatctgccagcgatccggtaaacgagctgggcacgattaccgtcatcggcgtcgccgcagaagaagaaaagaaaatcggcaacaccagtggggcgagtaaggaggatgttgagcggcgcggtgccagccacatgagtgatctgatcgaccaaatctcgggtacgtcggtcaacagcctttatgcccgaccagagatttcggtcggcgtgcaaggcattgccgggcatgggcgtgtatcgcaatcacttgagggtattactcagaacttccacgcttttaccaaggacattggtcagaccggttcgatatttgttgatccccagctcttgaaatctatcgacgtaacccgtggcgtcaataccagcaccggcactctggggagcttgggcggatcggtcgatttcaaataccttgatctcgatgacatattgcttcctggccgaaatttcggcggcatgattcgcgggtccacaggattcagcaaatatcgaaacggtcaaaaaccttcgggctctttcttcttgggcggacgtaatgaacgctgggatgtaatggtgggcgccgccgatagtgagaatgatgcgtatcggatcggcagtcacttcaatgacggcgacatgctgaagtatttccatgcgacgaacttgaatatttatgatggaattaatgatccaaccgctaattggcagggtaggtgccgctactattatgttgtagggcatactggctcaggtcgagacggccttaataactgtcagctctcgcctgaacgattgaatcaactcaaacaggctgcaaagtctggtgctttgacaggcacagagcgcaaggccgagtcacagatgttacgcctgcgccattacttcaacgatgaactcaatcagagccttgagctgttcgctaccgccagcaagtccagctacgagacggatcaagagcccaatatatggttgccatccttatctggtgcgagcgaggcaatctggggcgaacgtccctggtccattggcactgaaatgaaaaatcaggttgtcagtctgaaatataaagcggccatctcggattttttcaatcctgaaatcatggtttaccacgagaagcaaaaaagggatcagcgctggaaaggcatccctggaacaggcgcggtaggccaggacatgcactatttcgtagataacagttcaaacgggttaaagctgaataatgtcagccatttccgcacatcgcttgttggcccgttacgcctggattctgcattcgagtttcgacgtacccataaagatgtggatagtttcagcgaagccgactggttggaggaagacaagaagaaccgtggtttgccatacaccctagctcaggaatgggaccccagctccaaaaataaatcttcaggtttcgtgctgaatttgagcaccgaaggcgatggtccattgcaagccagcgccggcataggctggcagcgagtcagaatggatgtggattcccccaggtttctgacaggaaatatctcatcagaaggaattattccaaattggcaaatattgcgagatttatatcgaagccaggggtattcatctgctgaagctagaagaatggcccaggcggaaaccacgagaatagcaaatggattaaaaatagatcctgatggtgccagtgcgtacaatcgctttaactcggataataaaaaacattattttaatttaaggcaagccaactttaatttgcaatacaccaaacccggaacaggtttgacgacatatggttccattggttacagcgagcgagcgcctacaagcaatgaaatgtacacatctgggccttggttgaggcaactattcgttgccaatcctgacctaaagaaagagaaaaatctttccttacagttggggatgaattaccgaaaagcagactggctgacagcctctgatgaattcaatgccggttttggatattaccgaaatcgcatacgcaactatattgggtatggcccgatctggatggaaaatgatggggttatgggtgatgacagttccgttgggggggctgttgccaacgtcaataatcaggaatctgttattcgtcatggttttgaactgaatattggttatcggcaaccgtcgttttacgtacgcagtaacttaaccattccacttcggcataataacaaaatgtgcagcttgctatcacccagcggaaatagctattacgtcactactgatgcagatggaaacaccgtcttcgacagaacgggcaacgagccaagctcatgttactcaggttggaattggatggaaaccagcttgatcgagccaattcgtgggactcttactgctgcactcacaccgcacagtggaaagatggaattaggcaccacccttcattttcggggcaagcaacgggcatcttattactacgtagagactgctcaaagcatcggcggtaatcatcctagtaatcactcttccgctacattgcccaatggtaatggctggattgatgcgtatctttggccaaaaactatcaaggtggatttgtttttcaattaccgattcaatgatcagttaaaagtcggagtttatcttgccaatctcacggatgaattcgatggcactccgacttctttgggctacaacttttaccctggccgcacattgacggccaatatggaataccggttctaa

SEQ ID NO: 532608 - DNA, 822 bp, Stenotrophomonas maltophilia
atgtctttgaaaactgcaatcaacgactggcgtgatagctacgatgagaccatcatcgacacccagcataatccggcgtatatcggttccattcgggacaccagtggagtgttccacaaaggcgtagacatctacatcactggcaccaatcagattcacaacttcaatgtgtacgctggccaaggtgtggatcacctgaatccatctaatggcggtgggaaattcgtggtggagtccactgcggccaccggtttcgcgtggaataccgtcgataccaacggcaacggcaagtacgagttcgtaacctcgggccagctcaacaagctgtctttgggttacaccccagcaggtgacaacggcgcagcgccagcttccggaacactggcgtcgttcgataccggtgaaccactgctggtggtcaacggcttcaacatcgccgtggactacgctgccagcttgtttggagctggatacaacggcaacacggccatcagcgtgtcggcaacggcctccgatggcactgtgctttctagcattctggccaatgccagcttgtatgagtcggcaacgttgaattccacggtgctgtacagcctggcgttcgacaacaccggcgtacaagccttcgagtgggtgctggacaagtacctggagtccaagggttcggacatcactgacgattgggcaaacatccagagcgcactgaatggcactggtgtgtcgatcagttactccgagtacacctccagcagcgccgttgcagcagatgcctacgctgttgcggctgccgaagtcgaaagcgacctcttgctggccgcgtaa

SEQ ID NO: 532609 - DNA, 1821 bp, Stenotrophomonas maltophilia
atgacggcaggtaaaacccggccggcagagggtgcgcgcggtgagttggcccgtgctctgctggcttacaaaagcagtttcgtacatatcggcgtgttctcgggcgtcatcaatatcctgatgctggccccggcactgtacatgctgcaagtgtacgaccgggtactggcctccggcaacgaaatgactttgctcatgctcacgctgattttgctgggcatgtacgccttcatgggcgcactggaatgggtgcgctcgctggtggtgctgcgcctgggtacgggctttgaccgccagctctccccgcgtgtttacgacgctgcattcagcgccaacctgaaaaccggcaagctcaacgccgcacagccgctggaagacttgcagcagttgcgccagttcgccaccgggcaatcgctgtttgcgctgttcgatgcgccgtggttccccgtctatgtgctggtgatgttctatttccacccgctgctgggctggtttgccctgggcggcaccgtggtgctgatgctcatgggctgggtgaacgagcgcgtgagccgcccgcatttgaagaaggctggcgagctggcgatcagttcccgccgcgatgccagcgccaacctgcgcaatgccgaggtgattgccggcatgggcatgctgaccaacctgcgccgccgttgggcctcgcagcacctgggctatgtgcgtgagcagaacttggccagcgcgcgcatggcaaggatccagggctggaacaaggcactgcgcatggcggtgcaatccctcgccttgggcctgggcgcctggctggtgctggaaaaccagatgacggcaggcatgatgatcgccggctccatcctattgggacgtgcgttggcgcccatcgaccagatcatcagcgcctcgcgccagtggacgggcgtgaaggaagccgagcgccgcctgagccagttgctcgaagattttccgccgctggccaagggcatggatttcccccgccctgcaggtgtgctggccgtggagcaactgctggccgccccgcccagccaaggtccgcaatcactacagccggtgctgcacggcatcaacttcaaactggaatcgggcgaggcactggtggtgattggcccctccggtgcgggcaagaccacactggcgcgctgcctggtcaacgcctggccgccgttgcgcggcaaggtccggctggacagcgccccgctcgaccagtggcggcccgaggccctgggcgcattgctgggctacctgccgcaggacgtgcaactgttcgcgggcacagtggccgagaacatcgcccgctttggcgaggtggatgaagccaaggtgattgccgccgcgcagatggccggggtgcatgagttgattttgcaactgcccgagggctaccagacccgcctgggggaaaacggcgtgggtctgtctggcggccagcgccagcgcgtgggcctggcacgcgccctgtacggggagccgtgcctggtggtgctggacgaacccaacgccaacctcgacgaagccggcgacgccatgctggccgaggccattggacgcatcaagcgggccggcatcacgctggtgctgataacgcacaagcccaacatcctcaagcaggccgacaagctgttgatcttgcacgccggcgcccaggctgacttcggcccgctgaccgaggtgatgcagcgcatgcagcgtagcgccccgcctcgtccgcagcaatcgccgccaccgccacagccgcaaggccgggtgatgccgctgcccacctacggcgcggccatgaacttcgcacagcgcaaggagggcgcatga

SEQ ID NO: 532610 - DNA, 492 bp, Stenotrophomonas maltophilia
atgcgccccatcgtcgtggccgatgccggccccttgatcgccctggcaggctgcgggcaactggtgctgctcactgaagtattcagcacggtgcatctgccgcaaaccgtcttgcgggaaacctccggcgacctgtcccgccccggcgctcaggccattgccgaatttgcccaacaccatgcgcagatacacccggatcgaaacgatgccatctacaggcaaagcatcatcggtctggatgagggtgaatcccaggccatcagcctggcccatgcgctgcaatgcagcctgttgatggacgaacgccggggccgtgcggtggcacgcagttttggcttgccgctgtttggcgttctgggcgttctggtacaggcgcaccggctgggccacgtcaaccacttggccccgttgctgcgccagatgcaggatcatggctaccgcatcgccccggcgctggtcactgctgccctgcaagcggttggcgaagcctga

SEQ ID NO: 532611 - DNA, 345 bp, Stenotrophomonas maltophilia
atgcaaacattcagcatccgcgaactgcgcgaacgctcgggcgacctcagccggatcgccgagcaaggtgagctttcgctcgtcacccggcacgggcagccgttgtttgtcggcgttccctttaccgaagaattgctgcgcgccggggtgcatgtggcattggcgacccgcctgtttcagagcggcgatctgagcgcgggcaaagcggccaaactggcaggcatgcagcatcccgagtttctggcctacatcagccgccagggcattgccgtggttgactacgatccggctgaactggcggacgaactggccgggttcgatgcggcaggccaagcgcagaactga

SEQ ID NO: 532612 - DNA, 1332 bp, Stenotrophomonas maltophilia
atgagtgtggaattgagcatcgacgccaaggacgacttgctgtcggtggatgaccgccactacgtgcgcgtgggctggctgatcgtgctggtgggcgtgatgggctttctcggctgggccatgctggcaccgctggatgcgggggtgccggtggaggccaaggtggtggtcagcggcaaccgcaaggcagtgcagccggttgccgggggcaaggtgcaaagcatcctggtgaccgaaggccagcgggtgaaggccggccaggtgctggtggtactggaacccaacgtggcggccaaccagctcgattcgctgcagttccagtttctcagcagcctggcaacggaaaaccgcctgatggcggaacgcgacggggcggcgcagatcgccttcgacgagcacctgctgcgggccgaacgcgagggccaccagcaggcggcggagatcatccaggcgcagcggcaactgttcgacagccgccgcagcgcccagcgcgccacgctggatgggctggaggcgaccttgcgcgggctgcgcgagcaacgcgacagcctgcaacgcatcctgcaatcgcgccgcagccagcgcgagaccttcgagcggcaactggcgggccagcgttcgctggccgacgaaggcctgctggcgcgcaaccgcctgctggagtccgaacgccagtacctgcaactggccggttcgctggccgacgaccaggggcgcctggcgcagttgcagggccaggtgcaggaatacgagctgcgcctgatccagcagcgcgaggactaccagaaggaactgcgctcggccctggccgagacccgcacgcgcacggcggacctgcgctcgcgcctggacagcgcgcagtacgaagtgaacaacatgcagatcgtcgcccccaccgagggcatcgtggcggggctggcggtgttcacccagggcggggtggtcagcgcgggcgagacgctgatggacatcgtgccactcgatcagccgctgatggtgcaaggcaagctgcccgtgcagaacgtggacaaggtgcaggccggccagccggtggagctggagttcatggccttcaaccgcgcctccacgcccaagctgccgggcacggtcaagacggtttccgccgaccgcctggaagacgaacagggcatgccctattaccacgtcgagatcgcggtggatgacctgaagggccgcgaggtgcagccgggcttgcagttgcagccgggcatgccggtgacggctttcgtcaagaccggtgagcgcaccttgatgagctacctgctcaagccgctgcgcgaccgtgcccgcctggcgctgacggaggagtga

SEQ ID NO: 532613 - DNA, 1551 bp, Stenotrophomonas maltophilia
atgggctggcgaacttctccactgacacgcatcgcctcgctgtatggccacctgtccgtccgcttcccgcggcgcggattcctagccggcaaaggccggtacctgatctccatcgccacggttgtggtggcgctcgcgcccgatgccgtgccgaccgcccatgcgcagacggaattggcgttcccgccgatgctgacgcagccggccgcttctgccgctgccaccacggcggcgccggcccaagcggtgcgccccagccagtcgggcacgctcgacctgacgcaggcctatgagcgcatgctgctcaacgacccgcaggtgcgcgcggccagcgccgcgctcgccgccgggcgtgacgccggcaacatcgctcgcgccgcactgctgccacaggcctcgatcaactacctgcgcaaccgcaccagccagaccgagtattacgacagcacgacggccggacagcagagcgtcgactaccgctacttcggccgccgtgcgggcctgaccatcgaacagacgctgttcgactattccgccatcagcacctaccgcatgggcaagacccaggccgagtacgccgaggtgcagtaccggctgcaactgcaacaacaggccgtggcgctgatcgacgcctatctgaacgcgctgctggcgcgtgattcgctggatctggcccggcaccagttgcgggcgtaccaggacatgctgcgcggcaacgaacgcatgatggcccagggcgaaggcacgcgcatcgacatcctagaaacccgcagccaggtgagcgccacgcagtcggagctggtgagctacgagaacgacctggcggaccggctgcgcgaattgtccgcgctgctggggcagccggttcacgcaggcgagctgctggccatcgaccagcaggccatgcttgcgccgctgcccgacggcgagctggagcggctgctggccgattcccgcgagcagaacccggaggtccaggccgcgcgcctggcggtgcgctacaacgacctcacggtggagcgcgagaaaggccagttcatgccgcgcgtgtcgctgtacgcggcgcacgagcgcatcgtctcggataccgtcaacaaccgcggccgggactacaagaccaacaccatcggcctgcaggtcaccatcccgctgttcagcggcggctccagctactacagcacgcgccaggcctacaaccggctggaacaggcgcgctacgaactcgaacacaccgccaacaccaccatcaccacgctggagcagtactaccgcgtgttcagcaccagcgccgagcgcatacgcaccttgcgccagaacgtgagcgacgccacggcgctggtggacgccatgcgcaagagcgtggccggcggggaacgcaccaacaccgatgccttgcaggccgaacgccagtcctaccaggcccggcaggccttgctgcgcacctacgtggaatggttccaggcctacgccaagttgcagttctacgccggcaggttctcggaagaagacgtgctggtgctcaaccggcatttgctggcggaggttcgataa

SEQ ID NO: 532614 - DNA, 6240 bp, Stenotrophomonas maltophilia
atgacggacgcgagacgaaacgacacaccatcgagggggcatatcgaagcaacgcttcgtgaggaaatcgccgccgacctcgggatgcccaccgggcaactggatgccgatgccagcctcctgaagctgggcatggattcgatgcgcctgatggcctggatgcatcgcctgcgcaagcgcggccacaaggtcaaattgcgcgatctctaccagcagcccacggtgcgcgggtggagccaactgctgcaggactgcccggccacggcaccggctgcccgggcggcacccccggaaccaagcggcgccgcctcccccgccgctgtcgtctggccgaccatggccgatgggcaccccttcgacctgacgcccgtgcagcacgcctacctggtggggcgtgcgccccaccagacgctgggcggtgtcggctgccatctgtaccaggagttcgacggccagggtctggatgccgatgctctggagcaggccatcggcgcgctggtcgaaaggcatcccatgctgacggtgacgtttctggacgatggccgccagcagcgccgccccggtacccgctggcgcggcctgacgctgcacgacctgcgcagcgcttcgcccgcccagtgcgaggcccacttgctggccatgcgtgcgcgtcatggccaccgggttctggctgtcgagcatggcgagaacttcgatttccagctcagcttgctgcccgacgggcatcaccgcctgcacgcggacatcgacttgctggtgctcgatgccgcgagcttcagcctggtgttcgatgaactggcggcgctggttcgcggcgagtgcctgccggcgatctccggcgactacgatttccgcagctatctggcccaggcggcgcaggagaacgaggcggcccgccagcaggccaaggcgttctggatggagcgctcgggcagtttgccgcacgcaccgcggttgccgctggcctgcgaaccggcgcagatcaagcaggttcgcatctcgcgccagcgggtggaaatcaccgccgaggactgggcgcggttccagggcctggcgggcgaatgcggcgtgacgccgacgatggcgctggcgacctgcttcggcgcggtgctggcacgctggtgcagccagccacggctgctgctgaacctgacgctgttcgaccgccagccgctgcatcccgccgtggacgggatgatcgccgacttcaccaacatcctgctgctggacatcgccggcgagggatcgagtttcgatacgctggcacggggcaaccagcagaccttcaccgaggcctacgagcatcggcattggtcgggcgtggaactgctgcgcgaactgcgcaagacgccgggcgcctatccccacggcgccccggtggtgttcaccagcaacctgggccgccctctgttcggccgggacgtggagcgcaccctgggcgttcccggctgggggatttcgcaaacgccgcaggtctggatcgaccatctggcctacgaacatgccggctcggtgttcctgcaatgggacagcaacgaggcccttttcccgaccggcctgctcgaagcgatgttccaggcctacgtgggcctggtgcggtacctgctggcgcatccgcaggcctggcgggaacccttgcccgatcccatgccgcaggcgcaacgggcggtgcgcgagcgggtcaatgcccatggcgatataccggcgcccgatggattgctgcacgagggtttctggcagcaggcgcggacgcgaccggatgctctggccctggtgcatggcgagcgccgattgacctacgccgagctggcctccctggcacgtcgttgtgccggcgcattggccgcgcaaggtgtgcagccgggcgaccgggtggcgatcagcatgtccaagggcatcggccagatcgtggccgcgctgggcattctccatgtgggcgcggtgtatgtgccggtgtcgccggatcagccgttggagcggcggcgcaccatctaccagggcgcgggggcaaagcgcatgctggtatgccgcgacgacggcctgaacgacgccgtggccggcgtcaccttcctggcctggcaggaggccacggactatccaccgctggccgaacccgtgcaggtcgatgcgcgcgagccggcctacatcatctacacgtcgggctccaccggcatgcccaagggtgtgatcatttcccaccggggggcgctcaatacctgcgcggaactgaaccggcgctacgccgtttcggcagatgaccgggtactggcattgtcggcgctgcatttcgacctgtcggtgtacgacatcttcgggctgctctcggccggcggtgcgctggtgctggttgacgagggccagcggcgcgaccccgcctgctggtgcgaggtcatcgagcgacatggcgtgacggtctggaacacggttccggcgctgctggacatgctgctgacctatgccgagggtttcgagctgcaggctcccgcccgcttgcgtatggtgatgctctccggcgactggatcggcctggacttgcccggtcgctaccgcgcgtttcgcccggatgggcagttcgtggccatgggcggtgcgaccgaggcgtccatctggtccaacgtcttcgacgtggattccgtgccgccgcattggcgctccattccctacggctatccgttggcgcggcagaagtaccgcgtggccgatgcacaaggccgcgattgcccggactgggttccgggcgagctgtggattggcggcgaaggcgtggcgctgggctatttcaacgacccggagcgcacggcgcagcaattcgtgagctggcaaggcgagcgctggtatcgcactggcgacatgggctgctactggccggacggccggttggaattccttggccgtcgtgacaagcaggtcaaggtgggcggctaccgcatagagcttggcgagatcgaagcggccctgttgcgggtcgagggtgtcaagagcgcggtggcgctggccgttggagagcgggagaaagccctggtgggcttcgtggtgccacagggaacggcgctgtccagtccgctgcccggcgacccgtcgctgcccgcggactacgccgcgctgctgccaggcgaggcctggcatgcggggccggccgagccggatcatgaggatgatatggcacgcctcctggccggcttcctgtacgagcatctgatgcggcaaggggtgaacctgaccggccgcgtcaccgtacaggccgtgatggcggagtacggcgcacagccccagtgggccggcttggtggtgcgttggctggagcatctgcatcgacagggctacctgcagcgtctggacgatggcgtccacgcgccggtggagagcatgccgccggcatggcaaccgagcggcgaacatccgctgcgggaagcggccaacatgttgttgacgcaccatgcgccgctggcccagatcatccgcggcgagcggcctgcgcgaacgctgctgaaccatccattctgggcgccagagcagttgctgctgcgttcccccggcatgcacgcggccatcgcggtgctgaccgacctgacccggaccttggcgaagacgctgggccgtccggtacggctgcatgaggtcggcgcacgcagcggcctggctgcggaacagcttctccggcatttggatgcaggagctgtggcttataccgcgtgggatgactcgccggagatggtgcttcgcgccacggaacggttgcagcggcatgcgcatgcagaggttaggcggtggcatgccggcgtggcgcaggaggatctgcatcaggccgatctggtatgggccaacaacgccttgcaccgcgtgggcgacgccggggtccaggtggtgctggccctggccgcaccttcggccatggtgttcgtccaggaactgaatcgggtttcgtgcctggcgctggtttccaccgagctgctggcggacggccacgaggaaggcctggccaaccggctgcacgagacgccctggtggcaggacctgttggcaaggcaaggaatgcgcaacgaagcccagacggtgctggggcatgtgcagtgcctggtgtcccgtgcaccgcaggaagtgctcaggccggatgccaaccggctggctcaggcgctgcgcgggttgctcccaggctacatggtgccgcaacggctgtacttcctggaggccttgccattgaccgccaacggcaaggtggatcaccgcggcctgctggagcactgcactcatggcacgcccgaggccggtgccgagcggccactgccccaggggggcacggaacaggctgtggccagtctctggcgcgatcttttgaaggtggaacacctttaccgggacagtcatttcttccgcatgggcggggacagtttgctggcgacgcgcctgatcggtgaactgaaccgacgcggcttttcggcagcgctcggcgacctgttcgacttcccgacgctggcggcattcgccgagaccgtgcgcagcggcgacaccatcggtacgccgggcctgcggcatgaccccacgcggcgatacgcgcctttcccgctgaccgatgtgcagcaggcctatctggtggggcggcagccagggttcgcgctgggcgggatcggctcgcatttcttcgtcgaattcgaggtggccgatctggatgtcgcgcgcttcgagcgggccatgaatcggttgatcagccggcacgacaccctgcgggcagtggttcgcgacggcatgcagcaggtgttgccgcaggtgccggacttcaggctgccctgccatccggtgaccgacctggacgccccggaagccgtggcgttgcgtgagcgtctggcccggcaggtgctcgatccatcgcgctggcccgtcttcgacattcaggccgccctggtcgatggcggcgccaaggccagcctgttcgtgtgcctggacaacctgatgctcgatggcctgagcatgcagatcctgcttgccgaactggaacagctctacaccaatcccgggcagtcgctgccggagctggagattggcttccgcgattatctggagcatgtgcagcaacgaccagccaacgacgtctcgttggcgtactgggcgcgccgcctggaccatctgccgccggccccgcgcctgccattgcgctgcgatccgggcgacgtgggcctgccgcgcttcgcacgactgtccgccaggcttgccgccccgcagtgggaggcgctcaaggcgcgtgcgcgcgccgaaggtttgaccccgtcggcattgctgctctcggcctatgccgccaccttgtcggcctgggctggccatgacgagctgagcctgaacctcaccctgttcgaccgcgagccgctgcacccgcagatcgaacaggtactgggcgacttcacgacgttgctgctgctggcttggcaaccggccgcggactggcgcagcagcgcccagggcctgcagcaacgcctgcgccaggacctgttgcatcgcgatgtctcggccattcaagtcatgcgccaactggcccggcgcgctggacaagcggctgccgccatgcccgtggtgttcaccagcgccctgggcttcgaacaggaccgcttcctcgcccatgcgtcctggatgaagccacgctggggcttgtcgcacaccccccaggtctggctcgaccaccaggtgtacgagtccgagggcgagttgcgcttcaactgggattacgttcaggagctgttcgaaccgcagcagattcaggccgccttcgaccgctacgtctccttgttgcagcggctggcgagcgaagactcggcctgggatcagccattgcaggcactggtgcctcgcctggagggaatgtcgcgcagcgccgatcacgtacctgcgcctcgtgctatcgagccgtcagtcacggccacgccgctgcgggccgatgacgccttggttcaagcactgtgcaggcatttcgagcaggtggtcgggaggccgatccagcctcgccagtcctttttcgatgcaggtgccacgtccctgaaattggttcagttgcatgtgcacctgacccagacgggccacaccggcctgctggtcactgatctgtttgcccaggccacgccgctggccttggcagcgcacctgcacggcagatcgaacacgacgaatgacaccgcagcgcccggggacgagcgccgcgaactgctggcgcagcgcaaagcgcgtgcgcaacgtcggcgcggggagacatcatga

SEQ ID NO: 532615 - DNA, 9723 bp, Stenotrophomonas maltophilia
atgaatatcgaagaacgcttgaagcagcactatctcgactgcgagccgatcgcggtgatcggtcatgccagccggttcccggacgcggccgacagcgacgcctattgggccaacctgctggccgggcgtgaatgcagtcggcagttttcgcggcaggaactgctggatgccgggattccggcatcggtcatcgacgatccggcctttgtgccgcgtggaaccgtggtgcccgacgccgaggctttcgacgccgagctgttcggctactcccgccaggaagccgaactgctcgacccgcagcagcggctgttcctgcagatggcctggcacgcgctggagcacgctggctatgcgccccgagcggtgccacacaagaccggcgtgttcggctccggccggatcagcacctatccagggcgcgaggcgatcaacatcgccgaagtggcgcacgtgcgcagcctgcagtccctgatgggcaatgacaaggactacgtggcgacgcgcgccgcctacaagctggatcttcgcggcccggccatgtccgtgcagacggcctgctccagttcattggtcgccacccacctggcatgcgagagcctgcgatccggcgaatgcgacatggccatcgctggcggtgtggccgtctccttcccgcaggtgagcggctatttgtaccagcagggcatgatcttctcgcccgacgggcattgccgcccgttcgatgcgcaggcccagggcacctatggcggcaatggcgtggcggccgtggtgctgcggcgcctgtccgatgcgctacgcgacggcgatccggtcgtggcggtcgtactgggcagcgccatcaacaacgacggcagccagaaagtcggctataccgcgccctccgtgctcgggcagcgtgaggtgatcgccgatgcgtgggcgctggccggagtgcgcagtgagcagatcggcatgatcgaggcccacgggacggcgactccactgggcgattcgatcgaactgcaggcgctgcagggtgtattccatcccgccggccaagggcccgcctgcgcgctgggctcggtcaagagcaacatggggcacctggatacggctgccggcattgccagcttcctcaaggcggtgctggcggtcgagcgcggcgcgatcccgccatgcgtgaacttccagcaggccaatccggccttgcacctggaagacggtcctttctacgtgccgcgcgaggcccagtcctgggaggcgccggttcgcatcgcaggcgtctcgtccttcgggatcggcggcaccaactgccatatggtcgtggcgtccttgccgcaggccctgcgttcggtgcatcagcccgaggatgggcagccccatggcgctgatgaggacgtgctgctgctgagcgccaacaacgaaggcgcgttgcggcgtctggccggtgcctatgtacaggcattgcaaacccagcctgtcgcagacgtggcccatacggcgctgacgggccgcttgctcgacatgccttggcgtctggccgtgcccgtatgcggtgagacggtggatgccttgaacgccttcgcccagggcgaggacgacattctgatccatgtcggccaaggcgaagcaggcaaacgggcatggcttttcaccggccaggggtcgcagtggcccggcatggcacgcgactggtaccactcctcccccgcctttgcccaaggcctggagcgctgcttggcggcgttccagaacctggatagtgctttcgccgagcaactgcgaagggcgctggtggagccggacagcgatttgctccagcgcatggagtacgcacagccggccatcgtcgctttcgaactggcgatggctgcgcattggcaaggcttggggttggtaccggacatggtactgggccattcggtcggtgaattcgcagcggcggtcgtggccggccactacagccacgagcaggtcatgccgttggtgcggcggcgtggcgcactgatggaccgctgccgcggcggcgccatgctctcggtctttgccgacgaggcgcaagtcatgccggttgccatgcggctgggcctcgacctagcggcctgcaacggtgagcgtcacctggtcttctccggcgaacgcgacttgatcgccaaactggccaccgaactcgaaggcatgggcgtgcgcagcaatccgctggcggtcacgggcgcggcacattcgcggatgctcgacccgatcctgccggagttccggcaggctgcgggcgcgctgcaggcaagacagggcgacatcgcgctgatctccggcctgactggcgagctggtggatgccgcgctactgaatcagccggacttctggccaaggcacatgcgcaaccccgtgcgtttcgtccagtgcctgcgcaaggccatcgaagacggtgcaggcatgttcctggaaatggggccggatgcacccctggtcggtatcgggcagcgggagatgggcgctggcgcccactggatcgccagcgcccgacgcaatcaatccgcacggcaaccgctgcggcaggccctgatgcaactgttcgtcgcaggcgtcgatctgccctggccgcagttgctgggtggctcggggcgtaaatgccatgtcccgctgtacccctttgaacgtcagcgctactggcgtgaagcaaccgctgccgcagcggcgaacgcggcacagccgttctcgcacggcacgcaactgcccactgcacgcaatgtcgtgacgcgcgaagcacgcgagctggatttgccgcgcctggaggctctgtatgaatgcgtggtcaaactgcatgccatctatgtcgacaggttgctgcgccgttgcgtgggtgagcgcatcgaccggggcgtgacggcactggatatcctgcgtgatggacggcttctgccccgacatcgccaattgctggtgcggctgctcaatgcctgcaccgaagacggctacctgcaacaacaggacggccgctaccgcacgcgggttgccgcaccgcacgcagcacatgaacaactgctcgccgagctgaaaagttactgcgagggcctgggcgtcatcgcggaaaccgtgcagcgcgcgggcgacagcctgtacgagatgatgagcggcgcgatcgaacctgtcgctgtgatcttcccggagggtgcctccagcggcgtggaagtcctgtatcaggatttcagcttcgggcgctatttcaatcagatcgccgcgggtgtggtcgccgacctggtgcgcagccgtggcgaacccggcgaaccgctgccgccatatcgggtgctggaggtgggtggcggcacgggcggcaccactgcgtgggtactgccggcgttgtccagccagccggacgtgcactacgtgttcacggacatctcgccgatcttcacccgccgcgccgagcagaaattcgccgactacggcttcgtcgagtaccgggagttcgatcttcagcaaagtgccggggcccaggggttcgcggcgggcgatttcgacttgatcgtggccgccaacgtcattcacgccacgcagcacgtgggggatgcgctggcgaacctgctgcccttgctcaagccgggtggccgcttgctgatgcgcgagatcacccggcccatgcgcctgttcgatttcgtgttcgggccgctggttctgccattgcatgatgagcaggcccgtggcggcgagctgttcctgagcacggcgcactggcgcgatcagtgtcttgccgccggcttcgccactgtcgaatggctcccggacgacggtaccgccacgtccggcatgagcgagcacatcttgctggcgacggcacccggcgcgtccgctgcgcagtccacaccgatgcggcttggcactagcgtattgggtcaggcgctcgccaatgacggcagttacctggcggattggtccgattgtgctgggcaggacagccaatggatcgaccgagttggcaaggccagccgcgaaatggcccgtcgccacggcgatggcaggcacgtgcccgccatcgatgttccaccacgggcaccagactggttgggcctggttcgcctgcaatggcaggcccgactgaaccagccgtcgaacatcgacctgacgctgcttgggccgaatggcctctggcagagcccactggcgtcccccggtggtgacgaagacggcctgccgaagctctccgcaacgccagacacgcactacgactggtgctgggaaccgcttggccgggcgacggatgccgtcgtcggcaggcggctgcgagtgttcggggaaatggacgccggcctggtgtccgagctggctcaggtgggcgtcaccctggatgaggatgccggggacatgctggtgctgcttccggaacacgctggcctggatggcgttgccgaaaccgtgctaggtgcaattcaagaagcctcaggccaggacggcagccgcattgtggtggtcacgcgggcggcatggccggtggccggcgacgagaacgtcagtgcggctcatcatgctgtctgggggctggcacgcaccgcgtcggtcgagtttgctgccccggcagcggccacgcgttccatcctgatggtcgatcttgcagtggacgcgccttggcaggatctgctcgttggcctgcatgcgacggagaaatccggacagtgggtggccgtgcgcgaaggccatgcatgggtgccgcgactacagccacaccgttttgccgctcccgcgctgaatgaacacagcttgcgaagtgacggctggcacgtggtaacgggcgggttgggcggcctgggtcggttgacggctgaatggctggccagtcgcggcgcaggtcgaatcgcattgcttgcgcatcggcagcaggaggacgccgctgacttcatcgccaggctgcgacagcgctatgcggtcttggcgacgtgcgtggtctgcgacgttgccgatctggccgatcttgatcgtgcggtggatcgtctgtcggctgacggcgggctggccggtatcgtgcatgccgcaggcgtgctcgacgatggacctatctcgtcctgggatgcccgtcgccttgcgcctgtgctggcggtcaaggctcacgcggcgcggcatctgtacgagagactgagccgggccggtggcaggctctatctgttgctgtactcatcggccgccgccgccctgggcagtgcgggacaggccggccatgccttggcgagcgcctatctggacggcctggcgtatgaagccgccgcctggggtgatgaaagcccggtcaaggtgattgccatcggctggggcgcctggggccaaaccggacgtgcggccgacgaagcattacaggcagctctcgcgcaggacggcatgggggtactgagcgatgccgaaggcctatggcatctggagcaggcactgtcgcgcggggcgccctaccgcctggcgatgcgggtgttgcccgagcatctggatgatggccgcaagcagttgctgggcctcctgcgcgagacggcgcggcagcctgcggtgccggtggcaggcaagcccgccaaggccgcgcaagcgcagtctccggacctgccggcggaccaactggcagatgccggcgcggtggcgcagtggttggcagcgcagatcgcggctcaactgaggctggacgacccatcgcggctttcggccaaacgcgatctggtgcaactggggctggattctctgttgttcctggaactgagcagcaccatccagcgccgcctgggggtacgcatcgacgccgaacaagcctatcgggatatgacgatcgcaggcctgagccgattgatcgccaggcaagcggcgcaagccaccgaggggccgtcgcaaccgacgctgctgcatcacgatgcggccggtcgcttccagccattcccgctgacgccgattcagcatgcgtactggttgggacgcaccagcctgatcgactacggcggcgtggcctgccatgtgctgttcgagtgggacctgcgccatgaccagttcgacctggagcgtcttgagcaggcctggaatgcgctgatacagcgtcacgacatgctccgcatggtgattggcgacgatggccagcagcggattctggaacatgtccccgagtaccgcatcgagcgccgcaacctgtccgcgctttccgccgacgaacaggaacggatgctggcacaaacccggcaagagctgtcctaccgtgtcctgccggcagagcgttggccgctgttcgagctgatcgcgtcggagctgaacggcgaacgctatcggctgcacatgaacctggatctgctgctgttcgacgtgcagagcttcaaggtcatgatggacgacttggcggccttctaccggggtggcagtccggagccgttgcagatcaccttccgcgactacgtgctcggcgaacaggcacgtcgccagaccgaggattggctcaggtcgtggtgctactggcaggacttactggctgagcttccgcctgcaccgagcttgccgctgtccgatggcgatccggacggccatcagcccagttttacgacctatcaggcgaccctggatcgtcagagctggacggacttgaaggaggagtggcgatcctggggggtgaccccttcggcagcgttgatgacgctgttcgccgtgacgctggagcgctgggcacgctggccgagcttcaccctgaacctcacgttcttcaatcggcgtcccgtgcatccacagatgagccagttgattggcgacttcacctcggtgctgctggtcgatttcgatctgagcgatgaatccctcaccctgcgtgagcgcatcgagcaaacccagcggcgcttgcgccagcacctggcacacagccaggtgaacggcgtcgaactgctgcgggaggtaggccgcattcgtgggcagtcgcatcagccgctgatgccggtggtattcacgagcatgctgggcatgacgctggatgggctgaacatcgatcaggccatgaccagcctgctgggcgaccccgtgcatgtgttcacgcagaccccacaggtgtggctggatcaccaggtcatggagatcgacggggaactggtgttcagctggtattgcatggacgaggtgttggccgaaggggccgcacaggccatgttcagggattttcatgccgtactgaaagcggtggcgaatgctccgcagcggatgcagcagccgggaatatggaagcaccccgaagagcaagttgagcctctgcctttcgcgcgtcacgcgtggttcgctgccgcaagccaagtcgacccgagagaaatcgaggccgtcgcactccgacaggagggcgtctttcaggccgatgcccagcacgatggcgttggcggaaatctgctggtcaaggtggtggcgaaacctcgcagctacgacccggccggtttcacggagcctgacctgggggttctgccggaattggcaggcctggagccagccgagcagagcctcttcgatgcggtgtggctggcgctggaaacccgtgcgctgcacggtattgccagcaccctggcgaaccatggcctgttcgtgcaggaacgccaggcggtggcattggatgccatctaccgtcgtctgcaagtgctgccgcagttcgagcgcatcgtgcgccaatggcttcgggcgctgacgacggcgggctggctgagccaggacgatgggaacttcgtgtgcctgcggcccttgaatgacatgcaggccccgccagccatgccacccagcgcctggggcgacacgctggctcactacctggaccgcaacgtggagcggcatgcgcaattgctgcaaggcacttgcttggccctggaactgttctttgccgatgactacgcgatcacgcgagcactttatgcgcagaacccggctgcgcaatgcgtgatccgcaacgtggcgcatatcgtgcggaggctgggacagtcgttccggccggagcgccgcctgcgcgtcatggaggttggcgccggcaccggagccaccacgggcaccgtgctggaagcacttggcgaccgcctggacacctatcacttcaccgatgtctcgacgttcttcctggatgaagcctgcaagcgattcacggggcgcggtgaactgacctacggcattttcgacatcaaccagccggtcgactacgcgacgtacccggccgaaagccatgatctcgtggtggccgcccaggtcatgcacgacgccagccacgtcgtacggtcgctgcgccgtatcggcagcctgatgaagccaggcgcccgtctcgtgctgatcgaggccactcaccgggatagcctgttgcagatggccagcgtgggcttcatcgaagggctgggcaactaccaggatcaccggatcatcgacgaccgggccatgctgaatctgacccagtggcgcgaggcgttgcaaggcagcggcttctcgctcgaactggcctggccggaaaccgcggactcccccatccatcagcatgtgatcgtggcccgcctggtacgcgccgcccacgtcgattgccaggcggtcaggcagtcgctgatacggcattttggtgagacgttgccggatgtcgaagtgcggcaaagcgagtctcagcacatgttcgccatcggcgccgctgcaggcgcgcgggccttggctgcgaatgtgccggcgacgagcacgcagccagtggtcgacggcgcagccatgtcgtccaacgcccgcgaagcgccggacgatgcgctgatcaatagtgtcgcccagatatggcaggccttcctcggcagaccagtgagcccggaaagcgacttcttccacagcggcggcgacagcctgatcgctacgcgggtcattgcccagctcaaccgcgtgggcgttgcgggcgccagcctgcaggcgctgttcgcccatcgcaccttggcggcgttctgcgccacgctcgaaggaatcaggagcccggatatgaaaaatgttctcgtacccttgacgcaagggcatacgcacgaacgcatgttcgtctttcatgcctcagatggcggcgtggcttcgtacatgtcgttcgccggggcattggatgcccaggtgtggggcttgcaggctccggaacagatcgaagtcgaaagcctgcagaccctggcctccggctacctgcacgcgatggggacgaagctcggcagggagccgcacatcctggtgggatggtcctacggcgcagcagtcgctgccgaggtcgcacgcatgctgcatggtcgcgacaaggccgttcgtctggtgttgatagacccggtgtacggggccgacttcgcggtcgaggacctgtccgcactgatgatgatgctggccggcgaacaccagatcgttctgccagaaaactgggaggcactggatgagccggcccgcatcgaagcgttcgttgtcggtgcagctcaggcgggcgtcatcgccgaggcaatgccctcggatgccgcgcgtcagtggctgatgcgcattttccgtctgctgaacctgctggcggggcatcgcatcgggcgatccattccggctcccgtcctgtggatcgaggcagaccgtcacccggatcattggacgccggcggtgcgcgaatgggcggattggaaggcacacgcgcaaaccctgaccgtgacggccacgcactggcaactcatggcggatgcggacatcgccgctgcgctggctggcgatgttcagcagtggcttgccagcacgaactgcgcggagtccacgaaatga

SEQ ID NO: 532616 - DNA, 1134 bp, Stenotrophomonas maltophilia
atgatcaggtccaatcccagcaagagccggcgcgtcgtggtcgtcggcgcgaagttcggcgaggtgtatctcaatgccttccttcagtcccggcccggtcttcagttggcaggcctgctggctcgaggcagccgaagagcgcaacaattggcgcacgactttggcatcccgctctatacccgtctggaacagcttcccgaagacatcgacattgcctgcgtggtggttcgatccacggtggcccagggcgaaggcagtcaactggctgccgaactgttgaaacgtggcattcatgtggtgcaggaacatcccttgcatccagatgatgtcgaacggctccagacactcgccgaacagcgtggtctgcggtactgggtcaacagtttctatccgcacgtgccggcgggccgttgctggatagaccgggctacccatgtcatgcagctccttggcggcgagatgccatgcgcggcgcatctgacgaccagccgccagttgttgtattcgacgctggatctgctgctgcaagcctgcggcatccctgatggcgcccaagtacaggttcagccgctggagggcgccgacgcgcacttcgtgcccgtgagcctggcgctgccaggtggatgccgggcggtactgcgtttgcaagcctttctcgatccatccgatcccgacatgcacagcctggtgatgcaccaggccagtctgatgtggcctgcgggctatctcacgctggaagcaagctacgggccggtgctatggacaggtcatttccacgatgcgcagcacgacagccagcaacgcacgatgtatcgctatgtcccggccgaggccgtctatgcgcgtccaacctgcgcagtgctgcacgatgcgccagccacctggcgggacgcgtttgaggtcgatggcgtttctggcgttgccggcgttctgcagaccctctgccaggttctggacggcgagcgcgtaccgacggccttcgatcccgcatatcagttgtctctggcgcgtctttggctcgacgtcctgcgcgttgttccgcctgcggaggagcgacgcctatcgccaccccaagtcgtgacctgggacgaggtgcagacggatcacggaaacgcaggaggcacggatggctga

SEQ ID NO: 532617 - DNA, 786 bp, Stenotrophomonas maltophilia
atggctgacctgatgccgttgtgcgcaacaagcgagccctgcgcagaggatacccatcttgtgctgtgccccttcgctggcgggagtgcgagcgcgttccgcagttggcgcgatctgcggccttatggctggcaggtctggttggcggtctatcccggacgcgatcaacggatgaacgaggcctgcgcggcaagtatcgccgaactggccgatcaggttctgatggccatcgacacgcatcagatcgcccaacagcaacttgtgatcgccggtcacagcatgggggcccaggtggcattcgaggtttgcttgcggctggaacagcgcggctcggcgccgctcggtctggttttgtccggatgccatgcgccgcacctgcatggccggcgcctcatcagccaccttgaagatcgcgcattccttgagcaattggtcgccattggtgggaacgcacaggagctattgaacgagcccggcttgtggcctgtgttcatgccgatgctgcgggcggatttcaaggcaaccgaaagctattggcatcctcagaaaccgggggaacggcggcgacttcaaacgccgacgttgttgatctacggcagtgcagaccaggaggcctggcgatcggaagtcgaagcatggaaaagctggctatccgacgtcgatgggccggtagccattgctggcgaacacttttatgtcactcgtcgtccgagagcttttctggagcacatcagacggcgttttgaaccgaattccgcgcactcagcgacgtgcgcgttcaaatga

SEQ ID NO: 532618 - DNA, 2940 bp, Stenotrophomonas maltophilia
atgaaagccgacatttccgatccgcttcagggcacgagagaaaaacccatgccccttgggcattgccttgcgcaatgggcgcgcaactacggcgaccgaatcgtgctgatcaatgagacgggtgaatgcctgacctacacgcagttgcacgaacgtgtcgagcgcatcgccggtggtttgtacgcctcgggcctgcgtgctggcgaccatgccatggtgcatatgcccaacaccttcggcttcttctattcgttcttcgcactcttgcgtgtgggtgtcatccccgtcatggcgatgcccaatcaacgagagcaggacatcgatgcgttgatggccttggcgcaaccgacggcctacttcattcccgatgatgttggcgagcatgactatctggcgttggcgcaacgcatgcaggccaagtatgagagcctccggttggttgtgatggatggagacgtcgagaacgaaacgcgcaacgtacagatcttgactgcactccggggttccgcatgcccctggcccgaacaggatgagcgcgacaccgccgtactgctgctttcgggtggcacaacgggaacgccaaagctgattccccgcacccatggggactatttctacaacttcaccgcttccgccagtctgtgtggattcgatcgggagatggtgttcctggcggtgcttccggccgcgcacaacttcacgctcgcatctccgggtgtgcttggaacatttcagtgcggcggcaccgtcgtgacatcggtctcggccagttgcgatgaaaccatgccgctgatcgagaagtacaaggtgacgcatgtggcgttggtgccaccgctggccaagttgtgggtggaaggccgtgaatgggaggacagtgacctatccagcctcaagctgatacaggtgggaggtgcccgtctggaggcgggattggcccggcaactggtcgatgtcatcggctgcaaattgcagcaggtctttggcatggccgaggggctgctgtgctacacgcgcctgaacgatccgctggacacgatcatccatacccaggggcgacccttgtcccccgaagatgaggttcgaatcgtcgatgaggacgaccatgacgttcctgaaggtcaagtcgggcagttgctgacccggggtccgtacacgattcgtggctacttccgggcaccagtacagaacgcgtccagctttaccgaggatggcttttaccgttccggcgacctggtacgtcgtgacgcgaatggcaatctgactgtcgaaggtcgtatcaaggagcagatcaaccgctgcggcgaaaaaatttctgcggccgagatcgaagaggcaatcagtctgcttcacggtgtccatgccgccgccgcagtcggtgtgccagacgagctgctgggcgagcgcatctgcgttttcatcaagccggaaggtggtcagacgatcgatcctctgcacatcaaggcggcgctgcgcgaaggaggtttgagcgagtataaggtgccggatcagatcgaaacgatctccgaatggcccctgaccgcagctaagaaagtcgataagcgccgcctggtcgcggtcgccctccaacgcgcctcggcttctccggaagccaagccatcgagttacttgcaggagtcggcggcaacagatgcgacgccgttcgagttggcggtcaaagtggccgaagttatccgacatgacaccagcaactacgtcttatacgaacatcacggcgaatggacattggggttggagtgcgccatgcggattacggtggaggtcgatggaacagtccgccgcagtgatgggaagtcgtggcgatcagcgtctgtcagcgaaagcatcgaacaggccatgtccgacatcccgttcgttgactggcgtgcttatggccgtgccgacttcgagttcgcctatctaacgtatggtctggacaatccgtacagctcgggccccttgctcaccatcgtcataccgaaaagcgaaatccgtattcggcttggaactgtacaactgcgcaccctggacagcgcagaaatgcctcggttggtggcgatcgtacaaacggccgaaaagagagggcttccacgagtcgattcgcctatcgctctggacgtgcgctctacggggggtatgccgtaccgcgacatcgtggcttcggcggtacaggagatgcaacagggtcggtatcagaaagtcatcctgtcccgcgctgtggaaattccgtccacggtggatatggtggccagctactacgccgggcgcaaatccaatacgccggcccgatcattcctcatgaaggatggcgagttccaagcctatgggttcagccctgaaatcgtcgtgaccgttgatgctgagcgcaacgtaacgactcagcctttggctggaacccgtgcattgacaggtgcgccggagaaggaccagcagttgcgcaaggaactggagtcggatgtgaaggagatcgcggagcatgcggtttcggtgaaactcgccgtccaggaaatgctgcaggcatgccgggccgaatcggtcgtcgtggacgagttcatgaccgtccaggagcgcggcagcgtgcagcacctggcgtcgcatgtgaggggcgttctggcccctggtgccagcgcatggactgcattcgagaagctgttccccgctgtcacggcatccggtatcccgaagagggaggctttggaaagcatcaacaggcatgagggccgcgcgcgagggctttacagtggatgtgtgctgatcgccgacagcgacggctcgctggatgcggccctggtgcttcgttcggcgtatcgaggtgcaggccgtgcctggctgcaggccggtgcagggctggtgccgcattcgacgccagagcgcgagtgggaggaaacctgcgagaagctgacatccgtcggaccctacctgatttcctctgaggagcattga

SEQ ID NO: 532619 - DNA, 753 bp, Stenotrophomonas maltophilia
atgacggcgtggattcccggactggccgaccttctggaattgtcgcctgacatccgattgtccgggctggcgctgccaactggtcggacgtcgatgaatttactcgggcatgcctcggccagttggccggggctgcccatggtgtcgggcatgagtcacaagcggcgaacagaattccttgcagggcggctttgcgccctccattcgttatgggagatgggggtcgatgccgaatttccattgcccgcgcaagatcggattcccatctggccccctggaatcctgggcagcatcagtcattgcgcgtcaatggccgtcgccatggcggcgccggcctccagatttcatggcttgggcatcgacgttgagacgttgatcgatgccgaggtcgcgcaggacatacggcgcagcgtcagccgtgattgcgaactggattgcctggagcgaaacattccctgccgcgctcgatctttgacgcttctgttttccgccaaagaggctctctacaaggcgctgtatccattgtcgcgccaatacaaagacttccatgccgcggaaatcatttcctaccaaaccaaggccctcgtactgcgattgacggaggactggtgcggatcgtggcgaggtggagcctgcgtggaggtgcgatatgcatggttggaccgtgaggtgctgacggcagtctgcataccgcgcgtatcacccattcactcacgcagcgccgttgcagcagtcgcggagcctaaattttga

SEQ ID NO: 532620 - DNA, 891 bp, Stenotrophomonas maltophilia
atggagctacgacaccttaagtgctttcttgccttggccgaagaattacatttcacccgtgcagccgaacgtctgcatatcgagcaaccgccgctgtcgagaacaatcaaggagctggaagatgatctgggcgtgaccctttttgatcgtgatcgtcgtggaactcagctgacaccagccggtgcggcgtttttgcaggatgtccgccggttgtttaccgttctggaacatgcgcaggagaacgccaggaccatcgcagcaggcctgaaggggtgtctgcgcatcgcggtttccgacggttcggtagatcgccggctgtcttctttcctggcttgttgccgagaggaagagcccgagatcgaggtgcgtctgtccgaagttcccttggcagagcaaattcgcggcctgcgttccggtgacttcatggccggatttgcgcacacggctgatgtgggagaaggcatcgtcgccgagccgatttggcacgatcccttgctggttgccgtgcctgcccgccacgagctactggaacataaggcaataccgctgcacaagctcgcggaccacccgctgatcctgtgcgatcctcacgtatgtgagggatactggcgagaactgatgcgtttgctgcggccactgcaacgtgagccacgcattgtcgaacgtgcttcgtccctcgacatgctgctaacgctggtgggggctggctacgggatagggttcaccaccgccgcgagaattgcgtccagtcaccatctggatgtcattgcccggcccttggccgtggagtcaaccgtcattaccacctatgtgctgcgtccgagcgacatcgccttggcgccaccactggaacggttcatcgctcgattgcatgcccaggcgcagggatga

SEQ ID NO: 532621 - DNA, 1944 bp, Stenotrophomonas maltophilia
atgatggcactctctgatctgatggtgcggcaagctagggccgctgacaaaacctacaacctccccgacactgatggccttggcctggtggtcgcccctaccgggggcaaatcgtggcacctgcgctactactggctcggcaagcaaaaacgcatatccctgggtaactaccccgaggtctgcctgcgcgaggcccgtgccttgcgcgacgaagcccgggcgcttctcgccaagggcatcaatcctcatctcgatcgcaagcaaaagcgccatgccgtcaagctggcatcggatttcaccttcaaggccgtctacgacgcttgggttgaacatcgctcgaaggaactcaaaaccggccggaacagcacgctgtcgcagatcaagcgcatcttcggcaaggatgtgctgcccaccctggggaagatgtcgatctacgatattcgtcggcctcaacttctcggggttctggcaaggatcgagaagcgcaaggccttcaccactgccgaaaaggttcgtacctggctggggcagttgttccgctatgccctggtcgtggtcgagggcatggaatccaatccggcgacggatctggacgtcgtggccgaacccaaaccgccagttacccacaacccctacctgcggctgcccgaactccccgagttcctccagaacctccgcctctataaccctcgcggttggcagactcagcttggcatccggttgctgttcctgaccggtgtgcgtacgggtgagctacgacttgcgactccggatcagttcgacctcgaccgcggcctctggatcatccctcccgaaatcgtcaagcagctccaggacgagatgcgcaaggcgggcaagcggccgcaggacgtacctccctacatcgtgcccctgtccttgcaggccatcgagatcgtgcgctacctgcagggcgtgatgcggccagcgcagaagtacctgctgtcgcaccgcagcgacctcaagaaacgcatcagcgagaacactctcaatgcagctctgaagcgcatgggctgcgaggatcggctgacgggccacggcattcgcggaaccatctccacggcactcaacgagattgggtacccgaaaatctgggtggacgcgcagctttcgcactccgacccgaacaaggtcagctcggcgtacaaccacgccaagtacgtggagccgcgccggcggatgatgcaggactgggctgatcgccttgacttgctggaacacggggaagtacaagccgccagtgcgcacctgaccatccgtattgatggggtgccggcaatggccgaagttgaggacgcggtgggcgtgacctcagcaacggcagaacccacttcccccggcatcccgcccgcactggccgcgcccattgtcgtaaccccgaataacggtggcatcacattccagcggctgtcgcaggtgccgccgcctccgacgcgggcaccagaaccggaaatttccgccatccagcgtgagcgcgaagaaatgctggctatgtacgaatcgccgagtaatttgccggtcccgctgttcggcaagctggccgggaagtccaaggaccagatcaatcgcgagctgaaagcgggcaagctgctgtccatcagtctgggcaatcgggggcagcgggttcccgactggcaactggtgccgctcaagcacaagctggcgcaggtgctcatgaaccagtgcccatatgccgactcatgggagctgtaccgcatgctgaccaagccccacccggacctgggggatcgcgcggctatcgatgtggtcaccgccaccaatgtgccggccattgtccgcgccatcatgggtactcatcagccccatgcagttacgcacgaagccgccgaatcgcaatccgttcccgaacaggtgcgacagagcattcggcggatgatggaggacaccgtggtcgctgcgggatga

SEQ ID NO: 532622 - DNA, 663 bp, Stenotrophomonas maltophilia
atgaagaccaacgacaagaccctggcggacgtgcagcccggtgggagggtgaggctgggggatgtactgccggaagacgtggcccaagccctcgctacagtgaacgaagtagccaacgatgctcggcacgctggcaactacagggtagcgaatgcgctggtcaccgcacgcgtcgccctgagcaagcagctgcttgccctgtccgcccagccctccccgggtggtcagggggatgctcgcgcaataatcgaagaattcgtccagtgcgccacgctgggtcgaccgcacggaaagctgatcgcgcaggcaaaggactacctcgccgcccgccagccggtgggggaggagccggtcacagttgaggccgtagcgagcgttcgccggaacagcgacggtgaacgctacatcgactggctgacagagggcgggatcgccgatctggaagttggtgacgtgctgatggtgtctgaccgggcaatcaccgatgaagacggatcgggcgaggtctacaccgccccgcccgcgcaggtcgtggacctggggcagttccgggatgcggttgcatacgccgctcgttcggccgacttcgccactcacatggaaatcgggaacaagctgcgcgaactgcttgccctgatcgacagcaaggcggtgggcaaatga

SEQ ID NO: 532623 - DNA, 324 bp, Stenotrophomonas maltophilia
atgagcaaggaatctatcgagaagcgggcgcgggagctgttggctgcggaaatcgaaaagatcgaaagttacaagttggcagcacaaatccgtgccaagttggtagcacaaatccgtgccgggtctcagcttggcccgattatggccgtatgccatgccgccatcatcgccgccctcacgccgcccgatggctacgtgctgatgccggcggtcctgcccgagcccatgctggatgtcctgtggcgcgcagaaggcgacatgaaggatgcggacatgcagagcctgtgggccgagctgatcgctgcccgtccggaggtcgcatga

SEQ ID NO: 532624 - DNA, 444 bp, Stenotrophomonas maltophilia
atgagcgagatcgaattgaaggcgtgtccgttctgtggcggcgaggccggaatcagaaagtggcaggacgaggatctgtggagccacgccatcgtggagtggcaaaaggcgcattgcactgaatgtgagtgcgaaggaatatccagctgccctggctatgacccggacacggtgcaagcatggaacacccgcgccccgcagtggcagcctattgagtcggcgcccgctgacgagctggtggtggtctgctggcttgacgatgaggacacagaaaatccggagcgccacgagttcgactacatcgaggatgggatgtgggtgaatcacgccaacctggtggagcatgcgcaggcagtggcgccaccggggagccgcgttccgaaggatcatgctccatatcagtggtggatgccgctgcccgctccgccggaggtggagggatga

SEQ ID NO: 532625 - DNA, 210 bp, Stenotrophomonas maltophilia
atgaagtggggattgcctcgacctgaatacaagcgtcagttcctgtggttcccacgctgcgtggagggaacttggtactggctgatctggtgctggacgcgattctgcggcgactgcaccgagttctattttgaggaaccgaagtgcggccattgcggaggcgggaacgtctactgcaaccgatgcatgcggtggaggaggaagctgtga

SEQ ID NO: 532626 - DNA, 279 bp, Stenotrophomonas maltophilia
atgacgcagttccgaaagaagcccgtagtgatcgaggcatggcctgcccatgagttgatccatgcggcaagtcgcgactggcaggctctgcccaaggtggtggccgatgcctatgaaaagggtggatgggtgttccagtccgatgggatttacatcccgaccctcgaagggtcgatgcgtgcggagcgcaccgacatggtgattcgcggcgtgcagggagagttctacccgtgcaagccggagatcttcgctgagacctacgaccgcgtggaggcgtaa

SEQ ID NO: 532627 - DNA, 1047 bp, Stenotrophomonas maltophilia
atggcctttaccccggcacagctggcgatcggcgcgaactacacgctcgaaagctacgccaaaaatgaccccatcgaccagatcagcttcgcccatgcgacgctggacatgctggtcgcgaacaaggaggtttcgttcttcggcaacggcatcttcaacgagaagctgttcatctccaacgacagcaactaccagaactacagcggcgccgaccaggtcacctacaacgagcgtgacccgaatcgcttcgcgaagttccagtactacagcaaccacgagggcttctggttcgatgaagaccgcctgatcgccaatggcatcaacattgccgacgacggcgtggccgtgccggattcgaccgagaaggagcagctggtcaacctgttcaagtccagctggactgccctgaagaacggcatccaggaaggcctggcgctggagaccctgcagaacggttcgcagtcggccaaggcagttcccggcctggaccacatcgtttccaccaccccgggaaccggtgacgttgttggcggcatcaatgcaagcaccagcacctactggcgcaacaacgccagcatggccatcgcccccggcggtgtggttgccgcgctggatgcaatgtgggacgcctgtatccgctacggcggcgcgatgccgaccgacatccgttgcggccaggccttcctcaacgcctacaaggccgaggcaggcaccactgtcaaccgacagatcatcgtcaacgagcagggtggtaccggactggatgcctcgatcacccgtgtcttctacaagggcatcgagctgatctgggatccgaccttcgaggttctggacgccaagctcggcgcgatcacctacccgtggaccaagcgctgctacctgctcaaccgcaacttcatcaagttccgcccggtcaagggccactggatgaagaagcgcaagccggaaaagctgccggaccgctacgtgacctactacgcgcagaccaacaagtacggcctgaccgcgtcgaagcgcaacgtgcacgccgtgctgtccatcgcctga

SEQ ID NO: 532628 - DNA, 492 bp, Stenotrophomonas maltophilia
atgaagcacataaaggctgaacacgttcgcgagaaatacgacctcgacgccgaaaggggcttcctgatcttccgtgcgggtaagaagaagggtctaccctgtatcgcctacaaccactgcggctacctgatggcagccgtgaaggttgatgggaagcactacacggttctggttcacaggctcatctggatgcatgtccatggggagtggccgaatggagaaattgaccacatcaacggggtccgggacgacaaccggctggagaatctccgggtgacggatcgccgcgggaacatgcagaaccagcatggcccgaagaagaactcccgttgtagctctgttggtgttagctaccggccgaagaccggacagtacgttgcccgaatccagacggttggaggtcggctgtacctcgggtgcttccgcaatgagttggatgcttcgaacgcctaccaagctgccaagaagatctaccaccaggtggccgcatga

SEQ ID NO: 532629 - DNA, 1158 bp, Stenotrophomonas maltophilia
atggcgaacggatacatgcgcgcaggcgcggcactcggggatgcgctgttcggcaacggccgggctgcctacaacgaccagctggggaccgagtacaagctcgcctatgcgttggagcaggcgcggcaggccaggaatgcgcgggtactcggcgaccagaatgtcgcctcgcggcagggcctgacggccgacctcatcggacgggcacgggctggtgacgtggacgccctaaaccagttgactgcgtacggactgaccgcgaacgaaaaggtcgaccttggcacactcggccaatcgcaggactttgcaatgcgccaagcggtctacgaccgggccacccttggggacctggcgggggccggcgccgcgtcgctgggactcaccaccaagccgctggagatgaccaagatcgcgggcgacgtcgcctacaacccgtacgcgcagccggaccagtccgtcaacgtgaccccgctcggcgaggctgccataggacagcgcaatgcctcggcagcgtcgagctacgcgaccgcagcgcgcacgcggcaggcgatggggttggacgcggccaaatacgcagatcagcgcagcgccggcactctcggcgatccgccgcgtgggtcagccaagccaccgagcgctgctgagctgaaggcgcagcaagccaacgcgaccaagactgcgcagctcggcaacgtcaaccgaggcctggcgcgcattgaggcggcactggggaacctcggaggttcgttcgtagacactggcccgatcgatcagtatctggtccgcaacaccgaggctgggcaagagctggacgccgccgtcggcgcgatccagaactcgatgctggcattgactcgtgtcccgggtgttggctcgcagtcggatctggaggcaaggatcgcagcgcttcagtacccctcgctgtccaacgctcctggtgtgaatgccaggaccctgaagcagctgaaggacttcgtgcaggagcttcagggcatcggcgtggaggcatcgggcaccttgggcgatgcgcctccctcggccgttcctcgtggccctggccttcccgcagctggtggtccggcgccgggcactgtgcgcaatggttaccgattccgtggtggcaatcccgccgaccgtaacgcgtgggagaagatctga

SEQ ID NO: 532630 - DNA, 219 bp, Stenotrophomonas maltophilia
atgaccgacgatcgattcaaagacgcagggcagttccagcctgaaaaggcgtgggcgaagattgttcgcaaggacaaggaccgggcctttgacgagaagtatccactcacctggtgggatcgcttctggattcccacgtcgctggccctactcctggtcggcatcgtcgcctgcggtggctatctactgctatggctcctcagcgcccccttcgcttga

SEQ ID NO: 532631 - DNA, 744 bp, Stenotrophomonas maltophilia
atgaacggcctcatgattgccggaactggcgttcgccgggaccacgaaggtcgttacagcctcaatgaccttcacgctgcctcgggtggagagtcatcgaagcgccctggatactggctggcaaaccagcaaacagtggatctgatcgaagagttggaaactgccggaattccggcagtttcaagcaaggaggggcgtgggggcgggacgtatgtggttgatccgttggttgtggcctatgcagcgtggatcagcccgaggttccacatcgaagtgcttaacacgttcttggccaccaagaagaccccgcggacacaggaacatggaattgctggtgaagtagctcgggagttccgcgcgctgaccaccatttcaaagctcgctgggttgaagggcaatcaggccctcattgctgcagcgcagggcactgagcgcctcactggcacaaatcccctggcgctgatcggccagacgcatctgctggctgaggaacaggttcgatacttaactccgaccgagcttggcaaggtgttcggcgagtccgcccaagcgttcaaccggcggctcgaaaaagcaggcttccagatcaaggacatccacggcaattgggtgcccaccgatgccggcaaggcacacgcggtcctaagcgatacggggaagaggcacgggaatggaacgccgattcagcagcttcgctggctcgtgagtctgcttgatgtaatgcaagagacggagtccgcatga

SEQ ID NO: 532632 - DNA, 717 bp, Stenotrophomonas maltophilia
atgcgtactctataccgagcctcggatattgcgggtgagcagtctgtgcgagctggtccgctgaactggagtcacccaaaggctccaatcctgtatgtgcatggcgccagcgatttggctgacacgtggatgagagttccttcgcgtatcccggttatgcgtgcgctgacgcaagagggatacacggtcatgtcccatgacaacggtggggcgcagacatggggaagtgacaccgcaatggcccggatgtctgcagcgttcgagcagcttcaagcggatacgagcgtgatgccggggagggtcgtcctactaggtcagtcaatgggcggccttaactctattctgtgggcagcaagaaatcccagtaaggtggcggcggtcgtgctgtttctacccgtgctggatcttggcgaggtccacgcaactcccggtggctatggtggcctgattgatgcggcgctgggaattaattacagcgatgaggttcaaggagctatgcggagtccgatcataatggctcgtaacgggattgccccacgcgtgccgtgccagatttggtatggagcgggcgatgagctttgtcggcccgccaaggcggttgagtattctgcgttgacgggcgcggatgcaaggaaggtcccgggtgggcatgcagaagagacagtcggaggaattgacccggatgaagtggtcaggttcatcgccaggtcaacttga

SEQ ID NO: 532633 - DNA, 324 bp, Stenotrophomonas maltophilia
atggtggcgggtgtgttgttgatggcgctcgctgcggagttgccactgtcattcgccagcgtcgtgctgcccatgtggggcatcgcggtggggctggtgatggtggtttcggtggctgccagcggcgcgttgagtgaatttgccgatgcgtcgggtatggcggtggcgctctactacgcgatgcagagcctgatcgtggcctgcttcggaacactggctacggtgctgctgccaggcgatacggtatggccgctggtggcctatgggctgttgctgccagtggccagcctggtcgccgcggcgatgttgcgcggccgccgctag

SEQ ID NO: 532634 - DNA, 627 bp, Stenotrophomonas maltophilia
atgaccagcagtgcgcgcgagctgttgaagtggctggccgtcgttctcatgacgtgcgaccacgtcgccaaggtgatctacggcggctatgtgccaggtctcagcgaggcgggcagggtagcgtttcccctgttcgcactggtgatggcctacaacctcgcccagcccggcgctgacgcggttaagtcggtgcgcaggctcggcatgtgggggctgattgcgcagccggtgcacgccttggcgttcgggtactggttgccgttgaacatcctgctcacgttcgccctgtgcgcagtattgatctggctggtcgaccagcggaggtgggcatgcctggctttagccgcggctatattgcccctgttcgtcgactaccagtgggccggggtagggttcgtcctgctggtgtggtgcgccttcaagtggcgccagttctggccgttgctgccggcattcaccgcgatctgctggttcaacggcaacctgtgggcgctggtggccattccggtgggggtgagcctgtcgcgggtggcgctgccggtcccgcgtggccggtgggccttctacggctactacgtgacgcaccttgcgtgcattgggcttctggcgcctatactgcggccatga

SEQ ID NO: 532635 - DNA, 300 bp, Stenotrophomonas maltophilia
atgaacgctccgaagatcacgatcaataccgccgtcgaaatccgctacgtcaccaccaagagcggcatgcagaagcaggttcatttccagcgcgcaacgttagaaaccgaagcgatgcgcatccaggtggaagtggaagttgacggccccgagaagggctatccggttggtgcggttaaggaatggcatcttgttgccgacctcgtgcccggccgcttcggtatcgagctggcacgtcgcatgacgcttgttgatccgcagggcgcaaagcccggcaccccggctaagcaggctgcataa

SEQ ID NO: 532636 - DNA, 399 bp, Stenotrophomonas maltophilia
atgattgatccgctcattaccttcgtgctgctggtggccatcgcggccgtttccattggcagcgccaaactcgtttcgtggtgcctcgaccggcgcggggagtctgcccgttgcagtgcacgcgaagccgccttcgtagcccaggcacgtgccgaactggccgccactgggtggaccgaagatgacgagtccgcataccagcgcgacccctacgcctacgaccgcgaactgcagaggatgtgggaggcgtcggatttcatgggcggtcgcgattacgacctggacccggtcactctttctgaaaagctctatcaggcagaaatcgccgccaccaagcgcggcgatctactggccgcagcagaactagcttgcatgcgcgggcagggcgatgagccatga

SEQ ID NO: 532637 - DNA, 696 bp, Stenotrophomonas maltophilia
atggctgagattacgagtaagtgctctaggtgcggaactccgcatacgacgttcgacgttggcgcaatcaattggaggtcccagagctatggatggaaggatgtgtatgaggtctttgctgtgtgccgtgcttgcaagaagggctcaatcctggtcgcggccacgaagacttacacgactagtgaagttctagaaaagattggtgggcttgggcaggcaaaaggtgttctgaatcatttggtagaagttgtcggcgttatcaatatcaaggatgttgcgtcaattgaaccgcccgagcaccttccggcaccaatcgaagcagcattttcggaaggggcatcttgtctcgccatcggttgcgttaatgccgccgccgcgatgtttcgtctatgcgttgatcttgcaaccactgatcttgttcctcctgcagagcagggcggccccaatcatcgaaccgcaagagagctgggattgaggcttgcttggttgtttgaaagtgggaagctaccggaggatcttcatgatctttccgtctgcatcaaggacgatggcaacgatggtgttcataggggaacactatcttccgcagaggctgaagatctacttgacttcactaccgagcttcttcggcgtcgctatacggagaaggagcggattcgcctcgcacgtgagcggaaggatgcgaggcctagataa

SEQ ID NO: 532638 - DNA, 441 bp, Stenotrophomonas maltophilia
atgttcacaaggattgcagccggattgctgctgtgcgcgcttgccgcgccatcggtagcccaacaggtctataaatgcgtcactaaggctggtactgagtaccagtcggagccttgcgcgcttggtgaggcggctaagacatggactgcttatgtggcgccacgatccgcctctgtgatcgagaacgagcagcgcctggacaacctgcgccagcaaaacgcggctgctattgcatcgcgtccttcgcgtccttcgcgctccaactcaacgtaccgcagcggtggcggaggacggctccatcacatctcgcagtacaaggatgcaaacgcgtgcgaggccgccaaggcagagcgagcgcgcgtctacgaggccgtcggcatgcgccgctctttcgagttgagtcgtcgcatggacgacaaggtatgggctgcctgcaaatag

SEQ ID NO: 532639 - DNA, 267 bp, Stenotrophomonas maltophilia
gtggtgctgtcggcattcgtggactaccagtggtccggcgcggccttcgtgctgctggcgtggttcgggttccgcaccggccgggcgctggcggcactggccgggtttgtgccgctgtgcttcttcaaccgcaacttgtgggccttggcggggcttccggtggtcgttgtcctgtccggggtgcgctggcagctgccacggggccggtgggccttctatggctactacgtgggccatctggcgattcttgtggccttcgctagctga

SEQ ID NO: 532640 - DNA, 1020 bp, Stenotrophomonas maltophilia
atgatcactaggggctaccttattggccagatcgtagatgatctggctgccatcgccgcgcaggccaagttgcgtgggcgcctgcatctgttcgacatccacacacacgtagaaggcttcgttagtgaggttctgaatcgggtaatgggcattaacctcacgaacttcaacacggagtgcccaaacaatccgggcctcgatctcggggatgaggcagcaggctgggcatttcaggtcaccgcagacaagtcgagcgccaaaatcaaggcgacgctggagaagatcgacgccattcaacgaactaagtttacgaacatccgcgtctttgttatcggggaaaaacagggttcctacagcttctccggggagccctacgcgagcttcggctttactgagggcatggtctgggacttcaatgatgtctgtgctcgcatcatgtcgctcaagatcgaggcgctgactgatcttgctgaatatgtcacccgcgaatcgcgccgcgttcgcatcgagctcgagattccagatgagcaaggcaacttctcgacctcgattaatcatctgatcgaggcgctgccacagccaaagctatctgacgcggcgaaattggcagaacattttcactcagataatccgaaaatcgaccggagtgagttggagggtgcgatcaaacagctgagccacagactggcgaggcttccacgcctgacgcgggaagtgttcaagctccttgtggaacggagggatgagcacacggtcggtacgtgcgagcatttccgaatcagtgacccgctattgcgtcgcatctatcggggcgacgacctggatggcgacctctcattacttacagaagccaggcttgtgagtttcgatgagccggatgagggcgggcagccatactactggaccctccattttccagctgcggataccggcttccatcttctgttcgtcgaatatgcaaactcacgcaatctcggattgcacaaaccgctcgttgctctcgatttttctgacttctag

SEQ ID NO: 532641 - DNA, 219 bp, Stenotrophomonas maltophilia
atgatcatggactacgaaattgtattttccgatcagggatttcaggcgaacaaaaagggagatcccagtccaatggggagctctcggatcatctccttcaaccgggctacaggggaagacgaagctctcgcgctacttgagctagcatttcagaaggtgctgagcgactccgtggacatcgtgaaggcttatgcgagggaagttgacgaatggcattaa

SEQ ID NO: 532642 - DNA, 465 bp, Stenotrophomonas maltophilia
atgagaagagcaaaaaatcttagtgatgaagacatcgctagcattgtcggaattcttgacggctggtcaggtcgtttgacctggcaatctctgctggacgcggtggagcggcacctctttacgcgatatacgcggcaagcattgcataagcacactcgcattcagcaggccttcgaacagcgtaaggcgggtttagccgcgcaaggggggcatctgcggcaggtcaaggctgttcctgaaatgcagatcgctatggaccgaattctacggctggaggcggaactagaacgagtctatcgcgagaacaactgcctactggagcagttcgtaagatggtcgtacaacgcgagcctgcgaggcctagacgctgagtacctgaactctcccttgccatcgctgaaagggatcgattctcgcggtcggccacctgacagtgttgggtccttttcctccaagaagagctaa

SEQ ID NO: 532643 - DNA, 1134 bp, Stenotrophomonas maltophilia
atgagccggcgtgtgttgttcgtgttgatgctggtgtgcgcgctggccgtgctgatgccacgggcgtgggcgcagtggccgccggagacgcatcccaccgaccagagccgggacatcgtgatgacatgggaccgctcggcggtgccgggtgacgtggtgctgtgggcgccgcggacggtgctggggttcagtcatgacgtggcgatgaagtatgggcagatccatgttgtgtgtgggtctgcttctgatagtgagtttggtaaatgccccacggcgggtgttccgtctggcgcagatggagttagtgaggtttcgcttaggtttgcagatcagcggaccggcttacgcatcgaagtccgcgcgtttggcagcatccagcggatcatgtctgactggggatgcgcgattgactattgggactcgctgcagaggtttttgaactcggcatcctggtacacctgcgggccagatcagccaatcggcacaggcgtcaggctgtcagttccgtcagcggaacttgcgcgactcgtcgcaggccactggaaggccacgatgcgcctgaacatcaaggccgaccccgccgcagcacccgtcgccacagccaccttcaacttcgacttcaccgtcaccgactacgacgcgatctcgatctacttcccggccttcgacaccatcgcgccgctggtcaacatggacctgcgctacgaccccatcaagcagatggtaggcggccgcaagcagctggagatgtgcctctacgacggcctcggctcgcagagcgagttcctcggcgtcaccgtgcgtgacagcgggccgcgcccgccacccggcagcgacttcgcggtctggcaccgcgatggtggcggcgacgaccgccagcgcctggactaccacgtcagcctgaactacggcgggcgcgatatccgcatgcggcatggcgtggaagagctgctgcatggcatcgacagcgccgaactgcgcctggtcatgctgcccggcatcagccagccggtctattgcgtgcccacgccgctgacattgctgacacctcccacccctatcgccagcaagcgccccggtctctacgagggcgagctaatggtggaactgcgcgtccccaccgccaaaccctga

SEQ ID NO: 532644 - DNA, 5055 bp, Stenotrophomonas maltophilia
atgaatcgaatctatcgacgtatctggaatgccacgcggcagtgctgggtggtggcaagtgaactggccgcggcacgcggaaaattcagtcgggtcccgcaagccgcgctcttgatggcggtttccatctctggctcggctcttgccaatccgctcgccaccgatgacacgcacgaagaggacgccgtagtcattgcgccgttccagtggtaccgggcgagtatggggaacgagcttatgttccccgcgccactcattagtcaggccggtggtgcgcagcttgcgtcttcgccttcaccgcaacgtatgtatgcgctggttacagatacattggcagcagattcgagcatcagtggggatcacatgctggtggttggtactcgctcatccctcatcggtaacaagtctgttggctatggaaacctgatctcaagcaaaggtgatcacaacactgcagtcggcttccaggtggagacacagggaggctatgcaaccagcgtaggcgccacgtcgcgtgcgctggagatcggtgccagtgcgttcggcaacaatgcactggctgcaagagtcaacaccgtggccctgggaagtggtgcccgagcacaggccaacaatgctgtggctctgggagcgaattcctacgcgaacgaagtgaatacggtttcagttggcacgagcagtgagaagcggcggatcgtcaacgtcgaagagggccgattgaacgcgctgagtactgacgcggtaacaggcggtcagttgttccagacgaatgctcgggtgggcagtgtcgagagcaaggcgcgtggctttgaaagccaccttgccagaatcgacgccaagatgagtggaaccaccgtcgagcttggagattcagcgtccgccagtggcgagggcagcatcgccattggctcgcgcgcagcctcttcaggactgtactcgatggcggccggcatcaattcgcgtgcaacctcgctcaatgctgttgctttgggagcctcttcctacgccaccgagatgaacgcgctcgctctgggggcaagcactcgggcaacggcgcgcgactcgatagccatcggcttccaggcagtggcggctcatcagggttcggtggcaattggtaggcagtcggcaacaagcggtaacgaccaggtttctgttggtaacgcaacactgaagcgcaagatcgttaacgttgccgacggcaccgtagccgcaggcagcagcgatgcagtcaccggggcccagttgcattctgttgatgtgcaggtcaaagctgcctccaatcgcatcgatgcaaccaacctggcacttggtaagggcgcggttgcagaatcggggagctacggcatcagcaccgccatcggcaacaatgccaaagcctacaacggtcgcagtgtcgcactcggattcgatgcgctggccggcgtcgatggggagggcaatcgagtgaccggccagaatgccggcgtttccatcggtgcaaacacgcgcagcgcaaatggcgcggtcgcgaccggcttccgggccgtcgccagcggcaacttctccattgccgtaggtggtgacgccaatgcggccgccgagcatgccactgcaatggggtacctgagcaaagccacagcaaagcagtccacagcgctggggcgtggcagcgaggccaccgcgcagttcgccaccgcgttgggcaatcttgcggtatcggccaacaccagcgccgtggcgctgggtgaccgggccaacgcccgccatgacaatgcggtggcactgggtgctggctccgtcacagcgtcggtcaactccgtttcggtgggcagcgctgcgctcaagcgcaagatccagtacattgccgatggcacgatcagcaatggcagcaccgacgcgatcaccggcagtcagctgttcgcgaccaaccaggccgtgtccactgcgcagagcacggccacgagcgcgcagacggcggccaatgccgcaaaatccgatgctgccaaggcactgaccgagacgaccgcgctcaccggtctggtctcccagacaggcgccaccggcaatgtccgcctgggcgggaagaacagcggcaccgtactggacgtgcgcaacagcgccaacgccagccgaaaggttgccggtgtggcggatggcaccgtgagtgccagcagcaatgaagcggtcaacggcaagcagctcaatgccaccaacgtgcaggtggctgccgtggagaaagcggctacggcggcgcaggcggatgcaacggttgcgaaggcggacgctggtaaggcgttggtcagcaccaccgcgctggaaggactggtcagccagaccgccgccaacggcaatgtccgtctgggcgagaagaacagcggaactgtgttggatgtgcgtaatagcgtcggtgacaatcgcaggatcagtggggtggcggatggtttggtgaccgacagtagtgcggaagctgtatctggccggcagttgtttgcaaccaacgctcgtatttcctcgctggaaagtagtagccagttcttgagtgtagggcacgcgccgattaatgagccagctgaagcgggtgttgcgggtgtggcgcttggaaacgcggcaaagactggaaaggaggggggcaccgcagtgggtactcgtgccctggcgatggggaggaactccgtcgctatggggcgcggatcaactgtgttcgatggatcagagggtggatttgctctaggagctggagctcaggtcggtggctcgggtggtgtcgcggaaggtggtatcgcgatcggtgcgggcgcaaggactggtgaaggtgcaactggatcgcttgcacttggtcaaggtgctgaggcgaccgaagcaggcgttgcgtcgttcgggaacacctttgcccagaggcgcctcgtgaacatcgcccggggcacagccgatcacaacgccaccactgtctcccagctaaaggactccctcgccaccctcggcggcagcgctggcatggatgccaacggcaacatcattgccccgacgtactcggtgcagggcggaacgcagaacaccgtggaggatgcgttgatggcgctcgatggcgctgtcatcaccgcaggccgccgtgcggacaaggtggaaggccagctcagctcgatcttccaggattcaccctcggcccgtggcgatggcatgaaccagatcgcgctgagtggcgcgaacggcatggtgttgaccaatctggctgacggtcgggtggcaccaggaagccgtgatgccgtaaccggcaatcagctgtacgccgcggagcagaagatctcgcagaatcgaaatgatctggaggcgatgcgcaagcagcgagaggtgggcgagcaggccatgcgtggattggatgcgagcggtccgattgatttcggcggcgcgcgtttgactggtgttgcagacggagatgtttcggtcggcagccgagatgccgtcaatggcgcgcagctgaacgagacaaacgcaagcgtgatcgctgctcaaagtacagcggatgttgcgagactggaatcgagcagggctctggttgaaacatccgcgctgagtggtctggtcgggcaggtggtagagacgggagctgtccgtttgggtgaaaggaacagtggcgccctgatcgatgtgcggaacagcggtggcgctaaccgaagagtcactggggtagctgatgctagccttggcgccggtagcaatgacgccgtgacgggaagtcagctgttctcctcgaatctccgcattttggcggttgaaagaaagagcatgttctttgacgctggaagggaagatgggatggctcccgcgcgcgctggacagtacagcgtagcgcttggaaacggtgcactagcttccgttactgcagagggcggcaccgcaataggagcattctcaggggcgcacgcgaagaactcggtcgcacttgggcgtgccgcgaccgtggcggaaaacgcagaagctggcttcgcattgggagccgcatcctacgtcgccgagaagggggggatggctctcggcgccggatctgaagttaaggccggcgcccaattgagtgttgccttgggccaagggtcggtggccggtgagaagggcattgtttcatttggaaacagcgatcttaagcgtcgcctcaccaacatcgccaacggcaccgccaaccacaacgctgccaccgtcggccagctgcgaggagcgctgtccgcgctcggcggtgaagtcgatgccaacggcaacatcgtcggtcccagcttcaccgtgcagggccaatcccagtccacgctcaatggcgcattggaggcgctcgacggcgcagtcgtcagcaaccgctcgcgcgtgaaccaggtcgagtcccagctgcgcagcgtgttccaggacaccgcctccgtccgcgccgacggtctcaaccagctcaccctggccggaacccacggcatggtcatctccaacgtggccaatggcctggtcgccgccggcagccgcgatgcggtcaatggtggccagctgcattcgatgcagcagcagctcaacggccgtatcgatggcctggaagagcgcatcgatgcgccgcagccgcgggcaatggccgtcgcttcggcgccggagccggaagcaccggtgccgcaggccgaaggcggccagcaggtggcgtcggtcggcgagggtgagaagcccgcgccgcagccgaagtcgaagcaggacgacacgcccaagccgcaggtcgacaccgctgaattggagaagatgctggcccgcgccaacgagtacaccgatggcgcgatcagcaatttcgaacgtcgcctggacaagatggacaagcgtttcaaccgcatggcggcgatgagcagcgcacagaccgcgatggcgatgaacactgcgggcctggccacctacaaccgcctcggtgcgggcgtgggctacagcgagggtgagtccgcgatggccgtgggctaccagcgcgtgctcaacgagaagggctcggccaccttcagcctcaatggtgcgttcaccaacagcggtgagcgcagcatgggcgtcggcgtgggcatcggctggtaa

SEQ ID NO: 532645 - DNA, 219 bp, Stenotrophomonas maltophilia
atgcaccggtcgcccctgtgcaagatcgttggcagcgcgcgcggccagccgcacctgttcgtcggtgcccagcaacaggatgtccgagagcgcggcctcgaccgcatcacggatgcgacgcgttcgatccgaacgcggttcggcgatgccttcggccgcttcgcgctggcgcagatcgcggcgatggctgggatccacgcccagttcaccagtgaatga

SEQ ID NO: 532646 - DNA, 189 bp, Stenotrophomonas maltophilia
atggcacagcagaaccagaacccgaaccagaagcagaagcagcagggccagcagaaccagcaggatcagcaggatcagcaggatcagcagcaggggcgtggccgcgaccagcagcagcaacagcagcaggaacagcagcagcgcaaccagcgcaaccagcaacagggtgggcaggacgaggaggagtga

SEQ ID NO: 532647 - DNA, 375 bp, Stenotrophomonas maltophilia
atggagctcggcaatcagctgctccactgcgatctggcgctgaacatccagattatgcccggcgattattatctcgaaatcctgacaagtctgcgcggtcaggcaaagcaacgactcgcgcaacgtctcgatccgtcgacctacggtacggatgacaacggacagaaaacgagagtcttcgcgctcacgcaccgcgacgtacggcacatgtgcattggtagtttccggcccaggaaggtaagcgcgtacgaactgatttacatacccatagtcgtcgacctgctcacgaatcccagcaagcaattctgccaacggcgctttccgggcaaggacgggcagctgagcggggaaatgctggtcgctgcgaagcagtga

SEQ ID NO: 532648 - DNA, 411 bp, Stenotrophomonas maltophilia
atggctgcgcccgatgcgagcgtaaagcctaagcgcggcaagcggatcgggaaggtgctcaagcgtatcaatcgtacacaacgctgcgatggcagcgccctcaggaagtacgcggcgtaccagctcaaatgcagcttcagcatctcccagatcagcgtaatgggccgcaaatccacgcgctcgcaaggattccaagcccggctcgttgatatcaaaccctacgtatttgacgcggtagcgcgcctcgaccacctcagcaagacgtccaaaaccgcatccgaaatcaagaaagtagcttccagccttcggctcaaagcgggcgaagagatcggcgatgtgaccatatacgtttcggtccgagaaactgttatcgtagatttccatcacattgcgaacctatggttggcataa

SEQ ID NO: 532649 - DNA, 1152 bp, Stenotrophomonas maltophilia
atgcttgacaacattgatattgaggggttgaagggagtcggtcgagttaagctgagttttgcttctgctcgacgcgtgcgtgttctctttggtgtcaacggtgtgggcaagaccaagtcgctggaggcgatctatctcgcgcttttgttcacgcacgaagtagtgttgagggaaaaggggagaagcggaattcgcgtgaagccgtggtggccgttctccaaaatcaaagtggatggcgaattgctcaccaatgatttgtcagagctgtcggacgttgttcaagttaatcagcttgccttagtcgaggtaaggcatgacaagccgctcgtctacataggggcgggtgggcgctcatctgtagggccgcagtccaaaacaatctctgcactcggggatttcgagcagcggcgagaagcgcatgttgatcgacttctgggagagtgcagcagtggactgcgtttggctggtatggcgtcagacgtgcgcggatggttcgttcaacgagcccagtcagtgaatccatttcagattgaaaaggataatcttcgaggcgaaattgatgcggtgcttggattgctgaataagatcgattcccgggtggattctggtcgaatgcagattgatggcgctcaacgtgtcttcttgagtatcgaaggccgtatggtggagcttggtgagctaagctccggttttgcgtctgtggttaagctatttcaggcgattatctcgggattttctaactttaccaattccaaggatcttcagcatcttccaggcattgtcttgattgatgagatcgagagtcatctccatgtgagttggcagacgaccatagttaagcgattgaaagaactatttccgaatacgcaatttctaatctcgactcactccccgctagtgctgacccagctggagcagggcgaggcatatcttctcgaacgagatgaagtggatggcatcgttcgtgctcgtgagattgactccccgaacatgaaggcctttgctgatgttcttgaggagaccttcggcgtcgatctcaatgctctcaagcgtgaagcgttggcatctgaggatcaaggcaaagtcaagcgcgctcttttggagctggcgaagcgaaatcgcctgcgccgaactggtgggagtgcggattga

SEQ ID NO: 532650 - DNA, 429 bp, Stenotrophomonas maltophilia
atgcgcattgttcttttagatgcaaacattctgattggtgcacttgatggccaccccggaaatgatgctcatgacgacgcactcaggagatttgaagagcttgcgaatgatcctgacgtaaaactcgctatctcgcccctcgtaaggtatgaggtgctgcgcggcatgagtgaagacgatgtcgatttcgtgaacgcgcaactgaatgacatgaaggagttcgaggtgcgcggaattgaggcgatccgggctgctgaggtttttcgtcttgcgaggcagcaagatatcaagttggataaacgaaagtttgacgtgttccattgtgtatgcgccgagctaaatgacctcgagctccttagtagggatgcggatatcgagaaaattcagaatcttatgaaggctgtagacgaaaatgcccaagcgcactga

SEQ ID NO: 532651 - DNA, 333 bp, Stenotrophomonas maltophilia
atgaaacgcatttccttcccgctggcggccgtggccgcccttctggtggcttcgaccgcccacgccggccagcccgccgacgcggcccgcttttcgatcatggccccggtgcaggccgcctatgacgcctaccaggtcgaggccaaccgggcgcagaacacaatggacaagatcgaggccgagctacgcgaatccgtgacggccgagcgccgcgagctgctggcggtgtcgcttgcggcagcccgcgcccgcgaggcggccgcgctggacaagctacaggcggaatcggcccttgcgcagttgaagatggccgacttcaacgccaccaggtag

SEQ ID NO: 532652 - DNA, 345 bp, Stenotrophomonas maltophilia
atgaccgccccgaagaacctggaaacatggctgcatgagaaggtcggcccggcctatgacgcattgaaagccgacccggcccgcgccgtctcggccgaccgggtgcgctacacactcgatgagctgctggccgaagcatccggccagtatccattgccgccggaacaacgcgaatgggtggatgccccgaccgttggccgtgagctgctgcccgaagacttgcaaaccaccgaagccatagccgcgttcctggccgatgccgaagccacagccgacccggcctatatcaagcacgcccgcgaagtcgcggcgcaggccaaggccatgcacggcctggaagggtag

SEQ ID NO: 532653 - DNA, 177 bp, Stenotrophomonas maltophilia
atgagcaacaaaaccgccaccatcagcgccgccgttcctgcggccgtgaaatccgaagccgccgccgtcgcagcagcgcacggcatgagcttggccgccctggtgcgcgagctggtggcccgcgtggccgcccgtgacgccgcaatgctggcctggctcgatgaggcccgccgatga

SEQ ID NO: 532654 - DNA, 414 bp, Stenotrophomonas maltophilia
atgagcgagacgccggagcagcgcagccgcactatgcgggctgtgcgttcccgcgacaccgccccggaaatggtcgtgcggcgtttcctccacgccgccggcctacgcttccggctccatgaccgacgccttcctggcgttcctgacctggtgtttccaagccgccgcgtggcgctgttcgtgcatgggtgtttctggcatcagcatcccggctgcaaggcggccgaccggccaaagtcgcggccggactactggaaccggaagctggatgggaacgtggcgcgtgacgcccgccacctggtcgagctggccgcctctggatggacggccctgataatttgggagtgcgaaacacgcgacccgcagcgcctcgccgcgctggcggcaagcatccgagagaagggaaggacatga

SEQ ID NO: 532655 - DNA, 930 bp, Stenotrophomonas maltophilia
atgacggatttggcaacggccctgcgggacttcaacaaagatcggaaattcagccgcaaaggcccgctgtgcgttgcgctggtcgtcacgcagcacgcccgaaagggcttgccgctcaacccggatgcgctgctgaccgaagccggcggtcaggttctcggcctgggtaaaggggcggtgcaagcggttctgaaccgccacggcatcacccgcgttttagccgctgaaggcgggcgcaccagtcgcggcagcatcagcaacatgcgcgaatatgtggccttcctcaacggcctggccgccggcggcgcggtcgatcttgatgccgtggaagcgttctggattgagcgcgtgcatgagttcttttccgccaagcccttcaagattcgcctggacgcctcgcgcagcctgcgaacgctggtgcgcgacatgatcgcccaggccgaagaacggcagcgcaacacgccggggatgcagtatgccggcgcggtgctgcaacacctggtaggggccaagctcgattgcgcccttggcgtcggcaacttcgagcacaacagcttttcaacgtctgacgcccaatcgggccgcaatggcgatttcttcattggcgatgtggctatccacgtcaccacggcgcccggcgaggcggtcattggccgttgccgcgacaacatcgacaacggccaccggccgatcatcgtcacgacagcgcgagggctgacggttgccgaagggctggccgagaatgccggcctgggcgaacgcatcgacgttttcgaggttgaacagttcgtagccctgaacctctacgagctgggcaagttcgcggccgaaggccggcgcgtggccgtgggcgacgtggtaacgcgctataacgagatcgtggaagaagtcgaaaccgacccgagcctgaaaatcgaatttcgccaatga

SEQ ID NO: 532656 - DNA, 1149 bp, Stenotrophomonas maltophilia
atggctaatttctatgaatttttcgccggcggcggcatggcccgcgccggccttggccccgactggcaatgcctgctcgccaatgacttcgacccgaagaaggcggccagctatgccgcgaattggggtgccgatcatctgcgcgtcggcgacgtggccgcgctgaccacggccgacctgccggccggcgctgacctggcgtgggcctcgttcccttgccaagacctttccctggccggcgccggcgctggcctcaagggcgaccgctccggcaccttctggccgttctggaagctcattaaagccctgggcgatgaagatcgagcgccgcgcctggtcgtgctggaaaacgtgtgcggcgcccttagctcgcacgatggcaaggactttgccgcgatcagctcggccctgtcgaacaacggctatcggtttggcgccgtggtcatcaacgccgttcatttcctgccgcagtcccgcccgcgtctgttcatcatcggcgtgcgcaaatcctcgccgattccccgcgccctgatcgccagcggcccggaaggggaatggcatccttccgcgctggtcgaggcttacggcaagctctccaagcgtgcgcaaagctcttgggaatggtggcgcctgccggcgccgccggcccgcacgtcgatcttcgccgacctggtggaagatgagccgcacggcgtcacctggcacacggccgccgaaaccaagaaactgctcggcatgatgaacccgctcaacctggcaaaagtcgaagccgccaagaaatccggcggccgccaggttggcacgatctacaaacgcacccgcgccgatggcccgaacggcgagaaggtgcaacgcgctgaaatccggttcgatgacgtggccggttgcctgcgcacgcctaccggcggttcaagccgtcaaaccatcatggtgatcgagggcaagcgcgttcgttcgcgtctgctgtcgccgcgtgaagcggcccgcctcatgggcctgccggacacctacgcgctgcccaagaattacaacgacgcttatcacctggccggcgatggcgtggccgtgccggtcgtgcgcttcctggccgaacacatcctagaaccgctgttagcggcggccctggcggtcgagaagaaggcagcgtaa

SEQ ID NO: 532657 - DNA, 249 bp, Stenotrophomonas maltophilia
ttggccctgagccacgatggcgccacaatggcgcccatgaaagccgaccgcaaagattcgcgttctagtgcgctggagcgcatcaatctgcgcctctctcccgaggtgctggaagccattgatgccgaatgctcgcgcagggccggcaacgtatcgcgcaacacttggattaccgaagccgtgacggaacgcttggcgcgtctcgcttcgtcatcgcgcccgcaaggcgcagggggagccaatggctaa

SEQ ID NO: 532658 - DNA, 633 bp, Stenotrophomonas maltophilia; identical to SEQ ID NO: 16794

SEQ ID NO: 532659 - DNA, 666 bp, Stenotrophomonas maltophilia
atgaaagacaagccgatgatcggttacgccagggtatcgaccgacgaccaggatttgacgaaccaacgcgcagagctgcacgccgccggctgcacgcgcatctttgccgagaagatcaccggcacccatgccaagcggccggagctgggccggatgcttgaccacctacgcgccggcgatgtggtgacggtcacgcggttggacaggctggcccgtagcacccgcgatctgctggacattgccgagcagttgcaggcgaaaggcgcgggcctgcgctcactggccgaaccgtgggccgacaccaccaccccggccgggcgcatggtgctgaccgtgtttgccggcatcgccgagttcgagcgttccctaatcatcgaccgcaccaggaacggccgcgaggcggccaaggcgcgaggcgtgcagttcggccgccgccctaccctcacccccggccaggtcgaacatgcccgcgagctgctgggcgctggccgcacggcggccgaaacggccgagctgctgggcgtgcatcgggcaaccctttaccgggcgctgcgcggccaggaaaccagccgggccgaggcccgccggcgcggcgcgtttgtagaggacgccttgaccgaggccgatgcgctggcggccgccgaccaggagggcatgaaggcatga

SEQ ID NO: 532660 - DNA, 294 bp, Stenotrophomonas maltophilia
atgagaaacggacactaccccctgcccccgctccggccggagctgcaagccgcgcacgacgagatggacgccaagggcgattactttgcctatgccgtgtgccgaacccatgacggccaggcgtgggaagtgacgaccaggcagggcggcatgtatggcgcgctcgatggccgctacctcgaccacgacgaggcgatggccgccggcgcggcctggctgctggaacagctcgaccgcgaaccgaccgccgacgaggcggcttatcgggcgctatgggaaagcatgggcaaatga

SEQ ID NO: 532661 - DNA, 1014 bp, Stenotrophomonas maltophilia
atgaacaagaagcgggatggacaggaggcgcaacagatcggcgacattttgggcggcctgatcgtgaaggcgcaggccaaggcagaggccaagaccaggaagccccgcgccggggccaagatcaccccggccggcatcatcttgaccgagcaagaccagaagttgattgagaccggcgcggagattgccaccaacccgccgagcggcgaggacatggctttcacccatgcggtgctttgccaggtcggtttgcctcgtgcaaaggttgaggggcgcgagttcatgcgtcagtccggtgcggcctgggtcaatgtgcaggccggctatctggacgagggcagggggccggtactgcaacctatcccctatggcgtcatgccacgcctggctcttgcttgggtctccagctacgccaagcgcgacaacacgcgggaaattcccatcggtgacagcgcggccgagttcttgcggctcatgggcatggacgatcaaggccgacgctacacgacactacgccgtcaaatgcacgccctggccgcctgccgcctgcaacttgggttcaaggggcgcacctacaacggccagcccgtcgagcagttcgacgcctggctggcaaacggtgaagcgcaacagcggtcactttggccgggaacgatggttctgtcagagggctatttcaattcgctgatggatagcgccgtgccgctggacaatcgcgccctgatggccctgaaaggctccgcgctggccctggacgtttacacctggctggctcaccgactgcaccgcatcgagggcaggggagtaacgctgcactggaagtccctgcgggaacagttcgcacaggagtaccggggcaaagacccggacaaggacttcaagaaggaatttttgccggcgctcaagaaggtgctggccgtctatccgcaggcgaaggtgaaacccgttaccggcggtgtgctgctggtcggctcgccgccgcccatcccctacaagggcggcccatcggtttag

SEQ ID NO: 532662 - DNA, 207 bp, Stenotrophomonas maltophilia; identical to SEQ ID NO: 501876

SEQ ID NO: 532663 - DNA, 144 bp, Stenotrophomonas maltophilia
atgccgaaggagcgccaggccgtcgagctggacaagatgcagcgcgagcttgccgacaggtatgcacgcgacccgaaggagatcgagcgcagccggcagcggcagcgcgagcaggaacgcggcaacggcggtttgagccggtga

SEQ ID NO: 532664 - DNA, 372 bp, Stenotrophomonas maltophilia
atgagcacagaaccgacgaacgacgagctggcccagggctacgccaagcagatcgagcaggcgcagcaacgccgcgaagcgaaagaccttgagcggctggaacgccacggccaggcggccgcgcagcagtcccaggccatcgaggccgagcagaagcaaggccagcagggccagggcttcgagctggacgccggccagaaagtcgagctgaacgagatcaacggccagcaggcaaagacgctggcaaaggaattgaaccgggacaacgagaacggcgaccaggtgaagcaggcccgcgcccgcgagatcaccgaacggttcaaggagaaggcggcgcgcgaccgggagcaatcccgcagctttagccgctga

SEQ ID NO: 532665 - DNA, 222 bp, Stenotrophomonas maltophilia
atggctgacaccaatgttaccggcggcacccgccgcgagctaacgaaataccgtgtgaccttcgcggcggccgtcatcggcctggccgtggccggctggatgttccagacggcctatgagcagcacatcaaggttttgcagatcggcgacgacaccggcgaccgcctgcaaatgcgtggcctcaaccacgaccaggagggcgcacagcatgaacagcgttaa

SEQ ID NO: 532666 - DNA, 921 bp, Stenotrophomonas maltophilia
atgaacagcgttaagacctggcggcgcgctgccctggcggcctacatcctggccggcgctggcctggcctcgggcggctatgcccttgccagcgcgcaggcgaacgtgaacgccatcgcggccgcgcagaagcgtcttgatgacgacgagtggagcaagcatcaggcgcacgccaagaccgacagcggccgcagcgccgccggcgagggcgtggcgctggacgcccgcccctaccctgccgccgtcgattggtcggccgtggccggccaggtgatgccgtccgttgtcatggtggccgtcatcgagcgcgccaagggcgacggcagccgtaaccgggcatggcttgtccctggcgttcaaaccaacctggcaaccgagctgctgacccgttaccgggcttggcaacacgaatgggcgaaggccgatcaggaacgcgaatgggtgacgcggggcgcgggcttccttgtcggcgacggccgcacggcattgacggccgcgcatgtcctggccggcagggacggcgtgcgcgtgaagctggcaagcggggaatggcgcagcgcccgcgtggcgcgcatcgaccaggccggcgacgtggccgcgctgatgatcgacggcgagccgggccagccggtgcgcgcggcccctgccctgccccgccagggccaggccatcgccgcgatcggctccccgaatgggttggacttttccatgagcgcgggcatcgtcagccgtcatggtcaagtcggcggactcatgggcgaggcacccatgttgcagatcgccgcgcccatcatcggcggcaactcgggcggccccgtgttcaatggccggggcgaggccgtgggccttgtgagccacggcaccgggccgtttaaccaggccgtgcccatcggccgcgccctggccgtggcgggcttgtag

SEQ ID NO: 532667 - DNA, 546 bp, Stenotrophomonas maltophilia
atgagcaaacggaaggacctggaaaactggctgcatgagaaggcaggcccggcctatgacgccttgaaggccgaccaggcccgcgccgtcacacctgaccgggtgcgctacacgctcgatgagctgctggccgcttccgactattcgcagccgcagccgccggaggaacgcgaatgggtggatgctcccgccgtaggccgcgagtggccggcctgtgaagccttggaagccaaccaggtgcgcgcacgcctgcatgacgatgcgatggccgaagccttccgcaaagacccagcctatgcggtggaactgctgcacagcatccttgaggatggcgaccagggcgagctactgattgcacttcgccagatgacgaaggccgcaggccgcgaaatgctgacaccgtttgacccggccaaatggctgacaagcgccgaggccgtggccgcgttcctggccgacgccgaagctacggccgacccggcctatgtcgagcacgcccgcgaagtcgcggcgcgggccagggcaatgcacggcctggaagggtag

SEQ ID NO: 532668 - DNA, 426 bp, Stenotrophomonas maltophilia
gtgaacccggtcgatcccgcgcgcagcgcccaaatggcgcgcgtgcgcgggcgcgacaccaagccggaaatgcgcgtgcgcaaggcgttgcacgccgccggcctgcgctatcgactccatgaccggcgcttgcccggagcgcccgacctggtgtttccaagccggcgcatcgcgctgttcgtgcatggctgcttctggcatcgtcatcccggctgcgcggccgcgcggatgccgaaatcacgcttggagttctgggggccgaagctcgccggcaacgtcgagcgcgacaagcgcaaccgcgccgcccttgaggcggcgagctggaaagtgatggtgatatgggaatgcgagacgcgcgaccgcgcggccctcgcgcgcttggcggatgccatcaaggcccaccgcccggctacgatgaaacgctaa

SEQ ID NO: 532669 - DNA, 942 bp, Stenotrophomonas maltophilia
atggcgacgagaaaaccgaaaacccccgctcaatccgtcatcgaggagatgcgcgagcgcctggcgcgcttgcgcgagctgctgcccagcctgagcaaaccagcggccaagaaggcgatggccgaattgctctccatcatgggcgatatcgagtcggcccgcgccgacctcgacccgatcaaagaccccggagcctcattcgatcccgccgaccccgacacggccggccgcctggttgccctggcgctcatcgcgcaggatcgcgttcccctggggcgcgtcgcgcgaacctacggctccggcgtgtacgccatctactaccggggcgaccatccgctctatgccaccgtatccgggacggaaacgcccatctacgtaggcaaggccgaccctgatagcccgaacgcgcgcacgccgcgcgaacaggggccgcggctcttcggccggctgaaggatcatcgacggatgattgagacggttggcgcatacgccgaacgcgaggccctgccgcatcccctgcgcctcgatgacttcgaggcccgccgcctggtctgcgccacgaacgcgcagctcgtcgcggaaaagcacttgatcgccatgttccggccgatctggaataacgaaatcggcatctgctggggcatcagcaagcacggcgacgccgccaccacgcgcgcgaacaagcgttccccttgggacgtgatgcacccgggccgcgcctgggcgatggccgagtccctggacgacaaggcgtcgcccgaggacatcgagcggcggatcgcggagcatttcgcgcagaaccagccttaccgagataccgtccacatagtgcacgacttcctggccgccttcgtccagcacgccgccatgtcgccggaagaaccggccgacaatgacgacgctggcgacgatgcggacgcgagcgacgagcaacagcagtga

SEQ ID NO: 532670 - DNA, 1158 bp, Stenotrophomonas maltophilia
atgcgtagcgttgagctgttcagcggatgcggagggcttgccctgggcctatccagggcggggtttcatcacgacttgatggtcgagtggaacgaggatgccgtcgccaccgtgcatcacaaccggcggcgcaagctgcgccatatccgcgattggccccttgagaagcgcgacgtgcgcgagatcgcttggcgcggtttcgccggcctcgacctggtggccggcggcccaccgtgccaaccgttctccatcggcggcaagcaccgcggccacgaggacgcgcgcgacatgtggccggaggccatccgcgccgttcgggaaacccgcccgcgggccttcctgttcgagaacgtgcgcggcctcgcgcgcgcggccttcgccgactatctgcgctggatcgtcgcccatcttcaccacccggaaatggctcgcaaggatggcgaggatcacgccaagcacacccgacgcctagaggcgtgcgggcttccgccgtcctatcgggtgctcgtgctccaggtgaacgccgcggactacggcgcggcgcagaaacgccaccgtgtcatcgtcgccggtgtccgcgccgatctcgccgcagagctggaaccgcccgcgccgacgcactcacgcgaacggctgctatgggatcagtgggtcagcggcgaatattggcggcggcacggcttggcgatgccggccgactcggacattcccgccacggatcgcgcgacggtcaagcgcctgcgcggtcacgacgcgccgccgccggaaaagccttgggtcacggtacgcgatgcgctcgccggcctgggcgagccgaacggcaaggcaaaccacgtgtttcaggacggcgcgcgcgtgtatccgggacacaccggaagcccactcgatcagcccgccaaggcgctcaaggccggcgatcacggtgtgcccggcggcgagaacatgatggtcaaggatgacggctcggtgcgctacttcaccacccgcgaggcggcccgccttcagggactgccagacacctaccatttcccgcgctcgtggacggaaagcatgcgccagctcggcaacgccgttccggcgcaactctccgaggcgatgggcgcgtggatcgcctccacgctgagggaagatgatggggcgcgggtggcggtggcgtaa

SEQ ID NO: 532671 - DNA, 198 bp, Stenotrophomonas maltophilia
atggggaaggacggccgcgactccgtgagggtcacaaccacgctgacgcgccagcaacacgccgacctggaacgcatcgccgaacagaacggcgtcaaggtcgcttggctggtacgtcgtgccgtggagcgcctgattgaacaggcccaaggcccgctgttctctcttgacctgcgaggagaacaaaagaatgcgtag

SEQ ID NO: 532672 - DNA, 729 bp, Stenotrophomonas maltophilia
atgaagaaaccggccacggccgcgccgatggtggcgcgggtctatctgcgcgtcagcaccgacgcgcaggacttggaacgccaggaacgaatcatcacggccgcgaaggccgccggctactacgtcgccggcatctaccgcgagaaggcatccggggcgcgggccgaccggcccgagctgctgcgcatggtggccgacctgcaacccggcgaggtggtcattgccgagaagatcgaccgcatcagccgccttcccctgccggaagccgagcgcctcgtggcctcgatacgcgcccagggcgcgcgcttggctgtccctggcgtggtcgatctatccgacctggcggccgaggcccagggcgtcgccaagatcgttctggaatccgtgcaggaaatgcttttgcgcctggccttgcagatggcccgcgacgactacgaggacaggcgcgagaggcagcgccaaggcatcgagctggcgaaggccgccggcaagtatcgcggccgccgggccgatcccaagcgccgcgcccaggtggtcgcgctgcgccgttccggccacagcatcaccaggacggccgagctggccgggtgcagcccgtcccaggtcaagcggatatgggccgaggaagtgagccaggccgaagcccgccggcgcggcgcgttcaccgaggacgcattgaccgaggccgacgcgctggcggccgccgaccaggagggcgcgaaggcatga

SEQ ID NO: 532673 - DNA, 300 bp, Stenotrophomonas maltophilia
atgagaaatggacgctatcccctgcccccgcttcgccccgagctgcaagccgcccatgacgaaatggacgccaagggggattacttcgcctatgccgtgtgccgcacccatgacggccaggcttgggaagtgaccaccaggcagggcggcatgtatgccgcgctcgatggccggtatctcgaccatgacgaggcgatggccgccggcgtggcttggctgctggaacagatcgaccgcgagccgaccgccgacgaggcggcctatcggacgctatgggaggcgcaggattttagccgctaa

SEQ ID NO: 532674 - DNA, 189 bp, Stenotrophomonas maltophilia
atggttcttgacgatggcgcaacatgggaggctgttcccgaccctatggggcttgggcgtggctggacggccatccgccagggcgaagacgagcgcgggccattcgaggaatggtgcggccagttcttcccctccgcgtcggcctgccgccaggccatcgaggaggggcgcgccgatgccaagcgttaa

SEQ ID NO: 532675 - DNA, 660 bp, Stenotrophomonas maltophilia
atgattattacagtaggaaacacaaagggcggcgtcggcaagacgacgctggccgttcagctcgccatcgcccgcgccttggcagggcgcgacgtgtggctgatcgacggcgaccgccagggcacggcagcggcggccatcgccgcacgggccgagggcgggcgtcagccggggattgcctgcgcgcaatacgcggacggcccggccctgcgcggccaggtgcagcagcagcggaacaagtggcaagacatcatcatcgacgccggcggccgcgactcgaccgcgctacgggcggcgctgatcttgtccgatgtgctgctggtgccgttcgcgccgcgttcctatgacgtgtgggcgctcgatgacatggccgcgctggtggatgaagcccggagcgtccgcgacggcctgcgcgccttcgccgtgatgaaccaggccgaccccggcgagcactcggccgacaacgccgacgcggctgcggccgtggccgaggttccgcagttcgagtacctggcagcccccatccggcgacgcaaggcgttcagcaatgccggcggcgctggcctggccgtgtccgagctggccccccgcgacccgaaggcgatagccgagattgatagtctcgtttcatcgctttttaatatccaacaaatcgcctaa

SEQ ID NO: 532676 - DNA, 270 bp, Stenotrophomonas maltophilia
atgtcaatacagcgcaaacccaagaccgccccggcaaccgccgcccaggatgctttcatccagggcgcacccgacgccagcaaggccgcgccggcggccgcctatgagaagggcatccccaagggccacaaacggcagatcaccttgaccattgcgcccgagcttctgcgcaaggtcgatgaagtcgccaagcgcaccggccaggcccgcgccgccgtcatcaacatggcgattttccgcgccttggaaggcgatattttccagagctaa

SEQ ID NO: 532677 - DNA, 204 bp, Stenotrophomonas maltophilia
atgagcatttgcgccgctttagcggctaaaaccagggcgaagaaggccgggcggatagcgcagaacctggcccaagcggcccgcgaaaacgcgcagctcggtttgccggcgccgtggcagctcaatggcatttggctggtgccgctcgaatccggccgcgtgaagcccatagggtcggcaccgtggcggcggccgaaggcttag

SEQ ID NO: 532678 - DNA, 1131 bp, Stenotrophomonas maltophilia
atgaacaaccaacgcgggaaagggccgcagcagatcggcgacctattgggcggttccctgggcgcttccttggagaagctgaaagccgggatcgatgcgaagcaacagaagcgcatcgaggccgccgcacggccgggcgagtccaaggagcaggtagccgctaggctgcgcgacgaggacgcccgcgccgaccgcgagcgcaacgccagcagccccgttaaatcgccccccccttcgccgtctatccgcaagccgccgaccggcgacgagcagcccgattttttcgtgccgtcgctctacgacgtgggcaccaaggattcccgcagcatcatggacgtggctgtgttccgcctgtccaaaaaggacaagcgcgccggcggggtcatccgctacgaactgtccgatggttacgtggaggtgaaggcaggcccggacggcatggcgtccgtttgggattacgacctggtgctgatgatggtttcgcacctgaccgaagccatgaaccgctaccgcgagggcaggggcgagaagccaggccgcacctaccggccccatgtgagtgacattctcaagttttgccgccgtggcgacggcggccgtcaggcggatgaagtggaaggggcgctagaccggctcaagggcacgaccatcaagaacgtgcgcgagcggccatccgccaacggccggcggcccatgcgcgaggtcgaggccgaaggcttggtaagcagttacaaggtgctgtcctatacagagaacggcaagattgcgtccgtcgagatcgaggccccgaagtggctttaccgtgaagtcacagaaggcaagcggccggacgtgctgaccgtgcatcccgactacttcctgattgacccaggcatcggtcggttcgtctatcgcctagctcgccgagcggctggcaagggtgaagcgaaatgggctttccagacgatctacgagcgcagcggcagcgcgggcacgttcaaggagtttcgccgcatcctgcgcaacatcatcgaggccaacgacctgcccgaatacgagctgcgagaggaagcagggcagggcggcccgctgctggtgatgatctaccgcgaccgcgccgacgaggcgctgccgccgccgtccggtgtgtaa

SEQ ID NO: 532679 - DNA, 897 bp, Stenotrophomonas maltophilia
atggccgtgaccaaagagcagattttttccgccgctgacgagctggccgccggcggccagaagcccacccttgaggccatccgccagcgcaccggcggcagctacaccaccatttccccggcgctgaacgaatggaaggcccggcaggccacggccgccgcgccgctgcgcgagcctgcgccccaggctgtcgccgaccgtctggccgaactgggcgcggacgtgtgggccgtggcgctcgacctggcaaacgcccgcctggccgtggagcgcgaggcgctggaaaaggcccgcgccgagctggaagccgaccgcaacgaggcaaccgagctggccgacaagctggcgagcgacgtggaagctctgcaatcccgcctggcgtccatcgaggccgccgaagcggccgcacgcggcgaagccgacgagctgcgggccagcctgaccgctgcccaggaacaggcgcacaccgccgaggcccgcgcccaggagatcgagcgccgcgccggcgagctgcgcacggaactggacagggcgcaccaggacgccgaccaggcgcgcggggctctggccgagcagcagaaggccagccaggccgccgccgctcaactcgaccaggtgcgcggcgagctggtgaaggcgcaggccaaggccgaggccgaccaggaagcgcaccaggagcagcgcaagaccgcagcggccgaggcgcaccgcatggccgaacgcctcaccgccgcccagggcgaacgcgaccaggcgcggcaggatgccagcgccgcccgcgaggaagccgcccgcctggccgggcagctcacggcgcaccaggaacagaacgccgcgctgctggcccgcatccagccggcggccgaccaggacaagccggccaaggggcgcaagtga

SEQ ID NO: 532680 - DNA, 465 bp, Stenotrophomonas maltophilia
atgcgggcagggctggccgcgttcgcggtcatcctggcggcgacggccgcccaggccggcgagctgcgcggccgggtggtggccgtcgccgatggcgacacgctcaccattctggacgccggccgccagcagcgccgcatccggctggccgagatcgacgcgcccgacaagcggcaacccttcggccagcggtcgaagcaatcgctttccgatctttgctacggccgggatgccgtcatcgaggacggcgggcgcgaccgctacggccgcaccatcggccgcgtgagctgcgcgggcatcgacgccaacgccgagcaggtacggcgcggcatggcatgggttttcgaccgctacgcgaccgaccggagcctctacgcgatccaggacgaggcgagggcggcccggcgtggcctatggcgcgatccccagccggtgccgccgtgggaatacagggctaaaaaatag

SEQ ID NO: 532681 - DNA, 393 bp, Stenotrophomonas maltophilia
atgtgggttttcgtcgtcatcggttatctgctgctggtcggcctggccgcctggttcggcggcggcgcggtgatgacggtcgccgccggcggcttcgtcctggctgtggcgctctggttgctcgatggcctgctggccgatctgctgcgcgggccgctgcggtggctcgccaagcccttccgggcgctggcctcggccctgggcgtgctgatcgtgctgccgttcattcccggcatcttcctggggtcgttcctgctcgaactgttccgccggcggccgcgccaggcggaacccggccgccctgccccggccacgccgatgcaggccgccggccggcgcacggcggacgtgatcgacctggccgccgccaggcagcggcgcggcggccagtag

SEQ ID NO: 532682 - DNA, 2529 bp, Stenotrophomonas maltophilia
atgatggattttgaagctctagcagcgcgattgtgggccgccgttgtggcggtgtttttcggggcgttcgtcctgtctctggcgaacacggcgcacgcccgcgttttccctgaatgcaacccggctgccgaagccggaaagctctacggcgcggctgatgctgacgcctgggtgaagcgcatttgtgacgcgcaggaatcgacctaccggacgtgggaagcgaacctgcaaaagctcgacattgggcagcaggatttggcgatggcgacgaacgccggagactggaaagcctaccgcgccaagtgggccgaattgctgcccgttttgaaggaaatggaagcggccgcgctggcgagccggaacgccgttggcgcggcgaacatccttagcctgtatcgcgccgacctcggccttttcttgcagaacgcgggcctgggaacggcggcgaacctggacgagttcagcgcccggatttccggcggtctggacggccaacgcccggcggcggcggctaccgccggcgtcaatgtggtgcagcagtccgtgacgcggggcgttgagttcgtgaaggggctggcggctgcggaaggcgacaaggttctagcggagtatcgcggccaggttgagcagaaggccgcgacgcgccgggagcagctttccggaagcacggcaagcggctatttcggcggcttcgcccggcgcatcattgaggtttggggcatcttcttcttcgtccttttcgtgctgatgctcggcgcggtcgtggtggccgtgaagcgcaaacaaaacccgatcacgctggcgggcgcggccgccctcgcctacctgctgccggcgtcggcaatggtgctggcgttcgtgctggttccgttcctgccgtcctgggccatgatcgcggcaaccctggtcggcacctatgccatgtatgcgcagggcggccgcatctgcggcgcgctggcgtccaagctcggcgaaggctccaccctgggccatcggctgcgcgtcctgggggcctggttggacaacctgcgggccggattgcagggcgaaccgggcggcgctgccagcatcggcgcggccgccgttcaagccgcttccgcgcccggcgcgcagccggtcacgcatgggtcggccaggtggggcacggtcgcggaaatccgccaggccgggcacctggtcgcgcccggaaaacctgccggtttcgccctgggccgggtggccgatgcgtccgccggcctcgatcagcgtttccgctttaccggccacgtcgtgacggtcgccccgaccggctccggcaagggcattggcgcggtgatcccgaacctcctggactatcccggctcggccctggtgcttgacgtgaagggcgaaaacgcggccgtgacggctcgcgcccgccgggcgctcggccaggccgtgcatgtggtcgatccgttcgcggtcaatggcgacggcggcgcggccttcaacgtgcttgaccggatcgacgtgtggaacccggattgcgtgagtgaatcggccatcctggccgatgccttggtgatctccgaaagcaagggcgacggcgtgcatttcgatgagtccgccaagaacttcctgcaaggcttgatgctgcacgttgccggactggatgacgtggagcgccggaacctgggcgagctgcgccggctgctgacggccggggaagcggagtttttcgacctcttgggcatgatggccgctgacgaaacggccgccttcggcatcccggccagggcggccaatacgctcatgggcatggccgacaaagagcgtggttccgtgctttcgacggcccgccggaatacggcatttctcgatgacccgcgagtgtcggcggcgctgtcgcgctccggcttcgacctgtcggaaatcaaggccacggccatgacggtttacctggtcatgccggccaaccgcatcggcccgaatgcccgattcctgcgcctgttcatcagctcggtgattgccgccatcacgtccagcaacgtgcagcccgcgcaccgggtcgcgttcctgctcgatgagttcggccagctcggctacatgaagcagatcgaggacgccgtttcgctgctgcgcggctacggcctggccttctgggtgttcattcaagacttgtcgcagctcaagggtgcctatccgaagtggcaaaccttcctggcgaacagcgccaagtcgttctatggaacggacgactacgacacggccaaatacatcagcgacagcctgggcaaagccaccatcgagttcgagacagagaacagcggcaagaacagcggcaccggcatttccggcggcggcggctcgatgaacagcggcaagagcaagggcacaagccagcagttcgccgggcgtgagctgctgacgcctgacgaggtgatgcgcctcggcccggaaaagccgattgtgctggtcaagggcgaatatccgtacctgctcgaccggctgaactatctggctgatcccgagtatgccgggcggttcgacgcgaacccctaccatagctga

SEQ ID NO: 532683 - DNA, 222 bp, Stenotrophomonas maltophilia
atgaacgccaggagagaagatgcacgccgcaagattcagcttggcggcttggtcatcaagtccggcatggcggactatcctgcatccgtgatcttgggcgctttgaccctcgcggccggcgcgctcaaagggccgaacgctgacgccaccaaagcgcgctttgaggcggcgggcgacgcggctttttccgatgatggagaggacggcggcaaccgttcctag

SEQ ID NO: 532684 - DNA, 252 bp, Stenotrophomonas maltophilia
atggcacgaaagaccttatccgaacgcaaggccgacaagctggccgagctgaaccgcatcaaggcagaactggccgaactcgaaagcaaggccgctgaacgcatcggcaagattgccattgccgccggtctcggcgatctcgacattgacgacgcagccatgcggaaggagtttgaggctatcgcctcgaaatttcgcaagggcgaagccaagcaagctgccccggctccggcagcgcctggcgcgaactga

SEQ ID NO: 532685 - DNA, 3264 bp, Stenotrophomonas maltophilia
atggcgatctaccacctgaacacgcacacgataggacgggcggccgggcatagcgccgtggccgccgccgcctatcgttccgcgtcgtctctggtagatgagcgcaccggggaagcgttcgacttcacccggaagggcggcgtcctgtcggccgagatcgtcacgcccgcaggcgtgccggttcccgagcgcgccgccttgtggaatgccgccgaagccgccgagaagcgcaaggatgcacgagtggcccgcgagtggcgggcggccttgccgcacgagctgaacgaagccgaccggcgcgagctggcaacgcgcatggggcaggccatcgccgaccgctacggcgtggccgtggatgtctgcatccacgccccggacagggaaggcgatgaccggaattttcacgttcacatgctggcgaccacgcgcaccattggcgcggatggaacgctaggcgctaaggccgtcatcgagctggcgaacaaggacaggcagaaggcgggcattccaggcaccagccagggcgacattaccgacattcgccgcgagtgggccgagctggcaaacgaggcattggagcgggccggaatcagcgcccgtatcgaccaccgcagctatgcggatcaaggcgtggagctgacgccaaccaagcacatcggcagcgacgccgtggcgatggagcggcgcgggctggacgccgaccgcatcgacattcacaacgccgaccggcaggagcaggcgcggcagatcgccgagcggccggagatcatcctagaaaagatcacggcgacgcaggccgtattcacgcgccgcgacattgccgccgagctgaaccgctacattgacgacgccgggcagttccagggtttgcttgccaagctggaaaactcgccgctgctggtggagatggaaccggcgaacggccgcgacccggcgaagttctccacccgcgaaatgatcgacaccgagcgcggcatggtggagagcgccgagcgcctagcccgcgccgggcggcatggcgtttccggcccgatcacgaacgccgcgattgacggcgctggcaccctgtcggccgagcagcaaaacgccgtccggcacgtcctcaatccgggcagcctggccgttgtcatcggcgacgcaggcacgggcaaatcgttctccatgaagatcgcccgcgaggcgtggcaggcccagggcttcaacgtgcgcggcgctgccctggctggcaaggcggccgacgaattgcaggcgggcagcggcatcgaaagccgcacgctcgccagccttgaatttgcgtggaagaacggaaaggacaagctcacttcccgcgatgttctcgtgatcgacgaggccggcatgatcggcagccgccagcttggccgcgtgctgaaagccgccgaacaggccggggcaaaagtcgtcctgctgggcgatgacaagcagcttgccgccatcgaggcgggcgcggctttccggggcgtggtgcagcacgttggcgcggcggaaatcaccgaggttcgacgccagaaagaggcatgggcgcgggcggccgggcaggaactggcgcgcggttccgtggccgatggcctggcggcctatgccgagcgcggccacgtccaaatccacggcagccgcgaggccgcacgcgacgccttggcggcgtcctacgtcggcgacaagggcaagggaagccagatcatccttgcccattccaatgcggacgttcaggcgcttaaccaggccgtgcgcgatgcccggaaggagcgcggcgagctggccggttccgcccggttcgtgaccgagcgcggcggccgcgagttcgccgccggcgaccgcatcgtgttcctcaaaaacgaccgcgatctaggcgtgaagaacggcacccttggcaccgtcgagcgggccgaggatggcagcctggccgtgcggctggacagcggcgaagcgcgccaggtgcaggcgtcccaatatgcggccgtcgatcacggctatgcagtcacgattcacaaggcccagggcgtgaccgttgatcgcgcctacctgctggctacccccggcatggataggagtctggcctatgtcggcatgacccggcaccgcgaggccgcgaccctgtttgccggggccgacgacttcaccgaccggcgggccgggcggctggtcgatcacggcgcagcgccctacgagaacaagccggagaaccggccgagctactttgccaccttggagaacgacaagggcgagcggcacaccatttggggcgtcgatcttgagcgcgccattgccgtcagcggcgcgcagcgcggcgacagcatcggcttggagcatggcggttcgcaaaccgtgcgcctgccggatggcaccacggccgagcgcaacacctggcacgttcgcggcgcggccgagctggccgccgggaagctggcccaggtgctgggccgcgagcggccgaaggaaagcacgctggactttgccgaccggcgcggtttcgacggcgagaacgtcatgcgccgctggctcgaacgcggccgggcgaaggtggccgagctggccgggaagatgcagcgcgccatgcgccgcagcctggagcgccacggccgccccgacctcatgcccgcgaccgacattgccggcacgccggccgtgcagcggccgcagcagatcgagcagccggcagcgccgcagcggccccaggccgagcgcccggccgccgacccgctggccgggttccgcgccggcgtcgagcgcgccgaggcggccggcggtggcctggcgctggacgtggcgaaggcacagcttgccgtcgcccaggagttccaggcggctgggaaagacccccggcaccattcggccgcgatcatgcaggaagggcagcagcgggcctttgcgggcctggcgcagcagtcccaggccaaggccgagccggagcgcccggcggccgtccaggtcagcgagcaagaccgcaagcgggccgagatgtacgccaagcgagaggccgaccagttcaaggcgctggccgtgaagcggcaggcgggctttgcgggctacaccgaccgcaacccgagtgcctggcgcgagctgccggccgagctgcgcgagcgcatcgagcggttcaacgccatgccgaaggagcgccaggccgtcgagctggacaagatgcagcgcgagcttgccgacaggtatgcacgcgacccgaaggagatcgagcgcagccggcagcggcagcgcgagcaggaacgcggcaacggcggtttgagccggtga

SEQ ID NO: 532686 - DNA, 576 bp, Stenotrophomonas maltophilia
atgctcgggtgctcagtgcaaagcgagggcgagccagtgcttccttcgccatttggaaactatagccgcagaggcaacctgttcggcgtcgaaacgggcacacacgtcattgatgtatgcaacttcgcctatgcgcgcatctggtccgtatcgccgccggtcccagtgcttagccatttccttggagacgtccaagattcgaccgagaacagggaggaaatccgcctcagtaagtggttcctcgatgagggctgtgcaccctcgatgcagggagtcgaattcggtcatgggcggctccgggatcgcgctccccggtgtcatcgccagctggaaggcatttcgcaggcttttcaggccctcgacgcgagctgcgactgctcgcacccgctcgaagtcttcaaggcgcttcatccgtactgggatgtaaagcgcaagcacgatgccgacaactgcggcgactacctgaatccatgttgcccacgtttgttgatccattgtcccgagcttccctatgggtcgccaaagatgatcgctggtggctcggccgccggcaagctcgggcggtgctgcccatga

SEQ ID NO: 532687 - DNA, 225 bp, Stenotrophomonas maltophilia
atggtcgattgggtgggtgttgcaccacgaccgtaccgggggcaggggaggcgtcaacggacggccctcctgacggggaaggggatcaccacgctgggcgcaccgggcggcttcggaaccggcttccgcgtcggcctggcctcgaccgtatccccgacccgcttcaccacaaacagctttccgcacatgggcgtgagcgtcagtacgtcggccaaggccggctga

SEQ ID NO: 532688 - DNA, 432 bp, Stenotrophomonas maltophilia
atgaagacctgcgctcttgcactggccctggttacagcgttcccattctccgcaaatgcactgtctgtcgaaaactaccggaaggtgaaagctcagtctgagtcgtcagatgagatggagtccaaggttgcacgccttattctcaccgggtacttccaaggggttgaggaggttttgttcggccagcgcagttattctgatgatccaatcaaggtgacgggcgatctgcatgcctgcgtcccctcctccgtgacaatcgatgcagctcttcttcgtaccgccctagatcaagagattggacggcacgcgaagatctatgcggatgtacccgactgggaacaaacctacgcagcgaatttcgcaatgcttggaatcgcgcgcatgttcccatgcgaccagggcaaacgcccgagctggcaaaagcaatcatga

SEQ ID NO: 532689 - DNA, 243 bp, Stenotrophomonas maltophilia
atgctgcccaacgactacaagcgttcaaaacgtcgtgagtatctggcctacgtttacttttttgcggcagccattggctttggcgtgatggcctacagcggtgttaaagccgcgctctggtgggcaccggataattacaaatctgtcagagacgcagctgccgcaggggttgcgctttggctctcgttccacctccccctgatcttgatgggtcacgctggctgcaaggctagagagccctga

SEQ ID NO: 532690 - DNA, 684 bp, Stenotrophomonas maltophilia
atggctgatgtttctacttctattgtgtcgcggcgagatgccgcaattgcagccgcagcggcatttggatttggcgcaatcatcactgctgtagcgctggcaggaagcgatattccgctgaagtgcattgatggtggaaatgccgcagactggcttgccgccatcggcacttgggtagcagccggcggagctttggcggttggatatggcgcaaaccgtttcgcgcgtgaatcgcatgatcaacgcatttcgcaggagcttagcgatcgcaaggctgcccgtgttgagcgagcgcggcgcatcgagttgatacgccttcgacttaagagggcgatgagtctcccgatagcgtttcgtgcgctggagtcggccgggaagtatgaagacctggatgtctcggacattcactccatcttccgggtgctgaagcgagcaatcccggggattttctggccacctgaagaattggttcttctgagtccagagcatcaggatcgcttggctgtgatcgaaacgcttcttgtagccttggacgaaatcgtggatatgggcctgtctggagaggaatccgataacgccagactggttaagtccgccattgaaaccgcctttagggcagtgggtgacatcgctaagaaggccgaccgccttaggacggagcttggcgaagagtcttccgagtga

SEQ ID NO: 532691 - DNA, 228 bp, Stenotrophomonas maltophilia
atgacagagccctatttcgcacttctcctgatgggagtcgtcgcgaccctctccataggcttcgcacgcatcgtttcgtggttgctcgacaggcgtgattacaccgcctcccagcaatcccgcgaagcccaggtgatcgccctcgcacaggctgagattgccgccaccaagcgcggcgatttgctggccgcagccgccttttccgaagagcaggagcgcgccgcatga

SEQ ID NO: 532692 - DNA, 177 bp, Stenotrophomonas maltophilia
atgagcaggtatccctcattcgccgaactggcggagttcgatatgggtcttgcggcgtgcgccgcgctcatcgtcgtttggctgggagcggcgttgctctccatcgtgatcgagcaggcatggttggggcttcgtcgcctgtggaatctccggcaggatcgctccaatggccggtga

SEQ ID NO: 532693 - DNA, 954 bp, Stenotrophomonas maltophilia
gtgattaagataccaccgctaaaatccacagagaaggagcggcactacaaggctctcaaatctagattcgacgagaaaattctcaaatctaccaaagggctaaaggaaaaagattatgaatcgaagctaattgaaaaaatcaaagaatcaattcagacaattcttatcggagatcatatagaaatagcaaactttgcaaggaatacagtaactaatttccccgagttctcagcatacgccgcactcaaaagaaagcccaatgacaaaaaccatatcaagcataagaacacgctgaatataattaacgagtgtttcgactacgaatggttttcgacccaggtcgattggggagcgtacgcactggttcaggcgtacaacctaagaacgtgcccatactgtcaggcgaatcatgtaaatctgcatattgagaagaatcgtcctcgcaaaggctcacccagttttaagttacgaccaccactggatcactatctaccaaggtcgttgtatccatatctttcagtatccgtcagcaacctaataccttgctgtactcaatgcaattccggagtaaagacagcggatgaccccctcgacaaagggattccgcatccactagattcgacgaaattactagtgaaattctccattcagggaacaattcgaaaaagcattaacggaccaattgaatccagcgacatcgtgctctccttaactggcttggatcaaccctcttccaatcacctaaacgcattccgattgcaagatcgatacaaatggtatcgccacgaaatcaaggacttaattgatagaaacgatagccacaaggagcttgatagaaacattcgctccatcgtttgccgagagagatttgtgctcggatttctggaaagaagcgcggaagagcgctccttaggattgtgccttcgcgacatatttagagagctcgactcttaa

SEQ ID NO: 532694 - DNA, 1611 bp, Stenotrophomonas maltophilia
atggctcctcctataatcttggcactggctttcaaacgaaggcaaggaaaggcaccagcagtcctttcacttacagacgactatgaattcactgtagatggcagcaaccataaatccagttcaacaacggcaattaaagttcgcaaaatccctcacatacatagccgcacatccgatttaccagtagattcgatcactgtagtttatggagagaacggagaaggcaagactgcactccttctggatgcgtgccaatcagtagttaagaaattttacgaccaaagacagctttcaataatctggagagatgaatccggagtaatccaccttgatgacgagggcgtgcgaaaagcctttcgacttgaaggtccggaaacttcacagaagaagaagcaatttagccataaatttggggcaattttttatacaacatctccatttgaatcgaaccggcgcctacgccttcagtcgagcggaaccatagactcaaccccaaaatctggcacggcatcttacagtggtgcagccttgtgcctagcggctgggtcgttgccaaaaaacattcctttcattcgtcgcgcgaaaattggtattgacattgaaacctcagttgatatacagactgaaatagaaagtgtcagtacattcttgtcgtccaaccacccgaaaggaagaaggtcaagtaaattctcaagtctgggaatggcgctggatagacttagaaaagatgccttcgaattgagtcctcgatccaggacattactagcaattgaactccgacgcgccaggctggatggcgcaaaggccttggatatgctcctttacgagctttctgatcgaaaagaaaagcccatggccgacaatcgctcgatcagccgcttccttcgctaccatgcaagcgcctacgagaaacgcccaacagcaaatcaaatcctcagcatactaatcaagcttaggcgatcaatttccgccactgcgccaaagggattgtcggagtacgcacgcacgcttcgttctgtatcacccaacatttctccaatacttcaggaagcagagcgactggggctgatcaactggaaattcattgagcttagcagcggccaagttgcgcttctactcttatttgcctcattgagcagcgcacttaacaattttgcagataggaatatccgctcagctctgatagcgattgatgagggggagatgtttatgcaccctagttggcagcgccagtatctccgtgacattcttaacttcatttcaagatatcgtagagacttcgatcatattcatcttattctggcaacgcattccttgatcgttgcgggcgacacgcctccaaatagattatttgatgtcaaatccggaagtatgcagaacgggtttgcccttggccccaaggagcttctcgacagggtctatggagtaaaagacttttcaggcagcatggctgaaaatctatacaagataataaccaatttcctcagccaacctcgatccaacgactccgcagaagccgagatagaaataagaagcttgatcgaccagatcgcctcacgggagctaagggaataccttctcacagaactacatatgaggactgcaagatag

SEQ ID NO: 532695 - DNA, 1176 bp, Stenotrophomonas maltophilia
gtgtcatcaaatgatcaagaccattcgtacaagttgctgggcaagcggatggcgtgggctcttggatatgtgccactgctcaacgtccccgtctccctgccagccaacacccgatggcgcgcagctacagatctgacggacgcggacgtgtatggctttcgcttcagccccagtggcggtgtctcgcggctgctgattgattgcaaaaccacctcaggcagggctgttgatcgggtgttgtgggtcagaggcctgcaagacgtcctacatctcgacgaactctatctgttcaagaagaagctcccagagaatgcgcgctggctggctcacgaactcaaggtcaactgtcttgatgagagccaactgcacgagcttgacagtcgtcttggactaaaccgtctcaaaggtccctattttgatggctgcgggtacgaagggatcgaagcattgctgaccttcccaaagggaagcgaatatcgcacccttctgcagttcctgcgcacgacactgtggacacttcaaccggcgcatcgggtgctgaccttgctcaatcttggaagacagaatggcttgcatagaaagctgcgcgcggacaatagggcgcacgtgtgtctcgtcctgttcgcaacgcgcgccttggctatcagcctaggcctgctgatcagcgagttgaatgttgtagatgtgctgaacgtcgaagcgcgtctacgcgaggagctccatggaggtcccgagtctctggcgcagaaggtcagatttgccgatgccatccgtcgcttgacgggggaagccgattcgcagctagccatcgatcatgaggattttccgctattgcttgaagaagtgaatcgcttattgatcaggcgctatgctctgaatgatgcggtgcgcatcacagatctggcattgcactactttgcggcaggtgcaggcgctctgccacgccacctgggcggtaatgattcaaacctctcggcgaagatggcctctgacattcttgcactctttgtaaagagtaactcccttgatcctagcttttcgcttgcgatcatcggcctgttcgccggcgctaccgagaccagctccgatgagagcggacaccgccgccaagatgaacaaggcaacatcgagcaattttcgctgctttccccgctgccgccactggaggaaccctag

SEQ ID NO: 532696 - DNA, 1299 bp, Stenotrophomonas maltophilia
atggatcgtgaagctataggaaggcgagcccaggacgtgcagtccggtctgcgtgacgtttcggatttccgcgtatccgcgacgataccgatcacgcgccagatcggcatggcagcacaactggctgtccatattcggggacttgaaactattgagaatatcgtaggattccacggattttgtagaaacttgggtatctcctcagattcgctgcccacggtgctgggtacactcgagcaaattggttggatccgcgtagtgcctaatgcttacgcccccaagcgtattgaagagaccatcccctacttccaagaagtctacggagcgcttggcgagcaatggtccgcgcgcaggccaggcgaacttgagcaggcgaccatggccatcatcgaccggcttactgtggcccccgtgccgcttgaaacgctagtctccgaactcggattgaagactgcagacattcaaacggtggtggacatcggtgatctggggggctacctgcgtcagtacgactcgccaaaggaccgcgtcccgattctctacgcgccgttgttctctgacgagaatcccgagactctgctgaacttcattgccagcaaccccggcacccatacagagatcgaagcagtgtttcgcgcggccaagtcacatcctggcgccccgatcagtatgctggagcagagcacgccactggtcgtcgagttggtcaatgaaaacatactgcgtgcgcccgccatcatctcttccggcgggactcagtcatttgcatttgctccttttaagacaacccagccccgtgccatcgtcgagaaggctcgcataattttggcatgtgtacgttatggcgagggctactcttcgattaccaaaattgccgatcccagtgccattctgaaagggctcagggaccgcaagatgattgggcgcacaccgcattccaatatccattcccaatatgcggctgcggcgaacatgggcgtgggctggatcgaaccggacggcgggcgtttccgcttccgcctttacgacaccgaggacaacctcgcggcggtggatctggcgattgccatgtgctccggacaaagcgaagacgctgcttcgtccctgctattgcccgaagaggtcaaaggctatttcactagaagcgagcctggcggtttgctcctgccagaagcaaaccgcaagcacgcacgcgacctcatcgccgcgcgcacgctggacccgaacacgcgcaccgccgcccgtttgggccgtgccttactggacgacctgcgagggattcaccgtgtcatcaaatga

SEQ ID NO: 532697 - DNA, 627 bp, Stenotrophomonas maltophilia
atgagtttcccggccggtatccaagggtgtatgaaggattgcatccagtccttgttctggcctcgcaaggacatcctcggcttctttgaaaagcatggttgtacgaaagcagaactggctagcgtgtcgatcgatggcgaagacgcgatcaagcggcatgagatcatcgacacgatgttcgcggcgttgaaccagcgcgcagacagcggcatagggccctttcgagcaatgcttcaatcgctattaaactggtctcatttcgacacctactacttcgacagactccgcaagcttgatcggagcaccgcctaccgaaatttggagcacttgcgccaactacaggaaattcgcgacgctaggatcaggcagcagcgcgaactccgggcagcacaagaggcacagcgtcagcgtcccaccgcctcgctacatcagctgcgtacgaagtaccttggcctgcttgccaataccacgtcacggcggcaacgcggatacgccttggaagggattctgtcggagctgtcgcgcctgtccgggttgaacgcaacagaagcctttcgggtgaacggggagcagattgatggtgtcgttaagttcgatggtgagcactacctcatcgaagccaagtga

SEQ ID NO: 532698 - DNA, 519 bp, Stenotrophomonas maltophilia
atggcaaccaagaaagctgcgaagaaaaagcccgccgccaagaaggcggtgaagaaggtcgcgaagaaggccgctgccaagaaggcagtaaagaaggtcgcgaagaaggcgaccgccaagaaggcagtgaagaaggctgcgaagaaggtcgccaagaaggccactgcgaagaaggcagtgaagaaggcggcgaagaaggtagccaagaagtctcctgccaagaagaccgcgaagaaggccgtcaagaaggtagccaagaaggccaccaagaagactgccaagaaggcaacggcccgcaagccggccaagaaggtcgcgaagaaggcgactgccaagaaggccgtcaagaagaccgccaagaaggcagtgaagaagaccgcgaagaaggccaccaagaaggccaccaagaaggctgccccgaagaaggcagcgaagaaggttgccaagcgcaagccggccgcccgcaagaagaaggccgctccggtcgctctgccggcaaccccggcgccgctgatctaa

SEQ ID NO: 532699 - DNA, 483 bp, Stenotrophomonas maltophilia
atgctgggcgcgcgcgaggatgtgatcgtggtgggcgccggtgccatcggtctggccgccgcgctcgcactgcgtgcgcaggggcggcaggtgcgtgtgatcgatcgtggccgcattggtgcggcaacctcgcacggcaactgcggcaccgtcactcccagccatgcacctccactggctgcgcctggcgtaccactgcgcgcattgcgctggatgctcgatccgcgtgcgccgctgtatgtgcgcacccgcctggatccggtgctatggcgctggttgctgcagttcggtgcgcgctgcaacgcgcgtgactggctgcaatccacgcgggcacggggtgcattgctgaacgactcgcggctgcgcctggccgattgggtgcgggcgcatgcactggagtgcgagttcgatagcgcgggctggactatgtgttcggcgatgcgcgcaacttcgaccactacgcggccgagtgcgaagcactga

SEQ ID NO: 532700 - DNA, 291 bp, Stenotrophomonas maltophilia
gtgttcggcgatgcgcgcaacttcgaccactacgcggccgagtgcgaagcactgaacaggcagggtatcgccacggcctgcatcgacggggccggctacgcacgtgccaatccggccttccacgaccgtctggccggcgcgatccactttcccggtgatgcgcagctgcggccggaccgctacaccgcggagctggcacgtgtactgcgcgcgcagggcgtggtgatcgacgagcagaaggacgtgcaggacttcagcgacgatgcacagggggcgcgtgcaggtcggtga

SEQ ID NO: 532701 - DNA, 1620 bp, Stenotrophomonas maltophilia
atgaacgaagaatccaaagaggcatcagacgcgacaaccagcgacagtcctgggagacagccgccccgacttgctccgccgaagggagtagatcctaccgaggttgccgccggcccgatcttcgatctcaccacggcagaaggtgagaccgagtcggaacgttttctcgcgcgcctttgcaggcactcctttctgagcctgtggtcctatccaaatacatttactaacgaaggcgttcgcgaggatggtgcctcgagtgggaacgagttcgctgacgttctcgtggtttttggagatgacgtcattctgttttcggacaagcacgttcgcttcagcgagggcgttgcactcgatgttgcctggccgcgttggttcaagagcgcgataacgaagtcggtgcggcagctctatggcgcgatgaactgggccaagcgctttcctggccgcgtctatcaggatgcagcctgtaagaagcctttgccggtcccgcttcctccgccagatcgtgcgcgtttccatcttgtcgcaacgacgcgtggatcgtttgtcccttgttcaaagcattttaaagggagtcttggcacacatcagatcaatacggggattgtcggaaaagatcatcaccagcatccctttaccattggcgtagttgagccgcgcaaacagtttgtgcacgtctttgacgaattctctctcgaggcggccctgcgcgagcgcgatacggctgctgacttcatcgcttatctgaaggcgcgagaggaactgcttacatcgggaccagttgtcatcgccgctggggaagagcagctacttgccgcatacatggcgaacatgagagacggtgagcactggttcttgccgccacaagatgggaagtcacttcccgacattctttggttcgacgaatctcactggacaggcctccacgaacgacccgagtacaaagcaaagaagattgccgatagaacaagctatctctgggaccgattggttgatcggttcatcaaggaaggcaacccaggaatcatgggtgccaccacgagcaaccaggatctagaggtcgcacttcgcatcatcgcgtctaagagtcggttcgagaggaggtttctttcggatgtcttgttagctgcattcgagatggccaagtcacggccagatgccaggcggacgagactgttctccacgttgcagcagccagaggtggcgtacgccttccttattgatccgctgctgcctggagaagactatgccgagtaccgcaggcggcgcgcttcgttccttcagatttatttgcaatgcgcaaagctgcgcatgcctgaggcaacgacattcattggtatggcgttcgatcatccggtgaaggattacgctggctattccgaggacctagcggtttaccgtttgaccgaagatgcggaggtcgatttggtggaattgcggcggttggccgatgatgtgggcatactcgcggagaatcttcctttacagcacagctggactcaagacttccctcatcaacgtccggaatcaccagcggcgcccattccacgaccgcggaagaaggcgaagggccgcaataaaatggcgcaggcttctaggcgcaagaatcgtcgaaagtga

SEQ ID NO: 532702 - DNA, 4035 bp, Stenotrophomonas maltophilia
atgttctccatgaagaagctcagcgatcgccgtctcgccgtactggcctttatccaggaacgcgtggcccgacaggggcagccgccgaccctcgctgagatcgcggaggcctgtgggcttgcctcgcgcagcgccgcccggaagcatgtcgtcgcgctggaggaggccgggctgatcgaagtcgcacccggccaggcgcgtggtgcacggccgacgcgtaccaggacccgcaccgacctaattcgggagagcagcttgttcgagatcaccccccgtgatgtcgccgaactggatgacagcgcgctgcgcgaactcctcgccagactgtgcgacgcaagcctggcggcgagcagccacccgtcgcagcacgtgacctggggtggcgatcagcgcgcttcagatggcggtgtggacgtgcgactggatgcgtcgcaggcagtcgccgacgaagccggcttcccccggcccgtaatcggctaccaagtgaagaaaatgcggatgccccggtccgagatccaggccgagatgtgtccgggcggcgtattgcgtccgtcgattcgcaacatcatccagaccggtggcgcgtacatcatcgtcagctcggaaagcacctccgatagcagctatcaggaacgcaagaaggccatgcaggaggctgtggccggggtggagggcgcggacgccgcgttcgtcgacttctacgacgcacggcggatcgccgactggaccaaccggcaccccggggtcgtcacgtgggtccgggagcgtctcggcaaaccgctgcagggatggcgcccccatgggcagtgggtagtcaatcggggaggcaaggcccatcccttcgtcgacgacgaatccccgcgtctggtcgaccccgctgatcgcgaacagcaccggtactcgcttcaggagggaatccagtatgtgcgcacgctgctgcgcaagggaggcgcgtctgtccgcatcgcgggtttgtccggggtcgggaagacccgcttcgcccaggctttgttcgaaggggaggctgtggagaacgccattgatccgtcactggcggtgtattgcgacgtttccgacgagccgatgccggtgccgcaggtgctcctggacgagctggtcgccgccgggcgccgagttgtgctcgtggtcgacaactgttcgtccgagctgcacgcgaagctggcggcgaagtgcaagggctccaataccgtcagcctgctgaccattgaatacgacatccgcgaggatacgccgaacgagacgagcgtcttcaggttggagccggcgtcatcggagctgatcaccgaggtgatcaagcagcagtacccgcatatctcgcaggtcgacgctgcaacgatcactcgcttctcggaaggcaattccagggtcgctatcgccttggccgaaacggtggggaagcatgagtcgctgggcaggctgaacgacgacgcgctcttcaaccggctgttctggcagaaacacgacaaaaacgactcgctgcttcgcgcagcacgagcctgtgcgctggtgtactcgttcgatggcgagaacgaggcgaacgagctcccccgcttggccgcactggccaacatgggggttctcgcgctccacggcgaagttgccacgctgctccaacgcggcttggcgcagaagcgtggtccctggcgcgcagtgctgccgcatgccatcgcgaaccgccttgcgaagctggcactttcggcgattccctacagcttcatcgccccccagctggtggagggcagaggacggttgctacgctcgttctcgcgtcggctgggctacttgcacgacagcgaagaggccgtcgccatcgtccgcggatggttggcgaaagaaggactcctcggtgacgtcgccgggctcaacgaaccactggttgaggtgcttcgcaacgtggcgccggtggatcgcaaggcgacgcttgaatcgatcgagcgggcggcaaacggcaatgatgccgaacagttcctgtccgtggacaacccggccagaagcaccatcacgcacctgctccggtccattgcctacgaagccgagcatttcgaccggtgcttggcggtgctcgtgctgttcgtgctggccgagccagccgggaaccggatggaccgtaccgacgagctcatcaagtcgatgttcaccatctacctgtccggcacgcacgccacccgggaccagcgcgcatcatggattcgtgcgcacctggagtcggcagacgagcgcgtgcaggggctggcgatccggtgcctggattccgccttggagacgaaccatttctcctcgcactacagtttcgacttcggggcgtggtcgcggaactatggatacacgcccaagcgagggccggaggcgttggcgtggttcgagtctttcatcgcgcttgcggtggagttcggtatgcgcgagtcggcgctgggcgcgagggtccgaaacatgctggcgagcaacttccggccactatggaccaatgtccgccggtacgaccagttggagcatgccgtcgcgaggctgatgccactcggctgggaaaaggggtggttggccattcgccagacgatgcggttcgacaaggacgagaagaatccggagggcgcgcgtcgcctggcggctcttgagcaacaaatccgcccaacgacccttgtcgcacagaccaaggcggtagtgttgacctcgttctcggccggactggatatcaccgacggggacgaatacgacggcctgaaaccctatgagcgtgccgagcgctacgcggaggatcttgggcgggcggtggcgacggacgccgaatcgctggaggtactgcttccgatgctggtcgagaacaagcaggcgcgccagtcgagattcgggtacgggctcgcgaaggggtcgaaccagccggagcaactttggcgtgcactcgtgtccgccttcgaatcgacgggtgctgatgtccgcggtgtgcaggtgctgcttggattcctgggtggcctccacgaggtcgacaggccgctattcgaacgacttctggatgaagcactggatggcccgacgctttccgagtgggtgcccgtcctgcagacctgtgcaccactggacgagcgcggcagcgaaaggctcatgcgctcgctcgagcgcggtgccgcacctgccgacaagtaccagtacctcgcctacggacgtgtcacggagggactggcggatccggatatggcgcgcctgatccgtggcatcgccgacaaggatgatggcctgctgttcgcgctggacgtggtggcgatgcatctgcacggcaagccgcaggcgggcccggaaattgctgccgccgtccgtgagctcgtgcctaaggtgccgctgaccgtacggcggaaccaccagctcgacttctccctcaagtcgctggtggagaagtgcatggcgggccctgacggggagccggcagctaggacgctacttctgagcctccgtgcaggcatggcggaccatacgctgtcttcgtacgacttcgaagacgttattggcgcgctgttttcggttcatccggttgccgcacttgacgagctggtggatcccagtgaggacgagcctcgagggttcattcggacattgacgttcgaaggcctgcacggtgggcaacacccgcttgccaacgtccctttggaaacattgctggcatggtgccgtggtggtgattccgagcgttgggcgctactggcagattcgattccggcgttcgccgaggacgatgacaaacatgtggtttggaccgaagccgcgttggaactgatacggcactcgcccgagcagataaaggtgatccgggcgttggcccgccggattaagcccatgagctggagcggatcccgggctgccatcatgtccaagcggttgccgttgttcgatgcgctcgaggccttccttcaaggcgaggatctcgctgcgctcaggcagtatcgcgaggacttcgagcgccagattgagcgcgagcgtgcatgggaacagcaggaacgagatcctcgggataacagcttcgaatag

SEQ ID NO: 532703 - DNA, 213 bp, Stenotrophomonas maltophilia
atgggtagccgtccctctgcaaagagcatcgaccacctttccagctcccagaacgtaatctctggctcagaggccagagggccttcccctgatgaaagcttcgactgggaagtgtgcggccagatgatccaatgcgtactgttgcagcactgggagtttagagagctgttccatcacgaagccgactccagccatcagctgaccgtcttctga

SEQ ID NO: 532704 - DNA, 1218 bp, Stenotrophomonas maltophilia
atggccgcacgcaaaaagtacgcagcgacgaagggcgtctacgatcgaggaagcgcttggcaggtccgcatttcgggccaggatgcctccgggcacacccaccggatcaatcgaaccttcccctacaacgcgcaggcggacgccaaggccccggacagccgcgcggcgatcttgaagcaggccgccgcgttcgctacagcggaacgggcagccctgcacgtggagaagcagccggcggcggggcttctcaggaaccaaagcctcaatggctggatcgagcgctacattgatgaggtctgccccaccaagaaggcgggaaagggcgacgccgatgccctccgattgatgcagcagaggttccccaatctctgttccaggggggtggagtcgttgactcccaaggacttcgggatggagaagctggggttcgcgcgcgtgctttacgacgactacctgctttccgaagcgagcatagttcgtcaccagacgctcctgtcccacgtcatcacaacggcgatcaagaactggcacttcccgcttcgtgagaaccccattcgtaaggcgtcgcgcccgtccgtctccaatcagcgggagcgggtggtcactgaccaggagtgggcgagtcttcagcacgccatggaggccatgcatcccgcgacgcgggctgccatcgcgttccttcgttggacagggtgccggcgcggggaggcgatcaagcttcggtgggaagacatttccttggatggaacgccgcaggtggtcctgagggacaccaagacccccaagaagggcaaggtgaacagccgaaccattccgcttcaccccaacgcggtgagcgtgctggaacagctcctgcgcgaactgggggcgatggaagggaacagccccggcgagactgcctcggcaacgccatccttccctgctgcaggcgcggtcttctccaccgatagcggaaagaccgctattgcgggcgacagcctcacccaggcgtggtcccgtgcatgcacgaaggctgatattgagggggctacgctccacgacctgcggcacactcgcatcacagagcttgcgaacctattgccccttcacaaggtgatgcgaatctcggggcacaagaccccccagatgttgatgcgctattacaaccccaaggtggacgacctggcccgggatcttgcgcaggccgagcaggctagggcgcggggcgacggcgagtag

SEQ ID NO: 532705 - DNA, 693 bp, Stenotrophomonas maltophilia
atgaaccagaaggtgttccgagtgctggcaacaatggacagcgcaaccggtccgttgattcgggacgacggcaaacacgcgtcgatcagcatcgctcgtcttcttgagtgggctgagggcgtcccaaaggttcgccgctggcgggagtttcgccgcgacgaggatttgctaggggtaagggtagtcaagtcggcggaagctaccttcaaaatggtgaggggcgctcgaattgacctgaacctcatcggaggcaaggtgacgtctctcgacctctcccatttgagtcaagaagagctcgacggtctccgggagctcttgcggggtgggagcagcgcgatccagctggatgagcgcaatgtggccatgctcatgccgtcgacgttgcccaaagccttgagcatgccgtgggaggacgagtcgctgaagcagggatacgtcgatcgctactgccgactgctgggagaggcgcgtgaggaagcatctcagcgcttggcgctgctgtcagcgcagatcagcagcgcattggcggaagacggtgtcggcgaggggcaggaggctctggatgcactggtggccatgtggcgtgaagaagagcaagggttggtccacctccagtccgagattcgcagcgaattgttgaatctgacgttgccaccggcagttccgggaaagagggttcccttccgcttttga

SEQ ID NO: 532706 - DNA, 249 bp, Stenotrophomonas maltophilia
atgcatccgatcatcctctcgctcgatccctcgctccttgcccatttctcgaccttgaccattgattcccttgccgcgtcgctctctgacctgttgcccgacgcgttggtacagctgcagaacggcgccgggagcgtggatctttcaagcaatcacgacctgcgcggtttgcatccgggtcaagtcctgacgctgcaggtggcgaccctggaaagcttcttgggcgttgaccacgcacccggcgactga

SEQ ID NO: 532707 - DNA, 528 bp, Stenotrophomonas maltophilia
atgaagcagatgtttgtcgtttccatttccgctcacgtcgaggttacctactttgcgccgttgcggggagctgcgccgaccgacgtgctcgccaagatcttgggcgatgatccccgcgcagttgctaagcgcctcaagcgcaaggccgattacgcgatcggttccattgaacgttacgtgcacgcagccccgctgggcgagatccaggaggaaatgcctcatcacggcttcgaccgagcaggcgagctttcgatccctggttgcctcggcaacatgcccaactccgtcgttcttgagggcaacgccatggcgagcaagtactttaaattcagcgccccgtccattgaggacgcgttggaacagttcgatcgcatctccccgatcgatctcgatcgcgccccttggcggatttggggcgtcgaactctacgaggagatttgtgcgaatggacatccgaattgggtccctcaagtgactgctgaggatcttgaggagattgggtatgcgctggacgcaaccctccgctga

SEQ ID NO: 532708 - DNA, 360 bp, Stenotrophomonas maltophilia
atgaagaagaagcatcgccgtaaggcatccattggcaactccaatcaaatgcctgcaaggctgcggttccacacctatgaaccgacgaccgcagtcattaatgagctgacctcgtctcacaacgtagaaacgtggcaactgtatgcgcttatcaagcgaaccctctttgatctcatcggtgagcacggaatgccgatgctgggtgaaaagctgggaaacggaatcaatgtccgtcgtgaggatggactgcctgactgcttgatcgaactgacctacctcgcctacacccccgccaacgaagaccaaggagaggtattcgcctttcttgtcgaagcgaccgccccccaaacccaccactga

SEQ ID NO: 532709 - DNA, 645 bp, Stenotrophomonas maltophilia
atgaacgccatcaactgccgcagtacaggcgccgcgggccaattgcgaaagatcgactcaaagatcggctacgaccgcttgccgcagtccgacaccaccaccacctggctcacgcccccggagctgatttggggcagccccaaggacgagcacactggcttggggccgttcgatctggatccctgctgccctgaagggggcatgccttggccaacggccagcgtgatgctccgtccaagcgaggacggccttaagtccccttgggcgagcgatgcgctcgtcttcgtgaaccctccattcggtggtccagtccagaaggcatttatgtcaaagctggctaaccacccgggcggaggcattgcgctggtgttcgcccgtactgacacggcgtggtttcaggactacgtgctcaaccatccggccacgagtgccctggtctttcagcgcggcaggctgaagttctgcaggccggacggaacgccgggagatgcgccgccttgtggcccggtctttgtggcctacgggcccgaggcagcgctgcggctccggcgtgcggtcagggaggggcagatcccgggcgcttacttgaacatggcccacgtgggggcggtggtcgacgctggcaaagcttcaaacgacgtgtga

SEQ ID NO: 532710 - DNA, 249 bp, Stenotrophomonas maltophilia
atgcaaccgctcaccccgtctatccccgaagacgcgttccacgaagaggggattgccgctgcagatactgaaggccccgaaggtccggagttcgacccccaatacctgctggtccgatccgcgtttggcctgcacctcaagcttggcaaccccggcgacgaaggcctgcgcagcgaaaacgacatcgtggatttggtccgccgacttctggatacgcgcaaatcggtagacctgcatttcgagttttaa

SEQ ID NO: 532711 - DNA, 1029 bp, Stenotrophomonas maltophilia
atgttcaactacagcaagcacaccgaagaacgcacccagcaaatcagcgactactcgcgggagcacggccagctgatctggcgaaaggagtggaacgatcccaacgcaagacccgggcttttgaccggcgcctggaatccgaccacggggcgcagctaccgcggcatgaacacgatctcgctgctggccgagcggctcagcaagggctacgacgactcgcgttggatgacctataagcaggcactttcggtaggcggacaggtccgcaaaggggagcgttcaaccaccatcgtcttctgggacttctcacgagtgaagggcgacaacccccatccgcaggaaggcgagggctcggaggacgaacagaagttcaaccgtccgatcccccggcctggctttgtcttcaatgcggcccaggtcgacgggctaccgcccgcgccaaccctggtcatgccggagagcattcgaaacctccgcgtgcgtgaactgctggaaaagcacgcccccaagttgcaccacgacggcggcaatcgggcgttctacatgccggcgaccgacagcatccatctccccaagttccaggcgttcgagtcgccggaggcataccatgcaacgctcttgcacgagctgtcacattggactgggagccaacaacgcttggctcgggatttgaccggtaggttcgggagtgagagctacgcgcgagaggagttgatcgcggagttgagctctgtcctgatccaggatcgactcggggtttcacccggaagatcacattttgagaaccatgtcgcctacctccagcactgggaaagccttctgcaggacgacagcaaggcgctcttccgcgcggcagcacaggctgagaaggtggtcggattcttgggggtcccggaatacgaataccccatgctggccgtggttaacaaggaactggaagccgaagagccggctccggtcgccgaaaccctggtggttcgcagcacgggacgtgggaggaagaagcaaggcgagcgcgaggtggcttga

SEQ ID NO: 532712 - DNA, 579 bp, Stenotrophomonas maltophilia
atgcaagacgattccacccaagacatcagcgcacgcagagcccttggtctgaatctctccgaagaagagcgcgacctactgattcaagcggcaaaaaacgattggtcagtaagcgatctttacgacgagctccgccaggccgcttttgactggcattgggacggcgagacagatgaagaagagtggaaggaggacacttgggtagaaagcgccaaagactatgaagcgttcctggccgccgcgaatcagtatccactccactttgccgttgcatgcggcgacgctgagtgggccggtgacctgatccaggcgggacgcacgcctcaggatccggattcagagggaacaacgccgacagcgttcctagggcgccctggaaatgatcaatccgatcaggttatccggtcccacatccgagccaagctcctcgactccgtgctcccgccggccaacgcgtggaagccaccggaaggcgggtatgcggcccaagcccagcgggacttggcagcggcgatgaaaggcgagggaaatgcgcccgtccaagaagcctcccggcaacggcaacgatttaacccctga

SEQ ID NO: 532713 - DNA, 228 bp, Stenotrophomonas maltophilia
atgaagtggcacgcattttttcgtaagcgctccacttcctctttgactttcgaagacttcaagcaatgcgggattctagtcttggatggcatggactgctcacccgcgcaacctcttgagctgcaccgcccgccaatggcattgagtctgcagctcagccagtggagccatcctctcacctatcaggcgcgcccgctgaggaatggcgggggaggccgccgatggtga

SEQ ID NO: 532714 - DNA, 426 bp, Stenotrophomonas maltophilia
ttgctggaccaaggggcgactcagcgcgccctggcccaacgcctgggcgtcacccaccaagccgtgaaccgctttgtccggcggcacggcctggccggttctgggcggcaggcgttccgggcccgccagaccgaagagatcatcaaacgtcgtcagcgggtgcggcgcctggtccaagccggcctaacctcggccgaggtggccaagcgcttgggggtgtcggccgccaccatcggcctggaccgtcaggctcttcgtttggggcgcgtcctgaaagagccggagcagcgcaccttgtgggggctaggcctggaccaggttcggggtcgcttgaaggtggtcagccgggcccagttggcgcgggagctcggggtgagcagctccgccgtctatcgctactgcaggaatgcgggcctcagcacgtag

SEQ ID NO: 532715 - DNA, 1281 bp, Stenotrophomonas maltophilia
atggacgaccaagatctagaccgctacctgggtgcagcctacgttcttcttggacaggaaggacagctggaggctgcgtctctgctccgcacgagcaaaggcaaggttgtcttcgaaaactacgacaacctcaacggtggcacgaacttctacaagctgattctggaggtccctgcgggagcctttgcacctcttcgtccgaagcaaatggagcttcaacgagtcatagaaaatgccgttcaagcgtctatcccccctgaagcccaggactactattcggttcacttgacccctgtcttggagccgggcttcaactggcgtgaggagccgactgagggactctcaaggatcgttcgtcggaacatcctcgatggcctacgcatggagcaggtgaatgtgttcggtgtgttgccagacccggagtttcttagtcgaattttcgaactgcgccggctgccatccacggacagtaggttcaaagacgctgcaggcgacatctaccagcatcgcatcaacaacgatggctgggatcagtattgggtgtttgatgacgatcggtttgcgctgttggatggtccagcggatacgtttctccgctttctttgcgagatcgtgcatccggtggtccgtcctgatcgcgctgagaccgaaaagattgtccagcacttcaacgatcagttgcgtcgcgcgggctgggagctggtggaagaagagcgaatcgccggcaggccgcgatacgttcctcaacaactcaaccacggtggtcgtgaggcgatagagcaggcaaaggcagttgcggactttttggaggccggtgccatggctcgtcagatcgagcggatgcagaacgccattacggccgatccagaggtcgccattggagcggccaaggactttgttgagtcctgctgcaagactatcttgggccgccttggcgtcgatctcgggaaatcgagcgatatcaatgacctgaccaagcgggtggcaaaggagcttgagctcgtccccgaagacgtgagtgaccgcgccaagggggccgacaacatcaggcttatcttgaggaacctgacagcgatgaccaatcacttggcagagttgcgcggtaggtatggcacggggcatggcccccgcggcaatcatcggagtcttcagcctcgacatgcccgattggcggtaaatgcagcccttgcctacgtttggttcatcacggatacctatcaggcgagatctgccgttaagaatggcgctgggtcgaatgacaaccagaaggagcgtgaatga

SEQ ID NO: 532716 - DNA, 597 bp, Stenotrophomonas maltophilia
atgaaacgcatgctgattttgggtctccgttgcagccttctgattgggctgctctgcgctgggatgcctttaacagccagtcccaagtgcgaagccgatacgttcaccggaaagaaggggtgcgtctacggaacgggcacgattggcctggcaggcgtcgggaaccagatcatcaccgaagacggccagatgcatttgcagcggcatatgcacgcgtttggcgatccgattgacgtcgacgccgtgctcttccgcctcgatgatcgccgcacgcttcgtgtgcgcgccgtcaacaatactcgtccgcaggtcaactgctctggccgcctttgcacttggtcttggacgattctgatgccgctttctggtgatttgctgaaggatttggccggtgcgcagtccctcgtcatggcggtgcagggcaaagatggccgtcgtggggaggaggtgaccatgaagaagggcggcaagctcttcagggagttccttaaggacattcaggccaatgagcctgaaatgctggagtcctcgaccgcggaggcatttgttcttgtcggcactgagttccagccctatgcctcacgttccacgccatag

SEQ ID NO: 532717 - DNA, 843 bp, Stenotrophomonas maltophilia
atgccgccccgtgcgctccccacctcctctacgactggcggggagcaagcttcacccaagcgcctgccccaagtccgtggctcgcaccacgtgaagacacaaccacagctcactgccagataccttccctccgcgaccgccacgcgactcgcaggccagagctttacacttggaggacgctcgctttgccgcccccgccccctcttgcaagagcgtgccgtcggccatgtcgagcaacacgtgtgcagcggccaacgccttggaacgggcgatcacaggccgttgtgcacggggttaacctgccgccttcgcctttgccttcttggcaggttttcgaatcggctttgccttccctgccttcttggcgaccttccccaccctcgcagcccccttagccgcggccttctccaccttgccagcggcgggcgggaacttggccccagggttcgcctgcgcccacgccctgccttctgccgacttggcccatgccgtgaacgtcttgggtgccagccctcggcctgcccaggtctctcccgtcgggagtcgatacttgggggcgactttgccgagctttcggcccttcaacggcccagtagagggtttgcgggcttgcgccggcttgacgtcgatggcttcgccaatgagcttggcaacctggcgacgctgagcggggctgagaaccttcgcatacttttgaagcaccgcgatggcgttgggcacttcaccatcgcgtttctccaccaaccgcttttgggcttcgagttgtttgatttccgcgttgatcgactgaagggtagtcaaggccaaggcaaatactccgttgagggcaagcaagggttatag

SEQ ID NO: 532718 - DNA, 1089 bp, Stenotrophomonas maltophilia
atggatggtgacaacttgcccgggcgagttggtttgatagcgggtgaccgcgggtccggctgcacaagcattgctcgaagagagtttcttgcgtgccagaagccgatcctcttcttcgccaatgccctaggtgatcatttgcttacacggccaactgtcttggcgttggccgagctttttgaggggcgtctgggttacatgggggtttcgttctcggcagagcgattctatcctgacgcggattttaggtgtgtatgtccagttgctttttcttatggcgacggcggggcgcatgactttgaaatggcatcggtgttgtcttacgggaatagcttcgacgcgatcatttctttgaatccttggcaatctccgctgctggagagtgtccggcatgccatcgcgccaaagcctttcgtcacgctcggcggcgatagcggcgtgctcgcatgcaaccctcagccgaagaaggacatggccgcaaaaatttttgcaatggccaaatattttagggaagattttgaactgagttcgttcttgtcagtgcatcctgcgtccgcggaggcgcgagcatgcgctgactacatcttcagcgagcttccggaaggaaaaaaagttctctgtgtacatacttggacgcatgatctaaaaaggtggccgacacaacgctttaaggaagtcattgctgcgttcattttgcgttttcccgagtacgtagttcttgtcgttgaccctgccgacaccgagctggacgccggtctgccagttggcgcagttttcacttgtgatggcgttgatctcgacacggctactgatctggttgcccgcagtgatctcttcctgggcatagattcctatttccttcatgtcgcagatttcagtggcgtcccgagcgttggaatctttgggccgacgaatcctgagaggtggggggcgtcttactcgcctgccatcagtctgcgctcgggacgatctccactggaagtttccagtggtagcgtgttgaacgccttggtggagatggctggccgagaggattgggatcgacgcttaaggggtacccacgaacgtgcattttggactttcgcgtaa

SEQ ID NO: 532719 - DNA, 288 bp, Stenotrophomonas maltophilia
atgcgttggtttacgtatcccgtcgtctgcttgctggctttggccggctccgcctctgccgcccagggtgaagtgtgcttggcggcggaacaaaccaccccggccggcgtgatgaagcccttcaacgacagcactgtctttcagtgcaagtcggtcggtcaagtgaccgttccgcagttgtatgcgaaagggtggaaggtggtgtcagtgtttccgcagagctccatggatccgtccaagccggggatggtcagtgtcctctggacgctggtcgttgaaaaatactga

SEQ ID NO: 532720 - DNA, 348 bp, Stenotrophomonas maltophilia
gtggttgcgggccacctcttcctggacttgattgacggcaagatcgagcccaaggccatgggactacggctacgcgaggaggttggtcttcagtggacttggctttcctgcatgcaatacctgtccgggaaagaggctttggctgtcttcaatgccctcccgctggagtgggagcagggcggtcgtaggcgatccgacacgctgtccgcctcgttcgccgcggcccatgcagtgggtaacctgcgtcgcgatggacaggcactctgcgccagcggcttggctgcacgactgaaaggctgggatttcgccgagggtgaggagcgtcagccggccgttcccctcgcatga

SEQ ID NO: 532721 - DNA, 378 bp, Stenotrophomonas maltophilia
gtgtgggttccgtcctatgtggatttcgcagacgtagaggatccggaggacgagcccgacgccggcgatgcggccaccttgcacaggattcaagattgggacaatcaagtcgctgcacatgtgcgcgaggtggccccttggctcaagccagggagctctgagaccgccaatgccacctactgggccaaccactgccgggcctgcgacgcgttacaaggcgactacttcgtgatgggcgagaatgggccgttcttccctcagttccgcgccgaagacgacgcccttgagctcatccctgggcgtggggccttgagtgccaatgcgacggctgcacaatccggatggatggattggatcgccgagcgcctgtctctctga

SEQ ID NO: 532722 - DNA, 1113 bp, Stenotrophomonas maltophilia
atgctgggaaaggcttatgccccaagttcggccgtcgcgcgtgcattgcaaatgcataagcaaacgcaggaggcgttgaggcagcatccgtccttgaacgctgcaagggcagccgccgtgggggccgcctggccccgttccgataggcgcctgcgctcgatccaagagttcgccttggtatccaacgagaccgtgaaagccatcggagcgatcgcgagggcttggtcccctgttttggaaggggtgttatccggcagccagaagttgggtcgcaacgccgagatttgggaacgacgtctgtcccttgttggcgagggcatcctccagatgcagcgcaaagcggaggcggtctccgcccccgttcgcttagcagtcacggagatgcacgatcggctccgcgtggttcaagccgtcgtccagtccccggctttccaagcgtgggcccagcagctgagcaacgaacggctccaagacaccctccatcggcttcttgaggaagcgcgcgaggtcgacgggccggtgcttgatgaaacggtggccgtcagcgaggaggcaagcttagaggcggcggaagacgttcggctatttgcatggatcgcgtcgctgcttcgtcgcatcaattccctggggatatcggtcagtgatcgttgggaaatcctcaaccttctggtggcgtttgctcttttcacttactccgagatgagcagcgacgctgatcatgcagaacttttgtcgaccatccgccagcagcaccaagagcaaatggctcagggaacgctgcagagtcaagacaccaaggagctcgctgcagtgctccatgctctggtgtcgcttcatcaggtggaccaaagcttcgagatctcggttgatacatcccccatgcggaacgaacggtccggcccggtggctcgccatcttcgacggggcgaagaagtgcaggtgttggcagccgctgggaagtggaggcaggttcagggcgtggacgaggagggggccttgttcactggatgggtgatgaacaagcatctgcgcaaagcggtgccgcatcgcgggcccgccctactgccccccaacgacgcccaacagcccttcgacgccgccagtgctcggtga

SEQ ID NO: 532723 - DNA, 870 bp, Stenotrophomonas maltophilia
atgcctgcaggattgatcgcagagcgcgtcggaacggacgtggaaaccgtgtgcttgctgctggaggggcttggcgtgagcgtgctcccacgctgccacaccttccgcgtcaccgacctcctgtggagcaccgatggcgtggaaattgaaggccttccgtctcagctcatcctcacgtttgataaccgttctgggcttgacggtgaggaagtgaaggacgctgtcctcggggcaatcagcgaacgggtcggctggtgcatccaggacgctgcgatgtgtgaagttcccggagctgccttcccggccaacaaggcggaggccgaggtcctgctggagtgggcagagtcgatgggggaactgaggatgggggacgggcgctacgcgctggtgactcccagcgcgctgcaggtcaaataccccaggcactttgcgtttattcacttcgtgatgggacccgactacttcgaactgatggccagcgagtggcgattcgtcgtcatcgacacccaggacaacgaagggcatcagttcttgaccgatgacttgtttgacttggtcatcctcgcccatcagcagggacgcaagggggaacggcggtgtgccgatacgctctgggatatcttgacttccatgggcctgacgcacgtgaagccgctcgatcccaatgggcggctggttcgtctggataccattgtttggaaggggaagtggaagacggtgaggcatctgccggtgtccggcgagatcacgatgcttgactacaatgggaagcggtcggaccgccagaccctgtatcaaaacgccatccgagcattcgccgaacttcattccgcggagatcaagagttgcgttcccagcgaggtcgcgtag

SEQ ID NO: 532724 - DNA, 639 bp, Stenotrophomonas maltophilia
atgaaaggccctactatgaatatttccattcgaagcgtcgcgtccaaggattttgatcaagcccgcaagtttgcggttcacggcatgaacttgaactggtatgccaagactaatttagagctttacatctacagcaagtatttttggtatttggagctttgcaaggcaacgcgcgtcctgggcgcctaccaaggcgacaagctcctgggcgtactgatggtgagcatgaaaaaccaacccagcgtgtactcatcctgggtggcaaagacgttcatccggttgaccgacgttctgatcaaggcgttctatggtcactcggcaaattcatacgacgcggccaatgcaagcctacttcgccaactgccgctagaatcgaaggcagacggagaactgaatttcttcgccgtcgacccctgctccaagggccaaggcgttggaacgctcctgctcaatgaacttgagaagctagaagccggaaagttcatctacctgttcacggactccggttccacgtatcagttctatgagcgacgaggttttgtcacgatagcctgcaaggacatcgtgatcgacgtcaggggggagcaagtccccctttcctgctacctctttggaaagcgcctgggaagccgcttctga

SEQ ID NO: 532725 - DNA, 3087 bp, Stenotrophomonas maltophilia
gtgaacctgaccgctgctgcgatcagatccagccgcctgaccctcttcgccgccgccctgatcctgatcggcggagcgcttaccttcgtggggttcccgtcccaggaagagccgagcgtgaccattcgcgatgcagtggtccaagtaagcaaccctggcatgccgaccgaagaggttgaacggcttcttgccaaacccgttgaagagcgcctgcgggcgctcccgtcgatgcgccgcatcgtgaccaccgtgcagccaggcagtgccaccatccagttgacggcccaagacgatgtaacggacctcaacgcgctttggcaaaaggctcgtgtgctggcgcagaccgcacaagccgatctgccgccaggaacgctggggccggtcgtcgacgacgactttggacgcgttgcagtagcgtcgattgccgtgaccgctcccaacttcagcatgcaggagatgcaagaagcgctgcgcaaaatgaggcaatcgctctacgccctaaagggtgtggatcgagtgacgttccacggactgcaggttgagcgtgcggttgtgacgctcagccctgaacggctggccgaagcaggtgcgacggcagaccaggtcattgcagcactcaacgctcagaatgtcgttaccccgtccggggcggcgcagcgtgcagagctgggcctgacggtggatgtggacgggaggctgtcgagtattgcagacctgcggggcttgctgattcctgtcggaagcaacgcctcaacggcacttgtgccgctgtcatcccttgccaccgtcgcatcgctgccagccgaccctgtcgaaagcgcggcgatctacaaggggcagcgagcggtcgtcgtggccatctcgatgacgcccggccaaagcatcaccaccttcggcgaagcgctgcggcagaagttggaggaaaccaagcttgagcttccggctggcttcgagcagcatgtcgtgacgttccaagcggatgtcgttgcggcggagatgagccggatgcatcacgtgatggtggagacggtggtcatcgtcatggcggtggtcatgctgttcctgggctggcgaaccgggctcatcgtgggcgctattgtgccgctcacgatcttgggctccctcatcgtcatgcgcatggtgaacattgagctgcaagcggtgtccattgctgccatcatcctcgccctcggcttgctggtggacaatggcattgtcatcgccgaggacgtcgagcgtcgactgggattgggcgaagaccgctaccaggcttgcgtggaagcgggccgaacgctcgccattcctctgctcacgtcctcgctggtgatcgtgctcgcgttctcccccttcttctttgggcaaaccagtaccaacgagtacatgcggtcgttggccattgtccttgccatcaccctgatggcctcttgggcattcagcgtgacggtcaccccgctgctgtgcatgctgttcgccaaggcgacccaccatgaggaaaagacggactcgggcatctacaagtggtaccgaggcgttatcgccaaggtccttgcgcacaagggcctgtacatcggtgtgatgtccgcggcgctcatcggtgcgatggcggtcctgtcctcgcttccttacagcttcctgcccgcgtcggaacggctccagttccaaattcccttgaagatgcgtgcaggctctgacgcaggccacacccagcaggccgtcactgagatcagcaagtggctttcggacccaaagcagaacccggaggtgacggagaacattggctacgtggctgacggcggccccagaatcctcctgggcctcaacccgcccatggcagggcctgccatgggatatttcaccatcagcgtgaagaaaggcgccgatctcgacgcgatgatcgagcgtgcgcgagggtatgttgcatcccgctggcccgacgtttacgtggagccaaagcgcttctcgcttggctccaccgaatctggtgcggtggtctaccgtatctccggccctgacgaaacggagctgcgtcggatttcggctgagattcagcagaacctgcggcaacttcccggaacgatcgacgtaaccgacgactggcaagcgcgtcagccccgcgttctggtgagcgttgatcaaaacgaggcaaagcgccttgggatcagcagcgaggcgatttcgactgcacttcagcgccgctttggtggacaagtggcagcgtctgccctacgccaggatgacgtgtccgtcccgatcgtggtgcgggtgggcgacggcagtcgcgacattgagcagtctgccctgagcacaacgttgattgatcgtgcggatgggggtggaacagtacctctggcttcggttgccaaggcgatcctggtcagtgagccgtccgcgatcgttcgaagggatcttgaacgaacgatcaccgtgaccggccggaaccctggcatgacgagtggcgaagtgaccgaagcgcttcagggcaaactcgactccctcaaccttcccgatggatacaagatcaccctgggcggggaggcggaggactcggatgaggcgaacgctgcgttgatgggcttcatgccccacgcggcgtgcatcatcctccttctcttcatctggcagttcaattccgtaagaaaggtgctgatcgtggtatctgcggtgccattcgttgtcatcggcgccgcagttgccctcctcttgactggctatcccttcgggttcatggcgacgtttggcttgttggctctcggggggatcatcgtcaacaacgccgtgttgcttttggagtgcatcgagtcggagctggaccgcggcgcttctcgccatgaggccatcgtagaggcctcggtcatgcgcttgcgaccgatcctgatgaccaagctgacatgcatcgttgggcttgtgccccttatgctgtttgccggccccctttggaccgggatggccatcaccatgattggcggacttgccctagcaaccttggttacgttggggctcattccagcgctttacgagatcttgttctcgcccaaaattgacgcaaagctatccaaattgattccgaagacggaagcgccgcgttaa

SEQ ID NO: 532726 - DNA, 1185 bp, Stenotrophomonas maltophilia
atggccgcacatcactcaaccgcaccttgcgatcgctcgagcagatcgccggaccccatgacttcattcccgaaaaggcaagtaatgcagtacatctctctcaacgcagtactgctggtgggcttgtcgctgtcgatgtctggctgcagtgattcccacccgcttcccgcagccactgtgcgtggcgtgaaggtccaacgcgcctccgaaaccgatgcaaccgttgcaaccgttgtgggtgtcgttcgtgcaacaaatcgggccgaactctcctttgtcgagacaggcattgtcgacaaggtattggtcgaagttggccaagccatcaagcgtggccaaccgttggtcgttcagaatcaagacgtagttgcagccgccctgcgttctgcacagacggatgccaagtcagcccgagtggccctcgaggcgcagcgccgagagacagagcggcaggttgcactgtacggcgcaggagaagtctcagacgcacagctttcaacggccaaggctaaccttgaagaagccgtcgctcggcgcgacactgccgtagcgaatgaggtccaggccaagtggaaacacgacagggcggtgatactcgctccttatgacggcaccgtcacagtccgaaacgtcaatcctggcgcggttgcaggcgctggacagatcatcctgagcgttgaagactcaagcgcgctgcaggtggtggctgatgttcccacggcgctgtcagaacaactgtcggccggggaattgcttgaggggaggagcacccaccttccacatgggatgcagctaaagttgagttctcttggaacctcggtcgccggcactggcacggtcaaagccatctttgacattgtcggtcatccggacgtgaagaccggcgaaggggtgcgccttgcactcaagcgcaagccctcagaagggacgtctgttccggttcaagccattgtctttggcgatcaccaaggcaagggagaggtctttgtctttgatccccaccatcgaaaggtgcaaaagcgctccgtcaccttcaatgccgatgactctggaaaagtgaagatcacgtctggcgtgacgccgagtgactgggtcgtcattgccggagctgcccagctgcaggacaaccaggccgcaaaggccatcaacggagcagatggatctgccaaggacgagagcaagtga

SEQ ID NO: 532727 - DNA, 1440 bp, Stenotrophomonas maltophilia
atgactatcccccgacgccctgcgtccacaggtggcctgttgctcgccctggccatcgttcaaagcggcctggttggctgctcactcgcccccacgtactcccggcccgttgcggacgtgccagccaacctcagcgagcttacgtcccaagctgaaccggacgcggctcgcatccccttgagcccggaagagcagaagttcgttgcgtccttcggcggcgacccagagctgcccgagctcgtcgagcgtgcgttggcccacaaccgggacttcaatgccgcggtggacaacgttcgcatggcccgggctgccttggcgcagcaacgtgcgtcgaccaagccttacgtcgcaggcgtggtcgaaggcgagaagtatgatcattctcatacgcgtcagggtgcagatccctccctgaactacgcgttcggcggcgtcgcgatcagccagacggttgacatctttgggcaggcgcaaggcatgacggccgccgcgcgtgagcgcctggtggcaagtgagcacatgcgatccgctgctcgggctgccctgatcaccgagaccctgcgcagctatgcggccctatgcgccgctcaggaaaccgcggaagcggcgtcggcgatcaaaaagctctcccaggattcaagttccgcgacaaagatggcctaccaacttgggaacgcggccaaggttgaggcgaatcaggcagatatcaactacgggcaggctcaggcgaacgagcgccaagccgaatcaacgcttcgatcgctgaaccgtgccttcagcttgctggtgggctacagcgctccccccaagctcgtccatacaagccaactggctgatgcgtcgcgtggcctgacgctgcctcccgccctgccctcttctgtcttgcttagaaagccggaggtcatggcagccgaggcagagttgaaggcccgaaacgcagacatcggagcggcccgcgccgctttcttcccgagcatcacccttaccggcgcgtatggaacggcaagtgaggatctggggaacctcttcgattccagcacgcgcggctgggtgtttctgccccagatcaacctgccgatcttcgactttggccgtcgcaagtcgaacttggacgccgcctggatacggaagcaggccggcgtccgcgagtatgaagcggaaatccaacggtccttccgtgccgccgctgatgtcatggacgctctggtcgtcgcgcagcagagcagtgatttggccttgcagagagcgagcgaggcagaagatcggctgctgagctccaagacgcgcagcgctgcaggacttgagagcgctgtgcagcagaggcagatcgagatgtcggccgccaatcagcatctgtccaaaatccaagccgatcgagacttggcacagatcagcgccagcgtctttggtgcgttctacaacaccggcgtcttggactga

SEQ ID NO: 532728 - DNA, 687 bp, Stenotrophomonas maltophilia
atgattggaaaaaaggtcttggtggtggaggacgatgcagacagtgccgaaaccttggaggcctatctgcaacgggacgggtttgacgtgcgcgtggccagggacggggcatcggccatcgaccaggcccggcaatggcgcccggatttggttttgttggacatcatgctgcccaaggtttccggtaccgacgtgctcacgaagctgcgtaaggactccgatgtcccggtgatcatggtgacggccattggggacgagccggagaagctgggagcgctgaggtatggagcagatgactacatcgtcaagccttacagccccaaggaagtagtggcacgcgtgtttgctgtgcttcgacgcaccgatggaatccgaaccgacggcaagctctaccgagacggtgcgttgatcgttgacatggagggcgtgattgccagtgtggaggtagccggtgagcgcagagcgctggatttgactccgtccgagttcaacattttggcgacgctcctcagaacgccgcagaaggcgttcactcgggctgaaatcattgattcgtgccttaccgaccgagactccctggagcgagtcgtggacatgcacgtccacaacctcaggcgaaagctcggtgcccttggtgtcgagggcgtgttggtcacggtacggtccgtcgggtaccggttccgatga

SEQ ID NO: 532729 - DNA, 1194 bp, Stenotrophomonas maltophilia
atgaaggcgtcgcctcaaagagtcaaagctgccgacggtctggcgtggtgggccggcaagcgtgtcagcctcttgctcgccatcacggtgggagtcatcacgctttgcatgtggctcaactatcagtttcgcgactacctgcttttgcaggggttgccgatcgaagccgcagatcagctcagacggctgagagccgatcctgtcgcgcatcaggaagagctttgggactttgcccggcagtacatgcctgtagatttgttgacgcctggtttcggtgcggacgattgggtcacgatcttcgtcctcattgccgcgagcatgccttttgttgccttgtgtggctggttggcatcccgtccgctcactcgccagttcggcttcattgcacgtggcgcgcggcaggttgcaggcggacaatttgacgtgacggtgagcgacgttcagggcgcgccggcggagctcaaagagctgacaaccacgttcaacgccatgaccagcagactcgctcagtatcagcgcgaagtcacagactctagcgccattcttgcccacgagcttcgcacgccactgaacgcggcgcttggacgcttgcacggcctcatcgatggcgtattccctcgatctgacgatcagctccggatcatctccaatcagctagagcagatgaaccgcttggtcagcgatctccaccttctctcccttgcaagatccggttcaatgcacttggaccaggaatactttgccatcgacgaactgctcaaagagcgaacggcttggatcagccagcatgcagagtccttggggattcaactgatagaacgggcaacccccaacctggtgatcttcgctgatcgtgaccgcatcggacaggttgtcacgatcctgatggacaacgcccttcgccacggtggcgcgaatggcccggtgttgatcgagagcgctgtctcaaacgatcgcgtgtatatacaggtcacggaccgggggcctggcgttccggactcggaaatgcgccatctcaccgaccgcttttggcggagcgatgcttctcggtcacgccactccgggggcagtggcttaggactctccattgccgctgcgatctgtgaagctcacggaggcacgctctcctttgagaacggcgcgcagggtggcctgatctgccgggtcagcttaccgcaggcgggtaatggctaa

SEQ ID NO: 532730 - DNA, 129 bp, Stenotrophomonas maltophilia
atgatggccgggctgctgaagacgctccgacggctcactgcgcttgccaaccaatgctgcaagcgtccccgcgcgcgagagcgtacgccgccagaagacaggggtgaggcctttatcatccatgactga

SEQ ID NO: 532731 - DNA, 1884 bp, Stenotrophomonas maltophilia
atgagcggtttggcgggaaattggattgtccaccgcaagccgagcattgaagagctccatcgaaccgggcgaagactggctcagtcgattgcccatcggggccagcagccccagcagcaggtggtgcatggtcccggcctgtgccttgccgctattcagggtgacgcgggggagcctcgaatcgctgtgtcgagcgatgatcgctattacgtagccgttgctggtcacccgtccggggtctccccatacaaaagagaccgctggctcaacggcttgctcaaccgcctctctcagctgggcgtagaggctgccctgcatgcatggaaaggttccgcctgcgtcgccatctgggacaatgaagcaagagccctcaccattgccagggaccgcatgggagagggcgatgtctactacacgtgcacggatttcggcctggtcttttcgtccgagctccacacgataacaaccgaatgccctacggcttgggtggtcgaccagtccgccgtgtcccaactgctgcagttcggctacatcccggcgccaagaaccatctacaagggcgtccataagctcgcgcgcggttcaatgaggacgtttcgggcccatgacatcggcgcggctgccggcggggagctggataccgatcaggtggtctactgggaccatcgtgtagagatcgataccgtgattcgggcacgggcgagtgcgccgatctcagaagacgcagcggtcaaccatgtggagattgcgctttctgcagcagtagaaagctgcgacggtccatccagcgtttgccttctatcagggggcgtggactccagcttggtcgcagcagcgctccagcgccaaaagagcgtcgctatcgacaccctgacgatcggatttgagggatcaagccacgacgagtcgaaggccgcgcttgaagttgcaaaggcgattggagcgaacaacgactgtgtcatggtgcggtccagcgatctcttgaatctgattgcgagcctgccccgcacgttcgccgagcccttcgccgacagtgcagcgattccgaccatcgctgccgccagggtcgtgggacgccgctggtcctctgtgctgaccggagatggcggcgatgagctgttctttggacacggtgcgtaccccaaagcgcttcgcaaccacgcgatagcggcgaagctcccgcggctggctcgccgaatagccgacaagctctaccaagcggatcctgaacgcgctcgacttgggggcatgagtgccgtgttcgcggaagctcgctgcgccacccttccagacacctacctgtcccgagtgtcgcgctggcggtctcccggcgatgccgtacgcgcggctgtcaatcatgactccatcttttctcgctccgaggcctacccaacgtcggtagagccgggagagttgctcctgtttcttgatcaggccatggagcttcccgaaggcttgctcacacgctccgaccgagcttttggatcccgcggcgtagaggtgagaaaccccttccttgccgcagaaatggttgacctctcgtggcgcacgcccctgagatccaagtattcagacggagtgacaaagacggttctgaagcgggcgttggaacgccagctgccgcacgcgatggttcatcgatccaagaagggactcggtgcgcccgtaggggactggctgaagggcccccttcgagactgggcggaatcactgttgcgcccagacaaaatcgaacgcagcggcgtcttgaacgctgaacgcatatcagcgctctggcagggcttcgtcaaaggcgaacgaaagctccacacgcacatttggccagtgctgatgtacctgacctgggaagagcagcaccgcagccttggcggagcatggcgatga

SEQ ID NO: 532732 - DNA, 1428 bp, Stenotrophomonas maltophilia
atgaagaagctgttcctctggattgtggtcgtgggcctggtcctgttgctggccgcccttgcctacgccttcgtgccaaccaagacccgcgtgctggccgatggtcctgcgccggatgcagcactgatcgagcgcggccgctacctggcggcggccggcgactgcaccgcctgccacacccggccgggcggaaagccgttcgccggtgggctgccggtggcctcgccgctgggcaacatctacagcacgaacatcaccccggacaaggacaccggcatcggcagctactcgctggatgattttgaccgggcggtgcgtcatggcatcgctccggacggccgcaccctctacccggccatgccctacccctcgtatgcgcgcatcaccgacgaggatgtacgggcgctgcacgcctacttcctgcacggcgatatcgcgccggtaaaggaggccaacaagccggtggagatcacctggccgctgtcgatgcgctggccgttggccatctggcgcaagaccttcgcgccggatgccgatgcggtggcttttgatgccagccgttacagcgacccgcagctggcacgcggcgcctacctggtgcagggcctgggccattgcggcagttgccataccccgcgcgggtttgcgttgcaggagcaggcgctggacgaaagcggcgctgcgtacctgagtggcgggcagatcatcgatggctggaacgcggtgaacctgcgcggcaacccggccgatggcctgggccgctggagcgagcaggacaccgtggacacgctgcagaccggccgcaacgcgcacagcaccgtggtgggcaaaccgatggccgacgtggtggtacacagcacgcagaagctgaccgaagccgacctgcgggccatggccctgtacctgaagcaattgccggccagcgcgcacgatccgtcgtcgttcactgccagcgacgccaccgcacgcaagctgcagaccggtatcaacgacagccgcggtgccgagctgttcgtggacaactgcgcggcctgccatcgcaccgatgccaagggctacaaggacgtgttcccagccatcgccggcaacccgacggtgctggctgacgacccgacctcggtggtgcgcctgctgctgcacggcagtgaactgccctcgaccaacaagcggccctccaatctgggcatgccgggctttgccgaccgcttgagcgatgaggaaatcgcccagctggcgaccttcatccgccaggagttcggcaacaaggcctccgcggtcgatgcgggccaagccaaggccattcgggccgagctgactcgggagcaccgcgatgcggccgccgccggaaccaagcatgagttgccggatgaaaaatcgcatgcgtcttcgcctaagaacaccacccgaggggacacggccgctcgatga

SEQ ID NO: 532733 - DNA, 1776 bp, Stenotrophomonas maltophilia
atggcacttgtgaaaccgaaggtcgacgcggtcatcgtcggcatgggctggaccggcgcgatcctggccaaggaactgaccgatgccggtctgcacgtcgtggcgctggagcgcggcggcgaccgcgatacccagcctgatttcgcctaccccaaggtggtggacgaactggaaggctcggtgcaccgccgctacctgcagagcctctcgcaggaaacggtgaccatccgccacaagacctcggacacggccgtgccgtaccggcagatgggctcgttcaagccgggcaccggcgtgggcggcgcgggcagccactggtcgggcgcgcatttccgcccgctgccggaagacatgaagctgcgcagcaacgtggaagagcgttatggcaaggccttcattccggccgacatgaccatccaggatttcccggtgacctacgccgagctggagccgcacctgcacatgttcgagctggtgtgcggcacctccggcaaggccggcgtcatcaacggcgtggtgcagcaggggggcaacccgttcgagggctcgcgctcggccgactacccgctgggccccaacccgaactacctgggcggagagctgttctacaaggcggccaaggaaatgggctggcacccctaccccatcccggcctccaatgcgtccggcccttatgtgaacccctatggctgccagctggggccgtgcaatgcctgcggtttctgcagcgactacggctgcctcaattactccaaggccagccccaacgcctgcatcctgccggtgctgcgccagcgcccgaagttcgagctgcgcacccattcgcaggtgttgaaggtgaacctggacggcagccgcagcaaggccaccggcgtgacctacctggatgcgcagggccgcgaggtggagcagccggccgacctggtgctgctgtgcgcattccagttgtacaacgtgcacctgatgctgctgtcgggcatcggccagccctacgaccccgaaagcaacaccggcaccgtgggccgcaactattcctaccagaacctcaaccgggtggtgctgttcttcgacgagacggtgcaggccaacggcttcatcggcatcggcggcgccggcaccaccatggacgacctcaacggcaaccagctggacaatgccaaggccggcttcgtcggtggcggcctggtatgggcgcggcagcccggtgcaggcccggtgcgtggcatcaacgtgcccagcggcaccccggcctggggcgcgaagtggaagaaggcggcggcggacaacttccgccacaacttctactacgaggtgcagggcgcgtgcatgtcctaccgccagcactacctgagcctggacccgacctacaaggatgccttcggccggccgctgctgcgcatgaccttcgattggcacccgaacgagatcaaggcctcgcagttcttcgtggacaaggccatgcagatgagcaaggtgctggacccgctgtcgatgagcggcgatgccaagaaggacggggagcgctacaacatcaccaagtaccagagcacgcacacctgtggcggcgcgatcatgggcgcggacccgaagacctccgcgctcaaccgctacctgcagagctgggatgtctccaacgtgttcgtgattggggccaacgccttcccgcagaacaacggctacaaccccaccggcctggtaggtgggctggcgtactgggcggccgcggccatccgcgaaaagtacctgcccgacccgggcccgttggtgcaggcctga

SEQ ID NO: 532734 - DNA, 726 bp, Stenotrophomonas maltophilia
atgaaagacaccgaaaagaccctgccggcgctcacacgccgtcgctttttccagggcctgaccctgatccccgttgccgcagcactgccgggctgtgccccgggcgatacccctggccaagctgagcacggtaccggtacgggcaccccatatgccccgcagttcttcaatgctgccgaatgggcctttgtggtggcggcctgcgaccggctgattcccgccgaagaggtcggacccggcgcggtagagtcgggcgtgcccgagttcctcgatcgccacatgcagacgccctacgccgccggggacatctggtacatgcagggccccttcctggaggcgcccagcgagttcggctaccagggcaagctggcgctgcgtgacatcctgcgcgtgggcattggcgcgttcgatgcgcagtgccgcaagcagcaccagggcaagacctttgcccagctggaccatgccgagcaggaaaccctgctgaagtcggccgagggcggcaagctggaactggaaggcatttccagcaagttgttcttctccaacctgctggccgaggtgaagaacggctatttcgctgaccccaagtacggcgcgaacaaggacatgggtgcctggaagatgatcggctaccccggcatgcgcgccgattacctggattggattggtatacgggacaaggcctaccccttgccgcccgtggatctggctggacggagaggctga

SEQ ID NO: 532735 - DNA, 1272 bp, Stenotrophomonas maltophilia
atgatgtctaaaaccatcttgtctggcagcggtgcgctgctggctctgttctgtattgcccgcgtcgaagctgccgagccgtctagggaaggattgttctctggagcaacgtccgagttgacgtcggtgaactattacttcaatcgcgactttcgcagtggtaccggccagggcaaaagagaggaatgggcccaagggttcattttggacgttaaaagtggctggacggccggacccgtgggcgtaggccttgacgtgctgggcttcgcggatttcaagctggacggcctcgattctgaagctggatccggcattttgcctaccgatgccaacggcgccaggaaggccttcggccgcctcgccccgaccctgaaggccaagcttggtgcgtcggagctctatgtgggaacgttgatgcccaaagagcccctgattggcactaacacaagccgtcttttgccgcaaaccttcaatggtgcgatggttcgttcgcgcgacattgagggcctggatgtgttcttcgcgcgttacacaagcagctggtaccgcgacggcgttgataaggtgccaatgacgttggtcaacaagaatggtcgcttcaagggcacgccgtcctccgaccatttcgacctgttcagtgcccagtatcaactgacccctcgcctgacagtccgctaccaatcgggctcgctcgagcccgtctatcaccagcaactcctcaatgcggtcgaccaggtcgacgtcgggcaggggcgattgaagacggagttgcgctactacgtcactgaagattctggccgagcgttggccggtccgatcaagaatgagatgtatgacgtgcggttgagctacgcatggaaagcccatgaggtcgccgcatccggccaatggcttgccggtcccaacgccatgcctttcattggcggcaccgacggcgacatgtttaactgggtgttcaacaacgatttccttgaagccaagcagagaagctggctggtccgctacaggttcgatggggcaagcatcggcctgaatggctggagcttcatggcccgatacgtaaacgcggaccacgcacgacccgcgaccatcagcggtgaaggcagggagtgggagcgaaacgtgcaggtggcctatcaattccaagatccgaggctcaagggcctgagcgttcgctgggtcaacggcatgttccgatccaactttcagcgcagcgcggacgagaatcggctgattctgcagtacaagttggatctcatgccaggccactag

SEQ ID NO: 532736 - DNA, 1518 bp, Stenotrophomonas maltophilia
atgatgaagtcacaagcaaaagcatgggttgttttgtgcgccgcactggcgctttcacccgcagttgcggcgaagcagcaaaaggaagtgcgggaatttgtcgctcagaaccgaaagccgattgttgaagagtttctcaagctggtgtcgcaacccagcacggaaaacaacgtcagtcagctgcagaagaccgcggacattgtcgaggcgatggccaagaagcgcggcatgaccgtggaacaatggcccacctccaatggcgtgccgattgttttcgcagagaagaaggtcgcaggagcgaagaagacaatccttctttacgcccattacgacggacagccttacaacgcgagcgagtggagtcagcccgatccctccgtcccggtgatccgcaccgacagcatcgaacggggcggaaagatcgtctcagacacgaaggcggggaactatcccgacgactggcggatttatgcgcgcgccgctgccgatgacaaggtgtccgtccaagccattctgtcggccctggatgcgatcggctccaaccccaagcacaacatcaaagtctactttgacggccaagaggaggccggcggcccaggcatcgcggaggccgttgccaagtatccggatcggttggcagccgatgtcatggtcctgtttgacggaccccagcatgccagcggccgccccaccatcttctatggcacgcgcggtgaggccggcgttcaagtgacggtctacaccggtcttcgtggcctgcacagcgggaactacggcaatttcttgccggatgcgaacgttcgcatgtcccagcttatcgcctccatggtcgaccccaccggcaaggtcgcaatcaaggacttctatgcggacttgaagcccttcactgctggcgaaaaggcgatgttcgctgcggtgccggacgtcagcaagaagatgtccaaggagcttggtattggcggccccgacggcgcggcctcctccttgcaggaggggctcaacctgcccgcgttcagcgtccatacgctgcaaggcggcgacgtgggaaatgttatcccggcgaaatccaatgcccgattggcgatgcgcttggtggccgagaacgaccgctccaccatgcaaaagcgagtctttgatcacatcgctgggcagggctacttcattgtggacaaggaccctgacgtcgcaaccctcggcgcgcacgccaagattgccaaggtcgtcaacaaggaaatgcccaactggcttggcagcgacccttggcgaaccgatcccgactccacccaggcagtggcggtgacttctgcactgcgctcggtttggggcgatgatcttgttcgaattcggaccttgggcggcacccttcccgccgctggcttcatcaaggggctgaagataccggttgtcggtgtgtcgattgcaaattacgacaacaaccagcattcggcagatgagaacattcgtatcggcaacttgctcgacggaattgtgaccatctcttcgatcatgacgaactga

SEQ ID NO: 532737 - DNA, 456 bp, Stenotrophomonas maltophilia
atgctggaccaaacggatcgcgccatcctcaacctgctgcagttggacaaccaaacgcctcagcgaattatcgcggagaaaataaatctctctgcgccggccgttcagcggcggattcaccgtttagaaacgacgggagttatttcgtcgaatgtggcagttgtggatccggttgcagtcggcaggccgctcacgatcgttgttgagatcgaactggtgagcgaacacgccgaccaaatcgacgtcatgaagaaacggttttctttggccgaagaggtccagcagtgctactacgtgaccggagagttcgatttcatcctggtcgtcaccgtggcgaacatgtctgagtacgagtcgttgacgagaagactgttcttctcggattcaaacgtgaagcgcttccgcacttctgttgcgatggatcgggtgaaagttgggctgtactgccctgcttag

SEQ ID NO: 532738 - DNA, 1206 bp, Stenotrophomonas maltophilia
atgttgaaggttctttccaatccccatttcgcgggcgggaccagcttgcacttcaacgcaggctcggccgaggaggctcgatcgtttcaccgtcgcattccagggtatgaggccaccccgctcgtctcgcttgatgccctcgcgaaacggctgggcgtccgcgcgatctacgtcaaggacgagtccaaccggtttggcctgaaggcatttaaggttctcggaggctcctttgcccttggaaagattcttgcaaacaagcttggtgtgagtttggactccatcgacttgcagtcggcagctgcctcactcgatgctccattgaccctcacaacagcgacggcgggcaaccatggaaccggcgtcgcttgggcggctcgccagatgggactgaaggccgtcgtgtatatgccgaagggctccgcggccagcagtgtcgaccgcatcgaaaagctgggcgcaacctgcatcgtcacagacgtcaactacgacgataccgtaaggctcgcgtcgcaggcagccgattcggagggctggacgctggtccaggacaccgcgtggtcaggatacgaagcgatccccacttggatatcgcaaggctacatgaccatggcatccgaagcagttgaacagatggcgctggttcaagatgccccaccctcccatgtgatgctgcaagcaggggttggggcgatggccggcggcgtacttggcctgctcaatgatgtgtacggcgcacacgggttctcgtcattggtttcagagccggccgcagccgattgcctcttccagtccatccaagcggatgacggcaacctggtccgcgtgaccggtgccctggactccatcatggcgggattggcctgcggcgaggtcaatcctgtgacgtgggatatcctcagaagcagggccaacgcattcgccaccgtcagcgacgatgttgctgccaccggcatgaggatcctgggcaatcccctgcccggcgaccctgccatcgtcagcggcgagtctggtgccatcaatgtgggcttgctgtacctgctgatgacctccaacggtccagcatcgtccaacgccaaagcggcgctcggccttgatcgagaatccaccattctcatcttcagcactgagggcgacaccaacccatcccgataccgcgacatcgtctgggaaggaaggctgcccctgcagccgctcggcgatagttga

SEQ ID NO: 532739 - DNA, 387 bp, Stenotrophomonas maltophilia
atgaaaaccagaatcacaaccgagcaggcgcctgcagcgattggaccgtatgcacaaggcattgtttttcaaggcctggtctttacttcgggccagctccctctcgacccgacctccatgcagttcccggcgggtgggattcgcgagcagacgctccaatccctggcaaacgtaaaggccgtgctcgaacagggcggcgccacgctgaacagcgtcatcaagaccacatgcttcctcagcgatatgaacgattttgccgagttcaacgccgtatacacggagttttttgggacagagaacgccccagcgcgatcctgcgttgaggcggcacgtttgccgaaggacgcgctcgtagaagttgaggcaatcgcctacaaagtgggctga

SEQ ID NO: 532740 - DNA, 693 bp, Stenotrophomonas maltophilia
atggacgacttcccctccggccccgagcggcccgatttccaagtggtgttctcggatcgggaccgcgagttcatgcagtcctacttccgccttgccgacatggttgccgatttggtcgggccgcattcggaggtggtgctgcattcgttcgaagacctggatcgctcggtggtcaaaattgtcaacggcgaccacacggggcgcggggtcggatcgccaatcacggacgtaggcctgaagatgctgcgtcgctacctgcagaccggcgaagtgaactctcgcaaatacttcacgcgcaatggggcaggcgagctgatgaagtcctcgacctgcgtgcttgcaggtgagggcgggaagccgattggcatgttctgcgtcaacatcaatgtgtctgtcccattccctgagctggtgaaaaccctgctaccggatgcgggcccacacgccttgatggccgaaaatttcagcgcatcggcgcacgatgtgatttcccaagccactgacaaggccatcgccgacgctgatggggacctcggcgtggcgcaaaagtcacgcagtcgcgtgatcgtgcagtcccttttcgacagcggcatcttcgagctgaaagatgccacgtccatcgtggctgagcggctgggcattacacgccatgccatctacaaatatttgcgtgaatttaagtcatctacctga

SEQ ID NO: 532741 - DNA, 1464 bp, Stenotrophomonas maltophilia
gtgctagacaatctttcaaagctgttcgagatcctttggggtggcccgctgttcgcgctcattgttgggatcgggctctacttcacctgccgcctgaaattcttccaggtcttccatctcggcgagatttttcgcaacacgatcggaacgctggttggcaagaacagggaggtcaccacgggtgaatcggactcaggcaagtcgctgaaatccgttgaggtggcggccaccgtgctctccggatccctcggggcgggcaccattgccggcgtagcgacggccattgcggtagggggcccaggagcggtcttctggatgtgggtcatcgccctggtcggaatgatgaccaagatggtggaagtaacgctggccgtgcggtatcgctccaagagcgataacggcgagtactacggcggaccgatgcactacatccgggccggtctgaagaagcgctggcggccgttggcgacgatctattcatttgctttggttgtgctcgtcataaccgacgcctgcttcgtgcagaccaacaccatggcatcggtactgcacttcacctttgacgtgccgcccatgctggtcggcgtcctcatcgtggcggtcggtgcgttggtgatcctgcgcggcctgtcggggttgggcaagttctgcacgtatgccttgcccccgatcacgctcgcttacctggccggatcgggctgggtcatcgcagcaaatttccacgccatcccgcaagtcatcgttgacatcgttcactatgcgttcgctcccgcgcccgcggcgggtggctttgccggcgccacgatcatgatggccatgagcaagggcgcaagtcgcggcatcttcaccaacgaggcggggatgggcacctccgccaccgtgcacgcaacggccaacgtggactacgcatttcgccagggcatgtggggtgcagtggaggtcttcttcgtttcgatgatcacgtgcaacttcaccgccttcgcggtgcttgcatcgggcatttggacggatggaagtcaccaaggcgtccaaattgtgttcgcagcactctcacagacgtggcacccccttgtcgtcaagctcttgtgcttgggcgttgccctgatcttgttcacctcctacgtcggttccttcatcaaataccgaacgtcggtgaactacctgtttgggtccaaagccgagcagtggatgcgctatgcatacttcgtaccgcctttgattgcggtcaacatggagattccagtgatctggctcatggccgacatggccgttgggttcctcgtcatcccaaacgtcatcgccttgttccttctccggaaagacttcattgccgagttcgttcgcttcacccagcgcggacgaagcgccagcaatggcctgagcgggtcccaacctgtccaagatggccggcgcgttgaagcaggcctgtcagagagtgctgaccactctaccggaagccattag

SEQ ID NO: 532742 - DNA, 945 bp, Stenotrophomonas maltophilia
ttgaaaaacagtattggtattcgcagagtgtcggtcgtcggaacgggcgtcatcggtgcaagttgggcggcgctctacttggcaaaggggctcgacgttgtcgcaacggacattggaaccggggccgagaagttccttcgcgacttcgtggacgcgtcttggccaacccttgagcgcatggggcttgcggtcggtgcagaccgcagtcgtctccagttcacgcgccacctgccagacgcagtcagcggcgtacagcttgtccaggaatccggccccgaacgcttggacctgaagcaggagctctatggcgacctggatgcgctcctccccgaggatgtcatcatcgcatcgagctcctccggcatccccatgtccgacattcagcgcggtgcgaaacaacatcccgagcgctgcgtcatcgggcaccccttcaaccctcctcatttgattccgctcgttgaagtggtcggcgggaaagcaacgtcagaagacgtgttgaatcgcaccgtcgacttctacgaatcgatcggaaagaagacggtccgcctgaaaaaggagcttcgcggccacgttgcgaaccgcttgcagagcgcagtggcccgagaggtctattacttgatcgccgaggatgtgctcagcgccgccgatgtcgacacggcgctctcatgggggccaggccttcgctggggcgtgatgggcaacatgctgcttaaccatctgggcggaggtccggccggccttgagcatttcctgcatcaattcgctgggcccatggccgcctcctggaacgagctcaaaacgccagacctgagcgatgacctgaagcagaagctgatctccggggtacaggaggcggtgggcaaccgcaccattgccgagctggaagcagagagagacgagttgctggtacagctgatcgagctccggtcgcagtccaagctgtag

SEQ ID NO: 532743 - DNA, 927 bp, Stenotrophomonas maltophilia
atgacccagcaccaccacctctttccatcctttgccagcactctcttcgtgctgcaggcaaacccagctcgaatccacgcgttcgatacgcttaccggcagcctcaaaaccatcctggagatccagacaggggtgccagacggcatccaggtcgatgcaaaaggaggcttgatctactggaccaacatgggcgcgatgccttcccatggcgaagacttcattcttgccgatggatcactggagagatgcgatctggcaggagagtctcacacgcgactgctgcacagtcgcggcattgttacgccgaagcagcttcaactcgaccttcaggcgcgcgagctctactggtgtgaccgagaaggcatggccatctatcgctgttcggcagatggagaggcggtgaccgagctctatcgcactgggacatggcctgaagacagctccaacgtcgctcttcattgcgtcggaatcgcgctggaccgccagcacaatcaactctactggacgcagaagggccctcccgacggcgacgcgggccgcatattcagaaagaagatcgacacctcatgcgacgcgggccggccgactaccggcgatgcagagctcctgctgggcgaccttcctgagcccatcgatttggacattgaccatgggcggcaacaaatctactggaccgaccggggccaggatgcatccggcggcaactctctgaacagggcggacatcacgaatgaggggttggagaaccacgaagtacttgcccgcggcctcaaagagggaatcgggctggcgcttgcgcccgagcagcggaaagcctacgtgaccgatctcagcggtgcgctgcgcgtggtttccatggacggcggtgaattcgagacccttcacacgttcccaggcccgctgaccggaatttgcttccctaagtaa

SEQ ID NO: 532744 - DNA, 2349 bp, Stenotrophomonas maltophilia
atgaacccagacattcccggtacctcgcttctgccctttgccggcttgcggattgcggagcgctccaagctactgacgggacgactgattggtcagatgttcgctgatcaaggggcgaacgtcttcgtagagagggacgccaaccgtcgttcaacctcagaagacgactacctcgaccgaaacaagattgcggtagatcttggggcactgactgatccggccaccatggacgtggtcattgtcgacggaacacaggaaatcgagcgccagccccgtcagttcgttttgagggtcgtcgccgcccttcctggggatacgcagtacggccaccttcccccggattgcagcgaagaccttctcagcgctttggttggtttcttcaccgacatggctcaaaccggccgtctgctgggccgtgacgcgatctacacgccgctgccgctgtgctctgtttatgccgcagtgaacggtgccaaccacttggcggcggcgctgtacgaccggcagcgcggggccaacggccgtgagctgtatgcgtcgcgcctggcgggcggcgtttccgcgattggcgccctatcgctgaagtctgaaggcgtcgcgccgcatcttcaaccgagcaagcgatcagccgacatccccaaccttcagagcgtagttcaaagggccaaagagagtggcgaaggccagctgtggctggaacagcatgcagctccccttgccaccccctacaaggcaaaggatggaacctttgtcatgtgcattggcgcggcgaacagtggtttggcccggcggatgctgcagggcctgggcatctacgaggatgtcctagcagccggctttgtcgagaaaacgcctttcaggccagaaaacatcaagtatcgcgggatcaatctcagtgaatccactacgcttgactgggcgcatcgggcgcagctttgtgacatggtttcagcagcgttcctgcagcgaagcgcatccgagtgggaggagcttctttgcaccgagtttcgcgtcccgtgcgtcaaggttcagtcgtggaccgactggaagaacgatgaagctgcgcgcgatgcggggatttttgcaagcgttttaggccatacagagcgccagatcggtcgcgccggctgggttgcaagtgcccgaccttacccaccgctgcaggcgtgccggaggggcaccaccgcaggctcgcccttgattgatctgtcaacgccctcggccgttccctacaagaaacgcccacttgaagggctgaccgtcgtcgacttctctaacgtaatcgcaggacccaactgcggaagaatgttcgcggaactgggcgcgaaggtctgcaaagtcgaccccgttagcccacgccactcgcccgagattgtcgtggcctgggccggtgaatcaggtgccgaaaaacagtccgtcatcgttgaccacacgcatgccgacggcaaagccatcattgaccaccttgtgtccgcctgcgatgtcgtcgtcgccaacaagctcgacgaccaatgggaaaggatgggcattggaagggaggcacttgactcgctgaaacccggcatcgttcaagtcgccctgacgggacacaggggcgagaccggaggcggggcgcgtcacgactatccggcgtacgatccagccgtgcaaggcctcaccgggatcatgatgagattcgggcctctcggctgccccacttttcacggactcgcgtcttgcgttgactatctgtgcggctaccttggcgtttgggctggactctgcgcgctcaatgcacagaaaaacagagaagatggccaaggggattgggccgagacatcattggccgcggctgccacgctcacacaatgcatgcttcagtggaaggacgagcccgcctctgccagagggccacatgcgacggggacctctgcaggagaacgcctctaccaggtggccgatggctggatctttgcgcagggcgaccgcgacatgggttcggacctgcattcaatgagtcgcgtcgaggccattcaacacctcgcccaacaggagatcgccgcggttccggtgcaaacatgtgcggccttggctgaaaggcacctcacggaaccgtcccataccatcgcctatgaatccaggatcagcgacggatggcgtgtgggcgctttcggcgccacctggttcgccgaggacggcatcgcactgggcagtccagcgcccgcgcaccgatccggcgccgacacgaagcgtgtggcctcccggctgggctactcagtggacaagatcgagcacctgattgcggtgggcgcgctgggcgccgtcgagttcgccaatgctcgcgaggaacccggggcaaccgaacagtga

SEQ ID NO: 532745 - DNA, 1011 bp, Stenotrophomonas maltophilia
atgcgttgtcttggctacttccatgcttccaaggctatcgccagatctaaacgcacaccaacaagcctttcgaccagcggtcataaaatggcttatgcttcggcgatgtcattgccgcgactaagaacgttcgttgaggtgtatcgccagggctcgatcagtgccgctgcgcggcgcctaggcctcacccaacccgcggtgtctcaacacatcgccgggctcgaggcttccatcggtcggatgctgtttcatcgcctctccagtggggtagtgccgacgcccagcgctgacgagcttgcggccgatcttggagaccgcctcgagacggccgaagccgcattgaccaaagcgagaacgcggtcagaggagatggctggatcgttgcatatcgtcggacacgccgatttcttggcagaggtcgttgcagctgagttggttccgctgatcaagttggggatgcgcgtgaggcttcagaccggtaccaacagcttggtcgcccaaatgctggtagacggcgtctgtgacttgggcatctcggtctaccctccagaggatgatcgccttcagtcggacatcatccgacgtgaagacctcatcgctgtcgcgtcccctgaggtggtcaatcgaatggcggcacgccgggatctcgctgtggcattggcgcaggagcctttgttggcgtatagcttggagcgccccttcgtcgaggcttggatgcgggtgaacgggcttgaatttagccctcccgcgccagccctgatggggcaggacttaagggcgcttcggcgccccttggagctcggattgggatggaccgtattgcccagctatctttgtggggaagcattggatcgcggcagtttggtggagatccaaggcgtggctggcagggcctcggtggactaccacctcatgtggacgtcgacgggcctgcgtcgcccacgcgtggcccacgcaagacaagccctgcaacggacgctcaaggcagggcgggtggctacaacgtcatga

SEQ ID NO: 532746 - DNA, 399 bp, Stenotrophomonas maltophilia
atgagcaagaaattcccaattcccgccgagcagttcgacgcggccttcgcggccttggtgcgttacgagcgccggcaagcccgcatcgaacaccccgcaggaagcttcgacaacgccaagcgttggtatccaagcggccgggacgaggaggtgatagacgccgttcgctcgccatcgcgttcctatcccaactcttacaacgctgcatgccgaagcttggcccattgcgagcgatacgacgaggcggatcatctggcggtgcttcgtctgaagcgcgagctcaagaatgcgggagcaagcgcgaccgatgacaatgccatggccgtcctgcgggcggcgttgttggacggcgggctgccccaagccgccgccatcctgcccccgacgaagcggttttga

SEQ ID NO: 532747 - DNA, 213 bp, Stenotrophomonas maltophilia
atgaaagagcggcgcagacgctattatgcttatgagcgcaaatccggtggagcgtgctatgtcgataaggcgcagcacgagcacttgcagcgatacccgcacaccatcgcctattaccatctctcccgatgcacgggcatttgggcgctgctcaccgcagaagaggcagcttccctggggtggctttccaagcccatctcgagggtgtcatga

SEQ ID NO: 532748 - DNA, 375 bp, Stenotrophomonas maltophilia
atgaccacgggctacgccctccgtccgaagcagaagcgccagtgcatgatagatgtgattcatgaggcgcggatcgatgccccgagcaaggagcggttccaagccctggcagcggctcatgggctaagcatgcgcgctgccctgacgcagttggttgagcagcaggctgaaatgcgggagcctttccaggagctcagcaagcggtccaaaaagcggaggctgggcgagcctgggcatttcaccgagatgcttcctgaagtccaagtgtgggacgacgttggcttggccctgaggatcgatgccaaccgtgcgggcatccggttggctgaggcaatgcgccagttggtgtggcgatgcatccaagaaagccattga

SEQ ID NO: 532749 - DNA, 336 bp, Stenotrophomonas maltophilia
atgcttgtccatcccttcaacgacgacggctttgccgccttctctgcctggctggccgaatcacgggcgcagttcaaccaggatctgttcgacctgcagcaggcagcgagcgccaagggcaaggagagctggctgttccactgcgagttctgggaggtgccgtgtcctgatatcgaatggatcgatcgagagcttgaggccgtgaacaacgaatggagccaagcgggctttgagcgctatcaattcttggagtgcgcactcgcagcggttcaccagaccctggtcgaccgggagtggcgggtgttgaacgcgatgccgcagggcgagccgctgtga

SEQ ID NO: 532750 - DNA, 186 bp, Stenotrophomonas maltophilia
atgcgaaagcttttcaataaactgctcaacatcgccctgtttggcatggtcctgttcgccctggaccaagtcccggagcgcctggatcgcatgtcgcgaaccgcccagaacttggttcagcaggtgaactactcgggccccatgcagggcattccgtccggcgttcctgatgatatcgagtggtga

SEQ ID NO: 532751 - DNA, 675 bp, Stenotrophomonas maltophilia
atgattttctggaactccctcaagaacggctgtgtgtggttgctgagccccttccatcgcagcaggaaaccggtaagcctgggccaagcctggcgcaagccgcgaaagcacaccaaggaactcgtgggcgactactcggacgcggatcggcgcttgtggctggctgtcaacgtcggcttcacgtcattggtcgagatcgcgttggccaaaggcggtgatgcgtctagaaccttccagatgaagaacgacctaggggcaaccgtcacagttgatctgttgctgctttgctggatgaagacggtcgagaatcaagcattcctgcggtcacctctggcatctgcgggtctgaggatgtgcgaccccatttcgcgatggggcatctcgccggacggtgagtttggagcttccgatcaggaagaacagtggagctccagtcagaaaatggatggaaacgacgttgctcggcggttgattctagccggggctagcccgtatcgagccttcaatgacatccgcgggacaggtggcgaccggactggaagtcttgagtccagtccaagatgggtcgcagccgagcacgtgagggaatggggtgctctggctcggcatgttcacttggaagagacccttccgtcagcgcagctgaccggcccacgtgccaaagttcgcttctga

SEQ ID NO: 532752 - DNA, 261 bp, Stenotrophomonas maltophilia
atggcaccggagcaaatgcaggcgctggtggacatcaacctgctggaaacccagctggcggcgttggacgccctcaagccctcgacgccagccgcggaggtggccagactgcgatcgcatgcttgtctcgcgtcggtccgtggccaaggcctgaacgggacgccgaactggagcgaactgcgggcagaagcgcgagcactgaaccgtgagctggcagccgtcctcgccgccgtacaggtcgatgcccccttagaggcctga

SEQ ID NO: 532753 - DNA, 180 bp, Stenotrophomonas maltophilia
atggagaagctggcccgcgcgcttggtttgccggtcgcttatttccacgccacgaacgatctggtggccgaaacgttgctggtgatgtcgcggctggaccccgagcagcagcgagacctgctgagcaaggtcagggaatacgccaagagccgtggcgtggccatcgatcctcccgagtag

SEQ ID NO: 532754 - DNA, 819 bp, Stenotrophomonas maltophilia
atgaaacacccgattgcagccgtgatggcctgcatggcgttggccagcggcactgccgccgcgcaggctggcattctgggaaagattggaaaggggctgatgcaggccagtaaggacgccgcctcggcaccggcgaccaagcgttacctggaacccgccggcacatactgggacgacggcgatcccccggtgctcgacgggtacacccggattcggtgggggttggcggccaccgcctcggcaggtttcggcatgtgcgaagacgatctcttcgccctagccaaggctgcaaagagcttgacgccggccatgcgaacccactgcatcgggtcgtgggggcaccagttcaagcgtgtgggcgagcggggcgacccggcttccgcgtttgaggccaagacgcgacagatagcctccaccgacgcgttctacctgcggccctacaccgacgtggagatcgaccccaagaccaacatcctgcacgcctacgtgttggtcatgaatcaccattggtatccgcattcgccgggattcctggccgtatcggtcattggcccctctccgctggggaagggcaatgcggtggtgggggtcgagcacggcgggcgttaccacgccgcgttgcgcctgaagcctgaagacgcggccgaactgcgacgggtggggcgcgacgccacgggtgatcgaatctttttcaaggtcctgaaaggcggccttcagcccaacgcgctgccggacatcgttctccaaatcgaccggctggagatcggctacaagaaccagatcatcggcatcaccccttccaaagacaaggacgcatga

SEQ ID NO: 532755 - DNA, 384 bp, Stenotrophomonas maltophilia
atgaagcacgcaatgatcgtggccgcaacggcggcactcctgaccctgacggcctgctccggggacaagggccccaccaaggaggatggggtgaaggtcgtggaaggcttcttcaccgaacaggggaggcaggcaaccctgcagcgctcttggcagttcgaggtgaccgacgcgggcggcttggatctcgactgcgaaaagaagcccaatggggatcaagaatgtctggtgggcgggtcggtaaaggctcaggcgtccatcggcgggcagccaaccaagcccgaacccagcacgctcaagccgaagctgcgagcactcttccgatcgcaaggggagggctggcaggtggtcgaagtgaaagacgaagggacgtctgccggctaa

SEQ ID NO: 532756 - DNA, 498 bp, Stenotrophomonas maltophilia
atgaaccgatatcctccgcagcaagtcgtgtatgcgccgccaggcccgtccgcgctgatcctgcccaccgtgattctggctccgttgggccttgtcgcactgggggcaggactggaggtgatgaagcgcgatttctttgtcggcttggtctgttgtgtgccaggcgcgatcgttttcgcgttcttggccctctgcctggcgctgcacatccgcgctcagcgagtctgggcgtggcacatccgcacggggcggataccgtatttccgcaagcacgggttcctgaaaggggcgctgctcgggggaggcctcgggttgctgaccgtgattgtggccgtcgctctggggttcaagtatgcggagcaccctcagttcggggacatcgctaccgcagcgttttacttgggttggctttggggcgtgtttctgatcgccgtgctggccgtggcaatggggtggggcaagcgggcgtgggatcggacagcggtacctgacagttga

SEQ ID NO: 532757 - DNA, 714 bp, Stenotrophomonas maltophilia
atgctgcgctgcctgctactctttcgcccatttctggccctcgcaagcctcacccctctcgcggcaagcgccgaagcggtcgagaaggcaccgttcgtgctccccgccctgccttattccaccaacgcgctggtcccggccattgacgcgaagacgatggagatccaccaccatcggcatcaccaggcatacgtcgacaacctcaatgccctggttgctcaatcgacggccctgcaaggcatggagctgaccacgattctgggccaagtgtccaagtatcctcttgcggtgaggaacaatgccggcggacatttcaatcacagcttcttttggaagacgctcgctccggtcggccaaggcggcgaaccttcgccgtcgttggcagctctaattgagagagattttggttcttatgatgcgtttgtggctgcattcgaaaccgcggcaaagggcgtctttggatccggttgggcatggctaatagtcaaaccagacggaaagctgacggttacagcgactgcaaaccaggacaacccattgatggacacggctgcacaacgcggagcgcccttgctcgcgcttgacgtgtgggaacacgcctactacttgaactatcaaaaccgacgcccctcttatgtgcagcagtggtggaccttggtgaactggaaccaagtcaacgagcggttgtccaaagcagtcgctgtagcgccttga

SEQ ID NO: 532758 - DNA, 2184 bp, Stenotrophomonas maltophilia
atgatcccttcaagccgcactgctcacggtgaggcactcactcgccctgtcctgtcagtgctgacagctgctgtgctggtgaccctggctcccaatgcgcgcgccaacgaggatcgccccggtagcgcaacacagctggatgcagtccaggtcaaggtcagcacagctacgcgcacagagcgattgctgtcggacgtgccggtacgaacagaagttcttcggggtgaagacatccaattgcgggccgcactggacttctcgagagctgccgaacttatcaatggcctgcgcgtcgaaagcaactgccagaattgcaacacgtccgaagcgcagctgctcgggctgccaggcgcatacaaccaaatcttgttcgatggaactcccctgctttcgaccctgggcggggtgtatgggctagagcaaatccctgcggcgttcatcgatacgatcgaggtcgtcaagggaggcggctcctcactctatggccctggcgcggtcgccggggtgatcaatctgatcccacggcaaccgacccaaaacggcggcttcctacgctacaacgtggacgtgcagaagggcgagccaatccatggcatcgatggccgaggggacatcgtgtcggaaagcggccgcgtcggtctttccatggtaggccaagccgccaagaacgacgccatcgatttcaatcacgacggctatagcgaaatcacggagaaagagcagcaggtcattggcttccaaggatggtacaccccgaacgacggaaccacgttgcgggcgaactaccaattcacccatgaaaagcgccgaggcggcaatcgcttggaccggcctgagtggttggcaaacattgccgagtcgattgagacggactatcaccggggcggggtgcgatgggatcagattgtcaacgacgatgtggacttcacgcttggttattcttttgcctacatcaagcgtgacagcttctacggcggcttgggcgatgtagttacggacccagccgacccacgctttgacgcaggccaacttgatccaaccagcgatggcgctgcagcgacctcctacaatcagtatggctacaccgaggatccgctgcactactttgacagccagttcaactggcgcatgggcgcccacgcgattgcgttcggggtccagtacaagcacgagtctgtcaaggacgagaaccgcaatgctgtcggggagacgttgggcacttcgtcggacgacagcttctccaacctgggggcgttcattcaggacgaatggaccgtcagcgatgcagtcgatctagtgctgggagtgcgcgccgacaaaagctcgaccctcgacgatcccgtctactcccctcgaatcgcgctggcattccaggcaaacgaacgactcaagttgcgggccggcatttcaaccggcttccgtgcgcctgaggtcttcagcgaagatcttcacgtcgatactctcggggccgagcccattcggatccggaacgaagcgggcctgtcggaggagcgcgcattgacaggcatgcttagccttgactggcgctccgacccggccgatccaacgtggatgtgggacgcgacggtgtcactgaccaaactgcgggacaccttcgtgctcagcgaggtgcaaaccggagaggatggatccttgtaccaggtccgcagcaactcaagcggctctcgggttgccggcgttgagaccaacttgggttggcaagcatcagaagaactccggatcaccgcaggcgtagcttggtaccattcgcgctacgaccaatcgcaagtggtttttgacgatacctccgacggcggagatacggtcatttcgacccgagattatctcaagacgcccgaatggacgggggtggcgcaggcgacttggtcccccagccagaactgggatgcctatgtggggctgaagtacaccggtcggatgtatgcgctcaacaacaacaccgcctcgttaaacagaacgccagatttctgggtgacggacgtgggcgggactaggcatttccaccaagaagatggacgaagcatcgacgtttcctttggcgtccggaacgtcttcgaccagcgacaaaaagatctcgaggttggggcgacccgtgacagcgactacgtctatgggcccaggttcgcacgcgccgtctacgcgagcattcggtatgcgttctaa

SEQ ID NO: 532759 - DNA, 2481 bp, Stenotrophomonas maltophilia
atggtcaccggcacgcggttcaatggccggctcatcaccgagtcgccggtacccatcgattcggtgtccaaagaggacctccggcggagtgcgtctccgcttttagaggatcagctgaaggttcaggtaccctccttcagcatcccgcgcccctccacagcaggggcggtcgacttctacacggctccgtcgttgagaggactgtcgccgggccaactgctcgtgctcatcaacggcaagcgtcgacacgcatccggcgatctttccatccacaatcagatcgggcgcggtgacgtggcctacgacctgaacgccattccaagtgccgccctcgagcgggttgaggtgcttcgcgatggagcatcggcccagtacggatcagatgccatcgcaggtgtgatcaaccttcagctcgcccgcgacttgggggctggtgcagacaccagctacagcgtgaccgatcagggcgacggccagacgctggataccaatgcatgggttggactgcccttgcgagagacgggctttttccgcgcgacagtgtcataccgaaagagcgatggcacgaatcgggcgaaagaagacacccgtcaacagtactttggcgggaacggttcccgcatgccttccggcaattttggctccggcgtagggctgacgccctccaatggcgctcttgatccgcgagaagccaccgtggaccgaaacacgttccgtctcggtgaaccggagtatcggcagaagtcgatcttcatcaactccgaggttccattgaccgacaatgcggatctgtacctgttcgggggctacagccggctcaacggcgagtcggtgggcttcgcgcggagggcaggtcaagacgagacggtacgtgcgctgcatcccgatggctattccccgaccgtccaggcagagcttgagaaccggtccctcgcggtcggggtaaaagggcaagatctcggtggactggcgtatgacatttcaacggtctacggagaaagcctggtcgattcaacccaagtcaactccaacaatccttccatgggccttggcagcccgacctcgtcttatcgcggcggcacacgatttggtcagtggaccaccaatctcgatttcaccaaggacctcaacgttttccaagcatcgcccatgaagctggcgtttgggtacgagttcaggcgcgaagcctatgaactcgtgcacggagacgtcgcgagctacctcaacggcggcgtcccgatcttggacggacccaatgctgggaaggtcgccccggtggggttccaagccaactcaggcattgttccggaagaggcacggaaagaatcgcgtcacagccacgccggctacatcgaggccgagcagagctgggggccgctgttgctgtctggtgcggtccgccacgagcgctactcggactttggcaacaccaccaactacaagcttgcatcgcgtttcgagctcacccccgagtgggcgctgcgggcgtccgtgagcaccggcttccgagctcctcagctgccccagagctactttgccacgacctccatgacgatcgtcaacggcgtccaaacgtcgtcgaggctcttgccggtcggaaatcccgtcgcgcaacttttgggcgcgaaggcgttgaggccggaaaaatctgacaacgtttcgctggggctggtgtacaacagcgacgcaatcgctgcctctgtggacgtgtatcagatcaagctcaaagaccgcatcgcgctgtcctccaccttccaaggtgcagcggtgggcaacatcctcaccaacaatggctttgccggggtgagctcggtcagctacctgacgaacgcggtcgatacgacgacgcgcggtgtggatttgacggtccggtatcaaaaggaactgtcggacgcgagtcgttttgtcgcgacgttcagcggcaactacaacaagcaggagttcgatcacatcgcgggtaccccggacgcgcttacacaacttggtgtgaccacgccgctctttgacctgacccagcaggtccgcgtcacggacagcatgccacgcgacaaactgagcttggatctcgggtgggaaaagggcgattgggagttccacttcaccaacacgcgttacgggaaggtgggggcggtcgcgtttaccagcctgacccccgcccagatcggggttcttagccctggttactcaaccaaggtggtgcccattgagggcagtgatcgcagccagctgatccagtacttcaatgcgaaagtcatcagcgacttgaccgtcacgtacaagccgaccaagaactgggtcctatcagccggcgtcaacaacctgtttgacgtgtatcccgacaagaacatcgcttcgaccgtggagagcgtggcggctggcgccaatgggtctgacaacgttgggatcttcccttacaactacatctcgccctttggctacagcggcaagacgtactttgcccgcgcccagttgcgcttctga

SEQ ID NO: 532760 - DNA, 1575 bp, Stenotrophomonas maltophilia
atgaaaaagaaacgactcccgatcgccatcgcattgacggtgggttgcgtggcctcgctcattgggaccagcgcgtctgctcagggcgcaactgtgagcaaagatgccacccgcatcggacgcagtgccgtgccaaaggccgcagaattccaagagctctatgactttgatgccgctgcgaagactctcccggacgccacgttcccctacgaggcccgccttcaccgggcgcacgtgatcatgctgtcggaacaaggaatcatcacacgccaggaagccggccagatcctcaaggggctcgacgcagtggaccgtgcaagtcaagccgatgcgggcttgcggacgtacctgccgtacgaagcggccctcatccgagaaatcgggcctgtggcaggaaagatgcataccggccggagccggaacgatctggccaatgcagtcaaccgtatgtactacagggaccaggtgaatcgcatccttgaggcactcattgccttgaggcggaccgtggtgaagaaggcggaagagaacaccgacaccgtgatggtggtctacacccatcgtaaggaagctcagccgatcacgctggcgcactacttgatgggaatctctgaaagcttgggcaagtccatccagcgctatgaagagctgtacgtgcggatgaatcagaacccgctgggctctgccgccgctgctgggacgagctggcccctgaaccgtgagcgcacggcggatcttctgggctttgatggtcttgtcgttaacacggttgagggcacggctggctgggatcacatcgcagagctggcatcggacaacgccatctacctgagcgggttgggccgactggcctcggagatccagctgtggaccacggatgagtaccgctcggcggaactggacggcgcattcgcggggaccagcagcatcatgccccagaagaagaaccccgactctctggagcgcacccgccagatcgcagcgaactcggtcggcgcgctgacctccgttctaacctcgctcaatgccattgagtatcagcacagcgtcgcgcgtgtgccgctggagccccgatccatcgatgcgctgattgcagccacccatgccatgacgggcgtggttcgcacgcttcatcccaataagctacagatgctcaagtatgcggcggagaactattcgaccatgacggatttggccgacctgcttgtcaagcagggcaacatcgatttccgcgaggcacatgagatcatcgcatcggtggtcgtcaaagcattggatgcggggctgcgcgcggaccagatcactgcccccatgatcgaggaggctgccaaggcgagcctggggcattcgctgaaggtcaccgcccagcaggtcagcgatgcccttgatcccgtcaagagcgtcgagcgccgcaatggcacgggcggaccgggcaagacggccgtggcgcaaatgatcgcgtcgacaaagaaagaaatagacggttcctcccggcgcttggcagaaaggcaggccaagctgggccaatcctcaacgcgcttggacgagcaggtcgccaagctggtgcggctgtga

SEQ ID NO: 532761 - DNA, 1200 bp, Stenotrophomonas maltophilia
atgacttcaaaacctcggcgccgcttggccgtcataggtgggggcgttattgggctgtctgtcgcgcgcgcgctcgcgatggaaggggcagacgtgaccctgttcgaacgctcctacgtcggctcggggacgagtgggttgagctttgcctgggtcaattccaacggcaagaatccccaggcctaccacgacctcaactgcgcaggcatgttggagcacacccaactccagtcccaagccaagtcgcagacgcgcgcgacttggctggaggcttgtggcacgtttgagtgggctagaggagttgatcacgttgcccgcctctgcaaacgtgtcgactccctaagagaacgcggttacccagtcgagcgtgtctccttcgcagacgttcatcgtcggctgccagatctgcattgggacgggtgcacgggcgacgtttggcattatccgacggagagcttggttcacccccacttgctgatggcatggttgcgatcgcaggcctccgcgctcaactgcgtggtgcgtgagaacacgggtgtcgttgctttggaagagacatcgcagggcgtgaacttgcgcttggcctccggcgaaaagtggcaaggcgaagcgtgtgtattggccaccgggcgatggattccagagttgacgaggaagctaggggcaccgttggcgatgatcaatgccgacgaacccaacaagagggcttgcggcttcttggcaatgacgcctccgctggccattcaactggattgcaacctcatcacccccgaactcaacgtacggcccatcggtggggggcgtctcatgctacaagcccctgatctggatcagtacgcgcaccccgcatatgcacccgccctcgatggctcggtggggcaggagttcgccgcacggctttcccgcctcttcacccacgttcgccctgcatgccttcagtccatccgagtgggccaacgggcgaggcccgccgacggcctcccggccgtgggttttttagtgcctgggggaagggtgtattcagttgttacgcacagcggcatcactttggcgccgttgctgggcaggcttgcggccgtggaactgatgagaggagagagacacccacttctctctccatattctccggctcgactgataggaaaggtgcaggacgatttttccgaggttgagaccattcactacccggctgcacagtag

SEQ ID NO: 532762 - DNA, 927 bp, Stenotrophomonas maltophilia
atgcctacccagatcaatcaagacggccttgatcagaccctgttgctgaagggcctgtttccgctgccgaagttcatacgcttcgtcagggaacgttgcccgctcggaagtttagacgaggcgttgctggtagaagagtggcgggccgctcgcaagttggtgcgtcgtctccagcaggacgaagcggatcaccccgacgacatggaagtcctcccgctgccggaagagatgctgccactggccgaacagccactccgtcaaccctcgatgcatcgcatgacaagcgtggtgccacgcagctggcagatggtggagatcgaccggctggtggtcttccaggaatgcattaacctgcgccacatcgatcagcttgcggcggccaccaccacgtcactcgatgcccgcgaaattatggagcttgtggcgcgaagtggccgccacgcgcatccggatgtgcgcttcacccagtccgagggcagcttcaccttcgcatctgcatccaacgacttgcggttcctcgatgtggcgaccatcgaccctcgcaccatcgccgattacgagcctttcggcgcggccagccacgccctcgtcatctatctcggtttcagcgacaacctggtcagtgccacgcgcattggccgccggattgtcctgaccaatggctcacaccggctgtaccttctgcgcaagctcggcttccgccatgcgccctgcttggtgaccgatgcgtccgacagcgatttttccgacgtattgttgccggccgcggtcaagcaggatcggcagttctatctaggagcttcgcggccaccgatgttcaaagattacctggatccgcgcctgacccgcaccgttgcggtgacccgcaagcactatgcgctcagggccaagctggatctgcagcggatcaccgtaccgtcgctttag

SEQ ID NO: 532763 - DNA, 1953 bp, Stenotrophomonas maltophilia
atgccatttccgttgatcccgcgcgtccgcccgtgcgccctggccgctgccgttgcgctgtcctgcagcgcgactgccgcagccgctcctgatacgagggagcttgatcccgtcgtcgtcactgccaccgccaccgatcggctggccagtgacgcacctgcctcgatcagtgtgatcacgcgtgaggagattcaggctcgcgccgttctcgatctgagcgatgctatccgagggactaccggcgtcaccatcgccggagtcggttttgggcggcgcggcatccgcattcgcgggatggatccggagtacaccttggtgctgctcgatggccagcgcgtgaatgcggccagcgacgcaattgcccacgccgactttgacctcggctggatgccggcgtccgccattgagcgcgtcgaggtcgttcgcggtcccatgtcctcgctgtacggctctgaggcgctgggcggcgtggtcaatgtcatcagccgtcgggcgacggacgaatggcagggcaacgtcgtctacaacggcggcgtggtcggcggcaaccttggggggaacacggtccaagccggcctgtacgccggtggtgccctcatcccgggaaccttgggactcagtgttttcgccgagcaccgccagaaggatgctacccgggaccccacagacgagcgtttggacgagcaggagcaacgccgtgccaacaccggacgtgcggtgctgacctggacccctagcgagcagcagcgaatcgatctgtcccacttggaaggctcggagttccgcaagcgcaacgcgctccaggccgggaccgtgccgtacgtctacgagacgatagacgacattcgtcgccagcagaccacgctttcccatcagggcgactggaactggggtcaaacgcgcgtcagtgcctaccaaagtaaacttgagcgcgagaaccgccgcgacatcggcgacgccactcgccctcaggacctccgcgacgacatcgtggacggccgcgcaacggtgaacctgggatcatcgcaccgtgtcagcgtcggtgcggaatggcggcgggagcgactggacgatgcctcatctgctgcctcgggaacggtcgaggcgatccagacggcggtgtttctgcaggacgaaatccagattacggagggtctgtccgtcgtcgtcggtgaccgcgctgaccaccactccgagttcggctggaaccacagcccccgcgcctatgcggtgtggcacctcaacgacgagttcacgatcaagggcggggtaggtacgggcttcaaggcccccagcctgaagcaactgtcgccggagtactcggctgttggcggcggtggacgcttcacgatcgtcggcaaccccctcctgaagccagaaaagaacacaagctatgagctgtcgggcgcatggcagcgcgatggttggtcgattcagaccacgctgttccaaaatgatctggaagacctaatccagacagtgtgcgtccggtcctgcggcgtgcggggcagggagcttcgcaactacaccaacgtagcagaggcgcgtatccgcggtatcgagctttccggtatcgtgccgctgacggacggtctgcgcatcgaggccaactacagctggctcaacaccgaagacaaggaaacggggcaggagctcaatgagcgacccaagcgtagtggcgctgccagtctcgtttgggaatacggtgcgcttcaggcgacgctccggggcgaatatgtaggaccgcagaagcaggcgtctggaacggcacaggtcacgctgccagactatggactggtctccttggacactcgctggtccatcacccccaggctgagcctggtggtgggggtggacaacatcgcagacaagcggttggatgaaaccggggcgttgtatgcctatccggaaaccggccgctacgtccacgccggctttgacttggcgttctga

SEQ ID NO: 532764 - DNA, 3900 bp, Stenotrophomonas maltophilia
gtgcgcttccctgcagtgcttttgttgctgacgctgctgtttcccctgtccggatgggcaggggagttgcgggtagagatcgtcacgaccgacttcatcatgcccgccaagatcaccgcgatcgacgggctggtgacgcctgcgggagtgcgtgtggaacagcggctggtcggcaagggacaggcgcttcctgaggcatggcctgcgggggtcgacctgatcatcatcgacagcccccggccatcggatgcagagcagatcatggcgacggtcaagccggcgctggagggcggaaacgtgccgtgggtgcgtattggcggcggggcgccagcatctggcggcctgcagccggatcacgcgcggcgcatcgcaaactactacggcaatggtggcgaggccaacttcaggacgctgggcctctggctgtcccgatgggccaacgccgatcccagcgccgacagcctgcccgcaccccacgtactgccggcctctggctactacgcaggtcccggtcaaccggcttacgacaccgtgcaggggctgaaggcggcatggcagaaggcgggacaggcggcctggccaagggccgcggtgatcattgccgcgaacaccgtcagctccatgcagacacaggtgctggatgccttggtggccgctggcatcgaccggcgagtttctatctttggcgtctggtacgaccaacagggcaaggctgccctgaccgacgcaatcgagaagctagacgtgtctgcagtggtcaatctgacccacctccagagcggcaatgctctcaccaaagaattcgctgccttggacgttccggtcatccaagcgctgaactaccggcaaggcaatgcccaacaatggcgcgaggcaaccagcggtgtgcccatgtcgctgatggccaccttcgtggcgctgcctgaaacctggggcgtgtctgaccccatcgtggtttctgcgaccgcgggcggcgcgctcgaacctatcccagagcaggtcgaggcattggcggccaagctcgagcgtctggcgcgcctgcgtacccgtccggcaccggagaagcgcttggcgcttcttttctggaactcacccgatggcgagaagaacctctccgcctcccacctgaacgtgccacgaagcatcgcctcgctcctcccaaagctgaaagcggctggctacggggtgacgctggccgatgagcgccagatcatcgaagacgcacaggcattgcttggcggctactaccggccagagtctctggacgaactgctcaagcgaggcctggctgtgacgctcccggtgtcccactacacccaatggctggcgtcgctgccagccaagcgccgcgaggaactggttcagcgctggggagaccccgcccaaagcccctacatccgcaccctcaggggacagccgtgctttgtgatcccgcggctccagctcggcaacctccttgtgatgccgcagccgccgcgtgcgggccaagtcggccaagccacgcatgatctggaggcaattcccagccactattacctggccgcatacttctaccttcgggagtcctggggtgccgatgccttcatccacttcggcacccacggcacccaggaatggacgcccggcaaggacagagggctctgggcaggtgactacccttggctcgccgttggcgacgtgcctgtgttctacccctacattcaggacaatgtcggcgaggccatgcaggccaaacgccgcggaagggcggtggtggtaagccaccagactccggcgttctccccgtctggcctctacgacgaactgcgggaccttcatcaactggtgcacgagtatcagcaacttgatgccggccaagttcgcgaggccaccgccgcccagcttcagcagacggcgttggcctcgggcattgccggggacatgggctggagtgcggtcgacatgcagtcgcgctttccggcgttcctgcaggccttgcacgaccatctccatgagctggcgcgacgtcagctcccgttggggctgcacacctttggcgaacctgcgggcgagagccctcgcctgctgaccgtcatgcagcaacttggaccagcctacccaacggcattggggctggatccaacggagaccaacacgggcgacgccgaacagatccgcgccgggcttccctaccagacactcgtccgctacctgagagacggcgacgatgttgaggcagtgacggatgcagaccttcgcgcccagctcacgcgggcgcagctgctggacgccgcgctggtggatacgcaggaagttgaagcgcttctgcgaggccttgcaggcggattcgttccgccgggagcgggtggggaccctatccgttcacccgaagtgcgcagtggcagaaacctctatgccttcgaagcggaccgtatcccaacccaagcggcttttgagagtggtcgcgaagcgttgaaccagttgctgaatgcctaccgggaagaccacggaaacgtcctgccgcagaagcttgccatcagtctgtggtccagcgaggccattcgtcacctgggcgtgctggaggcccaagtcctgcatgccatgggtttgcggcccagatgggaccagggaggaaaagtcatcgccctcgacatcgtgcccgaagaggagatgagccgcccgcggattgatgtcgtggtccaggccaccagcgtctaccgcgaccagttcgacccgttcctccggatgctggccgatgcggtcgtccgtttgagcgcgcttccgcccacggccagcaatccgatcgcccaaaacaccaccaccgttgaaaaggcgctgcgcgagcgtggcgttccggtcgaacaggcagaggagatggcccgtgttcgaatattcagcaatgcgccaggcgagttcgggagcggattgaatcgtgcggtgcttgacaggaaccagacggcgcagaaggacgatgccgcgctggcggctggcttcctcgaccgccttcagtatggctacgacgcaaaggggcgggcgcttaccctgcccgaaggcaacctgttcgccgagcagctgcacggggttcaggcggccgtgctttcgcgttcttccaacgtgcatggcctgctcagcacggaccacccctttgagtacttgggtggcttggcgctcgcggttcggcatctggatggcgcgacgccatcgctgttcatctccgacctgcgagaagcgacgccaaaaaccactgctgcggcccgctttctggcagacgaactgcgcactggggtgctcaacccggcttggatctcggcgatgaagcaggaagggtatgccggcacattggaggtgctcaagaccaccgacaatctgctcggctggcaggtgaccgcgcctggtaccgtacgacaggaccagtggcaggccgtgcacgacacctacgtccgcgacgtgaggaaccaagggatcgacggttggtttgaagacgccaacccaaccgcgcaggcccagctgatcgagcgcctccaggaggccatcgcgaggggctattggagcccgagtgagaagacccggacggagctacagcagcgacttgagcagctcgcgacccttgccgtacccgagggctctgtggctgccgcagacgcagcggataccacaagcactggcttcggaacgtcgaccgggcctgcgccctttgctgccgctgcgcctgacgttgaccccgggtctgctcaacctaccgcggctgcgccagtgcccaccgtgcgtggtcgggtaatgcgccagatcgatgcctcccctcaaccctcctcggcacacaccgaactggccctgctcgccctccttttgttcgtcgccctcggtgcttggcggcaggccaaggcccacgaaggcgtcccacaccaaaacgttgacccatga

SEQ ID NO: 532765 - DNA, 477 bp, Stenotrophomonas maltophilia
atgaacgctattgaaaagaccctctacgatgtctcccacctgttccttgcccccgtacttctgttgatcctgttggcactggcttactccttcatcgccttggggggcttcctgtgggaagcatttaagcgcaggaacggcaggtatcgatcggcgctgctgaactggcacgctcaggacggtggcaccacggatgacgccgaactgtggattctcaagagattggagatgctgcggatcgtttcccgtacagcgcccatgctgggattggtcgccacgatgattcccatggggccagcgctgctggctttaacccaaagcgatgcgcagagcgttggtgagaacatggtcgtggccttctcttcggtcattttggctctggtatctgcgagtctgaccttcttcatcatgacggtgcggcgtcggtggctccttgaagaacttcgacagcttgaacgagcgaaggaggcccactga

SEQ ID NO: 532766 - DNA, 336 bp, Stenotrophomonas maltophilia
atgcgattccttcaagacgaagaggccgacgatcccatcctgtctgtcgtcaacttgatcgacttgttcctggtcgtgacgggcattttgatgatcgtcatcgtcagaaacccgctcaatcccttctcctcgaccgacgtgacggtcatcgagaatccaggccaagaagacatgcggatcaccgtcaaaaagggtgaggaattgaccaaatacgagtcgaccggtgaaattggggagggaggcggcaccaaggctggcattacttaccggctgcccgacggaaggatggtgtacgtgccggaaggcgcgatgccgagtgaggctacctcgccttag

SEQ ID NO: 532767 - DNA, 612 bp, Stenotrophomonas maltophilia
gtgccgtctgtgccgttgatttggaaagccgtgtccaagcccatggcgcttttggttgtgctgacggtggctcccctattgagctacggcgcggacaggccgcttcaactggcgtggagcgacctgcaacctgcaggggaggcagaacacaacgcgaagatctccgcagcccttacctcgggtttgtacgacgccatcaaacgccggcgcgtcagggagtatgagtctcaggcaagggaactaagggagcaactgaaggctggtaccgttccgtcactgaatgggaagagcgtgaggatccccggctatgttgttccgctggattttgacgatggcggactggtgaaggagttcctgctggtgcctttctacggcgcatgcatccacgtgcctgccccgccagccaatcagatcgtccatgtcttggcactccgcccacgcaagatcacagattttcgaatcccgatctgggtcgaaggccgcctcactgtgatcagttccgccccgtcacaagcaccggcgtcctaccagctcagcctaaccgacctgcaagcctattcgggcggggacgtcccatactccggctccaagcctcatcttggggagcagtga

SEQ ID NO: 532768 - DNA, 255 bp, Stenotrophomonas maltophilia
gtgttcataggcttcaatagcgtcttgttcaactgcgtggtgggtgcgggcagcgttgtcagacacaacgcggtagtggatggagtcgacctccccgcaaacttctacgtgccgtcgaccgagcgaataggtccgaagaccgatctgaccagtattccaaagctcagcgcctcggcttcggaattctccgagagcgtagccgacaccaacaacacgctggtgaccggctaccgaagaatccgtaacgatttttga

SEQ ID NO: 532769 - DNA, 255 bp, Stenotrophomonas maltophilia
atggacaatggcccggtgcgcgatagaagtgcgttgaccaatcactaccgcggcaccatctttggagtgaatgactacgccatcttggatgttggagtgagcaccaatgacgatcggttcaatgtgcccattctcatccatctcatctgcacggatgactgcgtagggccccacaaacacgtgttcgccgatctcgacacgaccacaaatgatggcggtggggtccacaaagctgctttcgtggacgaccggtag

SEQ ID NO: 532770 - DNA, 1077 bp, Stenotrophomonas maltophilia
atgaccgcggctgcgatcccagcaaccctcgcgacaggctttctcggtgccgggaagaccacgctcttgaaccaccttggcgcgtctggtggattgaccgatgccttggtggtcatcaatgagttcggacaagttggtctggatcatctgttgatgatcgaagccaaagaagagatggtcgtagagctgagtgatggctgcgtctgctgcacgctccaaggcgacctcacccgcgccctcctggaggctgttgagcagcgcgtgcaaagcggtcggccgccctttgaaagagtagtgattgagacatctggggtctctgacccggccgccatcgccaaggcgctcacgcttgacccgctcttgagtccgcactttcatctggaggccgtcgtgaccttggtcgatgccgcacaaggcgctgagaaccttaagaggttctccgaggcatcggctcaggtcgcactcgcagacctcatcctggtcaccaagtgcgatggggcagcatcttcggccgtggaagggctggtggaagaccttcaggcgcgcaatccgtttgccaagatcgaggcgatcgaaggggggcggattgactctcaaaccatcttcgatcctggactaaagctgcgcaggcccctgctagagctatccgacgtggatgtttctcctctgccccagccgtcagcgatgctggggttgggaaaccttgcggcggccacgggcgcccgtccgccccatggaaaccgttaccaggtgatggggtttgagtcctgtgctccgctgtccagaatggcactcaggtgctggttggccacggttctcaccatgtttgggcatcaggtccttcgctacaaggccattttggacattgaggcggaggacaagcccttggtactgcatggggttcagggtgtcatcagtccggagacatggctggaggattggccaccggaaggccgcgtgagccggatggtgttgatcacccaatcactgccgcccccggtcatccaggccggtctggacgcctttttcccagaggcattcgttccggcacagccaaacgcgtggcgggccgcatga

SEQ ID NO: 532771 - DNA, 915 bp, Stenotrophomonas maltophilia
atgaccccagctcctgattgtccgctgcccgatgtttccgtgagtgggcgggcaccgtcggcacacgcactggactgggtcggcatgcgggatatccgcatgccggtggccctagaagatccgctgacgaggaccccggtaccggcaagctgggaagccctggtcaatctgcccgagcccggcgtgaaaggcatccatatgtcgcgcctgtacacattgcttttcaatgcctcacagaacgcgctggcgcccgctgatctctgccacctgctgatggacgtggtagcgagccatgacgagtgcaggtcggatgcggcgcgggtggtgctgcgtaccgagcttgttcggccaacaaccgcgttggtgaccaagggccttaacggttgggcaagtcacaacgtggaaatcgatgcatcgatcaggggcagcacgcctcaaatctggctgaccgtggatgtcacatactcctcgacttgtccgtgctcggcgtcacttgccaggcagctgatggagcgtgccttcctcgaccagcacgacgcccacgctgaaatctcggtcagcgaagcggccgcttggatcgccaagcatggaacgatggcaaccccgcacagccagcgaagtgtggcgaggatcaaagtggcggtcagtccctacgagccatggaacttggcatccctgattgaggacgccgagtgcgcattgagcacggcatcccaaggaccggtaaagcgcgccgatgagcaggagtttgcgttgagaaacggccaaaacctcatgtttgttgaggacgctgtgcgcctgttgctttcgacgtttacgcagaagcaccctgcgggctctatcgacgtcacacacttggagagcctgcaccctcacgatgccttcgccgctgcaagctggggagcaactgtatga

SEQ ID NO: 532772 - DNA, 1311 bp, Stenotrophomonas maltophilia
atggccatctccctttcggactgtcgcctcccggtgacagtcctctccggtttcttgggcgcgggcaaaaccactcttttgaacgccgtgctcagcaaccgaaaaggcttgcgagttgcggtgatcgtcaacgacatgagtgaaatcaacgtcgatgcgcagctagtccgggatggtggagcttcgctcagccgaacggacgaaaccctggtggaattcagcaacgggtgcatttgctgcaccctgcgcgatgacctgctcaaggaagtccgacgcctggccgaagaaaggcgcttcgactacctcctgatcgagtccacggggatcggcgagccgatgccggtggccgccactttctcggtgagggacgcggatggcttctctctttccgacatagcccgcttggacacgatggtaaccgtcgtggatggtcagaacttcctcagggagtttgggtcgactgagcgactggcagacagaaacctgcaggccggcccggacgacagccgtggcctggtcaatctgcttgcagagcaggtcgagttcgccaatgtgatcgtggtgagcaagcgcgacctgattccggaatcggagatgcgaaagatcaaggcggtggtccgctcgctcaaccatgatgcggtgatcgtggaggccgtcagtggaaacgtgcctctggagaagatcctcaacacgggactgttcgactacacccaagcgcagctcgcccctggctggataaaggagttgcgcggagaacacgtaccggagactgaagaatacggcatcagcagttttgtgtatcggcaggcccgtcccttccaccctacccgtttcgccgagctgctggtgggtggcattcccggcactctgcgggcgaagggtttcttctggcttgccagtcggatggattgggtcggtgaagtgtccatcgtgggcgggtccacgcagacccaggccgcaggcttctggttcgcagcacgccatcgcgtggaagcggggctgatcgggatcccgccagaggccatcgccctgttgggcggcggcaggaacaaggccgcgctgcaggaatggactgcccctcttcctcctgccgagatggtggatgatccacgggaatacgctgcgatggcccgccaatgggatgccctttggggtgatcggcgacaggagctagccgtcattggcgtgggcttggatgaacaggttgcgcgttcagcgcttgatgcttgcctgctgtccgacgatgagctcgctggcggcccgacctcctggctaaacctggccgacccgtttccggagtgggtgcgatga

SEQ ID NO: 532773 - DNA, 1824 bp, Stenotrophomonas maltophilia
atgggggcggccgcgctttgggtctacccccgcgtcaccacccgggtcaacgtggcgtcggacgtcgaaaacgttcgggacttggccagccgcattgatcggtcccacggcatcgtcggcacgttccgcggcgtcagcacattgaacgtccttgaggatgggctcgcccccgccgacttccgccaagccagcccggcggccatgagcaacgcctggggcggcaccgtgaccgtgtccccaaccacggtgcgcatggcaggggatgccttcaccgttgggctgtccgggcttcctgcccgggcctgcgtgcccttcgtgtcggccgtggcgggcgacgtgaacgtgcgggacgtgatcgtgggcaacaccagcgttctgttgggcaacggcggatccttggacgtccccggcctgggattggcatgtggggccgatggtgccgtggtcgaggtcgtctattactcgggcatggcggccggctcgtcggtggccgtggtgcccacgcttcccgttccctccacgcccgcctcccctgccccttcaacgccgacaccggctggacccgtttccggcgcgcccagcgtgagcgatgcggtgcccggcgttcctggaagcgtatcgccaagccttggggttgcgccttcccctgcggttcctccgcttccggttgcacccagcgtttctatgcctcagccgctcccaacgccagtccccaccacggctccgccggccttggcgccctgccggcaatcggaaagctcggtggctcgggccagctgtccggcgggcacgtggggcacggaaacggtgcggacacgtcaggtctgcgcccccgccgacgtggatccaaactcggacgcagcgtgggagcatcccgaagcatgggttcaatcccagaccgcagtggccgtaaccgcgaaggattgccaggcctgcccaggaaccacccgggaggaacgcgatcaatggctccccacgtcgcaagcctgcccgtcgggccaaaccggcacgcacacgtgggagcggcagcaggtgcggtctcgggacgtgttcacccattgcccgttcggcaccacgaccctgcccggccccacttacggcggctggtcggcgtgggcggatacgaggggccgtcgcaacgaggtcaacacatgcaagcccacggctgctcgctgcagcgatggcagcttgcaggttgtggcgtggcactccgccgattggcaggacgtgccgccgccctccggttcgagtggcatttcttactggtatcccgacgccgtggtgcgcctgacgacagcggaaaaagccaagctggactgggccatcaacaacgtgcccattcaccgggtcgagacgcctgcatcgatgcccggcaactggcccgccaacgtgagcgagtcggcgttctacgaagagcaatgcaacgcgctttcggacactgggaacatccgctacgcctactcttatgactttgagtgcgtcgctcatatgggatggcactactgcgactacaactacaccagtggcggcacttccttggcggtgtgccgccaggcctgcgcatcagacttggtgggcaagagcaataatccctaccgctgggagtggccagagtcgtccgtcgtggcttccacgccctacacgacctgtacgggccagcccggatgcacgcccaacggcggttttggcacccagcagggcctgccggcgtgcaacgagcacaacgtgggtcagaccgtcgtcttcaactggtatcggcagttctacaaccccgtgcgggtggactaccagtcgctcacgctgacgtgcagggggcctagctga

SEQ ID NO: 532774 - DNA, 471 bp, Stenotrophomonas maltophilia
atgagcgccgggacggaaagcctcatcagggccatccaaaccaacgactcgctggcgttttatgggtggctgcacacactcaaggggacgcccgacctcgatgctggcgtggtcggcgatcctggcatcactgcgttggcggtcgcgagcgtcatgtattccaaggccatccagtcggaccggatcctggcggcgcgctatgccgcgatggtcgaagcgctcatggacgccggggccaacccgctggtccggattggggagcggttcgtcatgcgacgggggcatacggggaagctggagcggcgccgggtggacgaaggccgaacgctggcggaagtctgcggaggcgttctctgccctgccatgcaggcatggttcggcctacatatgaccgaccggcttaacacagagctccaccgacaccatcctgcctacgttcgctcacatcggcatcgcgaagcagtcgtctag

SEQ ID NO: 532775 - DNA, 396 bp, Stenotrophomonas maltophilia
atgctaccccagaccattgttcaagagtttttccgtcgtgccgcctccgatgagcccgtagaacacatcgccgaattagtcagcgagaaagtcgattggttcgtggccggggatacaaacgtcgttccttggataggccgcaaatttggtaaggccggagcagcggagttttacgctcagatcagggagcagatagcgtccgaggcatttgatgtaagcgagattttttccaaaggaaaccgggtactggcaatcgggagcctgaaatcccgagtcattcgaactggcaaattgattgaatcagaattttgctttgatctgacaatcgacaacggggagatcactcgcttccgccttttcgaagacagttttgcagtggctcaagcaacgagctga

SEQ ID NO: 532776 - DNA, 1521 bp, Stenotrophomonas maltophilia
atgagcagcaaccatatgtcgaaccaaaagcagcgccgtacacgccgggttgtgctccttcttcttgggatggcagcggccgcatccgcaggcgcagcgcccacttctacccgattgtctgatcacaacggtatgccctcatcgagggagatcttcagctacgtggaagacatcacagactttggtccccgccgaactggcagccatgccaacgtgcagacggcggactacatcgccgacaagttccgggacgcgggtctaaagaacgttcaaatcgagaccggcgataccttccaatggacggccaccaagtggggtctagaggtggcgggggctgccgtgccagccttctacatgcggcacagtttccatcctggcagcgcaggccgattccagacgccgccggaaggtcttgaagcgcccattgtgtatgtgggcaataggaaggatctgagcggcatcgatgttcgcggcaaaattgtggttgcggacgtggaactggggaagatcaacctggctcaaatgatgggggccgcagagctggtgcacgatccggcccgcaccttgaaacagaccgcaaagatcgatccgtttacccccaataactttccttacaattttgcttcagcgatgaagggtggtgccgtgggcttcatcggtatcctggccaactacatcgacagcaaccggttctacaacgaggacttggcctactttgtggacgacgacttgcacctgagcctgccagggctctgggtgacccgaacggatggagagcggctcaaagccatggcagcacagtcgggtggggctaaagccaagctggttttggaggggggcgttgagaaagtgaagtaccgtacggtggttggctacttgccaggccgtacagcggaaacgttgatggtgcagtcgcaccatgactcgggtttcgcgggcgccgtcgaagatgcaagtggaacagccgaagtgctggctttggcaaagtactacgggcatcaagcacccggaactcgggagcgcagcatgatgttcgttgcgatggacagccatttcacgggatacgaggcgcacgtggattttgccaagaagcatatcctctcgtctgccgtcgacgttgtagcgaatgtgacggttgagcacatcgctcgcgagatggtggtggagaacgggaaggccaaaatgaccggcttggttgagccccgcgtccttttgacgtcgccgtcgctgctggatctgaccagcgatatcgttaagcagcggaactaccggcggtcgatggtcgtcggtacatcgctctttcagcacgaagagggactgcccacggacgttgggcccattcaaaagctcacgggcatcccggtgatcagctttatctctgcgcccgtttacctttatgatatcggagataccttggacaaggttgcggtcgaagaactccatcccaccgctctggttgcggctgatcttctcgaccggttggacaagatgccaaggaaacagattggccgtgacaagtga

SEQ ID NO: 532777 - DNA, 1305 bp, Stenotrophomonas maltophilia
atgtccaacgatgctgacaaccgccggcgacacttcctgaagctctctggactagctgcagccgcgtcttgcggcctgcttgctggctgcaggggccgagattcgcagcccggggcttcgaaatcgagcgaagcgccagcgggcgcgaaggccgtaagaactgtgcgtgggccaatcgagccgggcctgctcggtttaacggacatgcacgagcacgtgctgcgagacgctgtgccgaccatggcgcaagccttgttgatgttcgaccgtaagaccatcaaagaacaagcgatgttggcagacccggagccggtgcccagccaattctttcctgagaaagacaatcccattgtgttgggaaaccgcggttacctgcgggatcactacgccaacggccaaaatcagttcattctagatgaagagttgatgaccggtgaattacgggacttcgccgccttaggggggcgctccatcctggattgcagcatcaccttcgagaggggttctccattaaccattcgaaggatgtccgagcagaccggggtgaacgtcgtcatgagcacgggcatcaactcccacgtgctgctcccaaagaagttcaaggcaatggacgtcaaagagctggctggattctttgaaaaggagatctttgaaggaatcgacgacacaggggttcaatgcgggaacatcaaactgctggctgaaagtgagctgtttggctcgaaggcaaccgaggaccaacccctgatgcgcggtctggaggccgcagcggcggtgagccgaaacactggagccccagtgactgtacatgcgtacctgctaggcgaggaggtgatggccgagttcctcgaaaaagccgcgggctttggaatgcctgaaggtcgcatgatcatcgcgcattttcctacggcgctgcagcccatgacctaccaagatttgatgaacaacccgaaaagcttcgccccgaacctggacatcggctttcgtgccatggacaaaggttttatcctgtcctttgatctttttggggcgggagacgcctgggctgatactgctgaaggtattgttccctcctatgacccggtttccttggctgccgtttatcaatatgtcaaggctggctacgctgatcgtatcgtgttgggcactgatctctggatgcgcaactcaacacgtcgtcacggcggccatggaatatcgcatctgttgaactacgtggttcccatgctgatgagaagcggcgtcaagaaaagcgaaattgatcagatgttgattggtaatccaaagcgattgctggcgttctaa

SEQ ID NO: 532778 - DNA, 1305 bp, Stenotrophomonas maltophilia
atgagtgattacttcgagattgcctacgccgctgcatccgagcgcctatgcctgttcaccggaacgggcttttcgaaggcagttacgaacaacagagcgccgagttggcagcaacttcttgagggtgtctgtgacttggcgcctgatccagcctctttgaaggaagcactttatccaggcggaatcttgggagtacttagcctcgaagaatcggcgcaggttatttatcttgagctcatgagggccggaaaaagcattcatgatgagattgcctcgggaataagacagatcgagctagaaggtgacaacacagcaatcgcaagctttctatcaacgaaggctgtgaaggtggccactaccaactacgacaaacttttggaggcactggcaggccctggcacctcccattcgatcactccaggcctccccatacctcgatcacatgcaaaggttgaggtttatcatgtccacggctcagtagacagcccgggaaacatggtggtcacctcggatgactacttcaagttcatcaataccgagtcatatttctcaaggaagctcagcacccttcttcatgagaacactgtggtcatcctaggctattcactgggtgacacgaatctgaaagcgatattgagcaactaccggggcttttccagaagccactcaatcggttcaaatatctttttggtgtcgcgatcagcggtcgcgcagcacttgaaagactactatgcacattgttacggaatccgggtgctcgacaggaccgaggtgcgtgattttttcgtctcgctcaacgcaacaatgcctatcgctgaaaatcgactttcgaactcacgtaccgacctacacaacgtcatcttcaacggctatgagttcactactgaatacttgaagattcaaagctcgttttttgaaattgtggcatcgctcggagctgccggactgagcatcaatgatgcccgagtggtggagatgctcggaagggtgataagaacaaaaatcgcccttacgcaggagaacggagcatggaatcagtaccccgacctcgctcattggcttgcttatctcgcgagcatcctggagctggaagggacgtcaatcgaaggcacattccttaaagccgtactgcactctatgactacaatgaggcgagagaaatacataggctattcgtggcaagcgtaccgctcatgggaggcgcgctggcccaacgtcattgcctccaatcgaagaatcatccgcgcgcatatcgaggcgaacactgggtgggcggatgctttggccgttgtgaagtctgtatga

SEQ ID NO: 532779 - DNA, 909 bp, Stenotrophomonas maltophilia
atggccaagaagtccagcgatcaatcgaaatccgcaagcaagaagcgcccccccgagtcgagggctacggggccagcaaagaaaagcgcaacacgtccagtaaaagcgtccaaggctgcagcaaagctgggccgcccagccgccgacgatcgcatccgtgcggcggcagctagtaagcaatctgcgagagtcaacacgggcaaagcaaccgtgggaagccgaggatcgaccggcaaaaagacgaaggttgcgccgccggccaagccgcctgccaagcccaagcaaacatcttctggtcaccctgaagctgctccagctgtctcaaacagcacagcagtcaccagccgcccgtcgaaatcgaaggggcgcactggcggacctcagccagataccgccgccacacgtaaaaaagcagtcaagggccttgtgcccaaagacccttggtatggcattgtcttccgtgccaaagataaagagcggttgcaagacatccttcttggaggggtgctcctcccaatactcgtggagatcgccacccgtggaggcttgctggggttcttcacccccctccaacgcaagctcgaaagggctcatgaccagttccgtcgcagtctaccgaagcctggtaagcgcgcactgactaccgcccagcacctagctgttctgcaggaccgcctctacgtccaaggactgctcgcactcaccctaacgtgcgtcaaggacaacccgagcgtttgggagtcaaaagctgcgctcaagcgcttcagtgacacggctgtcgactgctatgaccaacgtcatcagcgtgccggaacggcagagaggctgtctgcgcttgcggaaaagatcacattggagcaagcaacctttggcatgggcacgagagcacgacgtcgtggcgggctctag

SEQ ID NO: 532780 - DNA, 795 bp, Stenotrophomonas maltophilia
atgcgcgatgtggtgaactggtcgaagtggcaagcgttggcggcccctgaccgggtcgccctgctgctggaacgccgtaggtcggcgctgctgtatgccgaaaaccacttcaccccactgagccgtcatgccaagcgggagcgcgtgctggctcacctgtctgcccggttcgacaagccccgcttccgggttcaggcctggtccgggatggtcggtggtgagcgagtgtgcctagtcggctggagcagccgtgcgggcgatgccctagcactgagcgaggcgctgctggcgttgcgaatgcgggacggtgcagaggtactgatcgagggcaagagctgccttctgcgggtttcggtgagcgggttcttgcctgccgtatgggcgctcattgaggcccatgggatcgtcgttgagctggacgtgccaggcgatggcccggtcgattcagaggactggcgggagtgctggcgccaccacgcaatggacccagtgagcaaccatatgcgcgctccgatgaccggcggtccggcccttccccatgcaccccgtgtgctttccacgaacccagattccgttcgccggctggcgcagatgcaagcggcgaagcgggaagacaggctcgaggaagccgagctgttgtatcgggaggcgatggcaaggaaggggaaatatcttgagcgagtgaagcgcggcctggaggctccgatgccgttggacgactaccgggcttgggcggatgaggtgcggcagctcggcgtggcgtgggcgctgctggaaaacgagtgccggggctaa

SEQ ID NO: 532781 - DNA, 147 bp, Stenotrophomonas maltophilia
atgcacgggggcgtcggcaaggacaatggcatcgaggaagggggtgaggtcaagcacgacgcacccccgagccgttcaacgctgacctcgcacccggattgcacaacagcgccagagggacgcggccggggcttgagaaagatttga

SEQ ID NO: 532782 - DNA, 990 bp, Stenotrophomonas maltophilia
atgtcccacccgctttaccgcccgcgccgcatgcgccacgacgagttctcgcgccgcctgatgcgcgagaacacgctgaccaccgacgacctgatctacccggtgttcgtgcacgaacgggcgggccgcaccgcagtgccgtcgatgccgggcgtggagcggctgtcgatcgaagagctgctgaaggtggccgaagaagcgctggaactgggcattccagtgatcgacctgttcccggtgatcgacccgtcgctgaagtcgctggacgcgtcggcggcgtgggccgaggacggcctggcgcagcgtgcgatccgcgcgctgaagtcgcgcttcccggaactgggagtgatgaccgacgtggcgctggacccgtacaccacccacggccaggacggcatcatcgacgacaagggatacgtgctcaacgacatcactgtcgaagcgctggtcaagcagtcgctgtcgcacgccgaggccggtgtggacatcgtctcgccgtcggacatgatggacggccgcatcggcgcgatccgccgtgcgctggatgccgacaaccacatcaacgtgcgcatcatggcctactcggccaagtacgcctcggcgttctacggcccgttccgcgatgcggtgggcagcgcggccagcctcggcaaggccgacaagaagacctaccagatggacccggccaacggcgacgaggccctgcgcgagatcgcgctggacctggaagagggcgccgacatggtgatggtcaagccgggcatgccgtacctggacctggtgcgccgggtgaaggagacattcggtgtgccgaccttcgcctatcaggtgagtggcgagtacgcgatgatgaaggccgccttcgccaacggctggctggacgaacgcgcctgcgtgctggagtcgctgctgggcttcaagcgggccggcgccgatggtgtgctgacctatttcgcgccgcaggtggcgcgatggctgcgcgagcgctga

SEQ ID NO: 532783 - DNA, 303 bp, Stenotrophomonas maltophilia
atgagcaacgaatctatggagcaacgggcgcgagaactgttggccaaggtgcacgccgaggccggatggccaggatgtgagaaagaaattctgcagggcgccgccacattcgacgtggatcacggtctcgccatggctgcaatcgtcgccgccctcacgccgcctgatggttgggtgctgatgccggcggtgctgcccgaacccatgctggatgtgctgtggcgcgcggaaggcgacatgaaggatgcggacatgcagagcctgtgggccgagctgatcgctgcccgcccggaggtcgcatga

SEQ ID NO: 532784 - DNA, 543 bp, Stenotrophomonas maltophilia
atgttgaacatcaacgaagacgacctgaaagccgcaatcgtcgcgaaggcaaccgacgaaatcctgtccgattcggacgagctggaggtgctgatcaagaaagaagtgaaagcacgcctcgacaggatctttgtggatcgtgcagaagctcagattcaggcggctatcgacgcagctgtatccaattcgttcgagcgggagtatcgccgcgtttcgtctttcggcgaacccgaaggaagccctacgagcatccggaaagagcttgaaaagacggtcagcggctactggagttcgaaggttgacgcgcgcaccggcaaggccactgacagcagctacaacgcggtgacccgcgccgagtacctgatgaccacgatctgcgccgaggacttcagcgccgcgatgaagcagagcgcgctcaacgttaccggtgccctgaaggatggcctgcgcaaccagatcggcaagcagatggacgggatgttggacgagctgttccgcatcaagagcctgcaggaccagggcaaggtcgaaaagccctactga

SEQ ID NO: 532785 - DNA, 441 bp, Stenotrophomonas maltophilia
atgttcgagaacctgccgaagaacaccacgcggacccgctacaagggaattcggtcgcacctgcgctgccaggacgactgccgcgaggaacggggccttccgctgcacccggccaacgacttcatcacctgcccggactgtgacggcaccggcgaacacgtccgcaatgacagcgccagcggcgatcctcagtgcgagtacggcgtggcctgcggccgctgtggcggcgaaggcgagattgccgacggcctgatcgacccgctgctgctggtggcgaagtaccgcaagggccgcttcggctgggccatgagcgagcgccgggccgctgaccgccggtaccactacaacctgtaccggatgcgcgccatgcgcccctgcagcggtctggctgcggtcgacatgaacgtcgttcaccgcgaactgcagcaggtggcggcatga

SEQ ID NO: 532786 - DNA, 222 bp, Stenotrophomonas maltophilia
atgtacgagaacaagaagctggaactgcgcctgcggcacaccgaggcgaggaccgaagccctggaggacatgctggtgatcgtgagcaagggactcatccccggatcccccgcagccgccgtggttcaggcgcaactgcgagaagcagctgcatacgcgggcccgtccgtagcgaagaaggaactggcctccctcgcccgagccatgggcaacctgcagtag

SEQ ID NO: 532787 - DNA, 261 bp, Stenotrophomonas maltophilia
atgcgggggaagacgttttcccctgcgttcccctggctggttctgaaaatggccgcacccccaatcggaatgcagcctgtgaaaaagactcagccggccttggccgacgtactgacgctcacgcccatgtgcggaaagctgtttgtggtgaagcgggtcggcgacacggttgaggccaggccgatgcggaagccggtgccgaagccgcccggtgcgcccagcgtggtgatccccttccccgtcaggagggccgtccgttga

SEQ ID NO: 532788 - DNA, 669 bp, Stenotrophomonas maltophilia
atggaactaggccttcgccttgacaaggaacgcctcaatgaggccagccgccctaatcctgcgctgctctgcgtactccagaagttcaatgaagcgatcgacgtgtcccggcatcaggagtcggtccttcagcaggtcctgggcttcttcaaagaagttgatggtggtgagtatttctccaccagcatcaggcatgaggtggcattcccgctcgatttccctcatttctctggaaattggtgcagccctcatcggcaagatgacgcttccgtcgcgttggaccttcgcatgatcgagctgggcggaaatacccttctggaaacgcctaacggccctatgggccctggtgtagcgcatgttggcttcggccctttcccgcttgtccgcctcccttttggcggcagatcgttcgttagaggcgattacgattgccgcaacaatggcggcgatgctgccaaccgcttgaacccaagcgggtgcgtccttgccgaactgaatctgtccggtgaaagcgagaagcacgaaggcaaagccgcagccagtggctacaagcgctgcgttgaggcagatcctcgtccagttgaatctcttgatcaattccatgttggttgccccggtatctgtgtcggaaggatacccactcccgcattcacgggggagtgctgctga

SEQ ID NO: 532789 - DNA, 270 bp, Stenotrophomonas maltophilia
atgctcgtctatccgaaggaacaggacgacacgacgccggatttcagttggttgaacgacattcctgacaatcagtggggtgcgatgggcaccggtcagttcaagacgtttgggctacagcagttcatggatgagagcaacgccacgatgcaggacgtgcttaacttcgatcagtggggtcaggtccagacccggaactatcgtgccgaaatcccggaaatgctcaacgacgcccagccgatcgtcatggtgatgtggcccgccatttga

SEQ ID NO: 532790 - DNA, 360 bp, Stenotrophomonas maltophilia
atgaagcgccctggcatggatccgcgggaggaagagcagcgccggcaggccgaacgcctggccagcctgcaggacacccagctgcgcgaggacgtccgcaacgtcctgtcggatgcgaccggccgccgcctagtgtggatgttcatcgaggccatggacgtggacggcacggccttcaacacgaacgccatggcgcagtcccgaaagatcggtcgtcaggaggcgggtcagtggtggttgcacgccatccgtgacagctgccccgaacgcgaagcgcagatgcgtgccgaggccaacagtgcaatgaagcggctgcagtcgcagctgcacgaaaccgaggaaaccaacgatgtcgactga

SEQ ID NO: 532791 - DNA, 321 bp, Stenotrophomonas maltophilia
gtgaccggcctgcgcgtgcgcgcgacccggcgcggcttcttcgggcatacccgcgagtcgggcgacgagttcgagatcgccagcaaggaacagctgggctcctggatggagcagatcagcggcaaggccgtggccgagaagtcggcaccgacggttgacccgttcctcgaacgcaccgttgatcagatcaaggaggacctggccggcctggccgtcgagcagttggccgcgtaccgcgagcaggaagctgcgggcaaggaccgcaagggcgtgatcgaggcgatcgacgcggccgtggccgagaagtcggcgaacgcctga

SEQ ID NO: 532792 - DNA, 642 bp, Stenotrophomonas maltophilia
atgccctcgcaagtcgaaatctgcaacctggccctgggcaagctggcgcaggacatcaccatcgcggcgatgtccgaccggtcgaaggaggcgcgggtgttctcgcgcctgtgggagccgatgcgcgatctggtgttggcggaccgtccatggccgtgggcggtgaaggcgcagcgccttgccgtcgccgctgaggtcgcctatcccggctgggagattcgctacgctcgtccgaacgactgcatcacggccttggcggtcacggacgacgccggcctgcgtgcgggtcggcgcctgtcgctctggtgcgagccttactaccgccagcagcacggagtggccttcgaacaggtctacggcgaccaggacacgtccctgatgtgcgacctgcccgaggcgtggctggtctatgtcagccgcgtggccaacaccgaccggtacccgccgcatttcgtcgaggcactggcctgcaagctggccgaagaagcagccccggcggtgatcggcgggaacggcttctcgaacaagtcggggctgaagcagctgtaccagctggcgctgagccaggcagccgcgcacgacttcaacgaatccgacgagcccggccacgacatgccggccgcgcagatggcgaggggctga

SEQ ID NO: 532793 - DNA, 1539 bp, Stenotrophomonas maltophilia
atgacccggatactccagccgagcatgtccggcggcgagctttcccctggcctgcagggtcgcgtcgacatgctgcgctacccgatcagcctggccacgtgcaagaacgtaatcaccaagcccaccggcggtgcggaaaagcggcccggcctgttgttccgtggacgcacgaagacggcgaacggcggcacccgcatcatcccgttcatctactcgacgggcgtgaagtacctgatcgagatgggcgacgggtacatgcggttctgggtcggcggtgccctattgaagaccgacctgggcgtcatcgtcgaggtggccacgccatacaccgggaccatgatctacgacgtgcgctacacgcagtcggccgatgtgctgtacttgacccacgttgaggtgcagccgaaagagctgcgccgcacaagcgcaaccacgttcgagctgcgcaacttcgacttccggcgcgggccgttccgtgccaccaactccaacgactctttcgtcatggccgcttccggtgccatcgggcaggtgatgctgacgtgtaacacagacgtcttcagcgaggccatggtcggctcgctggtgtacatggaagagcaggagctgcgcggcgtgaagccgtgggtggcggcggagaagaacgttccgctcaacgcccaccgtcgaagcgaccagaaggtctatcgctgcatcagcatcccgaccctgactggactcaccggcacgccgtactacgtctgcgggagcgttcgaccagtgcacgacagcggccgagctttcgacggcccacaggatgtgaagttcgacaacgtgaacgactacgtggttggcgtcgagtgggaatacgtccacggcgggttcggcatcctgaagatcgactcgttcatcactaccaagcaggtcaacgccacggtcatcgagcgaatccccgacagcatcaccgggaccgcgccgacgcccggtaccacttggaacctgaccggcaatggctcaacggtcacgttcccgatcgccggtgccacgtcaaccagccagtcctcctacacggtgacgatcgccggcgtgcctgtgcccgggaacccgaacgcgggcaacccagaggacgagtggtgcgttgacgcggcttcgttcctaaccgacgggcgccgtgctggcgagatcgcggtgggcgagctgctggcctgctacaacgaccagcccgaagcgccggcggtggtcgatctcgccgtgcaggccaaccgcgcgggaacggccgaatgtctgcggcttgtgacagaaagcggcgctgccgtgatcgcgtcgactaccacgcccatgacgcttcgcgacggtcggtgcgtccggctgccgcagatgctcggagagcaggcactggtgatgcgcgacggtgccttgggatgggagacggtcaccgagctggagcccgcgggtatccgcaccgtggccaagatcagcgtgcgcgaccagtgctacttcgctggcgaggtggcgggcgtgttcgtggctacccacaacatccaagaagtgaagcggtag

SEQ ID NO: 532794 - DNA, 1644 bp, Stenotrophomonas maltophilia
atggcacagggttggactgtcaacgcctcggcggacaccatcagcttctacgaggccccggcgaacggggctgccattgtcgtggcggagtacggcgcatctggccgcggtggcacgaacgtgtggtccgtgggcgcctggtcgccgcggttcgggtatccgcgcgaggcggagttctacggcgaccgactgtggttcgccgggactgctggcgacccgcaaaccatctgggcgtcgaacatcggcgactacaacaacttcggccgcagctcgcccatcgtggacagcgactcggtgtcattcaccatcaacgcccgccaagtcaacgcgatcatggacctggtaccgctggacagcatgctggtgctaaccactggcggtgaatggaaggtcacaggcgggcaggacgacgtcgttacgcccagcacgatcggggtcaagccgcagtccaactacggcaccggcgacctgcaggcccgcgtcctgggcgagtcggcgatcttccaacaggggcagggacgacgggtccgtgatctggcgtaccagttcgagaaggatggtttccgtggcaacgacatcagcatctgggctgatcacctgatcaaggggtattccttcaccggcctggaatacagcacctcgccatggccgatcctgtggatgccccgcaatgatggcgtgctgatcggctgcacctacatgccggagcaggaggtcaccggttggcatcgacaccacaccgatggcgaaatcctcgacgtgtgctgcctgcccggcgagatggaaaccgaggtctatgtgctggtgcggcgcatcatcaacgggcagccggtgcagtacatcgagcagctggcgccgaccgagtatgcggacatcagcgactggaagtatgccgacagcctgctgacctacgacggccgcaacacgacggccaccaccctgaccctgaccagcgccgggggctggaatgaaggtaccgcgctgaccatcacggcctccgcggggatcttcaacgtcgcggccgacgcggggaacatcctgcagatcgatgtaggcggtgagcgtctccgggtgaagatcatcgaagcggcgtcaaccaccgtcgcctctgtcgagtcgatcggcgacgtggcagctgcatttcggggcgttcccctgaccgcctggacattccagaagaaagtgatcgccggcatggaacaccttgaaggcaagggtgtggtcgcgctggttgatggcagcgtgcagaaagacctggttgtggcggccggccaggtgcgcctgcagcgcccgggcggcgtggtccagattggactgccctacgaggcacacatcgagacgctggaggtcaactccagcggcggagagccactgcggccgatgaagaagctgaccttcgaggtggcgctgctggtgcgcaacacccgtggggtgtccgtcggcacgacgctggacacgctcgacccaatcgctcagcgcgaattcgagaactacgacgagcccacgaacgcgtacaccggtgtgctgcggaaaaacatgacctgtgggtgggatcgtgaccgcggcaagttccatatcttcagcgacgacccgctgcccatggagattctggcgctgatgccgaacgtggatgtgtcggcatga

SEQ ID NO: 532795 - DNA, 552 bp, Stenotrophomonas maltophilia
gtgtgcaatcccgcaatcgcccttttggcggccaccgtcgtaaccggtgcatatcaggctgatcagcagcagaagcagggcaaggccaacgcgcagatcgccgagaacaacgcggttctggcgcaggccgatgctgatgcgtccaatgccatggccacgcgcgagatggagcagcaggcgtggcgcacccgcgccgtgatgggccagcagcgtgccgccatcgctgccaacaacgtggacccgaccttgggcacgccggccgacatactcggcgaaaccgcgatgttcggtgaggtggatcagcagaccattcgcatgaacgctgcacgccaggcatggggattcaatgcacaggcccagggccttcggacccaggctgacctttcacgatggagcggtaagtcgcaggcgactgggaccattcttggctcactggcaagcgcggccagcatgggcatgggcggcatgaaagccggcgccggtaggtcggcggtaggggcacgcaccaccggaaccatcaacaacggcggctggacgggagggtattcctga

SEQ ID NO: 532796 - DNA, 2118 bp, Stenotrophomonas maltophilia
atgaccatctccgccaatgaccgccgcaagaactatcagggcaatggcgtcgcaaccgagttcacaggcccccggtgcttcagcccacagcacatcgcggtgtacctggggaccgccgagggcacggccgagctcccgccgtcgcagtacacggttcgcggagctggcgggtcgggcagcaccaccattgtgttgaacaccccccctgcggcaggaactgacgtgctgatccttcgtaccgtcccgttcgaccagccgacggacatcaccaatcagggcgcgtttctgcctgagttgcacgaagactcgttcgattaccgcgccatgcaggtgcagcagcttgatgatcggcaggaactgaccatccggttccctgagacctatcccgggacgctgccggacctgaccctgcccgaacctgagccagggaagggcatcggctggaatgccgacggtaccggtatccgctacatcaccctggaaggggccggcgatctcacgctgcgcgacgatcttgcagaccccacggcgggcggcgcgctggtggcctatcgtcgtccggaggcagcctctgtgcctcgcgtgaccgttggcaagctcaacgaagtcccggcttcggttgccgacttcggcgcaactttcgcatcgccagacaatctgtcgcagatcaatgcagccatcggccagttgccaaggggagcaacactgacgcttccgcaggggcgctacaacgtttccgcaccgccgaccaactccaagggcgtgcgaattaaggggccggggcagctggttgcgccggtgccggtgtcgcagatcaacacctatcgttacgaccatccggtggcaatcaacaaggagtatctgtggcgggtgttccaggtgctcaataacaccagccgcgagatccggtgctacacgtatggagactctaccgtcgagggcggcctgaacttcattgattggaactactttctgcaggtgctgctgcctgacatggcatcggcacgcggctgccgaaactacttcaaggtgaccaatcgcggtatcggtggctccagtctggcggcgtggaaccccacgccggacatcggtagcaacagcacagcggccgccgatctggtgatcctgaaatgcggcatcaatgatgcgttcccagaggcgactcggctcgatgttttcgaacagaggcttcgtcagggcttggctgcgatccgtgcgacatccggtggcgatgtggggtcgtgcgcgatcttgctggtgggccccaatgcggtttgggatatggaatacgatgcgcgcaacacgaggtggttcgagcaactgcgatcaattttcgaagctgctgcgcgcgactacaaatgcgcgtactttgacgcgtacgcctacctgcaggatgccagctttgctcccggtcgatggcttgaccaaagtccagcggggacgggattgcatcctacgaacatcggccacagctggatctggggcggagtcatggacttcgtgttcggcgactcagagctgctgcgctacaagacgaatcagttccacaatcgcggtcagttccgaggatacccagcggcaaagaacccgcctatctggtatccgaacacctacgcgcctggcatcaccatggagacggcgttcatcgtcgatgggttccctatcgatggcgcccttactaccgaggtccatgcagacggcttcgtgatgcaaaccttgcacgtcaccgactcgggcgggacggtgatgacccgcaccgcaaacgccaacgacaacgtgtggggcgcgtggcacggtgagtcgtaccggttcgcaacgaactccgcatacctgaacaactggagtgatttcgggggatcctacggtggggggcgagcgatcgtgagttcccagggatatgtcgcgcttgatggcatgatcaagccgggcaccaccactgcgggcacgtcgatgttcggtttgccggcccacatgaggccggggaaccagcgtgtcctgcacgcggtatccgaggctgggctttgcctgttggaagtactgccatccggcttcgtgcagcttcgcagcggtacggtggcgcagtggttgtcgctgtcgggggtgggcttccgccggtag

SEQ ID NO: 532797 - DNA, 222 bp, Stenotrophomonas maltophilia
atgctttgtgaaattgccaaacgccgcatcgaatccttgtcccgcagcgctggcgggtactccgacgaatacgtgcatgcgctgtacgacgtgaaggagaacgggcaggggaaaggaatcgagtggttggaagtgctgatgaaggaggctgcagaggcgggcctagcagccaggcgctgtgctttggccgaagtctacttggacgctcagcaggaactctga

SEQ ID NO: 532798 - DNA, 333 bp, Stenotrophomonas maltophilia
atgaaggacggcatttaccacgtgcgcttctcgtcaagcatgcagggcgtgggtgagggcatcgctgtattcaagggggagggcgtcaatggaggcgactctggttacacgtattcaggatttaagcagagcaacgatgccgactttatggccgggctgactattaagcgctgggatccgggctctgaatctgtctttggcgggctggaccagttcgagcttgagttccggggcagcgcaacggcgtctggctttagcgctaagggcagcattgttgggcgtcccgaagctactctctcagtcgaggggcgtttcttggcccccgcagtttag

SEQ ID NO: 532799 - DNA, 126 bp, Stenotrophomonas maltophilia
atggaccggctggtccaagccggtgtgacccacgagaagccgccgccgcaccgctgccgaaccgagcagccgtcacaggcgagcaggcagtcgttcttccaaggcgaactgctttgcacggcgtag

SEQ ID NO: 532800 - DNA, 861 bp, Stenotrophomonas maltophilia
atgcctgcattgatatcggaaatggttggcagtgacaactcttctagtgtgccaagattcttgaacttggctttcaccgaacaaattggatacggtctggatgagattccagacatcgaatgctggttcaaaattgcttatccggatgaggagtaccgggagctggctaggggagagtggttccgggcggtggacgaaagtttggcggcagggagggcgacggccgaggccagcgcgttgatcacttgcaagaatggagagcagcattggttcgtggtaaccgctcaagtgaggtcggagagcattccaaatatgcacttggtgacgttcagggatgttagcgaactgaaagcagtctctgataagcatcttcgcctatcccaaacggatcagctgacgcttgtttcgaaccgatgggctggtcagagccgattggagtcggaacatgccaggttcgcacgtaccggagtgccgttctcgctaatcatgtgcgacgttgaccacttcaagtccattaacgacatgatggggcacatgggcggggatcttgtcttgcgtgaagtggctgagattcttcggaccacctgtcgtggtatagacgaagtagttcggtggggtggggacgagttcatggttatcctgcctgccgttaggctgcaaggggcgatgatgttggccgagaggctgcgccacgcagtttcaaatttgcagcacggagcgggtcaaagactggttcgcccaaccttaagcataggatgcgcagccagcgttcgaggacagtccatcgtggaattgctccgatcagtagacgatgctctgtatagggctaagaggcaggggcgcgacagggtgggcatttag

SEQ ID NO: 532801 - DNA, 312 bp, Stenotrophomonas maltophilia
atgctgccacttgaaaccagagccgagctggggccgtcggcgaaggcgagcctgctcaagtcggtgtctctggcggagttcgcccaatcagcgtttcatttggagcgcttggccctgggtctcagggacgtcccacaggaccacttcagcattgacctgctggacctgcgtcggggtgcagccttgcgttcaagcgagttgcgttcccccactgaggcccctctcgttcgtctgggagatccgcctggtatttgcaagcctggggacgtggtggggctcaatcccttgcagaagaaagtggcgatccgataa

SEQ ID NO: 532802 - DNA, 447 bp, Stenotrophomonas maltophilia
atgcccaagtgtccccccaagtgttctgttgtctttgtaagctcggcggtaggagaggctgaggaaaagctgcttatcgatctgatggccgccggagccaggttcaatgagaagtgtgggtcgcgtgcagtggtgtgcttcgatgggagccgttttttcacctaccttgagggcaccgccagttcagtagctgcgactttggcctatatcgagtcgttggccatccactcggagctcgtccagctcgctcgaggtgccgttcagcagcttcgttttccggatcagccaatgctattcatgcgggtgtccactcctcggttgaagtctttggtccgcgctgattggaccaacttctcacagcgtctgaaaggaaattttgagcccatcacgggcatggagcagcttgccgagctggttgcgcaacacggcgagccggctgaagcctaa

SEQ ID NO: 532803 - DNA, 213 bp, Stenotrophomonas maltophilia
atgcaccccttccaagattggacattcatcgccaatggcagaaccataaccgcccgagtggaggtggacgagtacgggggcggaaccatcatcaggtttgaggctcgtcctggccccgctcagagtgggctcgcgatcaaagtgggctctcagcaggaggccgccgccaagttagaacggatcctcactgatctactgggcgatggctggtag

SEQ ID NO: 532804 - DNA, 300 bp, Stenotrophomonas maltophilia
atgaaatacaccctggagcaacttgctgaacgcctgcacgcatgcgaggtcgacttggaagcgcatcggggctacctcaaagcgatggagtatgcgctcggcgcgaccatcgccacccacaacgattcgcggtcattgggccggatctgggacctgatattggtagaagcggcggacgctcatgcgggcctaaacggcccgatcttcaccgccgcctttcagcagtgtcttcggatgctcaccgagcagatatccctgatggactcccgtactaccagccatcgcccagtagatcagtga

SEQ ID NO: 532805 - DNA, 477 bp, Stenotrophomonas maltophilia
atgccgcaccatgaaaaaatcgccttgtcaggcgttgttgaacacgtattcgcccatcgcttcaccctgctggcggacggtcagccgcacctagctgacttggggcccaagggtgccgaggccttcgccatcaggcccggtttggcagtcattctggaaggcgaacgccgtccctcggagatcaaggtgctcagtattgcccgcatcggcggcaggcgggtggagatcgagcacaagaagcctcatcatgggccgggccatcgcgccggtgaacacgtgcacgcagatcctgccgcagcgctggatgccgtgaagcaggcaggatggacatctgctggagagccgcagcgccaccccaagcactttgaagtgctggcccgccagaagggcggcgattggatggagctgcacgtggactttgctggcgccatctacaagcagaagcccgcttccgctcacaagtggggcgttgcgtaa

SEQ ID NO: 532806 - DNA, 1233 bp, Stenotrophomonas maltophilia
gtgaccgctcgcgttccgcactctcccgtaagccagcgcgccgagcgcggcctggacggcttgaacttcttcttggccgatgtccgcgacggcctagggccctacttggccatctacctgctctcggtgcaccactggcagccggccagcatcggtgtggtcatgaccgttgctgccatcgtcgggttgctgacccagacgcccgccggcgcgctgatggaccgtacgcactccaagcggatggtgctggccatcgccgtcattgtagtgacggcaagctgcctgctgctgccatggacgcaggactttgccgtggtggcctcgacgcaggcattgagcgcagtggccgcctcggtgattgccccggccatcgcggcgatctcgctgggcgtcagcggacctcgcgccttcgcccaccgcatggggcgcaacgagacttttaaccatgccggcaacgtggtggcggcattgctggccggtgggctcgcctatctgtggggaccaacggtggtgttctacctgatggcggtgatgacactggccagtttggcggccgctggctcgatccccgtcgcggcgatcgatgatgtgcaggcccgtggctccgttgccgaaccgcgaggtgcggccccgccctcacccgcacgcctactgcatgaccgccgactattgctgctggccgcgtgcagttgccttttccaccttgccaacgcggccatgctacccctggtggggcaaaagctctcattaagcagtcctgccctggcgacgacgatgacagctggctgcatcgtggctgcgcaattggtgatgattccgatggcgtggctcgtgggctcgcgtgcggaccgctgggggcggcggcccctgctgttggcggcatttcttatcctacccattcgggcggcactttatcccctttccgacgcgccagcgtggttgctgggtgtacagctgctcgatggcattggcgctggcatcttcggtgcgctcatccccatcatggtgagtgacttgagcgagggcaccgggcgtttcaatgtcacgctgggcgcggtctccactgtctttggtgtggggggcgcgctcagccccgccttggcgggcttcatcgtgcagcacgctggctatgacgccgccttcctgaccctggcagccatcgccacggcggcagtacttttggcctggcgagttccggaaacacgcgacgtccctgcaatcgtccgcacctga

SEQ ID NO: 532807 - DNA, 723 bp, Stenotrophomonas maltophilia
ttgtgccgcaatgcagaagtgctgccgttcgggttcagctacgcgttccagccaattgtggacacatttgcgagcagcattttcgcgcacgaagcgctggtgcgcggttctgcgggcgagtctgcccattcggtgctatcccaagtggttacctcgaaccagtactcgtttgaccaagcgtgccgcgagaaggcaattaggattgcggcctcgctgcagatgcagtcccatctctcgatcaatttcctgccaaacgcgatctaccggcccgagttgtgcatccgttcgacgctggatgcggcgcgccgatacggcttcccgatcgagcgcatcatcttcgaggcggtggaaggtgaaaaggtcgacgacagcaaatggcttgcggaagtcttgacggagtacaagcgcatcggcttcaggaccgccatcgatgatttcggcgcggggtttgccgggctgaatctgctggccgatttccaacccgacatcgtcaagctggatatggcgctagtgcgaggcattgacggcagccattcgcgtcgggccatcgtggcgggcgtagtgagcatgtgcggcgagctcggcatcgatgtcatcgctgagggcgtcgagaccggcgaagaagcgcgatgccttggtgatctgggcatcaggctaatgcagggctactggtttggccgccccatgttcgagggtatcgcgacatacgcgcagattccctga

SEQ ID NO: 532808 - DNA, 2268 bp, Stenotrophomonas maltophilia
atgaattggtttagaaatttaagtatctcaaagaaactgttgctggcattcgccgtcaccaccagcatgaccttggcgttgggaatcttcacgatcgtgcgggcgtctcactcaaagcaagagttgtccaggattgagaccgtttgggcgcctggcagctacgccatcggagagatgcgtgcgcagtttggcgatctgcgcatctacgagacatctcaggtcagtgaggcaggttcaccagaggcagtcaagcagtacgagcagcggatcgtggcgggcaaggccaagatcaacgatctggtgaagcaatacgagcggtccctggccgacagtgaagatgctgcgttgttcaagccggtcagcgctgcgttgagcgactactttgtcatccatgacaggcttcacgctgcgctgcttgctggcgatgccgaagctgctcacacgatctcggtgacagaatccagggcaaaacgcgtggcgcttttcgaggcaatggagaaagtcagcgaatacaatcttcggggcatgaagggtgaactcgccaccaatgcggcaagcctcaacaacctgatgtcgatcacaggcttggtcgtggtggtgctctgcttggtggcaagcgtgttgggttgggcaatcagccgttcggtcacccgccccatcggtgaggcgttggccgctatccgcagcgtggccaacggcgatctcaacgtgcgaaccgactaccaaagcagagatgaggcaggccagatgctgctctccctccgtcaaatggttaccaccttggagcgtttttcgaacgacaccaaggtcatggtcaagcttcacgaggccgaagacatctcgcaccggattccggaggacctgcccggtgtttacggggagctggccaagggcatgaatacgatggtgttcgagcaccttgaggccatcctggatgccatccaagtgctcaacgagtatgcggccggtgacctgcggcgagatgcgcgacgtctcccaggctcccgcgcggttctccacgagtcaatggatgctgccaaagcaagcctgctggctatcaatactgagatcaagcggttggcagtgtcggctgccgacggtgacttctcggcccgcggtgacacgtctgcgttccagcacgactttgcagtgatggtttcggacctcaaccgtttgatggaaacagctgaccacagtctcagtgccgtctccaccttgctccaggcgattgcctctggcgacttgacccaccgcatggaaggcaccttccggggcgtctttgcgaccatgagtcaagacgccaacgcgaccgtggctcagctgaccgatattgtctcccgaatccagttggcttcaacggcgatcaacacggcgtccacagaaattgccgctggcaatggcgacttgtcgcgacgcaccgaacagcaagcggccaacttggaagagacggcggcgtccatggaggagcttacctccacggtgcgccaaaacgccgagcatgcgcgccaggccagcgagttggccagcggggcctcgcgcgtggccgggcagggtggtggagtggtcggaaaagtggtggagacgatgggggacatcgaagcctcgtcgcgccgcatcggggacatcatctccgtcatcgatggcatcgccttccagaccaacatcctcgcactcaatgcggccgttgaggccgctcgagccggggaccagggccgagggttcgccgtggtggcctctgaggtccgcaccttggcgcagcgctgcgcctctgcagccaaggagatcaaggggctcattgaggactctgtggccaaggtcgcccaagggtcggcgcttgccgaccaggctggccagacgatgtctgagattgtcagctcggttgagcgcgtgtccaacatcattggtgagatatctgccgcctctcaggagcaggcgtcgggcatcgagcaagtgaaccaggctgtttctcaaatggatgagacgacccagcagaacgccgccttggtggaagaggcgaccgccgctgcccgttccatggaagaccagtcggtacagctggcagcagccgtcgcggtcttcaaggtgagtaatggcgcgcagagaaagacgtcatcaacggccagtgcaggcgtggccaggccgcgtgccgtggacggctcctgcctttctcaagccacctacgcaggcaagccaaccccacggaaggctttgccagctcgtccagcaccgcgggtgtctgcggacgtagagcattggcaggagttctag

SEQ ID NO: 532809 - DNA, 1725 bp, Stenotrophomonas maltophilia
atgtctacattgggcagcctcaacgcgttgaacgacgtgaccggggcttctttggaccgccttaccgagttggcgacgcataccttccgcgcccccgtggcctttgtgtcgcttgtagaggttgatcgccaacggctgattgctcgaaagggcctgccgatgagcgaaatgaacatccgggattcgatctgcgcacacacgattggcacagcggaagtcatggtcgtgcctgatctgcgacgtgacccgcgattcgcatccaatcctcttgtcatcggcgcgccgcatttgaagttctacgcaggggctccgctcgtcgcgcagaacgggaccgccatcggcgcgctgtgcgtgatggacaaacaggcccgggagttttcggaagccgagcggcgtcagctggaaacgctcggcatggcggtgatgaacgagctggagctgcgcgcactgacggggcgcagagagccggtcagcggtctgcccaatcggcaccaattctcaatcgactacaacgcttggtccgctaggtcgcccggccgatcatgctttgcggtgctcgtagacgttcttgatcttccccgcgcaagcgaggctggccaggttctgggcatgctcccgttggaggcgctcatcaaacgcgcgggcgtgcggatgaaggtagccttggacgggctagctgaggtttaccacgtcggagtcacgcgctttgccttcgtgatagatctccccgaccgcgacaccatcgagcgcctgcttgaggagcttcgagtgcgcctgactcggcccatgatggccgcagaggttcccatgtcacctgtgttccacgccggcatctgcaaagcggagctgggccgcgacaacgcggatgacgtcattcgcaagatgctcatcggcctccactcggcgatggtgacccacgagggctttagctggtattcctcccaacgcgatgaaggtctgcgccggggctaccgtttggcggccgacgccaggcgggggctgctgcaggacgagttccacttggtttaccagccgcgctttcggtccaatgacctccagccagtgtctgcggaagtgctcattcgctggaaccacccgcagcttggcccggtcagccccgccgaattcatcccggtcttcgagcgcactgcactgatggaaggggtcaccgagtgggtcattgaccatgccttggcacagttggcgcgatggaaaagtaccggtcttgctttaagcctttccatcaacctatccgctcgggatgtcgcccgccgagggatggccgatgatctggtgggaaagatccaaacacatcgcttggagtgcagtgatgtggaagttgagatcaccgaaggggaatggttacgggtcaactcgctgcccggcgagcaactcaaacgaatggctttagcaggtattcgcctggctgtagatgactttggcagcggttacagcaattttgcgtaccttacggaattgccagttcatactattaaaatcgacaaatcgctgatagatgacatctcagaagatcagcgcgcgttgctcaaagttcaagcaatcatcggcttggcccatgacttgggctacacaaccgtagccgaaggagtcgagacaggcgagcaggtcgcaaagctccaagcgcttgggtgcgacgagattcaaggcttcgcgctttccaagccgatcagcgccattgaactgtccgagctgcttacgtcgtaa

SEQ ID NO: 532810 - DNA, 612 bp, Stenotrophomonas maltophilia
atgaacaccaaacgcaacgtgcgtgtgagcgggtcggctgattacaggccttggccagaattgaaccatgctgcccggtcgctacgccggatggccagggaagaggcgggcttccgacttcacctgatgaccgggtccttggtgctgacagccatggccatcgaagccttttgcgccaccgtgggcccgaaagcgcttcccgaagcttggcaccatggacgagccccagtcttccggaagccgttggcccgtcagctggagctcatcggtgcaggggtgggtgtgttcgtagacttcgaccaagagccctggacgtcggtgcgccaactgctggaggctcgctcagacctgctggtgcccaagccggggttaggcgtggacgaggtgttgagcgtggacgaggacgctgacgcgaggttcgatgtccacatggccgtgcaggcgcagcaccgaacgcttcatgggatcgccgatctggaacgggtggcgggcgaagtaaaccggggcttgctcaacctgtgggacgccgtagggggtgacgagctggctctgaacgtgctggaggtcgcccaatggacggtgaccgaggtgcagggcggaggtcaaccttga

SEQ ID NO: 532811 - DNA, 582 bp, Stenotrophomonas maltophilia
atgactaacgtccagcccaatgctgaggctgatggcttctccgactgggagttgctgttccgcttggaaatgatggcccgaagcatgcgaggcttgtttgatcaccggcccatcgccccaggcgatgatcgcttcagtggagcatcagccgcgcgggtgcagccgatgaccgaggtgatggagcggctggttcttttggagcgcattggcgatcccagttccctgaagaccagcgatgctcgccatgcccttcgacgtgctttgcttacaagcgagctcgggcggggactgctcctgccgcccaacctccaaggcaagctagagcgcgatctctgccttgccctggctgaggcgactgaccccatcgcagacggggccgcagcaagcgcagccatcaaggttctgatggacccgtgtacgctccggcacctggcggccttggtcgagagcaaccaagggtctggggtgtctccagcgagcaccgtgcaagtcttcctgcagaccttggccgtgggccaatctcaggagaagcccaacagcccctcgttcttcgccacatccaacatcgcggcgacggactga

SEQ ID NO: 532812 - DNA, 180 bp, Stenotrophomonas maltophilia
atgggcaccaaccagaatcagccgggccaggatcagcagaaccagaaggaccagcagaaccagcagggtcagcgcacgcccggtcagcgcgataacgacgaccagcgccagcagcagcaagatcccagccagcagcgtgagcgcggtggtcagcagggtagccaggacgaagaagaataa

SEQ ID NO: 532813 - DNA, 681 bp, Stenotrophomonas maltophilia
atgggtctgcacgtgccgcgaggcgtttgggttggaacgaccgttctagcgtatagcgctgggatggtgaacgccgccggctacctgggatttgagcaccaagcactcagccacctcactggcacgacctcgcttggcgcgatcgccgttgggaatggtcggtggagccttgctctgcagctcggtgcagtggtcgctagcttcctgaccggcggttacgtcgcgggcttgacgttgcggcgacgcgatctgtcatggcactacgtgggccttcttgcgggccagtccctgctgctgatggcctccgcgtgggcgctcgtccaaggcgatacctggggtgcttgtatggcagcagccgcttgtgggcttcaaaacgccatgaccacttactatagcggttcagcaattcgcagcacgcacctgacggggtttttcacggacatggggctgctgctgggccaatcgacccgcggcgcgccattgccttggcggcggcttgccttcgggacgttggtgctctgcgcctttgtgggcggagggatcagcgcagcctgggcattcccgaggtttggattccacttgctgaacgctccagcgctcggagccggagccttggctgccgcgctctcatggcaccttgccagcaagccgacgccgcactcatcggacgacactccctag

SEQ ID NO: 532814 - DNA, 321 bp, Stenotrophomonas maltophilia
atgttgaattcgccagagagcatgtatctggtttggggctcagggctcatctttttgttcaacgacgcctacacgccgatcttgggcccgcgtctggatcgagccatggggagccccctgcgcgggctgtgggccgacgcgtggccggcagttaaagagccgatcaaaaaagcgtttagaggcgaagggtctcggtttgagaacttacccatcgcgatgaaccactatggccagcacgaagacacgtggtggaccttctcattctccccgctctatggcgagggggatggggggcgccgtcgccttctgcgtgaccaatga

SEQ ID NO: 532815 - DNA, 258 bp, Stenotrophomonas maltophilia
atggcgagggggatggggggcgccgtcgccttctgcgtgaccaatgaggtgaccggtctgatcacggcccaagagcggctcgcccgtgagaacaagcgactcatcgcgctgtttgagaagtccccgctgttcatcgcctttttgcgtcgaacgaaccttccccagcaactccggcagcgtgaaaggcttgtgccgcaggatgacgtctcgttgaagggcattcgggtctgcctctcagtccgccagcgtagccagtga

SEQ ID NO: 532816 - DNA, 2184 bp, Stenotrophomonas maltophilia
atgtacacaatgcgccgcctgaaagtgggcacccggctgacgctcggcttcgtcatcctactggccttgattgcgaccattcttgggatcgctctgcacagcacctacaaacagcgccaacagtttgaatcggcagtcaacgtacgtgtcgcccgcatgggtgagctctatggactgctcgcgctgaacaaagagatgatgctgcttcgtcgcgacatgctcctgaaaagaggctcggatgtagctgctgacaccgacagaatggagaagctgaagtcagagtacgaccaacgctggactgcctttacctcaagaccagccagcaccgctgagacccaagccttgaggcagcgggtcaacagcgcggcggtcgcggccagcgatctcaacaaggagttggatcagcttatcaagtccggtgactacgatgcggccaatctccttctagtcaccaaggtcagaccagcctctgacaactggaattcagctcttactgacttcaccacgttgcagcaccgcttggtgaaggaaggtgcggaggaagcagcttcgctatcgctcaggactactggcctgctgacgaccttcggaacgttgagcctcgtcattggagcgcttgcatcctggcttatctctcgcagcctgactggccccctttcgaaggtcttagcctcgatcgaagcggtaacgcaaggcgatctaaatgtgcgtcacagagatgaaagccctgatgaggtcggacaaatgctccgatccacggatggcatgattgagatgctccagcgcttctctaatcagacccgaaccatgattcacatgcatgccggcgaggacattagcttccgcatgcagacggacttcccaggcgtttacggcgagctggcgtcagggatgaacaccatggtgtttgagcacttggacgcgattgtcgacgctatagaggttctgaatgagtatgcgcaaggaaacctcagccgcgatgcgaagcgcttgcccggcacacgcgcaatcatccacgagtccatggacgcggccaagttcagcttggaagcgatcaacggagacatcaagcgacttgcccaagcagcagccgctggtgacttcagcgtgcgcggcaatgcgcaagcctatcaccatgatttccgggtgatgattgaagatctgaatcggttgatggctacagcagacgagagtttgagcgcgctctcagcggtcctgagtgcgatggccgagggcgatctgaccaagcgaatcgaaggagactaccaaggcgtgtttgcagcaatgcagcgagatgtgaatcgaactgcaggaaacctgaccgagatcgtgcggcgcatccagcaagcctctgcgtccatcgctaccgcagccgatgaaatcgcggcaggaaacagtgacctctcacgcaggaccgaatcgcaggccgcaaacttggaggaaactgccgcatcaatggaagagctgacctcgacggtacgccagaacgctgagcatgcacagcaagcgaacgcctcctccgaaaatgcaggtgaagcggtcgcagacaccactcgcgtcgttagtgaagtggtcgaggtgatgggacagatcaattcatcgtcgcaacgaattggcgagatcgttaccctgattgacggcatcgccttccagaccaacatccttgcattgaacgcagcggttgaggcggctcgcgctggggagcaggggcgcggattcgctgtagtcgcttcggaggtacgcacactcgctcagcgtgccgccgcgtccgcaaaggacatcaaggcactcattgatgaatcgaccagccaggtcgaggccgggatttcgattgcgaggcggtcagaggcaagcatgggagagctgggacattcagcagctaggactggagagatcgtgcgccagatcgcccaagccagcatagagcaagcctcgggaattgagcaggtcaatcaaacaatcgctcagatggacgaggcaacgcagcagaatgctgccttggtagaggaggcaagtgccgcggcccgatcgatggccgagcaagcgagtgagcttgaaaaggcggcttctctcttcaaaattgagggaaccgaatccaaccagccgaaccgggcttcggttcactctctccacatccccaagcgggtatcgggacaatctgtagcagagtggtcgacgttctga

SEQ ID NO: 532817 - DNA, 1506 bp, Stenotrophomonas maltophilia
atgccaaatcgtttcagatcagcgttccaatacttcaggcgcgcagtgccattcaagctgccgcaggcattggcaacgacggtcgtgctgatcgttctgctcttgctgccctgtcctgccgaactgacaccccaggcctgggcgctggtggccatattcatcacaaccatcgtcgccatcatcctcaaagtgatgccgatcggtgtaatggcgatgatggccctggtactggtagcactgtcccaggtgacagcgagcagctcaaagggcgccatcaccgacgcactttcgagcttctcgagtccgctcatctggctaatcgtgcttgcgattctgatctctcgcggcctgaagaagacagggctgggcaaccgtataggcatgttgttcattgcactgcttggcaagcgcacgctcggaatcggctacggcctcacgatatgcgagttggtgctcgcgccttttacccccagcaacacggctcgcggtggcggcattgtccacccgatcatgaaatcgatcgccaacgcgttcgattccgatccaggcaaaggcaccgagggcaaggtcggaacctatctggcgctggtgaactaccatgccaaccccatcacatcggccatgtttctgactgcgaccgcaccgaatccattggtagtggattttgtcgccaaggcgaccaatcaacagttgcacctatcctggacaagctgggcgttgtgcatgctcctgccggggctggcctgtctaattgtgatgccgctggtcatctatttgatggctccgcctgaactgaaagtgacgcccaacgccgtcaactttgccaagggcgagttgaaggcgatggggccgctggcaccgaaggagaaggtgatgatcggaaccttcggcctgctgctggttctctgggcgaacatccccgccatgatcctcggccccgtgtggacattggaccccacggtcgtggcgcttgtcggcctattcgtgctgatcatcaccggcacactggactgggacgatgtgctctccgagaagagcgcctgggacaccctgatatggttcggcgccctggtaatgatggcggagcagctcaacaagctgggcgtgatttcctggtttacagaggcaatgaagaactccatcatcgcaagtggcatggactggcaggcaatcgcagccgtgctcattttggtctttgtcttctcccactacctgtttgccagcaccaccgcccacatcagcgcaatgctgctcgccttcctcggtgtgggcgcattgttcatacccgccgactatgtccccctcttcatgctgatgatgacggcctcctcggccatcatgatgacgctgactcactacgccaccggcacgtcgcccatcatttttggtagtggctttgtcaccttgggggtgtggtggaaggtcggcctggtcatgtgcctggttgaacttctcatcttcgcgatagtgggcagcgcttggtggcgagtccttgggttctggtag

SEQ ID NO: 532818 - DNA, 471 bp, Stenotrophomonas maltophilia
atgtcgccctccatgccctcgcataccctgtctacacctgagcctacgtccatcagccgaacccggcagacattcattctttcggtcgcaagccttatcgaggtgcattgggagggcgacgtacgggaggtcagccttcccggccaagctggcagatttggcgtgatggcaaggcacgcaccaatgctggcaacgctgcgcgaggggctcctcctgatctacccggatgcggccgacaagccgccatttcatttctatgtgtcaggcggcttcgtggaggtgttaccggagcgggtgactgttctggccgacctggcgctcaaaagcgaagacaaggacgcggccagagccgaggtggcagaagctgcggccagctcacccatggcacgctgcttcagcagcgatgcttacctgcaagctcacttggatctcatgcaccacttcgggcagcccacgcgccgcgagccgtga

SEQ ID NO: 532819 - DNA, 780 bp, Stenotrophomonas maltophilia
atgaatatctgtggaaaagttgcgctggttaccggcgctgcgcaaggcattggtcgcgcgattgccttgcgcctggcgcgtgatggtgctgacgttgcattggttgacctgaaagtggaccgactccaggcggtggccgaagagatctcctccatgggacgcaaggcaatcgtcatcactgcggatgtgggtgatcgctcccaggtatttgcagcggtgaatcgtgcaagcgaagaacttgccggctttgacatcatggtcaacaacgctggagtatcgcaggtcaagccgctcgccgatgtaacgcagaccgaggtcgaggcgatctatcgcatcaatgttcaaggcacgatttggggcatccaggctgccgcagagcagttcaaggccctgggtcgcggcgggaagatcatcaacgccagctccatcgccggccatgagggctacgcgcttctcggcgtctattcgtcaacgaagttcgctgtccgggcccttacgcaagcggcggcaaaggaacttgcggttcacggcatcaccgtcaatgcctattgccccggtgtggttggcaccgacatgtgggtggagatcgaccagcgcatggccgaaatcaccggcgctccaattggggccagctatgaaaagttcgtcaaaggcatcacgttgggccgagtggagactccggaagacgtggctgcgtttgttgccttccttgcaggaccggattcggactacatgacgggacaagcaccattgatcgacggcggcctcgtgttccgctga

SEQ ID NO: 532820 - DNA, 1527 bp, Stenotrophomonas maltophilia
atgatgctgggcaacgccttgtgggcaagcttccaggtccagcgcaagcaattgattgacaacacactggaagcgaaccgcgtctacgccaacaagcttgctcagacgactcagcatttcgtgctgagcgcccagcagcagcttgcctatggtgcagagcgcatggggagccgacttggcgtcgaaggcgctgaggccgatgaggccgataggctgaggcgccaaacggattcattcaattccattgccatcgtggatgccgatggggttgtccgcgccacctcgcccgccatgccccagctggatgggaagagactgaccagtgctgcaaacgaggacgcgcttgcgcgacgatctccctttgtcagcgacccgttcgtatccactgccggcaacctcattgtcaccatttcgcatccggttttcgatgaggcgggcgtctataacggctacttggccgcatcgatccggctcaagcagaagaacgtcctacactcgctactgggcacgcacttctaccgcgatggctcatatctctacgtggtcgggcgtgatggcaggcttctctaccacccagacacgcgtaggattggagagtcagcgcgcggcaacgaagccgtccaggccgtgtgcagtggccgcacgggcgcgctccaagtgacaaacagtgccggtatacagatgctcgccggctacgcgccggtgccggcagtgggctggggtgtagtggcacagcggccgctggatgccactctggtgccgttggggggcttgatgtcaaccgtgcttcgcaatgctgccccgcttggactgctgtcgctcggcttcatctggttcttctcccggaggatctccagcccgctatggcaactggcgagcaacgctcagactcgggacattgctgaggcaatggccagggtccgggcagtgaacgcctggtactttgaggccgcccagctcaagaaggctgttctggtcagcttccggcagctcagtgaacggatcgatgagctggacatggcgtccctgactgatccgttgactcaactgttcaatcgtcgtggcctggacagagcgttgaatggactgaccgattctggaacaccgtttggtgtcatcacgttcgacgtagaccatttcaagcaggtcaatgatctatacgggcatgacgcaggcgacagggtcattgtcgatctcgctcagtgtctaagagccaacgcaaggccccaagatgtactgtgcaggtatggcggagaagagttcctggtgctgctacccgacgtggatgccaacgttgcggtcaaggttgccgaaagacttcgacgatccatcgaggcgcatccgtttccattggtgggccaggtaaccatttcggccggcgtcagccactgccctgatacggagtcggttcccgatctggcaatcaggcaggcagataaagcgctttatcaagcgaagagtgcggggcgaaaccgggtgattctctatcggaagcgcagtcgttccaatgccgtgcccgccgcgtaa

SEQ ID NO: 532821 - DNA, 1203 bp, Stenotrophomonas maltophilia
atgagtgcagcaaatgggggtgggtttggctcgggaaatactgaggatggcgggccatcttcgcgatatcgtgtgcgggtcctatttatcgattgccctaatttggatgttgctgcggcctctcaattggttctctcccaaaattcagttcaagacgtaatacagtttgaggtttgccatcattggatatattcatcaagtgaatttgatgagagtggcttgtctctgtcggaaagagttgttgagtggtgggctgggaagtcgtttgcatttagtggtgatgcgaagaggaggttgttttcccgatgggatcgcctcaatcccgacattcctgtaggagaagttgatctcaatagttgcactaagatatatggtgaggtggttgctggatatgatcgatggctgcagcggaagtcagaatggaattttgatatccgcccctgccccacagtagtcgtcactgatacgccaatcagtggcggctacttctgccagtctgacgacggggttggtgttgtaagcaccgcgcaatggcggcatatttccaagccggtctctgcgttggactatgtacttgccattgttcagcgtgtctcacttagattgatatttcctgttcttgactcacattatgcgaccaggggctgcatttgggatttttctccacaccagagggacgtaagaatatcgatcctgcttggtcatatttgtgaaacttgccgggatcgactattagtttcatcaagctataatgtggtggaaaaaatttcgttacttatttctagaagatgggttggggatcgggatgtgcaattctcgccagcatctgtgcttgctcatgtctacagctatgacttaagtcgatcaacagggttgagctcaaccttctcgagacgtgtcttgggaggatttgagcctgagctggggaagattcttagtgaggcggtgaagtggtctctggttatcgtgttgactgctgtaatggcatcttgctttccgggtgtgctaaaggggataaaggagaatatctcagtcggcttgcccgcgcgggagtccgagggggcggggaatctagttccactaggagcgggcaagttgaacgatgttgccgtactgaacggtgggacatcggaagagagcgtgcgatttcatgcgcgcatgctgggacgtagacttgatgtatgtgtatcggaggagcgctag

SEQ ID NO: 532822 - DNA, 129 bp, Stenotrophomonas maltophilia
atgaccccgaggcgcacgatatcgttggaaaacgagcgacagttcggtgctgatgacaacatcgagcgcttccgtacgtcggtggcgctgggcacgttgaagctcaggttcgacgtgccgctgacatag

SEQ ID NO: 532823 - DNA, 903 bp, Stenotrophomonas maltophilia
atgaagaaccatgtccgcacgcttgccatcccgctccttctctcgctgccccttctggcagccagcatgaccgctgctgctgccccgcccaccagcgccgcggcggcgccagtctcacagcgccacgccgttcctcttaatgtccgcggccttgccatcggccaaggtgccccgaagatcatcgtgcccaccaccgggaccaacgccgaacaggtcctaaagcaggcgcgagctattggcagcaatccttcggtggacatgatcgagttccgcatcgactatctcgacttcgccaccgaccccaaacgtatcgcggaactggggcagcaggtctcagcagctgcaggtggcaaacccatgatcgtcacctttcgcaccaaagctgaaggcggaagcaaggcgatcagcgactcggcgtatgacactctttacactgccttgatcggatcccacttcgtggacctgctggacatcgaaatgtacagggcgcctgaagtagtttcttcactggtcaagcaagcgcatgacaagggggtcaaggtcgtgatgtccagtcacgacttccatgccacacctgccaccgaagaaatggttgcccgccttcgtcgacaggaccagttgggtgcggatgtcctcaagatcgcggtcatgccgagttcgcctgccgacgtcctgcgattgatggatgccactgcacagatgcggtccagttactcgcagaagccgctgcttaccatgtccatgggcggccttggatccattacccgtctatcgggtgaggtcttcggaagcgatatgacctttggcatgatcggtacgccttctgcgccaggccaagtgagtgtggaaaaactccagcaggtgcttgccacgatccacgcgtcgatcacaggaacgccctag

SEQ ID NO: 532824 - DNA, 1332 bp, Stenotrophomonas maltophilia
atgaacatccagcacctttcctgccgcagagcgcggcattcatccctgggcagcgcggtgcgctgcaccctactggcaacacttgccgccgctgcattcgccggatcggcacaggcagcagaagatgcatacaccggcaagactctgaccggtgattggaacggcaagcgcagcgaatggtcggccaacggtatcgctttccgtggtggcttcatcaccgaagcgatgggcgtggtggaagggggaatcgatcgcggggcgcgcaatgccttccagacccaggtcggtgtcgatcttgacctgggcaagctcagcgatgtctggggtgatgcgcgcctgcatctgacagtcaatgaccggcgtgggcgcagcacgtccggcgagctagccggcaacgactacatgccgatccaggaaatctacagcgaccagttcacccgccttaccgaactcagctacgaccagaacttccttgatcgcaaggtcaactggaaggcgggctattacgtgatggggaatgatttcggcatcaaccagatcatgaccaacttcgtcaatgccgcgctgtgcgcccatcccatttccctgtccaccagcgctggctggacgaattggcctcggccgcgctgggcgacgcacgtcaccgtacacgcaacacctgaagtgacggtgcgtgccggcatggtgctggtcaatacgaactacaacctggaaaagaaccggtggagcctatacgagcacggcaccaccggccatctctacccggtggagctggaatgggcgcccgggaccgccaaccagagccactatccaggtcattacaagatcggctactactacgacacctctgacaagccgatggtcggcaaccgcagtgatcagactgcgcgccgccgcgaaggcggctacatcatgaccgaccagaagctgaccaacaacgcggtcaatggtggcctcagcgtctttgcccagtacaccgcccagtcgcagcagaccgcagtgatgcatcggtggacctctgcagggctggtctatcaagggctgttccacagcaggccgaatgatcggatcgcactcggctatgtgcgtgcctccatcaatcatcaccttctggagcagcagttgcagcggcaggcaatgggcttgcagacagaccccgactgggagctcaaccaggcggaggaactatgggagctcgcctatacgttccaggtgaagccgtggctttcgatacgccccgatgtccagtacatcaccaatccgggcacgttccgctacaagaacactgacaacgtactcgccctgggtgtccaggcgaagatcgcgttctga

SEQ ID NO: 532825 - DNA, 501 bp, Stenotrophomonas maltophilia
atggcatggtcctttcaacagcggttccttgccggattcctctgctgcacgggtgtactgctgtatgccctctacgcgcagtacgttgaaggcctcagcccctgcccgctgtgcaccatgcagcgtggcgcgtttctgttgctggcgatcgtcttcgtccttggcagcttgagcgcccccctatctcccagggtgcgagtgggctacatcctgctgagtgcatgcatcagccttgccggcgcatgcgtggctgcgcgccacgtctggctgcagctgctgcctcctgagcgggtgcccgcgtgcgggcccgacctagcacacttgctggcgaactggccgttgatggatgccctgcggcaggtgcttaccgggtcgggtgagtgcgcggtggtggactggaccttcctgggcctgtcgatgcccgcctggagcctgttctgctacctggctctggccggctggtccctcttggcactcaacgccccttcgcgtcaacgctaa

SEQ ID NO: 532826 - DNA, 1566 bp, Stenotrophomonas maltophilia
atgagtatcaaccccacctgttcgctgcttgcactggccctgctggccacacccgcctttgcccagaccctcgccggccccgcactcccccgcggggtgcagaccgtactgaaggtcacctcgtacgccgatgatgacgccgagggtaccctgcgctgggcgatccagcgcaacaatgcggatcccgggcactaccgtatcgagctcagcgcgatcgggacggctccctacgtcattcgaccgacccatgaactgccgccaatcaagggcccggtcgtcatcgagaacgtggacttcgcgcgcaacggaacctatgtcgccattgatggctcggcctatgtgattggtcccggcacccgtgcctgtccgggcgctgtcgaaggccaattcggaaccaatgtgcgcaccacgaccaagccgggactgatcctgcgcgacaccgaagcggtggagatccgcgggctggagatcagcaacttctgcatcggcatcttggtcaaccgagccagtggcagcctcatccacgacaaccgcatcgtcggcaacaagggcggtgcaggcatcatggtcaccggcgacgacggcaagggaaatgccacggccaccacgacgctgcacaacaagatcctgaacaaccgtttcatcaacaacggtgatgcaatggagatgacccgtggcgcagccttcaacctgatcgcggggaacttcatcaccagcaacgacaaggacaacgaggagccgtcgcagggtctagagattctctggggaaatgacaacgtcgtggtccacaaccattgggagaatctgtccgatggcgtgcagttgaactggggcaaccgcaattacatttccggcaatacgttcacgggcatctcgtcggccgtgacactcagtggcaccggcaaccgggtcgagggcaacaccatgatcggcaatcgtgttgctgtatcggtacgcccccaggccgagccaggccaggatgcggctccgggccgcaatcgtgtaagcggcccggcgatcaataccatcagtgccaatgtgatgatcgacaacggcaaggatatccgccgctgcttcgccggtggttcctgcctgccggacctgaagggtgccatcgtgttcgacgtgcccgggctcgagcacgcccgcttcgtcggaaaccgtggtggtggtgtcgagagcgatccgtccaagctggagaccatctgtgccttggatggcaaggtggaaggttgcgaaccgtctcccaaccatgggcaggccgccccgcacctgctgtccacgctcgctgccgatcatggctcggtcggcgtccgcggcgaattcaagggcattccggacagcctgtaccgcgtggaactcttcgccaatagcaagcccggaatgaccgaggctgagcgctaccttggattcatccaggtgccggtggacagcaagggccatgccagcttcgtgttcccgatggtctcggctgacgtctccaacgctgccaacgtcaccgctacggtcacgacggccgacggagccacgtcaccgctgagcgcgcccttggcacttcatcgctga

SEQ ID NO: 532827 - DNA, 507 bp, Stenotrophomonas maltophilia
atgacttcgctgccccctccgctgatcgacttcctccacagccacagcgttctatccatggccaccagctatgacggcatcccctggtcggccagtgccttctacgccttcgatgaagaggccactcgcctgctgatgcttagttctctggagacccggcatggagagatgctgtcgatcaatccgtacatggccggcaccatcaccgaccagttcagcgacatccaccagattcacgggctgcaatacacgggcatggcccgtcccctggctgtgcccgccgacgccgcgcccgcactcgacctctattaccgcaggttccctcaggcgtacggcatgaccgcgccggtgtgggagatccagctgctgcacctgaagttcaccgacaaccgcgttggtttcggcaccaagaccctgtggagccggcaggacaacgacgctgaccgcgtccggggccatgcccactcccggttcgtacccttcgcctcttcaaggaatgcacaatga

SEQ ID NO: 532828 - DNA, 717 bp, Stenotrophomonas maltophilia
atgatcgtcggcccctatatcaacggtgcagcggtgctattcggcgcgcttgctggcgcagccttggccaagcggatgcctgagcgcctgcgagtggccatgccgctgacgttcggcgtggcctcgatggccatgggcgtgattctgatcaaccgcgccgtgcacatgccggtgatggtgctggcgggaattctcggtgcgctgataggcgagctggtgtttctggagcgcggcataggcaaggttggtggccttgcacgcgccctggtggagaaggtggtgccagccaaggctggcggtctgtcgcaggaggagttcctggaaaagtttgtggctatcctggtgctgttctgtgccagtggcaccggcattttcggatcgatgaacgagggcatgaccggtgattcgtccatcctcatcgccaagtccttcctggatctcttcaccgcagccatctttgccaccacgctcggctacgccgtagccaccatcgcgctgccgcaactggtgatccagttgagcctggcattcggtgcggtcctgattcttcccctgaccacaccggaaatgatcgctgacttctcagcggtgggcggactgctgatgctcgctaccggcttccggatctgcggcatcaaggtcttcccggtcgcgaacatgctgcccgcgctgctgctggccatgccgatctcggcattctggtcacacgtcttctag

SEQ ID NO: 532829 - DNA, 600 bp, Stenotrophomonas maltophilia
atgcagaagccaagagtaatcgtcggcatcagtggtgccaccggcttccagtatggcgtcaaagcgctccagctccttcgggagctgggcgtggagacccacctggtaatgtcgaaggcggccggcctgacccggcaacacgaaacagcattcaatcgcgcgcaggtcgaaggcctggccgacgtgtgctatccggccggagcagtgggagcggccattgccagcggttcgttccgcacgctgggcatgatcgttgcgccgtgctcgatgcgcacgctgggcgccatcgccagtggcgtcagcgacacgctactaacccgcgccgccgacgtggtgctgaaggagcggcgcaagctggtgctgatgacccgcgagacgcccctgcacctagggcacatccgcaacatggctaccgttaccgagtacggggccattgtgtttccgccggtaccgtcgctgtacgccggtccacagactatcgaggacatgatcacccacagtgcagcgcgggctatcggcctgctcgggctggaccacccttccctgccgcgctggggcgaaaccctccaagcaaccctggctgaaggggaaagagcatga

SEQ ID NO: 532830 - DNA, 1494 bp, Stenotrophomonas maltophilia
atgaacaagaccctccctgccaccgtcgacgtgcatgacctgcgctcggccctggccctcctcgctcaatacgaaggggagtacatcgaaaccaacgagccggtcgattccgaagccgagctctccggcgtctatcgctacgtcggcgcaggcggaacggtacagcggccgacacgcacaggccctgcgatgatgttcaacaaggtcaagaacttccctgacgtgcgcgtgctcatcggcctgctggcctcgcgtcagcgtgtagcgcgcatgttcggcgtgccgaaggagaagctgggcttcctactgcgggactcggtggacaacgccatcgccccagtggtcattccgcgcgatcaggctctctgccaggaagtggttcacctggccaccgacccgggctttgatctgcgcacgttgctgcctgcaccgaagaacacgccggaagatgcaggcccctacttcacgctgggcatgtgctacgccgcagatccggagaccggtgagcacgatgtcaccatccatcgcctatgcgtgcagggcaaggacgaaatctcgatgtacttcgttcccggccgccatctggaccagttccgcatcaaggccgagcaggccggcaagccgctgcccatcaccatcagcatcggcgtggacccagcgatcgagatcggcgcctgcttcgagccaccgaccactccgttgggcttcgacgaactgtccatcgccggtggcctgcgtggccgtgccgtggagctggtggaaggcgtggccgtaggcgcacgtgccattgccaatgccgagatcgtcatcgagggtgagctggttcccaactatcgcgtgcgtgaagaccaaaacaccaatacaggcaaggcgatgcccgagttccccgggtatacgggcgaggcgaagatggaggttccggtgatcaaggtcaaggccgtcacccaccgccacgaccccatcctgcagacctgtatcgggcccagcgacgagcacaccaacatggctggcatcccgaccgaagccagcatcctgcagttggtggaacgtgccctgccaggcttcgtgcagaacgtccactgcccttcccccggcaccggcaagtatgtcgcggtgctgcaggtgaagaagcgcagcggccaggacgaaggacgccagcgccaggctgcgctgctggccttcgccgccttctcggagctcaagcacgtgttcctcgtggacgaggacgtggacctcttcgatatgaacgatgtggtgtgggcgatgaccacccgctaccagggcgatgtgagcacggtcttcatcccaggcgtgcgctgccacccactggacccttcgcaggacccggcgttcagtccatccatccgcgaccacggcatcacctgcaaggcgatcttcgactgcacggtgccctacaagctgaaggcgaacttccagcgctcgcagttcatggaggttgatgtgaaccgcttcgtccccggcttcgtcaagtaa

SEQ ID NO: 532831 - DNA, 1368 bp, Stenotrophomonas maltophilia
atgagaattctcccgcgcagcctggccgggcagttggtactgctgatgctgggcgggtttatcctgggaaatctcttcggcgcattggggttgtggcgggaatcgggtgtgctgcatccgattgcgcgcgaccacgctctctcacgtacgatcaccgcctaccggctggcgctgcgcgagccgccacatgccgacggttggctggacgcgttcaacaacaacgtcgccaggctctggatcgatgaagcccccagcccacctggcaccaccgcacgcgagctcgcattggcctccgatctgcgccaacgcctgccgacgaccgccgtgtcggtacacatgccctgccgtgacgacgactccacccgagagctggaccctgcggtaaggaacagcaacagcggactggaatgcgtcgagatcaatatggcccttgctggaggacggtggctgcacacgcggcaggcgcttcccgttcagtcattgtggcgcgacagctggcacctgctgcgactttctctgctggtaggcattccgccggtactgatccttctctatgtcttcatcaaccgtatcctgcgtcccaccaccgtactgaccgatgctgcggaccggatgagccggggggagcgtctggatccgctggccttacagggccccgatgagatccgcgagatcgcacgtgcattcaacgacatgcaccagcgtacgacgcgtttcgtcgatgagcggacacgcatgctcgcggccatcagccatgatctgcgaaccccattgacctcccttgagcttcaggtggcaatgctgcctgacagcgaggagcgcacagaactgctgcgcacgctgggcgaagtacgcgagatggtcaatgagacgctgcgctttgccacccgccacgcacagagcgaacccagcaatgaggtggagcttggtgcactgttgaaggaggtctgctcgcggcatcgcatcatgggccatgcgatcacaccggaagtgaccaatgagctcacctaccgctgccgccccttggccatccggcgcgccctggacaacctcattgtcaacgcagtgcggcatggccagcatgtaaatgtgcggcttacgaaccgtggcgccgagggtgtctgcatagacattaccgacgacggccccggtattccggaggaactgctggaacgggtgttcgagccgttcttccagctggacgaggcgcgtcatcgcgaatcaggaagcaacgtcggtcttggtttggccactgcccgcgactgcgttcaggcccatgggggccatatcagcctgcacaaccgcgccgaaggtggcctgcacgcccgcatcgttctccctcccgcgcaggggcgagcggcccattaa

SEQ ID NO: 532832 - DNA, 942 bp, Stenotrophomonas maltophilia
atgcagaatgccctggccggcgtggcattccgccttggacagtgggcgcaatgccaagtcgtcagccgaaacggcgatcaggggaggatcttcagcgcagagagggtcagccatcggtcaaccctatcaggcgtccagccgggaattgtgaccaattgtggcagcgggtgcgccccgtgcttgatactgttgactcccctgccctccctcttcgcccacgtgacccacctgctggtcgttgatgaccatcgctccattcgcgacccgttggccgcctatctgaggcggcagggctttgaagtatcgactgccgctgatggcattgaggccagagcgcatctgtccgcgcgtcagttcgatcttgtggtactggacaggatgctgcccggcgaggatggcctcgcgctctgtcgccatatcggttcggagtacggcaccccggtgatcctcctgaccgccttggtcgagcacagcgatcggatatccggcctcgaccagggtgccgatgattatgtgaccaagcccttcaacgtcgacgagctcgttgccagaatccgcagcgtactccgccgcgcgtccgcatccggccctcgcgtcgccgccgtgtccggcgagactggtttccttcacttctccggttggtccctggatctgctcaagcgcacgttgctggatccacacggcgtccccgtcagcctcagctccatggagtaccggctgcttcgcgccttcctgaatcgccccaatcaggtcctcagccgcgatgagctgctggaggtcagccggcagaacaatctgaacttcgaccgcagcatcgacagccagatcagccgcctacggcgcaagctcgaggaagacccgcgccatccagcgctgctgaagaccatctggggtgatggctacctgctggcggcggacgtgcatcgccaggcggcgacatga

SEQ ID NO: 532833 - DNA, 858 bp, Stenotrophomonas maltophilia
atgggtgcggcggcggcctttggtgcggtgctctcgtacgcgatcatccgccgaagaagaggggccaggcagaccctgcaagagcgtttcatcagcgccatgcgacgtggtgagatcgggttggtctatcagccccttcgtacactcgccgatgggggtctgatcggcttcgaggtgcttagccgctggacaccacccgatgaaggtgagatctcgcccgggatcttcattcccatggcgcgtgagttgggcctcagctcggagctgttccgctatgtgctaagcaatgcgttgaaggagatggcgccaactctgcgcacgcagaccatccgttacatcagcatcaatgccgaacccgccgatatggcgacggaagacatcgtccaatttgtcgaaagcactgcgaggcagaatgacgtcccgcctgcaagaatcagattcgagatcaccgagcgcgaagatcttgcatgccgaggactaaccgccaacatggccgcactagcagcacgcggttttcgtttcctgatggatgacttcggaacaggcagctccaacttctcccatttcgcacagtcgccgttcgttggaatcaagatcgaccgcatgttcgtctcggcggtcacggaggagtcgccactcaggccagtgcttccagggatgtaccagattgcccgccagttgggcctggatgtcatcgtcgagggtgtggaaaccgaatgccaggatgcgctactacggcagctcgcgcctttcgcgattgggcaaggctggttctacggaatgcccgttgcatgcgaggctgctgccgagctggtcagctcccacagcatgcaatgcggtgatgcgtcgagcgcctga

SEQ ID NO: 532834 - DNA, 330 bp, Stenotrophomonas maltophilia
atgaccaagggaaatcaagctttgcagaggtctgccatcccacctgatgaagttcgtttcaccccgtattggggtgacctctactggggcgggacggagggtcggcgggtgctcttgcttggcgagtcgcactatcggagggaggggacgagcgattcgctagaagtgacccgtcctttcactcaagaccatttccgagagatggccttgccggtccggaacggccgtgacggacccttcttcaaggcgctcgatctgatccccaccgggcggcaggactaccaactccaagacgccgccgaggcttggggaggcgcgtggcattcctga

SEQ ID NO: 532835 - DNA, 186 bp, Stenotrophomonas maltophilia
atggaagcgctggccgtgtccttgcaccaagcagtgaccgacgctgatcaaagctccgatgggctcatcccggttgctcagtatgtccggatgtccaccgagcatcagcgttactccacggagaaccaggctgcggcaattgctgaatacgccaaggcgcatggcatgcagatcgtccagacctaa

SEQ ID NO: 532836 - DNA, 222 bp, Stenotrophomonas maltophilia
atgcggcacgccttcctcggcctgcgcctggacgcactgtggtgcggctacttcaccgacaacctgcagtccctgagcgtacagagcaaatgcggtttccagcatcaccataccgaagtgaacaagttcaacagcttcctcggcgactaccgcaccgaacacatcagccacatcacccgcgagcaatggcaggcgcaacaggcttccgtgctgcgcgcgtga

SEQ ID NO: 532837 - DNA, 1122 bp, Stenotrophomonas maltophilia
atggaattcaattttcagcttcctgagaaatctaacctgttggacgaggtgaacaaaaaagccgagaattttcagactggcggcggctatttcgcctttgcttctcgcagaggaattgaagcctttttctcatcctccagtttaaagaagcagttggaagcaaagatgcgattccgactcgttataggcatggatgcgatcaccaatactggggcaatcctctacctagaagaactttcgactaggtatcgtggccttcaagtaagcgcgttccttcacaagcggcaaacgatatttcatcctaagtttgtgtggttcgagaacaacaacggattgagcgtgattgcaggttccggcaatctaacgctcggtggtctcggcggaattcatgacaaagcgactcgtggaaactgggaagcattcattagcactaccctccacggtgacgactcgcttaatttcatcaagtccattgatgtctgggaaagagctcaagtagaggaaggctctcttctccccctttcagatttcagggttcgcgacagagccatctccaacgggcaacaacgtgttcgcctttcaaccggagaagtggtgagaggcagtacattcgtcgtacccgaagaggactatcaatcccagccaagtgcgaaccaggtacttgtgagagagctgccatttaacagaccaggccaggcggacatcacggccgatggactttcgttctttggctttagcggcgaagctacgacggcgctattacaatacgttgaccctcagaacagaaactccccgccaactgaacgctcgttattcgtcaacgcgagcaagaattatagaattgaaataccagagatcacccaaaagaaatacatccccgggaaagatgacggcagagttgtactagtagccgtacgcgtagacgatcgcgcgtttaaatatacgctagtctggccagacgaagatcaatacccaaccattagcaagttgcttgggccaataccaaagggcaaaagccgcagaatgcgcacactaataaccaaagttagtgtgattcaaaatgcatggccccaagctcccggcgacctctttcctattgtctccgctctttctacacgctag

SEQ ID NO: 532838 - DNA, 1308 bp, Stenotrophomonas maltophilia
atgggatcgttttactatcttggtcgaaaagagagtatcgcatctgagatcgtttcagtaattgaaggcgtttctggaggggatgggcgcgcttgtgatctcttcgctggtagtgggtcaatttcggcttctttgagtgcagtgcgaccagttaccgctgttgatatacaagagtactcacgggtgctctgttctgctctgctgtcccatgattcattttcttttgaagagatcgagggttgggtgaaaagccttcggtgctcttccctgcttgagtcgatgcaggagcggttttcgcctctcttggagattgaggctcaggcaatttctcgagcggttcagggagatccactgcttctggcagatctggtcgagagcccgccgctggtcgtaggtggtgcggtcacgaactcagagatcaattccgcacgtctcagggtcagtcgggctctcaaaatgtcgagtcgtggaatgtatcgggcgtcgacaattgcaagatactatggcggcgtctatttttcgtactctcaggcaatcgcaatcgatgtgattctggagtcgattagtgcgcgaacgttcgatgagagagacgtctttacggcggcagctctgtctgtcgcgagtcaggtagtcaatactgttggaaagcaattcgcccagccagtaaggcccagggggaaagatggagagatcaagaatagtttcgtgaagtccgcaattagggatcgccttcttgacccaattgatctgtacggagttgcgctgaagaagtactcgacagggaatcagtccacgttcaagcatgaggcaatctgcggggatttcttgaatattctgaagagcaaaggagaagaattctcagttgtctatgcggatccgccatacacgagagatcattacagtcgcttctaccacgtattagaaacgatgtgtctgcgtgatgagccggccttgtcccagatccaaagaaaaggcgttaaagagacgagtcgtggaatctatcgtgaagggcggcatcagtctcccttttgtattcgaagtgaggctacggctgcgtttgaaaatctttttgaaacgacccgatattatggtcttcctttggtactttcgtactcgcccagcgaggagggggatgggactcatcctcgagttctttcggcctcggtggttactgacactgcgaagaagtactatcggtcagttgatgttagctttattgaagggaagcggcacaatatccataacagggcggacgtcgcgctggctgcacgcgatagtgcggaaatgttgattgtttgccaagtgtga

SEQ ID NO: 532839 - DNA, 1137 bp, Stenotrophomonas maltophilia
atgaagattcctggatttaagaaagtattaaagtactcttttggcggtttcgatagctctggggccataataaatgccgacaatttaacggctctgaaagctatggagtgtgatttttctgggtcattcagttgcgtctatttggatcctccgtataacaatggggatacatacagtcactatgatgacagacttgatcatgatgaatggatagccggaattgttcttaggcttaaagctatcaaaccgcttttgtcaaaagaggggtcagtgtggatctcgattgacgattctgggttgcattatcttaaggtggcttgcgatcaagtcttggggcgggattcttttatcgggactattgtttgggagcgcaggacgacgagagaaaataggagggcgttttctcgaaatcatgagtatattcttgtatatgctgcagattcgaaggtttggtcaaggtcgcgtaatctcctccccattactgcggaaattgagtctaggtacaagaatccagacaatgatccaagaggtccgtggcaatctgttactgcaaatgtacaggcgggtcatgccaccgattcccagttctatcgattggtcgccccatcaggagcctctcacatcccacctaagggaagatgttgggtctactctgagtcgaaaatgaatgaggagattgagaaggggaatatatggtttggtcgggatggtcttggtgcgcctaggatcaagaattttctttccgaaagacggcaaggagttgtgcctgagacgctctggcgcgctgttgatgtgggaactacaagtgaagcaaagaaggaattaataggtgtgtttgaagagtccgcgctttttgatacgcctaagccagaaaggttgatgaaacgagtgcttgaaattgcgactaatccgggggatctgatacttgatccatatcttggttcggcgacgactgccgcagttgctcacaaattaggcaggcgattcgtcggcatagagatcggtgagcacgccaagacacactgtgcagaaaggttgcgaaaagtgtgtgggggggagcagggcgggatatccagggaggtgtgctggaaggctgggggtggattcgatttcttgattcccggtgtgggagaatag

SEQ ID NO: 532840 - DNA, 627 bp, Stenotrophomonas maltophilia
atgtcgcgcagttcttccatcgattccggcgggcgctccggggtgaagctgcgggtgaggatgcggaactgcgcggtcttcagcttcagcaccacggtgtggccgacgcgttcggtcttgcgcgtggcattccaggtcttctccgccagctgcacgatcgcctcgcccaggtcttccagcaacaggtcctcggcaaaggtgtcctccgaggagatcgactgcacctgctggtccggttccaccggccgctcgtcgatgccgcgtgcacggttgtacaggctgcggccgaaactgccgaacgcctcttccaggtcgaccagggaccactgccgcaggtcgccgcaggtgacgatgccacgcgcggcaagtttgccttccatcaccttgccgacgccgggcacccggttcaccggcagcggcagcaggaacgcgtccacccgctgcggtggaatcacgaactggccatcaggcttgcgccagtccgaagcgatcttggccaggaacttgttcggcgcgatcccggctgaagcggtcaggttcgtctcctcgcggatctgcgcacggatggtgcgggcgatgtcggtggccagttcgatgccgctcttcggctcggtcacgtccaggtag

SEQ ID NO: 532841 - DNA, 399 bp, Stenotrophomonas maltophilia
atgaagtctttcaacatcgctcccgatgaactggagagcgcgcggtattgctcgcgagagcaaggaatctctctcaacaaatatttgcggttggcggttctcgaaaagaaccggggcgtggtgcaaggcttggaggccagcgacacgttgagcgcgattcaaaccacggtccgagaatccgaagccagggcattcctggcgctggaaagcacgctggcagacatgcgcgtcgagcaagccgcggcactccaagcaaacgaagacctggtggtgaaaaccctgcaggccttttcccagttcttggcccaggcagagcccgacacccaggccccggccaagcaatcggcgtccaagccagctcgcaacccgtcagcggcattcctgccgccgaagccctaa

SEQ ID NO: 532842 - DNA, 609 bp, Stenotrophomonas maltophilia
atgaaacgcttcactctcaccctcatcatcgctgccgtgctggcccccgggctttcgtttgcccaggacaccgcgcagcccgagccccagaagaccaacaagctgcgcctgttcaaggccggcggcatcggctgcctggcgggtggtggcttggcccttatcactggtaacaagaagaaggcggctgccgcttgcgtggtcggaggcgtggtaggcggcgtcgctagttatcgcgcccaggtcaaggaagcccaggaagtggcagaggctgcgaaagcggctggcctggacgcccaggtccataccaagaccgtcgaagccaaggacggccaggccgaagccttggacaaactggtcatccgttacccggcctttgacatgcaaccggtgagcgccaagaccgctgccacgctggacaagctggccgcgttgctgaaggccagcaaagaagagctgacggtcagcttcagcggtgccgatgccgccgtgtgccaggtgccggtcgttgagctggcaaagcgcggcgcgcttcagaacgccacggtcgatgaccagtgcggccggggcgattacgccatcacggtttcgccgatccctgacgttcgctaa

SEQ ID NO: 532843 - DNA, 1113 bp, Stenotrophomonas maltophilia
atgacacccgaagaactcatcaaacaacgcaagcagcgcgagctgctcgccaaagcagcacaagccaagaccaccgcacccacggacgcggagaagcttgtcagcgatgcgacgaaagaaaacttgaagaccgctggccgactggcagcaagttttggcaaagcgttggcagacaagaccaagcaagccgccgcggtcgccgctgagaaggggcgggaggcgcaagaggcgttggtccgtcgcgcggaagaggcgaaggcaaagaaggagtccgaagcaacggcacgtttggcaccggagcccctgacggctcaacccgatccccgcccatcgccccctgagccgagaacggagcacgaggtccacgcaccagcacccgtggtggatacggcccctgccggatccagtgtggacgcggccagcgttgctgcggagcccgttgcccacccacagacggaagagccctccccacccattcggcgcgagccacaagccatggcggtttcctcgccaacgttggagcacgtgacggtaaaaccgtccgcgagctcaacgccggcagtccctgcggctcagaaggagccgggccctcgccagagcaagcccgctccgcaagcctcagcgacgccgcagcagggcgtcacccgccccggctggcaccgcgttgttctggcgggcggcgcggttctgatcgtgggaggcgccctggcgtggtggttggcttcccgacccagcgcgccagcgttggatccaatcccgccgtcagcaacggttgctcctgcgttggtgtcggctcctgaggttgagtcgccaatgcccgtgccggcccagtcccgcgaaccggccgagcccgccagtgctcccgaggaagagcaagccgtggtgagcttgccgaaggtgagtgcgcccaagccggcggagcccatcgaaccggagagccgtccaacgccggtagcccctgccccccgggccgttgctgcgccgacgccacgaccggcaccgaagcccaaggcagtcgccccggaggcaacccctccaaatgccgagcggaaaaccgattggcaggaccaagccaacagcgatatcgacgcgtgggcagcaaagatcaagtga

SEQ ID NO: 532844 - DNA, 531 bp, Stenotrophomonas maltophilia
atgagcaatgcccacctccatgccttgaacgacctgctgggcactcgcgataagcggcgagcgaagctggccggcgagcgtcccaacgaccaccagccgcaggagaaagcagccttcgaccaatcgctggcgaaggaccaggccgcgatccaggagaagcaacacgccgtgttggactgggccaagcaagccaagcccgaagagatcgccggctttcgagagcgaatgcacgcgcaggtgcaggagcgcgcccaaaacgctcccgaagacaagcacgcccaagtggtgttcaacaccgtggacgaatggcgacagaaacgccagcacaagaacggcgggcaaccctcgggggaagacatccccatgctgacggcggcccagcggcagcaagccatggggccaggtaagttgggctacgcgcactacgccgccagcgcaaagaaggaagcggagttcatgagggactacgaggccaagttcgactggagcaagcacgaggcccacgtgcagaagaacatctaccgtcaatga

SEQ ID NO: 532845 - DNA, 762 bp, Stenotrophomonas maltophilia
atgcagccccgccttaccataaccgccgttctggcttgcttggctttggccgggtgctcgaccgtgccacctaaaccccagccgattacccctcgggtttaccaatctcccaattcgcagggagctatttttcgtttcttccatccgaaggcgaagagcgagagggtttggagtggagtctctcctgctttaagagaaaaggtggaagccgtccaagcacagcttgctgttgaaggcttcgatgtgcgcccggttgagggccgccgttcgccggagcgccaggccgccctactcgcttctggctctggagtgacgagcgtcggtgcctggtcgagctgccacaacttcggtctggcattggatgccgccgttttcgtcaatggcgagccgtcctggaaccttgaagatgcccacgtaatggccggctatctacgcttcggggagctggcggaaatcgtggggctgaactggggcggccggtggaccagcccgaaagactacccccacgtcgagctgaaaaccgagtgcggccaggccaagtgggcccaccgacagggacgcaagccggtcacatttcctccggtgactggggagccttcttctgaaatgctggcccgtgcactggcaccgtcttggtgccctgccgggatagaagcggcctgcttggcgtggggcaatgaaaatcgctacgcatggagcttggccatcccggatcgggtttgttctgcgacctttcctaacagcttgagaaagatcgcctga

SEQ ID NO: 532846 - DNA, 1314 bp, Stenotrophomonas maltophilia
atggaaatacccatcgagttggacaaggaagtcggaagagccctgctttggatgcatcacatcgcaggaccatcattggctgatcgactcgaggtcgcaaagacccacttcctgaagtcatctatccccgcaaatggctctatcctgtggccgtcaccgatgggcctactgccacctgaagatatgacggcaggtttccttctccaagccaccgcccttgttcaggatcggcgattctttgatgctcgtctcgccccccgggtgattccgttcctgaagttggtgggcaaagcactgaagaaactccactttacggaaggcgcggagcaaagggttaaagagttcctgaaccccaagaataaacaccctgagggaagcctgcttgagctagctgtggcatctcgctatctgttggagggttatcgagttaggttcattccggagagtcgtcacaagacgccagacctagagcttatctttgacgagggaagcattcagattgagtgcaagagattgcaacctggagcgtacgaaaaaagggaatcgaatcgaatgcaccggctgttccgtcctgcatgcgacaaggtcgatgccgcttcttccttcaagcatctagacgttacgttcaagtctgagatttcagctgttcccgacacgtatcttgctgaacatatgcaggccgcgcttgatgacttcaacgacagctacgaatgggaggaccaacttgcgaaggggactatccgccaaggcaacctcgctgcagtagtcgcagataccgctataggcccaatacttgtaggaccaaagctgttcagactgttcacaaattccgttgtcccatcgcaacgggtgctcttcggtgcgcgcggggaaagccacgagcttgaccctagatatcttgacaactttgacgctatcgcactttgcagctgggataccgtcaatgaagagtcaatgacatccagatccaggcattttgggtcaaagctcgcggagatcgatgcacagctagcaggatgctcccttggagccgcccacgttgtggttgatgctgagcgagatagcgcgactgcagatcttcgccgcagacgtatccgtgagaaggtctgctcgttcgacttcaagtcaaagctcgtgattctgactacgcactaccttctctcgcatactgctgagggagcatcttggactatagatgagacagccgaaccggcagcccgtaccactgagtctttactagaagacccgaggctctttctcgatgctcagatcctcggcgatgcacctgcctggcatcagccgccacccaaatag

SEQ ID NO: 532847 - DNA, 1947 bp, Stenotrophomonas maltophilia
atgagccggcgcgtcgacagtccggacactgatgctgaccgagagatccatgcgtgtattaccgcgactcccccgcagccgtttgtggttagagctggagctggatccggcaagaccacatctcttattaaagcgctggactgggtgatatcggagcatggctccaagatgcgagcgaagaagcagagggtcgcttgtattacctataccgacgttgctgccaaagagattgtctcggatattgatgattgcctggttgttgtttcaacgatccacagcttttactggtcaattgccaagtcatttcaggccgatatcaagctctggctgcagacagacatccgccggcgtatatccaagttggaggaagagttccagaactatggctcgcgtgtccgggacactactcgcgagaggaataggtttgatcaggagcgctacgcccgcagtctagaagccctggaacgtgtcgcgactttcagttacggcgtgggcagtgactacgcgaagggaattcttggtcacgaggatgttcttcagctcaccgactttctgttgcagagccgttcgctgttcaggcgtgttgtggcgttgagctacccatttgtattcattgacgaaagtcaggacacatttccaggtgttgtgaagtcctttaaagaagtagaggctcaaatgagaggcaagttctgcctcgggttttttggtgacccgatgcagtcgatattcatgagaggagtcggagacatcccacttgaagatcattggcgggtcattacgaagccggagaactttcggtgtgccaagcagatcctggatgtcgccaatgccgtgcgcgcccagggcgatggcttgcagcaagtcagaggcttgcaagagtgggtggatgggaatctccagcccgtggagggaagcgcacggatgttcattctgccgagcgcattgaaccgatcggaggccctgtctagagtccgagcatggagtgcggcaacaaacagcgacgagggttggagaaatccagacatcggtgtcaagattcttgtcatcgtgcatcggatggccgcagaccggcttgggttcggcggcatttactcagcgctcaatgatggaacttcggatgctatgaagcaggggatgcaggacggcacaggttggcccgtccggcccttccttagtctcgcattgccacttgctgcggcgatgaagggaggcagggaattcgaggcgattagtctgctccggaaattcagcccaagcttggcacctgcggccctggtcggccggcgacccgcagatgtgctgcgagagctgcgtatcgctgttctcaggctcgttaccatggtcgatgatcccgacaagaccattggcgacatagctcttcatcttcacgacacgggtcttctcgagttcgacgagcggtataggcgtgcgctcgcgctaatgggagagtgtgtggggtcatttcaggatgccgacgcctttgacaaagagccggttgacagacaatcgtcagatgcagctatggccaagttcttcaagtgctccaccacagagcttaggccctatgagcgctatgtatctgagggttcgccctatgcaacgcagcacggcgtaaagggggcacagttcgaccgcgttatcgttgtaatggacgaggaggagagtgactaccgtacctacaactatgagcgtgtcttcgccaatgcacaggaccgcgcagagtatcgtgcacgtgctcaggatggtgatgagaacacttggagccgaacgcttcgactgctctacgtctgttgcactcgtgcccggcgaggtttggtgttgacgttctttgttgccgatccggccaccatgctagagaacgtagttgccagtgggatcgtaccgcggagcgccgtatttacacaggatgcgctggaggagatgcagccctcttctccggaagagtga

SEQ ID NO: 532848 - DNA, 2409 bp, Stenotrophomonas maltophilia
atgaagctacaggcctatcggctgcagaattaccgccggctgcgggacgttgtcgtcgagctggatgacgagatctccatttttgtcggcgctaacaacagcggtaagacgtcagctgtccaaggtctgcactcgatgattcgtggggatgctaagaagttcgagctcttcgacttcagttcgacgctttgggccgacatcgacgcggtcggaagttccgaccctggagacgaggtggctgcaaggagattgccatctattctcttggatctttggttcggtgttgatgaagacgacctcgccactgcaatgtcgctgttgccaagcactgagtgggatgggaagtgcgtcggaattcgcgtggcgtttgagcctcgcgattactgtcagctagttcggaactttcaggacttgcacgagaaggcggagagagcggcaacagcattggaagaaaaacgcagcaacgccggtagttccgctgccagaacgggtgtggatatagaggtgaccaaagcctcagagtacaggccatggccgcagaccctgacaaagtatctcacgaaggagctgagtcgcgaatacggcttcaaatactacgtgttggacgagcgggcctttgacggctaccgggaaagcgacgaaaactacgatccgctgcccattggaaaggagccgggcggtgcttccatcttgaagtccctggtaagggtggactttctgcgtgcgcagcgaaatctcgacgatcccgacggtggcggctcggaccgcgccgagagtctttcgcggcggctgagccgtttctatcatcgcaacctggacaagcgcgctgatgatcatgcagcgcttaaggccctcgatacctctgagagagagctgaaccttcacttggaggaagtcttcaaagacacgcttaagcgcctagccgagctcggctatcccggcgttaacaatccagagatcgtgattcgggcggccttggaccccactactgtcctagggcaggacgccaaggtgcactatgtggttcccggtgcggatatcgctcagttgcccgacagttacaacggccttgggttcaagaacttggtctacatggttgttgagcttctcgacttgcacgagcaatggaaggcggaggacgaccagcgtgctccgttgcatttgttgttcatcgaagaaccagaggctcatctgcatgcgcagatacagcaggtcttcatcaggaacgtactggccctcctgagagataccagcgactatgcaacgcttttccatacgcagttcgtcatcactacgcattccccgcatatcctctacgagcgaggcttctcgtccattcgctatttccgtcgtgtcagtgaccatctggatcatcacactgaagtgcggaacctctctctcttcaaaacgtcggcgtcagacgctccggcgcgtgagttcctgcagcgatatctgaagctgacgcactgcgatatcttcttttccgatgcggtcatcttggttgaaggtaacgtcgagcgcttgctcttgccggcaatgatcgagtccgcagcgaagcgtctgcgttcatccgctttgaccatcctcgaagtcggtggagcgttcgcgcatcggtttgaggaattgatcggcttcgttggacttacggcattggttataacggatcttgatagtgtgacggtcaagactaaggtcgtgaagactgccgcgggaaacacaggcgtcaatagtgcagttgacgacgacgatgagggcgaggatctaaagtccttcgagctcgaagaggaggacgaaggtgtgccgggaggcaagaagacgtcccaacggcgcggcagcacttgccatgcacacgtggaaggcgccgtcacgtccaatcagactctcatcagctggatcccgaagaagcgctcggtgcgcgaactttgggaagtctcggcagagcagaagacagtgcggctggcggagggttcaggggctgaagtccgtgtagcgtatcagactagggttccggtgaccgtgggagagacgacttcgcaactttgtgggcgcacgctcgaggaggcttttggtctcgagaatgctgcctggtgccaagacgaggccaaccgcgcagtagggcttaagctcaagcctgccccaagtagtccagaggagctggcaagacggttgcacgaaagggtggttggcaagaactttgacaagactcgctttgcgctagaggtgctggctagcggcccgctcaacggctggagggtgcccgcatatattgcagagggcttagtctggcttgagagcaaagtggcccacgaacttgaggcagaagcggctgtagcgattgaagtcgggatggttgaggcggcagtgcccaatagtgttggtgtcactaccgatgcgggagagacggcatga

SEQ ID NO: 532849 - DNA, 3063 bp, Stenotrophomonas maltophilia
atgcaggatggggtcaggcgtcaagaatggcgtccgccggccgttgaggtcggggacgtggaggattcgttcgcgcatgaagccagccgactgcacaaggaacatcaaccgatgcccgcgctgaaacgggcgttggcgcggccgctgcgcgccatcacctggggcggtgtgctgctgggcgtactgctggtgaccggtctggccctcatgctggtcaacgaccaccaccgccgcctggaagcggcgcagcggcagagccgcgcgctggcggtgggcagcgagcgcctgctggcgctggagctgcgcaacctggagcgggccatgaccggcatcgccgccgacgccgcggaactgttccgcagcgtgccggcacaggcgccggccttgctggatgcctccatcggcggcgtgctgcgccggcacgccgaactgcacagcatcgtggtgctcgacagctatggccgcgcattgacggccggcaagggcgacctgcagttgccgttgtggaccgatccgcaacggcgcggctcgggcagcgcgctgtacatcggcccaccgcagcgcgccagcgacgggggctgggtggtcccgctggcgctgccgatggccgatgggcgctggctgctggcacggctgcgctgtggcgaactgcagcgcatcgtcggcggcctggatgtcggtcccaacggattggtctcgatcagcgatgcccagggctacatgctggcccgcgtacccgatccgcatggcacggtgggccgccgctatgacctgccgcgccgggacctgctcggcacgcaggcagtggtcgagctgggcagcatgcccggcgttgtcgacggcgtgccgcgcatcctcaccatcagcacgctcgaacgcagcccgctggcggtgcaggtcggcctggccgacgaagatgtactcgcaccgtggtggccgtacctgaaggcgtcggtggcgatcgtactggcctacatcgcggtgttgctggtactgctgtacgccgtgcgccgcagcacccgcagccagcaggcgatggccgaggaactgaagacgggccacgccgagctgcgcctggcgcaccaggtcgggcgtgtctgcacctggtacgtggatgaggacgccgcgctgctgcgctggtcgccgctggcccgcgagatctttggggtacagaccgacgccttgccggtcgcggatttcttcgcgcgcgtgcatcgcgatgatgccgcgcgcctgcagcaggcctttgaccaggccttcgccggcagcgctgtgctcgaccaggtgttccgcctggtgcttcccgggggcgaggtgcgctgggtcggcgcgcgcgggcagcgggtggaagtggccgacagcgagcggcgcatgatcggtgcgctgaccgacctgagcgaacgctatcaggcgcgcgagcagatgagcgaagtggaacgccgcttccgcctgctgttcgaccgcaatccggcaccgttctgggtgttcgacccggatacgctgcgcttcatcgaggtcaacgacgctgcagtgcgccagtacggctacagccgcgacgagttcctggcgatgagcatcctcgacatccgcccgcgcgaaggctgggacgaagtgcgtggtgccatccagcgggcgcaggtgggcgatccccccgacgcgaccgtgcgcctgcaccggcgcaaggacggcagtgtgttcgaggtgcgcgcacacctgtccaagctcgacttcgacggacagcccgcgtgcctggtgctggccgaggatgtcagcgagcgtctggcctacgagcgcgacctggcctatcaggcacggcacaacccggccaccggcctgctcaatgtgcgcgccctgaccgaacagctggacgagcaggaggagggctacaccatcgccttcgtgcagctgcgcgggctgcagctggtggccgatacgctgggccgcgagatcggcgatgcggtgctgcagtcgatggcgacccggctcgggggcctgggcgcacgctgtggcacgctggcgttccagccggccgaggatttcgtcttcgccatcggtgccgagcacgatacccagcgcgtgctggacgacctgctgcagatcgtgtcggcgccgatgcgcggcaaggactcgctgcaccagttcgagccgcgcatcggcgtggccgtgcacatcgctggtgacgggcacacggccgagcaggtgatcggcatggccgcgcaggccgcgcatgcggcgcgcgccgagggcaacgtggtggtctggttcgatgcggctgtgaccacgcgcctggccgaccgcctgcgcctggccgggcgcatccatgccgccatcgacaacgaattccagctgtatttccagccgatccggcatgccggcgatggcagcccggcagcgctggaggcactgctgcgctggccgcaggccgatggcagcttcatcccgcccaacgagttcatccagctgtgcgaggacaccgggttgatcctggcactgggccgctgggtgatccgcgcggcggcgaaggcgcagcgccgtctggtcgaggccgggtggggtgagttgccgatcgcggtcaacgtgtcggcggttcagttcttcaacagcgacctggtggccgaattcacccgtgcccagcaggatttcggcctggcccgtggcgcgctgcacgtggagctgaccgagagcagcctgatgcgcaagccggcacaggcgatgcagaccatgcagcgcctgcacgagcagggcatccgcgtgtcgctggatgatttcggcaccggctattccagcatgtcctacctgcagcacctgccgctggacatcctgaagatcgaccgcagcttcgtcgccgacgtggaaaccaatccacgcaatgcctcgatctgccgcgcgctgctgtcgctgggccacagcatgggcctgaccatcatcgctgaaggcgtggagacgccggggcagctggactggctggctgcgcatggctgtgaccaggtgcagggctacctgttggggcggccggcgccgctggaacagatcatcgacgcgctggatgaggtccccgcctga

SEQ ID NO: 532850 - DNA, 2112 bp, Stenotrophomonas maltophilia
atgtccaagctgcgccgtcccaccctggcgctggccattgttgccagcctgtccctggccgcctgtgaccgcccggccgacccggccgtcggtgccaccgcgccggccgatgccgcccccgctgcggccaagccgatgctgggcagtttcggcttcgatgccagcggcatggaccgcagcatcgccgccggcgacgacttcttcggcttcgccaacggcacctgggtgaagaacaccgagattccggccgaccgctcgcgcttcggcagcttcaatgtcattgccgagaagaccctggccgacacccgcgccatcctggaaggggccgccggcaacacccaggccagcggcgacgacaagctgatcggcgactactacgccgcctacatggacgaagccggcatcgagcagcacggtctggcgccggtgcagccgcagctgaaggccatcgatgcgatcgccgacaaggccgggctggcccgcgcactcggcggcgacctgcgcgccgacgtcgacctgctcaacgccaccaacttctacaccgaccgcctgttcggcctgtgggtgtcggtggacatgctgcagccggatcgcaccgcgccgtacctggtgcagggcggcctgggcatgcccgaccgcgatttctacctgggcgatggccgcatggccgaactgcgcaagcagtaccaggcctacatcgcacagatgctgcagctggccggcgtcgccgacccggccggcaaggcgcagcgcatcctcgcgctggaaacgaagatcgcgcaggcgcatgccacccaggaagaaaccaacgacgtgaccaagggcgccaacccctggacccaggccgacttcaatgcaaaggcgccgggcctggactggaacgccttcctcgatgcggccgcgctgggcaaccagcaggacttcatcgtgtggcagcccaaggccgtggccggcctgtccaggctggtcgccaccgagccgctggacgcctggaaggactacctggcgttccacgcgctggaccgtgccgccgcctacctgccgaagaagttcgccgatgcccggttcgccttccatggcaccgcgctgagtggcacgccgcagcagagcgaccgctggaagcgcgcggtggacgatgccaaccatgccgtcggcgaagcgatcggcaagcgctacgtcgaaaagcacttcgacgccaggaccaaggagcgtgcggacgaaatggcgaagaacatcatcgccgcgtttgccaagcgcatcgacgcgctgtcgtggatgtcgccgcagaccaaggcgcatgccaaggccaaggtcacgggcctgaccgtgggcatgggctatccggagaagtggcgcgactacaccggcctggagatccgccgtgatgacccgctgggcaatgcacagcgcgccgagctgttcgagtaccagcgcaacatcgccaagctgggcaagccggtcgaccacagcgagtgggcgatgctgccgcagaccatcaatgcgatgaacgtgccgctggagaaccgcctggtgttcccggccgcgatcctgcagccgccgttcttcgacggcgctgccgacgacgcggtgaactacggtgcgatcggtgcggtgatcggccacgagatcagccacggcttcgacaacgccggcgcgctgttcgacgagaccggcaagctgcacaactggtggaccgccgaggacctgaagcagttcaacgccgccggtgatgcgctggccgcgcagttcagcagctacgagccgttccccggcgtgcacgtgaacggcaagctgaccctgggcgagaacatcgccgacgtggctggcctgggtaccgcctacgatgcctaccagctgtcgctgcagggcaagccgggccagaccctggaaggcttcagcccggaccagcgcttcttcctcggcttcgcccaggcgtggcgcagcaagagccgcgagcaggcgctgcgcaactcgctgctgaccgatgtgcatgccccgggccagttccgcgcattgaccgtgcgcaacatcgacgcctggtacccggcgttcgaagtgaaggaaggccagaagctgtacctggccccggacaagcgggtcaaggtgtggtga

SEQ ID NO: 532851 - DNA, 1173 bp, Stenotrophomonas maltophilia
gtgagcgcttcatcgcctgcgcatgccgcgtctgtgccccgccatccgtggtgggcggtctccgccgtcggcctcgccacgttctcggtggtcaccactgaaatgctgccggtcggcctgctgactcccatcgccgaagatctcggcgcgtccaccggcaccgccggcctgatgatctcactgcccgccctgctggcggcagtgttcgccccgcttgcggtgatcgcagccggtggcatcgatcgtcgccgcatcctgtgtgtgctgttgggcctgctgctggtcgccaaccttgcgtcggcgctggcacctggcatcggctggctgttggccgcgcgtgtgctggtggggttctgcatgggcggcatctggaccattgccggtgggctggcagcgcgcctggtacctgcgcagcgcatcggtctggccacctcgatcatcttcggaggcgtggccgcagcttcggtgctcggcgttccgttgggcgcgctgatcggggatgcattgggctggcgcagcgcgttcgtggcgatgacgttgttcagtgcggcggtgatgctgctgcatctgcgggtggttcccgcgttgccggtcagcacatcggtgcggccgcgtcagttcgtgcagcagcttggccagcgcaacctgcggcgtggcctgtggctgaccgggctgctggtgtccgggcacttcatcgccttcacgtacgtgcggccgctgctgacgtccgtatcgggcgtggatgcgtcgtggataggtgcactgctgtttgggtacggcctggctggcatcgccggcaacttcatcgccgggccgctggctgcgcgccatccacggggcatgctgctggcgatagcctcgggcctgctgctgacgcctctgctgttcctgtgggtgggaaatacgccctccgcaggtattgcggtgctgctgctgtggggtctggcctatggcggtgtatcggtgggcctgatgagctggatgatgaaggcggtgccgcaggccgtggagatcgccaccgcgttgtatgtggcggtattcaacatcggcatcgcaatgggtgcgtggggtggtggccgcctgctggatggcgtgggcctgcatgcgaatctgtgggctgcggcggtgttggctgggagtgccctgctgatggctgccatcacccgcaggtag

SEQ ID NO: 532852 - DNA, 1215 bp, Stenotrophomonas maltophilia
atggccaccccctatcgcgacctgttcgcgacccccggcaccgccggcctcgccctggccgggctgctggcacgcctgccgctgccgatgaccggtatcggcatcatcaccttgctgtcccagctgcgcggcagctatgcactggccggtgcagtgtcggccaccttcgtgctgacctatgcgttgctgtcgccgcaggtgtcgcgctgggtcgaccggcgcgggcagggcagggtactgccatgggccactgcggccagtgcggccggtctgctgttgctgctcgcgtgcacgctgctggccgcgccggactggacgctgttcgttgcggcgatgctggccggctgcatgcccagcgtgtcggcgatggtgcgagcgcgctggaccgcgacccatcgcggacgaccacagctgcagaccgcgtattcgctggagaccgtgttcgacgaggtgaccttcatcgccgggccaccgttgtccgtcggattgtcggtggcggtatggccacaggctggcgtactggcggccgccctgctgctggtggccggcgtcgccgcactggtgctgcagcggggcaccgagccgccgatacagcactacgaaggtgcagcatcctcgcactcgctgctgcggcaaccggagatccgcctgctggcgttgctgatgctggcgatgggcgtgatcgtcggcaccgtcgacatcaccagcgtggcattggccgagctgcgcggacagccactagctgccagctgggtgctgtcggcctacgcgctgggcagctgcgcggcgggcctgctgtttggtgccctgaagctgccgatgccgctgccgcgcctgttgctggccggagcagcggccaccgcattgaccacgttgccgctgctgtgggtcggcagtctgccggcactggccgctgcggtactgctggccggggtgttcttcgcgccgacgatgatcgtggcgatgtcgctggttgaacaacgcgtgcccgaagcacgcctgaccgaaggcatgacgtggctgctggccggcctcaacatcggcgtggcgctgggcgcggcgctgtccggacagagcgtcgatgcggcgggcgtgcgcagcggttttgtggttgcgctggcggcaggcggtggcgtgctgctgttcgccttgctcgtgcaacgtgcgctgcgcccgtctgccgcgtccacatcccctgaaggaatcatcccgtga

SEQ ID NO: 532853 - DNA, 588 bp, Stenotrophomonas maltophilia
atggttcgccgcacccgcgccgagatggaagaaacccgcgccaccctcctggccaccgcccgccgggtgttcagcgagcatggctatgccgccacctcgatggacgacctgaccgcccaggccgggctgacccgcggcgcgctgtaccaccacttcggcgacaagaagggtctgctggcggctgtcgtcgcccagctcgatgccgagaccgaccagcgcctgcaggcgatcagtgatgccgccgacgatgcctgggagggcttcgtgcagcgttgccgcgcgtacctggagatggcgctggaaccggagatccagcgcatcgtgctgcgcgacgcgcgcgcggtgctcggtggcgcctcaccggaatcgcagcgccactgcgtgcattcgatgcagcacctgatcgaacatctggctgcccagggcgtggtggcaccagtgaatgcgcaggcgctggcgtcgctgatctatggcagcctggccgaggccgcgttctggatcgccgagggcgaggatggcgacgtgcgcctgcggcaggcgacggcggcgctggagatgctgttgcgcgggttgaagtcggcggggtaa

SEQ ID NO: 532854 - DNA, 660 bp, Stenotrophomonas maltophilia
gtgggtcgcctgcgtcgcaccaccgcgttcgttgccggtaccagctatgcgcccaccggcgaggtggaggcgctggtggccagggtgcgccgcatccatgcacggatccgcggccagaccgcacagggcgaaccctacgccgccgatgatccgcagctgctgacctgggtgcatgtgaccgaggcgttcgggttccttcagggcttccgccggtacggacgggaggtgccggcacacatcgccgaccgttactacgatgagtaccgctgcgtggccgaggcactgggtgcggtggacgtgccgcgcagcgaagcggaagtggcggcgtacttctgtgcgcggcagccggagctgcgcgtcgacgagcgctcgcgcgaggtgctggaggtgctgtccggcgtgcgcctgccggtaccggtgccggggctgtcgcgcgaagtgttcctgggtgcaggcgcggcactgctgccggactgggccgaaggcatgcttgaacgcagtggccgtcagcgcgcgcaggccgccgcgtcggcgaagctgatgcagggcatggcgccgctgttccgccgtgcgttgcctgatggcctggccagccgcgcctgtgcgcgcatgggcgtgccggtgtcggtgctgcgcgagtggcccagcgttccccggtag

SEQ ID NO: 532855 - DNA, 156 bp, Stenotrophomonas maltophilia
atggctgagtggattgcccttgacaggctgctgctggaggcgcggccgcatcgaagcgttggcgtctgcgatggcgaggtgatcgaccacgcccacttccgccagcgcgtgctggcctggcgcgccgcatttgcgacgaccgaagggcgtgactag

SEQ ID NO: 532856 - DNA, 771 bp, Stenotrophomonas maltophilia
atgcggactgatccggccgttgccggtgccgcactcgcgccactggtggtgattcccgtctacgatcacgagcacgccatcgcggcggtgctcgacggcgtgcaggccgcgggactgccctgcctgctggtcgacgatggttcgcacgatgggtgcgcggcggtgctgcgcgcgctggcacaacgccagggtgtcgacctgctgcgcctggacgtgaaccagggcaagggcggggcaatgctggccggtttcgccgaggccggcgcgcgaggctacagccacgtgctgcagatcgatgccgacggccagcatgatacggctgacctgccacgcttcatcgaagccgcgcgcctgcacccgggtgcagtgatctgtggcattccggcctacgacgccagtgttcccaaggcgcgcctgtacggtcgctacgccacccacatctgggtctggatcaacacgctgtcgctgcacctgcgcgacaccatgtgcggcttccgcgtgtatccactgccgccggtgctgcgcgtgatcggtgaagagaccatcggccggcgcatggacttcgataccgaaataatggtgcgcctgtactggcgcgggctgccggtcgagcacctggccacgcgcgtgacctatcctgccgatggcgtgtcgcacttcgatgtgtggcgcgacaacgtgcgcatcagccgcatgcatacccgtctgttcttcggcatgctctggcgcgcgccgcgcctgctgtggcgccgcctgcgggggcagcgctga

SEQ ID NO: 532857 - DNA, 1617 bp, Stenotrophomonas maltophilia
atgaagaatgacaccctcgtcatcaggtttgtgagcgacatcccggggcgtgacgtggactcatacgacttcagtttgttgggcctcaagcctacgaacgcatcgcatctagcaaagtcgttccaggcattgacggcgacctacaggtctgaaagcaggaggcaagcttgggcttcggtaacaaagtactgcagatacttgacgactcggcatagcccggatgcggcgatgaagtctcaatcagtcatcaaggacttcctccgcgatatggctagtaaagttcgtcagtcaacggccatctctcactacaacttcatcgcagcaatctatagatggctgtcgctgaacgacaccgcaaacacaattgtatggatgaatgttgattctggtccttgcggattgacgcgagaggcgaagtccgcgcgtagtatcaggctgtcggtcagcgacctatctatgatcttgtcagctagtaagaagggcattgatcgggtgcgtcgacgattagcggttggcgagatcgcgatcagaaccggtgaatgtgaggaactctctgaccgtgacgtcgccacattggtgggcatccagaaggggttgcagcgaggagtgctagccaagcatcggctgacaaagagtggcttgattcagcacagttgccggtacagggaggttcgtcgatacgtcgtcctggacgcacgtgatttcatcccatatctcatttgtctgatgtgccagacactcgctaatcctcagtcggcaattgagatctctgtggactgtgttgaagcgcacccggttgacccgttgaaaaggcgtgtcatatgggacaagtacagggccgggcggcagcaggtgttagacgtgagtgcagatgggcgttactcagttcctgctctagtagaagatatcaccctaaggacgcgcgccttacgccccattgctggtgacttcgcgacgcgcttgttcatcagcccggttgggtcggaagcaaggacacctgttgcccagtgttggcacgaagcgctagccgaattcattaaggagtatgatcttccggacttcaacttcgtcgacattcgcacgtctggtgcggaagctctgagtacatccggtgttgggattgagtccatacagaggaagatgcagcacagcgatcctaggacaacgcagcggtatctgagtcagcatcctccctcgtcgcaagctcgaaggaaagttgcgacgttcattggcaaggttctgaaagaggccaggcgtccagctgcgcggcgctacgaaactgtgacgggattgcagtgctctgatccggcttctggggtcgcgccgcagtcaattgttgggaaggagtgtctccagtacctgcagtgcgcgacatgtcctaatagcgttgtcgtgattgacagcccgaagcatgtgtccaggatgctcgctacactgagttcgctagagcgaatgaagaaggaagcagctaaatcagtcgatgtccgagcacgttatctggcagcttatgaggcaacacaccaggttctgctggcactactggaaagggttcccgcaaaggttcttgaagtagcgaggccgcttgctctgaagatcccgcagctgagtatggagtga

SEQ ID NO: 532858 - DNA, 858 bp, Stenotrophomonas maltophilia
gtgcgcccgttgcctctcccggtcgacgacttcgacgacgtttacacgctttgcattggcgcgactgcagatgcaggattaaaagcgcgcctgatcgcaattaggccattgcttcgagaagcagccgatctctacgatgagagcgctcgccaggcggcgcttcacacaatcgagcgaaggaacgcagtgggtgacgtaaccacggctgagctgagggcgctgtacaaaaatcatcttagcgcacccaaaggtgctgcgcgcgccgtgtacgataggatccgcagctcagctccgcacaacaagtgcccgctttgcggggttggcatagtagcccactgtgaccatcacctccctcagtcgaagtacccggatttggtcgttctcccattgaacctggttccggcctgtcatttctgcaacgacaagaagaaggccaagcaccccgctaacgcaggccagcaaacctttcacccttattacgatcagcacctccttgatgagagctgggtatcggcacaagtaaagctcgaggccccaggcgatccacccgtggtggtgttcgaagcacgacctcctgctcattggtctctggacgaccaacggcgcgtcgagcatcacttcaatgcatgcggtctagccgttaccttcgcagcaaatgcttgcgacgagctctcgacgcttcgccgacttctcagccagcttggcgccgcgggagggcgtgccgctgtgcacgaccatttaacgcaccagcgggacgccaaccagtggaggatcaacagctggcagtacgctatgtatacagcgctttcagatgatgcatggttcgtgggcggtggctacctctgcattccgcaatga

SEQ ID NO: 532859 - DNA, 1620 bp, Stenotrophomonas maltophilia
ttgaagttcagaattgttgaagactcatcagcctcgagtggtggcgatgagatactccttgcgctagatccatggaacgactggtttgtctggaagactcagttcttcgcagtatatgttgacggcacgggcaagcgaacagagctcgggcaggtcaaagttgggcgcgtcggaatgaacgagaaaaactcggtttcccacgagctaatggaacaccatttctcaagactcagcgcgccatggttctctatcggccagtccgaggactactatcagcagcttatcgagctgggtgatacgttcagagagcagtacctgacggctatgcgggacttggccttcgatccggtcaccctggaggaggtggagggcgaaagcgttgttatgagatcgctactgcgcggcatcagcgacgagcgcgttcgaaatcgcttgaaccgtcttgcgcatggcaacgcggctctcagtagctataacttcagcttcagcttcccaatggaatcagagtccatcgccccacccccggtgatggactttctggtggtgccgcactccaccccaccaacgaatgtgcacgtgatcattggtcagaacggcgctggcaagagccgctgctttgacctcatgtcccggactcttctgggacttcgagcgcgcgggggcgcggagccagggacggtcactcgagctggcaaagagctgtcgccattcatgcttagctgggatgatcaggagttcgccggcctggtgaacgtttccttcagcccatttgaagactacggccctctattgcctgccgacggggataacgacttccgctacgcctacgttggcttgataagagagtcggcaagggagattgagcgacgtgaagctcttgcaacgatcttgtcgcctcaggaccagatccaatctcaaacaccaacaatcaaagggcgcttggaattggcaaacgacttcgtggaagcacttaaggagtgccgcctatcgggtcgacgcaagcgctggttgagtgcaatagagctgcttgaagcggacactatccttcgagacactggggcacgagggatgatcgatgacgagaatgaaggatcagaacagaggatatcttcatggttcagatcgctgagctcaggtcatagcatagtcatgttgactattacaaagcttgtcgcactggttgaagaaagaaccctcgtcttagtggatgaaccggaaagccaccttcatccaccgctgttatcagccttcatccgtgcagtgagcgagcttctcacctcccgtaacggagttgcactcattgctactcactcccccgtcgttctccaagaagttccaaaacgctgcgcgtggttgctcgggcgttctggcggtcactcttgggccacgcggcctgagctggaaacctttggcgagaacgtgggtacactcacgcgagaggtctttggcctgcagattgtacagaccggattcaatcgactaatccgtgaagcggtgtatgaaactggcgacttcaggatggcagtcgagaagttcggcggaaagatcggcagtgagggcgtcacgctggctcgggcactgagcttccttccacgcgaagatctggaagatgaggcctaa

SEQ ID NO: 532860 - DNA, 747 bp, Stenotrophomonas maltophilia
atgagcgaggcgtttgaccgtaccgaagcgctacaaaatctgatgatttcgcatgccacaggtggcagagaaagcaatcaggaatactcgaagctgcgaaactcgctgatgaccaatccttcagtcgaagcattgatcccacacttcgtgcgcaactctcgcaacctagaccaattctggcagttcatcaagttcgagctcccatcctacgccgagcgcaggaagctgatatgggacgcgttccgccctattctggaagaaatagagagggcctccgcttttcctgcagaccacattatttctgacaagctcaccaccgtggacgcatcccacgtccagtcagcatggaaaaaatccttagagcgccgaacaaccgacccagaaggtgcgatcacctcagctagaacgctgattgagtcggtatgcaagcacattcttgatgagtccggcacatcgtacgacgatggcgttgagctcccaaagttgtacaaggccaccgccgaagcgctcaatcttgctccttctcagcatacagagttggtcttcaggcaagtgctaggagggtgcacgtctgtcgttgaaggactgggttcgcttcgcaatcgcctgagtgatgcacatggaaaaggcaaggttggtgccaggccggctcctcgtcatgccgagcttgcggtgaacctgtcaggagcgctggccaccttccttcttgcaacctgggactcgcgcgctaagtcctcctctaagtaa

SEQ ID NO: 532861 - DNA, 762 bp, Stenotrophomonas maltophilia
atgatcgacttccatgcccatctcgacctctatccagatccacaggcgctggttcgtcgttgtgtcgaaatgggcgtgtacgtgctgtcagtaacgactacgccatcagcgtatcagggcacccgcgaacttgctctggacgctccaagaatacgcacggctctgggtctccatcctcaagtcgtaggtgatcgccatcccgagatggatctgttcgagaagcttctcccagatgtccggtatgttggggaagtgggattggatggaagcgtggagcttcgctcaacttgggagctgcaaggccaggtctttaatcggatactcgagctctgctcgcaaagcggagggcgaacgctaagcatccattcgcgaagggcagctagagcggtactagactcaatcgagcgcaatcccggcgctgggacccccatccttcactggttctccggttccatgaaggacgctcgtcgcgcgatcgcgctcgattgctggttctccgttggacccgccatgctgcaatccgtgaaaggacgcgcgctagtcaagctgctcccacgaacgcgaattctgacggagagcgatggtccatttgtgcagattgcaggtcgcactatctctccgtgggacgttgctacaacctataccccgctcgcggaaatctgggatactgacatcgctgacgttgagcaccagctgaagattaatcttcgagcgcttgcaagcatatcagccggtagaaaaacccagaccgaccgtcgctga

SEQ ID NO: 532862 - DNA, 1269 bp, Stenotrophomonas maltophilia
gtgaatttcatctgtggtcccaacaactttcaatgggacctgtacccgcaacatcagaagatcgtcctcttttccacaggaactcgcccccaagacattcacgccggcgcagcagtcataaagacggttaaacggcatgggatggccgtttctccagccgcttgggacctgctagccattgcgttgtctgcatacgccgcggataccactgtgctccgagcatctgcgcctgatggatggacgagacagattcaacttaccgtggcagtgcagttcccggaaatgtggaactcgctcgcgaaagagcttgctgactgcttgggcttcctgagcacagacatctgggagttcaacttcgtcgcagggggaacaactgccccagttccgcgcaagccccaagactatccaatggatgctgccgtactcttgtctggggggcttgacagtctggtgggagccctcgaccttgcggctaatggccagtcaacaatagctgtcagcaagctggttcgcggggacagatcacggcaagagcgctacgcgcgcagaatctgtaatgatcacatcgttctgaatgacagcacccacaatcccgagagaacagaaccctcacagagaacacgctcaattgttttcatagcatttgggacccttgtagcaacagcactcaatcgctacaggcagggacagagaagcacactatatctatgtgaaaacggcttcatcgcgataaatccttctttgacagggctgcggcgcggcagcctaagcacgcgcacggcacacccaagattcctggggtcgttggcgcgcctactagaaagcgtgcgaatcaatgtggatatagtcaatccctacaaacacctcaccaagggagaaatgctcgcgaagtgcgccgatcaagccagcctcgtacagcttgctaccgactcaaccagttgcggacgctaccataagtaccaatacacccactgcggacgatgtgtgccatgccaggttcggcgagcatcgatcctggcgtggggaggcgcggtcgacgacaccaagtacgtctactcgaatctgtcgatcatgaatgacgagcatgctggattcgatgatgtcagggccgttgcgatggccgtccaggccgctaaggtagactttggtcggtgggtcgggaatgcgctgggatcgccaagcgtgcccgatcgcgccgccctcacggatatgctcgaaaggggcatcgatgagctctcacgactgcatgcacacttaggcgttagatga

SEQ ID NO: 532863 - DNA, 852 bp, Stenotrophomonas maltophilia
atgggcacttcgacgtcatcctcgggaccagggtccggcgtcccactggtcccaccttgggcaccaccagccccaccacttgtaccgaacggtcctgagcccgggctagagcatgagggacccaactccccaacagagacggagaccgacgccgacgcgccccaaaagcagtcatcagctgtcgccgtcccggcgcgatttgggcccgctcgtactgcgctcggcggcttcggacgaaccggatcacgtgaagacctccgacggggcgttgccagctatgtgagcaagggctatagcggatcccgaactgcagcaacacgattctccggaaccgcggcgactgctagtacgctgggcaacgtgctcttcagcttggctaacgatcaggccgtcaatggtcttgataagagcttgctcgctgcaatggatggagacgagctccttgacaacctggtggaggcaattcgaaaggtagatggaacgcaagatgccgaagctgagcgaagctcgactcgtgaggccctgagcgagacgctcgaactgttcccggacgaagacccattgaacctcagtgaagaagccagagcctacgccgtcgagaggttcgtagctttagacgtattcaatcgcttcgttctcgatgttggacttgcaatccaagccagtgcgcccaacgcgattcaggcgctatcaaggctggaagaagcgaaggactacatcgcacagactatcggctcttcattccggagcctcgagtccaagggggtcactgtcaattccagcacgatctccagcattgtccgcaccgccctgcaagatgcattcgaggtattcgaggagtacgtccagtga

SEQ ID NO: 532864 - DNA, 1794 bp, Stenotrophomonas maltophilia
gtgtggactgacaatgaaaccgatcgagatctgctgaacttcacgggagttgctcagagcatctctgagctgatcgttcaagccggcgggcgaccgatttctatcggagtctcgggtgcatggggcatcggaaaatcttcgatgattcagcttgtcaaagcagatttagtagagcgatcccgtgccagaagcggtcaggagttcgttttcgttgacttcaacgcttggctatatcagggctacgatgatgcaagagctgccctcatggaagttatcgcagctcgtcttggtcaggtcgcagaagagcgcaaaaccttccaagacaaagccaagcaactgctgaagcgagtgaactggttccgcgcaggccgactcgctgcgggaaccgcactgtcgatcgccactggtcttgtacctgccggccttgtcgctagtttagtaggtgcagcaaagtccgagacagagaaagccgaggagtctgacggctggcttaagccgcgagagactcctccagaagagatacaagcacttcgagactcttttgaggccctgcttagcgacctaagggtgacgctagtcgtgctcattgacgatcttgacaggtgcctccccgagaccacgatatcaactctagaggcgatacgcctctttctcttcatgaagcactccgcatttgtcatcgcggcagatcaggcaatgattaagtatgccgtgaagaagcacttcgctgatgttcccgatgaaaccctggtagtcagctacttcgacaagttgatccaagtcccaattcgagttccgacactcggactgcaagagatcagagcctatctcatgatgctcttcattgaccaatccgatgtaaccgccgaggacaaggagcgcataagagtcgagatagctaaacgtcttcgccaatcctggagtggcgcacgagtagacagggcatttgtctccgatcacttacccagcatgcccacggatctcgcaggcaggttggcgatggcagagcgtctcgccccgatcatgagcgatagagcgatgactgccggcaatcctcggctgatcaagcgattccttaatgccctgtcaattcgaatggcgctcggcaaagcccaaggggttcccgtcaaggagggagtgctagccaagctattgatctttgagcgctcggataattcaaaagcctacgcagagctaacctcagcagcagccaatcacgaggaagggaagcctgagttccttcgagaatgggaagaggatctccgagaaggaaaggccatagaatttccggcaaattggcagggcccgttcattagatcgtggttggaactcgaacccgcgctggccgacgaagaccttagaggcgctctatacgtcagtcgcgagcacgcaccgatggtgtcgcgagatgaccggctttcggcggaggcggcggttctgctcgctgcgctacttaagacgccagcggttagcaaacaacttcagccgcaggtcaacgttctaagcaaggcggatttggcgctacttatgtcgcgaattctagagaaggctaagaaggaggagaagtggggtgccccagatatcctcaaggcagccttggtggttgcgcacgcagatccgctgcaagcagccgtactcgccgccttcctaaaggacttgcccgcaagcattctcgccgtccccatcgtacctgcacttcaggacgagccttgggcaccggaagtctttgctcactgggccacgttggatggtcttaacaaggttatggaaaagcgactcaaaagggggaactag

SEQ ID NO: 532865 - DNA, 1149 bp, Stenotrophomonas maltophilia
gtgaacctgaccccgttgttcctcccctacccgttgcgcttcctgttcgccagcaagccggaggccatcagcccggtgctgggcatcgtgcatcgtgtgatcgccggttggcttgccgatcaggccggcgtgccgcgggatacggcgcaatgcggcgtggtgaccctgatccagcgcttcggcagcgcgctgaatctcaacatccacttccacatgctgtggctcgacggcgtgtacgaggacaccaccgagcgtccgcagcgcaagccgcgcctgcaccgcacccgtgcgcccacatcggcgcaactgacggaactggccaacaccatcgcgcatcgcgtgtgccggcacctgtcgcgccgcggctggctcgaaggcgaagacgaatccgtgttcctgtccgacagcgcgggtagcgacgacggcatggatgggctgcggatgagttcgatgacctaccgcatcgccaccggtcgcgacgctggccgcaaggtcgtcaccctgaaaacgctacccggtgacgcaggctcgctggagggcgacgccggcaaggtcggcggcttctcgctgcatgccggcgtggccgcggaagcacacgaaagccacaagctcgaaaagctgtgccgctacatcacgcgcccggcgatcagcgagcagcggctatcgatctcgccacagggcagggtgcgttaccagctcaagaccccatggcgaaatggcaccacgcatgtcgaatgggatgcggtggacttcatcgccaagctggcggcactggtcccgccacctcgcgcgcatctcacccgcttccacggcgtattcgccccgaatgcaaacctgcgtgcgcagctgacgccctcggggcgcggcaagcggcctgcgggcgatgcggcgccggttgacgcaagcgcccacgacgagccgcgcagccccgagcagaagcgccgtgcgatgagctgggcgcaacggctcaagcgggtcttttccatcgacatcaccacctgcgcccactgcggcggcgcggtacggatcgtcgccagcatcgaggaacccaccaccatccgcgccatcctcgcccacttcgagaagcacggcgcgctggagcaagcgcactaccggcccgcagcgcgcgcgccgccgccggccgcgtga

SEQ ID NO: 532866 - DNA, 1500 bp, Stenotrophomonas maltophilia
atggaaccgaactacaaacgagtaagacgcgctctgcaaaatttctccctagaggattcgctcatacacatttggcagtattcccggctgataagtgggcgagtgcccctcccagtcacttacaaccacctggacgcgggcgtcgctcgtcgaatcgaggatcacgtccacgcgcatgaactcgacttgctagccagagagatggttcttcacgcgagccgctccgagaagtcagccaagtcgtcaatttctacttgggaaggcgcagccactgcgttcaatgccataaaggaatacgcaggcggcgtcgtggacatgaagaatgaggatgtgatgctcgtattgcaccgcgtcgcgcatcaacagttcccgaagttcagtcgcctaagtcattcgaagatcggccgctacctgagcctgtaccgccaccgcgagctgcgtgccattttcgagcgaaggctcggcattggggtcgacgcctatttcacactgtcaatcgcggtgctcggaagtgtaatgcggagcgtccgcatgaacactacgacggacttttctatcttgggtgtagatctagaacaatcccaacatttcttcgatcgaatcactggccacattgaagtcatcgcaagtaagttgcggcaggatcaaagactcgatagctgctgggagtacacgttgaatgcactccatttccgtcctctcgttgcgctagatgaatcacatatggagagggtgtattgcccacttcctcccgcacttgaggctcgcttgatagagggcatcttctttgatgtctacgaaagtggcgatggcttcgagaacgcatacggcagcgccgtggaggcgctcgttggaaggatgctccagtcgctaccggacacttacagcgtggaaaagccggagccaatcacgctcggcaagcaggttttccatctttctgactggatcgttagacagggttcttcatgcgcatacatcgagtgtaaagccaagagaatcgcgctcaagggccgcgtggcagcgaccctagacgacctgcgagcagagcttcagtttctcgctaacgcggttgtgcagaactacgcgaacatgctgcgcacggacaaaggtgtcggcagtgctagagctactcagggcagatcctactgtctcgtagtgacgctggaggactggatactcttcagcgattccgcgttctccacattggataggctggtcgccgataggctcgcggagaaagatcttccggcagacctgccaaccatcgcgccatatctgatcgtaagcgccgagacttttcagtcctgcgtcaaggcgctatcactgcattcaatggaagaggtattcggctcaaccgaacatcctgactacaaaggctgggccttctccacctatttgcctcgccacttcccaaacctagacgctcaacacgtaggtggctttgacgccgaggctcacagcctgttcgagccatacttggctaggttccaaacccgctag

SEQ ID NO: 532867 - DNA, 339 bp, Stenotrophomonas maltophilia
atgccgctgccccccgacttctactggacgacgcgctctgccagctggccaagtgatccgttgaccgtgatcgcttgcgacagtgtgtgggtggtcgccatgtcgcagcgcgttgacgacgggatctggatcgccctgctggatcgccatcgcaatggaccagctgggcccgcccggcggtgcactagctatgagcaggggcgcgccggcgctgagctgtgggtggccaggcatgaggcccggctccgcgagcaggtggcagccatcaatcgctggcgggaggctgtgcgcgcgaacaggctggccaagttgaacataccgctgccgttcaagtggtag

SEQ ID NO: 532868 - DNA, 555 bp, Stenotrophomonas maltophilia
atgggaattgaactcgaactcaagggcgcgatctcgagcaccgaggaactgatcgatacggtccgacggagttatgggggaactatgcttgtggactttgccgaagactcagttcatcgagcccgcgaggtgctagacacggacgaaaagcccgccatgcaggacgcttggcttgaggtgacggtcgctcaagcatcgcttaatgcacagatccaaaaacggtgcagaaaagtgtctggactgcctggagccattccagccagcattgggacggagatggaaaccgctctcgcgtcgatgcggaacgcgctgcgtcaaatttttgccaaaccgcagttgctgaacgcattgcctcaacttggcgatgaggaacatgcagtgcatgcgctcttgggagaggcgtccgaagtcgctgcgaatgacgcggacagtgctgcagcgtggatccacaaatgcaaggacaagcttctcgcggccgccaaagataaagctgacgccaaggcaagcgcgagcgccaacagcgccagtgttggcggccagaagcgcgaactctga

SEQ ID NO: 532869 - DNA, 189 bp, Stenotrophomonas maltophilia
atggttgatatcgacaccgcccgccggttcctcgccgctgagtttgagagcgccggcctccctcacctcgttggcagcatcctggccggcacctgcgcctttggccagggcgcgtatatcgccgctgttgctgccgcgttgacagcggcctgcgtggcctgtggctgcgcgaaggaggatcgggcatga

SEQ ID NO: 532870 - DNA, 180 bp, Stenotrophomonas maltophilia
atgcgctttgaagaaaagtgcaatgagttcggcgctgagatgcctactgagatccgcattcactacgttgtggggagcaatgagatgcgggcgaaaatgtcgtatgaaccaaagttctcacacagtgacgatctgacaccggggagtttgttcgatagctgggttggcgatgttcgttga

SEQ ID NO: 532871 - DNA, 183 bp, Stenotrophomonas maltophilia
atggatccccatacctacgcggtctgcagccgcatcgagatcgacaatctgctcgccgaagcacagacgaaggcaaagagaaagacatatggcgatatcgaacagtgggcgcttcgatcaattccggatcctgagttgcgccaatactgcatggcaagagcggagcagctgctcgcaaaatag

SEQ ID NO: 532872 - DNA, 579 bp, Stenotrophomonas maltophilia
atggcgaagcagcgcgtcccactccatcagaacccgcgctcgttcaccacggtggaggagggcgctacgaagggcgcccaggttggtgtcgatctgcttggtccagatggccaggtcattcggcctgaccagatcatcaacccggcaacatccaccgagccgaacgccggccggtggacggtttggaagctgatccgcgaggtgccggccaacctggtcaagattgcggagctgatcggcaaggggttcgcggcccggcgtggcgacggtgaatggtcgctgcggacgatcgagccaggcgatgcagtagcggtgacgaacggcgacggagaagctggaaacccggtgatcgggctcaccaccgatgcgctcgcgtcgcttgccctggcggattcagccgtccaggaggtcaggcccggcccgaacatcaccgtcgacgcgaccgaccctcgacgcccgatcatctccgcttctggcgggggcggcgttcttcccgtcgtgaccggtgaaattgtggccggtcagccggttttcctcattgccgacgacggcaacctcatctacacggagatctcataa

SEQ ID NO: 532873 - DNA, 219 bp, Stenotrophomonas maltophilia
atgagcatttcccatttcaacgtccgcgcccaacgcagtatgagcggcgcaaccggcctcagcccagaagacctgaaggctctcgcgcttgaactgtgcgccgcgcttcctccgccagagatcgaggatcctggagagcgggagctgctgcagatctatcggttgttggacgcgaaccagcaagcggctacacgacagttccttgcagcgatggtttga

SEQ ID NO: 532874 - DNA, 318 bp, Stenotrophomonas maltophilia
atggcaaagactacagcaaggccgctttgtgtcaactttcctaagttccacccaatttgcgactgctgcgacaaggttgtgtcgtgggccaggatggaggctgaacgcggcacgcttggaacggtggcgggcggtttcaagtaccagatctgtcgcgaatgcgtggacgagatcgaggcgctgccagcggaggagagggtgatccgctacgcctacgcagcgatcagccacgccgagctgtactcgggcgcctacgctcagttcatcgcggactggtttggcttcaaagaccggagcagggggaaaaaggccgcatga

SEQ ID NO: 532875 - DNA, 546 bp, Stenotrophomonas maltophilia
atgagcaaggaaaccatcatcgtcccggtagtgcaggcgacgatccagcgcagcgagtacgtcacgatctccgactcgttcccgaagcatgagctgccgatcctggagctgatccacggcgaggacaacgtggtcgtgaccgacccggactacttcgcgttcgagctgccgaacaacgccacgcaggaattgcagcgtctctacaccaagtacaccgacaagtaccggccggtggtggaccaggtgttcccgcgcggcgcccgcgacgtcgcttctgagctgggcatggatgtcggcaaggacaccttcagcaagcagtccgaggctgtgatcgaaagccgactgccgccgcgcccgaccgcagccgccagcctgagccgtcccgcgccggaagacgatggcgacgaccagcccgagctgacccatgccgagctgcgcaaagagctgacccgcctgggcatcgaacacaagggcaacgcgccgaaggccgaactgcaggcgctgtacgacgccgcgcaggccggcgccggcaccctgggcggctga

SEQ ID NO: 532876 - DNA, 183 bp, Stenotrophomonas maltophilia
atgagcattgaacacaaggcccccaccgaagctcagatgcaggtcgctgccacccttgccgcagggctgctctccggcatggacctgaagcgatacacggcaccactcaaaatgctggacactgagctcatgtcgcaatcggtggctctgtaccaccgggttttgaacgagcttgttaagtaa

SEQ ID NO: 532877 - DNA, 204 bp, Stenotrophomonas maltophilia
atgaactggcgcccatttgtgaggatgcaaattgccaagacggccggcgatcggcattggtgggtgcgcactgctgacggacacatcgtgcatcagtggttggcccttcacgtggttgagaacgaggaggggagcgagatcctgcagctgatcgtcggcccggtgatgctgtgcttggcggctcgtctcgggggtagggcatga

SEQ ID NO: 532878 - DNA, 303 bp, Stenotrophomonas maltophilia
atgagcgagagaaagcgaatccagtctgagctgagtggtttcaccaccgatcaactcctttctgaagtcgttcgccggcgcaaccagatgactgcaaaagatgcagccgagatcacgttctgcgacgagtgcgcgcacgtgcgctactggacagccagcaccgaaccgcccaaggacttcaacgtctgtagcaaggggcatcagttgaagttccggatgcccgaggaatgggaaggcccgcatgggccatctggcttctaccggcgcgtctgcgctgatcgcacccagaggacgccagcatga

SEQ ID NO: 532879 - DNA, 381 bp, Stenotrophomonas maltophilia
atgagcgagatcgaattgaaggcgcgggaattgctggctgctgagtgcccggaatgcggtggggagaatggtcatgatactgaggatggctggctgcgctgcggccgttgctccgacccgcacactgttacgcggtatcaggcgactcaagcaatcattgctgccctttcgcaggtccctggcgatgtcggaattccgacatcggttacgcagtggcagccgattgagtcggcgccgaaggacggaacgaggttgatgctgtgggactcgcgagcaggcgggtatgccgtgaccggcgcgtgggtggccggaagcgccgacgaccacgagacgatcacccactggcagccgctgcccgctccgccggagggggagggatga

SEQ ID NO: 532880 - DNA, 195 bp, Stenotrophomonas maltophilia
atgtcaggcgcgccgacgacgagcggccttgcgctcggtagagatggcgagatcgaccagcgccttgcccacctcgtaggtcggctgcatcaggccgcgtcggatccggttgatggtggactgccgggcgcccacagcagagccaatgctctgttcggtcagcccagcagcacggagacgttcaatggcgagtga

SEQ ID NO: 532881 - DNA, 276 bp, Stenotrophomonas maltophilia
atgagcagtaagcacaccccggggccgtggtcttggtacacgcgcaatggtcatcgggtagccattgatgggtctggcggagccgaggttgcacgagccgaagagtacggcgcaagcgcatggattgaggtctcggaagatgacgcccgcctgatcgccgccacgccggagctgctggaagcgctgcaacggctcgtagatgcagtcgatccagagtccacaggatgggatgaggcggtcgccgccatctccaaggccacaggcggtgcgcaatga

SEQ ID NO: 532882 - DNA, 306 bp, Stenotrophomonas maltophilia
atgaccacggaacgcttgacggccgcgatggccgagaacatcacccgctcgaaggatcccgccttcgcagtggacagcatcctgcagggcgtgaagtctgcggccgaagggggcaagcgcgagtacatcacccgcgagtacggcttcggcgatggctcctgctacacgaccgaggacaagtacccggtgctgtgcaaggccatcctgaaagaactgcgcgaccttggattcaaggccgatattggctccagctgtggccagttcgtggacgtgtggctgtacgtgcggtggggtgaacacgcatga

SEQ ID NO: 532883 - DNA, 387 bp, Stenotrophomonas maltophilia
atggacagggccgcagccagggaagctccttacggctccctactggtcattgaggatgacccagacctctcgggaatgctctccgaaattctgatgaattcgggatacgacgtagatgtagtcgcctcgtccgccgacgcttttgcccgcatggcgtcgaagtcctttagcgctgcgattctggacatccaaactgctgatggggcaacgatgtccgttgccgatcacctcctctcgcgtcgcataccctatatgttcgcgtccggggtgcccaacccgcatctgccagccgcgcatcagtgggcaacgttcttgcagaagccctatcggatcaaagagttgatgggcgctttggacaggacgcgccagatggggattccggcgtag

SEQ ID NO: 532884 - DNA, 180 bp, Stenotrophomonas maltophilia
atgcgtctagatcggccccgcacttctcttccccgcctccgcccgctggcacgcggcctgctgcttgccttggcgcacctgcagcggctgtattcgcaggtgatctggacaatcagcgtgccgatgtcggtcccggcgatccgatcgaagcctggacgttgcgcaatgactcacggctga

SEQ ID NO: 532885 - DNA, 270 bp, Stenotrophomonas maltophilia
gtggctctcggcagcaaagttgagcacggcgtccggccggtgctcggccagcaggcgggtgaccagcgcctgatcgccgatgtcgccctgcacgaacacgtggttggggttgccgtccaggctggacagggtcttcagattgccggcgtaggtcagcgcatcgaggttgatgactttgacgccgcgcgcgacggcctcgagaacgaagttaccgccaatgaatccggcgccgccggtgacaagccatgtgggcactacctgttctcctga

SEQ ID NO: 532886 - DNA, 321 bp, Stenotrophomonas maltophilia
atgcgcggtatctggggttggccgggggttgaggccgggttgccggccggcggcccgcgctaccgaagtgcatccacgcatggtatggatctggggatctgctgtagagccgagccgatgctcggctgcgaccatcaagccgagcatcggctcggctctacaaaacgctctgcatgcacgcgtggcgcggatctactccagctgcaggcgggcgtagcgggccagttcgcgcgcgccgagcagcaggccgtcgacgacatcgggattgagttgctggcgggcaccgccctgctcccgcgcgatttcggcggcgtgcagtag

SEQ ID NO: 532887 - DNA, 657 bp, Stenotrophomonas maltophilia
atggagttctctaccacagaggctgaaattgacgaactcctttacaccaaccttccagacaatcccatccgcagctccttcagcgcgaaggagcgcatggagcaccttctcgaggtggcgccaacctcgggaattcccgttgctttcgacgatgatttcaggtttcgaacttcggtgaagctggactccacaaagtacgaggcgacgcggggactccgcttctgccagaggaactatacgaacgccgatctctctgcaaacctccaatacgaaaccatcttggaagcacgtagagatcctgaggacaccaccttcatttggattcagacagatcgtcgtcggtacaaagcatggtgttctctgctctcagagatcggtcactactcgtccgaagaaaggtatttcgagacgatgtgggatcagctgactaggccggaagtcaaaattcgaaaagagaaggcgcaaaggaatgcctatgagcgaacgagtgcggcgaacgaagcgcagcgcacccgggactcgatctcagcgaagaacgaacccaaggcccgttcaaagaagagcggtgctgagtccataaagaaggccatgaccctcaacgtagacttcagcaaggtccctgatttgctcttaagagagggcgctgatgacaactaa

SEQ ID NO: 532888 - DNA, 741 bp, Stenotrophomonas maltophilia
atgtccaccgtcatcagggtcgcggtggtcttgaaggggctgcttcgcatcggacgattgattctgcgcactcggttgggcaggcaaggtctgctgaggcgaaacctaatcacggttttttttactgtcaacaacccccgcgaaaaattttcacatccgcgccatccatggtggtgcctgcacggtcgccacgctccgcgctcgacgaccgccgaagcgccacgcacgcatgctgcctgcagcaacaaccatgcaagcgttgaacaaaaagtacttgaaataagcactctgcgcagatgcatgcacgtcggtggccactgcgtgcacacatcgccagcaccggctgccgctggcaccaacgccagcacaacggcgccgcaacggggggcaaaaagttttcacatccgagtacgtcggcgcggggcggaaacgcggatttgcgcaaaactgcgcacgccgatcggcaccgattgtcagtccgctgatgccacgccgagggtgccaagcgaaccggccgtcatgagtccgacgcactcgccaaaacgaaaacggccacccgaaggtggccgtttcagaatccgcaagcgcgactcagtggtcgtcgctctccaggacttcggcgtacgcgtccggatccagcagatcgttgacctcttcggcgttggccagttcgaccacgaacatccagccttcgccgtaggcatcttcgttgatggtttccggcttgtcggacagggctga

SEQ ID NO: 532889 - DNA, 978 bp, Stenotrophomonas maltophilia
atgaaatccctgcctagaatggcaagagaaatgtggctgtcgggactgacaagaaagaatttcacaacatctgaggggacgcgcgaatggatcttgcgttgtgactgggtgtttgcggaagacttgaaaaagaacaaaatcaagtttattccaagcatttttgacgagtacgcgcaatcttcactctatgacgcggtgtctttagctatcgctgcatttgagagtgtcgcatccttctcgaatgacaagaagaagcttggggataagcagtgtgcctggaggagtatttctctctactatgccgcgtattttgcggcaaattccataatgcgactcgcagggtatgcttgcacgaacatttctgcagttgagtgtgcctcaatcaatgagttcgctcgtttaatggggtgcggtggggaggtggattcaaggaggctggggaacgggatttactatgtccgaccgggagcatcttcatctgcgccaatttctatggatattctaaaaggaagtggtggtgtccatattcaattttggatcgggttctctcgatttttggctgatttgcgtacatcgataaagaagagtggtgctgtgaaattcgagaaggatgccgctttggaggaggccgatcagttgtctgccgcgctttcttttggttcctcggtcaatggtgcgtggctttcagagattagaaactcggtgaactataggttctcgtacggggcgtggtatccctatgacgggagccaggtcacattgagtgagatttcggcgataatgaattctgccgtagctggcaatagggtgagcatccctcaggtttcagtaaaaatgccagaaataattagggctgcacacttgtctgcggtgctggtgtcatggcttagagattctatgaatgttatctctgaatcatcatcggggagaaaaaagaagttgattgatgaaggggcgcttgcgatgttgttgcggtga

SEQ ID NO: 532890 - DNA, 1014 bp, Stenotrophomonas maltophilia
atgaatgctcgtaaagtgtcccaccgtctgtcagcagatgaagaggttccagagctcggggacgaagttcgctatgcaattagccttgttcgccaaggcgcgcatcgcttctacacgttgacgatgccttcgaatgttctggctgcatgctgctacgcgacatctaaggacgaagatcctgtccacggatttcagcgtgtgttgaacgacaagcgagcgcaagaaattgctgactacattgacgagggagggacgattcctagctcagtggttctttccgctcaagctatctccgagttccgcagcgtcgatcgctcgaagactgctgcgttcaagttcgggccccatgcgtttcttattctggatggccagcatcgtgtgtttggctttgcaaaggcaaaaacaactctgagagttcccgttgttgtttacgatgacttgacgacggagcaagaggcgcagttgtttattgatataaatacgaagcagcgccctgtaccgaaagagcttcttcttgcaatcaagggtcttgccagaaaggaaagcgacctggaggcgacccttagtcaaatatttgatctattccattccagtcccagtagtgcacttttcgggtggacgagctctaccaagagagcggttcagaaaatcgatcgagtgacgttcaatgccggtctgcgccagcatcttgaaatgtttagagagaaggatatctcattcatatatgagacatttaactcgtatcttcaggcggtggtttctggcctgcgtgcaaagggagtcgaatccgcgatcgcaaagaagacaacatttcgagcgttcatggttatcttccctgatgttgttcagagagttcaggataaatacaaatcaaagtactcggctgacaatttctcgagtgtcttgtctcaagtctttgatctggcttctcagaccttcactagtcccaaaagtacgattttggatctgtcatctgatatgaagaagcgtctcaagaccggtctcaagatatga

SEQ ID NO: 532891 - DNA, 675 bp, Stenotrophomonas maltophilia
atggcacagccaaactcccaggggaagcgtccatcaaatggtttggcgggagaaaagactatgtcgacagtgagttttcttgctggtgaattttttcttcggaacagacccaacggcggcacggctgtactgttgcggtcgctatgggtgacatcgctaatttgtgtgatcgtgctcccaatcaagtcgtactttgcggccggcacggagcttgttttctctgcagcccagctcaaggtcgagattgggcaaatgatcccatggttcggcgccgtctttgccggtgcgtacgcggcgttctacaccaggttcgcagcacagtgggggtatctggccgcgctgtacaaccagctcatggcaactcttgcttccgcaccgcctgggcaatttccgaacgaaactctcatcatttggaatgccgcattcatagaggacgctcaagacttgcatcttgcacggaagtcaatgtttgcgtcggtcatcagagagctgctgcagaatccgcacgttgttcgagtctttctagcctccacccagggcggcccaaaccggcttcgcgaactggagcgccagctcaattgcatcgccgtggcccctgcagagttcgacattggcacggcacagcccagctcgcgtgtagttgaaaattctgcgacttcccaacccgaaatgtga

SEQ ID NO: 532892 - DNA, 189 bp, Stenotrophomonas maltophilia
atggcgcccctcgatgccgaagtggatgaccagctaggtaatgatgcggttgatctttactgcattgcggctaacagcgtgttccgttgcgcctcctcctcctgcgtcgccaatcggaccgccacgagtggtgtaacccagcttgtgttggtcgaacgcaacaagggccgtggctcaaacaacccgtga

SEQ ID NO: 532893 - DNA, 882 bp, Stenotrophomonas maltophilia
atgaacgtcctgattgaccctgagctgctcgctccttttcgtgatgctcgccactgcaccgagacagaggcggctgcgttgaggaggtccctggagcaactcaccaagtttactgtcaagtatgacgcgaaggtggtgtcaacccggcacctatggcaaaagcttcaaagcctctacatcgctcccgtagttgccgctttcaatgagcccgccgtgcgaactccactgcagctgttgcgaaaccgtctgagggttgtcgtgccaaacgcggatcggcgtctagatgcatggggcttcgagcagatgctcagccgagatgacgggcaggattggccgagcggatatgcatcgatagcggccgaactgcacgctgccgacgagtcagtggtgctctttactcgctacctagaaggtcggaacgttaggacgcatagcactggccactcgatactggtggagaagacgcgctggcgtatgcacattggcgcgcctagtcttaatgggattacttctgttccatgcgttgcctccttgcggaatattgaagttccgtggactacgcgctttgacgataggttgccggatacagcccctccggatggatttgccttccagcctccatccaagtggtacagaggatatgtaaagccatttcgtgctcatcaatcaaagcatgcatggaccgacgcagtcggcaacggatggtctgatccgaacactccagggacagcgtatcactgggatgttcactttgtggatgcatcaggtagcccaattggaatctcgccagcgaacattgtgcgatggggagcgccaggggcagagggcgttgctggcggggtccatcatgttccgcgcctgaggcgttcacgggttgtttga

SEQ ID NO: 532894 - DNA, 1575 bp, Stenotrophomonas maltophilia
atgtcaaatgctcgtctgacggagatctccgtcgaaagattcaagagtcacggagcggaaacgcgggttatgcttagtccgctcacggttcttgtcggacccaataatggcggcaagagcactattgttcaggccctgcttctgttgcagcagaccctgcacttcccgcgcgtggaggtgccgcttcacctcgctggggcggtggatgccaactcattgcgagagctgacttatggctggccggacggtgaagacttcattggtccgcgattccagatcagttgggtttccgacatagagacgggggccgttctagaggagatgggagaggggccactttcagttgctgctgaacggattggtggcggatggcttcaccagtttcctacagagtcgaccgtcgaagcagtcacgagtatcagcctgcaattctcgcaagtgtcaggaaagctatcacttactcacattgagttggcgtcctatgcgaacagtgccgttgtgccatggttgatcttcgcattcgagctaatggatgatggagcctacgaggtcagctgtaatggcgaggttggaaagagcatccaggttaaccttgatcacttcattccgtacatttcgattaatacgaggaacattgggccgcgtgataggcagcgtgcgtgggtgaatggtttcaaggcagtcttcttgcagcctctcgatgatctgcagagcattctgagaggcctcaactatctttcatcgacacgcgatattcagccagcaatttatcggtctgcatctgtcgcgccggaaggtgttggcgtatctggtgagctggctgcgcagctccttcacgcgagtcaggataagagggtcttgtacaatcctccaagctctgccgcgctgcacgaaatcccgacgccagtggtctccacacttcaggaggcagtgggtcatgtcttgcgcgagctgggcatcagtgccccgctctccattcagaagattggcgacctcggttttaggctcttgttcggtaacgccaccctgcagcacgttgggcgtggccttacatacttgttgccgatcgttgagatggggcttgttggagaccctacgcttttctctgcgaaggatcgacagttgactttcatgcgagccaacttctcagtgtgtgcgtttgaggaacctgaggcgcaccttcacccaaagctgcaagcaatgttggcggactggtttgtagccttggcaatcgggaaaaggcaagtaatagtagaaactcacagtgatcacctggtgaggagactgcggtatcttattgctcaagccaaccccgactcccctatggagtcgtggcttggccgtttcgtgtcgattgtggaggtagagcagattgacggagttagcagggttgctgcatcccacctgcacaagaatggcgacctcgagacctggccgaaagattttatgggtcaagctcagttgatggaggaggtcatatatgtcgcaggcctcgggaaggatgccgatgtggagggccagcttccagaagtggcgcactcttcggaggatgagccctatgaacgtcctgattga

SEQ ID NO: 532895 - DNA, 372 bp, Stenotrophomonas maltophilia
atgtcaaccattgatgcgctgctggacgcggcgaaggccgccacgaagtcgagcaatgactccgagcttgcgaaggccttggggatcaagcctgctgctgtaagcaactacaggcggggcgtttcgctcccgaatgccgttgtgtgcgcaactctggcggggctcacaggcaccccgctggcgcgcgtgctggggattgtcggcgaagccagggccatcagctcagacgaaaaggccgtttggcgtaagctcgcggccaccgcgatggccctatgtttggccgttggtttcgccctgccccacaaggctcaggcggccgtgccgggcttcgataacgctcacgttgtatacattatgcgaaatgctacgtag

SEQ ID NO: 532896 - DNA, 627 bp, Stenotrophomonas maltophilia
atgaccagcagcgcacgcgaattgttgaagtggctggccgtcgttctcatgacgtgcgaccacgtcgccaaggtgatctatggcgggtacgtgcttggactcagcgaagcggggcgggtggctttccccctgttcgcactggtgatggcctataacctcgcccagccgggcgccgatgtggtcaagtccgttcgcaggctcgccctgtggggcgccatcgcacaaccggtccacgcattggtgttcggctattggttgccgctgaacatcctgttgaccttcgccctgtgcgctgtggcggtctacgcggccggccagcgcaaatggatcggcctggctttagccgcggctatattgccgttgttcgtggactaccagtgggccggggtagggttcgtccttctggcatggctgggattccgcacagggcggccgctgttgatcttggcggcattcgcgcctctgtgtgtcttcaacggcaacctgtggtcgctggcggccattccggtggccgtggggctatcccgcatggcgtggccgctgccgcgcgggcggtgggcgttctacggctactacgtcgcgcaccttgcgtgcatggggctgctggcgcctatactgcggccatga

SEQ ID NO: 532897 - DNA, 519 bp, Stenotrophomonas maltophilia
atgctggaaatcgtactggtcgaagacgatgcccgcctgggaacgatggtcagtgactacctgcagcggcatggctaccaggtcgcccatgaacgcagcggcgaacgggcagtggcccggatcctggcggaaaagccggcgctggtgctgctcgatgtcggcctgcccgaccaggatggtttcgaagtgtgtcggcagatccggccccactatgacggcatcatctgcgtgctgaccgcccgcaccgacaacatcgaccaggtgctgggactggaactgggcgccgacgattacatcggcaagccgatcgaaccacgggtgctgctggcccgcctgcgcgcccacctgcgccgccaccgccgggtcgagccacgcgacggcagcctgcgcttcggcgagctgaacatcgacccctccacccgcaacgtacacctgcagggcgccctgctggaactgaccaccgccgagttcgacctgctgttcctgctggccagcaatggaccgcccagcctttcgtag

SEQ ID NO: 532898 - DNA, 1278 bp, Stenotrophomonas maltophilia
atgcgcccgcgcaccctcgacgaaatggtcgggcagaaacgcctgctggcgccggacagtgcgctgcgtcgcgccgtcgaatccgggcgcgtgcattcgatgatcctgtgggggccgccgggctgcggcaagacaacgctggcgctgctgctggccgagtactccgacgctgaattccgcgccatctctgccgtgctgtccgggctgccggaggtgcgccaggtgctggccgaggccgcgcaacgcttcgccgaaggccgccgcaccgtgctgttcgtggatgaggtacatcgcttcaacaaggcgcagcaggatgcgttcctgccgcatatcgagcgcggcaccatcctgttcgtcggtgccaccaccgagaatccatcgttcgagctgaattcggcgctgctgtcgcgttgccgcgtgcatgtgctggaagcggtatcaccaaccgatatcgtcgaagcgctggaacgtgcgctgggggatcgcgagcgcggcctgggcgaggagggtatcgaggtcgctcccgagctgctgctggaaatcgccaccgctgccgatggtgacgtgcgccgtgcgctgaccctgttggaaattgccgcagaactggcgggcggggagggtggtcgcatcaccccgcagaccctgacccaggtgctggccgaccgtacccgccgcttcgacaagggcggcgagcagttctacgaccagatttcggcgctgcacaagtccgtgcgcagctccaaccccgatgctgcgctgtactggctgacccgcatgctcgatggcggctgcgatccgtcgtatctcgcgcgccgactgacccgcatggccatcgaggacatcggcctggccgatccgcgcgcgcagagcatggcgctggaagcctgggacatctacgagcggctgggcagcccggaaggcgagctcgcgttcgcccagttggtgctgtacctggccagcaccgccaagtcgaacgcgggctacgccgcgttcaaccaggccaaggccgacgtgcgccagagcggtaccgaagaggtgccgctgcacctgcgcaatgcgccgaccaagctgatgaaggaactgggctacggcgccgaataccagtacgaccacgatgccgaaggaggcatcgcgctggaccagaccggttttccggacgcgatgggcgaacgggtgtactacaacccggtgccgcgcggcctggagatcaagctgaaggaaaagctggatcggctgcgcgccgagcgcgaggcggcgcgggccgcgaagggccgttga

SEQ ID NO: 532899 - DNA, 975 bp, Stenotrophomonas maltophilia
atgtggactcataacgctgacggcacagtcaacggcaatctgtcgctgaaccgggtatgcacagctgatgatatggacagcgatgacgactgcaaggccaagcttggctctaccgcgtatttcaatcggcaagtgggtgtgtgcgagctgaaagatggcgagtgcaagaatggagccaagcccaactcgctcggccagtgcgccccggaaccttgcccagaaggcatggcgcagcagccagatggcacctgcaagaagaaggataacgagtgtccggcaggccaggtgcgttcgcccgatggcaagtgtcttcccggtgatgggcagtgcgccaagggtgaggtgcgcggcccggacggcacttgcaagaaggacgccgatgaggacggaaaccccgatcccgtcaatgaagattcgtttagcggcggcgatgattgcactgcgccgccttcctgcagcggctcaccgatcatgtgcggccaagcgcgcattcaatggcgtatcgactgcaacacgcgcaggaatcggaatgttgccggcggggcgtgcaacacgatgccggtgtgtacaggtgagaagtgcgatgcgatggaatatgccggtttgctgatgcagtggcggtctacctgcgcacttgaaaagatggcacaggggaatggcaacgggggcggcgataacgcagatatcaaggcgattcgtgacgcgcttaccggtactggcgggactgtcactttgccgcctgaccgtccagcgtctgacgcatgggctcccggtggcggtaccgcgaccacgccagatacgagcggatacggctggggcggaacctgtccgcaaccgccaagcattgaagtcttcggcaacgcaattcagatcaacacagcaccgttgtgcaattggttgtttctcggtggctacttcgtcatgggtcttgccgcgctggcctctctccgcatcgttgcatctaaggacgcctaa

SEQ ID NO: 532900 - DNA, 309 bp, Stenotrophomonas maltophilia
atgatccactccgaccagggctggcagtaccagcatgaaaactaccggcacatgctggaaaaacattcgttgaagcaaagcatgtcccggcgtggcaactgcctggacaatgcggcgatggagagcttcttcgggacgctgaagtcggagttcttctacctgaacagctttgacagcatcgagagtctggaggctgggctggtggaatacatccagtactacaaccaggagcgcatcaaattgaaattgaagggcctgagcccggtacagtaccgggagcaggcccaacaggcccaatcggccgcctga

SEQ ID NO: 532901 - DNA, 309 bp, Stenotrophomonas maltophilia
atgatccactccgatcagggctggcagtaccagcatgaaaactaccggcacatgctggaaaagcactctttgaaacaaagcatgtcccggcgtggcaactgcctggacaatgcagcgatggagagcttctttgggacgctgaagtcggagttcttttacctgaacagctttgacagcatcgagagtctggaggcggggctggtggaatacatccagtactacaaccaagagcgcatcaaattgaaattgaagggcctgagcccggtacagtaccgggagcagacccaacaggcccaatcggccgcctga

SEQ ID NO: 532902 - DNA, 156 bp, Stenotrophomonas maltophilia
atgcgggcgggcgcgcccggtggtgaattcggcgcactggtggtggcctatgccggcatcatgaaattcgacgtggcctgcacgatgattgcctcggcggtgactgcaaagttcgctgtgggtgcggtgaaaacagttctgacgaagcgaacctga

SEQ ID NO: 532903 - DNA, 351 bp, Stenotrophomonas maltophilia
atgccgcgatccggaaccgacgctgcctctcgctctccgcgcctgctgcgtgtcgaatgcatgccactggactgcggcggcgctgcaatcgtagtggagctggaccgcacgcctgaacggacgtggatgaagtcgctgaagcgagtcctgcaggctgacgacgccctggagggcgcgcaggccaagttcgatgggcatttcgtgtatgtcgtgggggttgagggcggcggtcatcgcgcgcaacatcgggtggcccaggcactgatggcgacggaaggtgcattcgcctccggtgccggcctccagcgcccgagcgccggcacggcactgtccggcacgatgacgacctga

SEQ ID NO: 532904 - DNA, 702 bp, Stenotrophomonas maltophilia
atgcgcacaaccggcttgccatcagcaagcgctgcggcgcacagacggagacattcatgcagcgggcagcattgccgcataccggcagacacctgtgtttcagggggttttatgcacgtgcgccgatcatcaggcttcctgattcccctacgcccgttccgcaggctccgccatccttcacgccatcggaaacgccaatgccgacatcactggagcacacgggtcagcagccccagcgccaatgccatgggaatggccagcaagcccagccgttgtgattggcccagcacgccgccgcaacgccaatcggcagcaaccacacccctgcggccaacaagctacaacagtggcggttgcagaccagcgcaaacacccccaagggccgcccgggcgcctgccccgggccccgccgggttgcaggccatcaccggtgcgaacaagcgaacgccagacggcccggctcacactcatccccggcaggtagccgccacggaacaccttggccacgtggtcgccggtcatggacagcagcgccggctactccaatgcttcgatggcgctgcttgcgaaggcagccctgcgtgctgtcctgccctcgtgcgaaatgtcgatgcccggctatcgctgcgctttgcccccagaccacgggcagcccgctgcccgccctgcccgtggatggtcccttcgcccgaattgcggtaa

SEQ ID NO: 532905 - DNA, 942 bp, Stenotrophomonas maltophilia
atggccgccccaactggatattatgattcctacaacagcggcgacgtcgtcgttggatggacccgtgccgtcgtgcactactacacggggtgcgagccccgttcgtcggcggagatgatcatctcgccaacaagccggttcgtcggcatcgttgatggctatagcaccttcagcacagagcacgacggcatcggcgttcaggtcgattaccgttacatccgctcgatcctggattcaggacaacccgagtactcggactggcagatgctcagcagtgccggcacccggatcgtggcgcacgcggagtacatccgggacaaccccgtcgcaaccctcccggtcgaggtggactatcgatttgtcgccctgcgcgatttttccggcgaatcaatcctgatgggctatttcgagccactgtcggcaagagacctgagctacggccagtcgctcaatcagctgacggtggagggtgtgcggcaacgcccccgggaagaggccagttgctcgttcagcgcagcaccgcctgcgaacctggagctgccgaggacctccatcacccacctgaagaacacaggagacgtcgggcccgctgccgacttttcatttgcatggcggtgccgtgccggcaatcagggccacagtggtcgcgctgatttcgagttcctttcggatgcggccatcgctgccacaccggggcatctttccaccaccggtggtgcagagggcgtggacatgctggtgaccatcgagtatccggatggcagccaaagacctgtcgtcttcggtgaaggagaatggtacgccaaccggctgagccccgggacaggagggctgcccagcagcggcagccagaacatgcaggtgcgtttcatccgcaatgccaacccattgctgcccggcctggcacgcagcaccatgaccatccacctcgtgcctttctga

SEQ ID NO: 532906 - DNA, 768 bp, Stenotrophomonas maltophilia
atgcctgtgcacagattcgttactaccctgatgctgcttgccgtgccctggccggcgatggcggatctacgggttgacgccacccgcgtcgtgtatgaagagggcgcgccgaccgcaaccagcgtcaggatccataacgttggcaagcagccttctctcatccaggcatggctcgacactggagacagcagccagccactggaacagctgcgcacgccattgctggttacgcccccgatgttccggcttgatgagcggggcaaacgcgatatccagatccgcgccgccgatacctccgggttggccaaggaccgcgaatcattgctctggctcaacattctggacatccccgctcggcagacaggcagcgaacaacagacgctggagttcgccatgcgctggcggctgaaggtcttccaccgccccgcagggctggctggcgccgcagatgaggcgcctgcagcgttgacgtggttcctgcagactgattcccaagggcattcggtattgcaggctacgaaccccaccccctatttcgtcagcctggcgcagctcaccctgggcgagcagcacgtcggtctggacgcgagcaccgcgcagattcccccgctgggccgttggtcgcaggcgctccctgcaggctatggcgggcgtgaagccgatagccgcctggaggtcgtctggatcgatggcaagggcgtggagcacacggtgcatgcacgcgtgtcgcgatcgaatgcacaccctgccatgcaacttcgcccttga

SEQ ID NO: 532907 - DNA, 738 bp, Stenotrophomonas maltophilia
atgcgagtcgttgcggcattgatcattgccctgcaggcggctgctacctttgcagcccgcgcagatatcggggtggagcacacccgggttgtctacaaggcggggcagtctgccaccaatacccggatctggaacaaggggcagcagacgtcccttgtccaggcctggatcgatgacggtgatgacagcgcagcgcctgagtcgttgaaggtcccgttcgttgttgcaccttcggtgttccggctggagccgggccggagccgcgatattgtgctccgcgccatcgggggcaacagcctgccagctgatcgcgagtcggtgttctggttgaacgttcttgatgtgccagcgcgggtgcccggggcgggaggcgtgtcgctggactatgccgttcgctggcgcgcgaaactgttctaccgtccgtcaggcttgcccgggcgagcggacgatgcagctggctctctccaatggagcatccgggaagaggccgatggcggcctccatttgatcgcgcacaatccgacgccgttccacgtcagcctggatgccgtagtgctcgcggagagaaagctccggccgtctgccggaggcaacctcgtgcatccactcggtgagtggtccatgccactggagcctgcggatcatggcgcgaagcgagtgacatccctccaggccacgtggctcgacgatgctgggaagccgcattcccgggagttctctttggtggcacggccatga

SEQ ID NO: 532908 - DNA, 849 bp, Stenotrophomonas maltophilia
atgtacctgtgggaatgctcggtcgggcagacagttgacgtttcgttgagccagaatctgacctacgcaggcaccattggtggtagggagaccttcgcgacatcgaatggaaacataggtgtccagttcgagtatcagtacgcgaatgggttcaacgccaatgggacggtgaggatgtcgtcgtggatcccgttgacccgaggtacccacgacataacgctccatggtgattctgcggcggcgattgtcacttcgatggtcggcatctattacgacatgcgctttgtcgcactcaatgatatttccggcgaccaggaggtgaaaaacgttcagcctgttgacctgcaggtcaagtcgcatgggttcagcgtcaatcagttcgtctgggagggtgtgtacctgacagccccccgcgcgccgtcgtgtgtgttttcggggggcgttggtagcacgatcgacgttcccaccgcctatacaagccagttgaagaatgaaggcgatatggggcgggcacaacggttttcctggagctggtcctgcgatccgggtgcaggaaccgagtacaacgatctgggcgatttcaggtacagatctaccaccaccgtgactgagaaggagggcggccgcatgcgggtaacgggcggggcaacgggtgtcgacatactggttacgcggcgcaatggctccggcgatcaggaagcgatctatttcgatcgctggtacggcgaattcttcaacgtgcccctggacggcagcgaggatatggaagtcaggtacatccgcaacaaggatgcgttgaccgtgggtgaagccaacgcgggcctgataattgacattgaaccgaggtaa

SEQ ID NO: 532909 - DNA, 2586 bp, Stenotrophomonas maltophilia
gtgagccgatttgtgcaaaacaactcgctgcgtcaccatcgtcttgccacggccatggcgctcgtgcttctgccgatggtgggcgcggctgcgccggcccccgagttcaatacggagctcctgcatggcggtgcgaatctcgacatcagccgctacctgggtacgggcctctccgcaggcatctactcggcagacatcagcgtcaatggggttgttgtcgggcgccaggacgtcgaggttcgtgcgatggatggcgaggacacgctgtgcctgtcccccggtttgattgaaaggttcggcctggatctgcgcaagttggatgctcagcgcgctcagcgcgatggggacgacatgctgccgttgcccgaggacatcacctgcgaggacatcgcgcgcttcctgcctggggccagtgtggagctcgacgcagctgagcaggtgttgaatgtcagcatcccgcagatctatctgagctccagccgcggtggctgggttgctcctgatcgatgggacaacggcatcaatgcgatgttgctgaactacagcatcaaccatacccgttccgagttctccggccgtcagagcaaccgaaccagcgcgacgctggatgctggcttgaacgttggcgcgtggcggttccgccacagtggctacttctcgcaggacggcaacggcaaccacacctacagcgccagccgcagctatgcgcagcgcgagattcgtgcatggaacgcgcagttgaccgtgggcgagtcttcgactgcaggcgacctgtttgattcggtcaactacgtcggtgccagcttgaccagtgatccgcgcatgctgcctgagacgcttaccagctatgccccggtagtgcggggcgtggctcagaccaacgcgcgggtgaccattcgccagcgtggccaggtgatctatgaaaccaccgtggcacctggcccctttgagatcgatgatctctcgcaaagcgcgggctccggtgacctggaggtcgaagtggttgaggccgatggacgcacagagtccttcgtggtgccttatgcggccgtgcctcaactgttgcgtcagggccagcagcgggccacgctgaccgtgggccagctgcgccatggcgacgtggccgatgcgccggagttcgtcgaagcaaccctgcgtcgtggcgtcggcagtgcattcactgcgtttggtggcgtcaccttggccgatggatacggttccatcattctggggggggcgttgaacacccgaatcggcgcgttctccggcgatgtgaccttctccgatactcgcttgccgtctgcaatcgaggggcatgggcagcgcatgcaggggcagtcgtaccgcttggcgtacagccgcagcttcaatacagcaaccaatttcaccctggcagcgtaccgctattccaccgagggctacctcacgttccacgacgcggcgcagttgcgcggcgagctgggcagtggcagcgcggggccgaacctgtcccgccagcgcagccgcctggacctgaccgtgaaccagcggttgcccaagggatccttgttccttaccggcagcacggccgactactggagtgagaaccgtcgcactacctacttctctgcgggctacaacggtcggctgggccaggcctcctatagtgtcagcgctcgtcgcacgctggagtcttcactgctggggagcagcagccggaaggcgtccaccggtgcgtacctgagcatcagcatgccgcttggccgcgcaccggcagcacctcgcctgagtgccagcacaagcagtgcccagggcggcaatacctatcgcgccgggatcagtggcagcttcggagacgagcggcagggcaactacaacatctcctacgccgatacgtcgggcagttcgaacatggggatgaacctggcgtatgcggcgccgaaggccaatctgtcggcctcctggagccagggcgagaacagcaggcagctgtcgctgaatgcatccggtggtgtactgctgcatgcaggcggcatgacgctttcccagcgcatgggcgagaccgtgggtcttgtgcacgtgccagatgcagcgggcgcgggcattggcaaccagcgcggggtcaagacggacaaacgggggtatgccgtggttccgtacctgaacgcgtaccggatgaacgacattgcggtcgatcctaccggcctgccgttggacgtcgaattgaagtcaggctcggtcatgagcgttcccaccgccggtgcggtggtcaaagttgtcgttccgaccgccagcggacgcagcgccttgatcgaggcaatggacagccaagggcgcccgctgccctttggcctggatgtgtacgacgagagcggccaggtggtcggtgtagtcgggcagggcagccgactgtgggtgcgtggcatcaatgaaagcggcagattgctggttggcgctggcgtggatcaaggcctgcgctgctcaatcagctacgacctgcgcgatctgccgagtgaccagattaatttcagcacttgcctgatgtctagccttgcggatgcatctgtagacaacgcgccgctggtttcacccggtgccccgaactga

SEQ ID NO: 532910 - DNA, 738 bp, Stenotrophomonas maltophilia
atgctgcgcattgagcgatccttcgtgacggcgactctggctgcggccacgctgctcgcaaccttcaactcgaacgctggcgttgttctatccggaacgcgcgtggtgttccctgccgacaagcgcgaggtgtccatgcgcttgcagaaccagggcgatgttccgtcgctggtgcaggcatggatcgataggggggagggcaagcccgccgcctccacggccgcggccgtgccgtttgccattcgtccacccatcttccgtatcgacggtggccgaagccaggtgcttcgcatcgtgcataccggggaatccatgccgcaggaccgcgaaagcctgtactacctcaacgttcttgacgttccggcgaacaagaccagtgcagggtcggcgagtccagagctgcgcctgatcgttcgcacgcagttgaaacttttctatcgccccacgggcctgtcggcacaggcggcggcgaatgcgccgaaacagctgcagtggagtgtcacgcggcatggtcaggagtgggcgctggaggcccgcaaccccacgccgtatcacgtagccatcagcaacatcagtgcgggaacgaaggtgaaggccgacatcgccgcaccactcgccaccacaacctatcgcttgacccaggcgcagtacaacgcgctgggctcgcaggtgacgtttgactacaccaatgaccacggcgcgagccacagcgtaagcgcgcccctggtccggccctga

SEQ ID NO: 532911 - DNA, 537 bp, Stenotrophomonas maltophilia
atgaacaagcttgcaattgctctttcggccgcgctctcgctgggcgccgctacctcggccagtgcggccgatggtgtcatcaacttcgaaggcaagatcgaggcattgacctgcagcatcggcgtgggttcgacggtcgacgacaccctggtgctgcccaccgtctcgccgaccacggttgtcagcggcgcagctgcgcgccagcaggccttcagcctgacgatgggtactgctactgacaagtgtgcagccggcgccatcaccgtgtcgttcgaagacacgaacctggacgccgacggatacctcgagaacaccgaggcggtggggtcgggtgagccgggcgcggatggcctgcgcatggcgatctatgagtcgggcgctgccgtgaacctgaagactcacgaactcaaggggaccgtcgaccccagcggcatcatcagcttcccgctggtggcgagctatgagccgactgtagccggcactgcaccgggcgcgggcacgttcaagtcggccctgcacgtcagcgtccagtactga

SEQ ID NO: 532912 - DNA, 684 bp, Stenotrophomonas maltophilia
atgaaaacctccctactgacgctatgcgtcatggcggcctgcgcgctgccgtcgatggcttccgccgacacggccggcaaccactatgcctcgatacgtgtagtggacgcccaccatcaggcccgcaacatggatgccagtgcacgccctggcattggccagttcgtcgcgggtgaccagaggcagcatttcgccaccggctctctggcctttggtcagatccacagcagcggctggcgtagcgaagccgaatacgttgcgcgccatagcgatacctacaccagcggctccagcatgttcgccaccagcttcaacaaccacgacgtgcgttcgcagcgcctgatgctgaatgtctaccgcgatgtcgccctcaacgacgcgtggtcgctgtatggcactgtcggtggcgggctatcgcacatcacgtccggtggctggcagggcaatgcggggcgccagtacacccgcgccacccgcaccggcctggcgtggtcgctgggtgctggcgtttcggttgccgccagtgatgcgctgaccatcgacctgggctaccgctacgcagacctgggcagcaccgagagtggctggaacaccttcgccaatgcgcgtggcctgcaggacgagaagctgaagctggacctggtgtcgcgcgaagtgacgctgggcctgcgctacaccttctga

SEQ ID NO: 532913 - DNA, 906 bp, Stenotrophomonas maltophilia
atgatttcacgcaagcttctgtgtgcggccaccctgctgtgcctggccccgctttccgccattgctgctgaggcccacctcaccccgggctcgaatggcggcagcggcgcgatgccgtcgggctactccaccctgttcttcgagatctccgattccgatttcgccaaggaactggctctgccggcgaatcctcgccatggcgacaatgttgtgctgagcgcgctgacttcgcgccgcgtcagcatgctggatgccgcaggcaccagcgtggcggacctggcctacatcccggtgacgcagaacagcagcttcgccctggtcaagagcgacccgctgggccgctgggcagtcacgggtcgtggcctgaacggtacgcgcatcattctgaaggacggctcccacgcccaggcgccgaataccgaaaagagcttcattgacctgcacgtgctgaacaatgtctccagcatcggcctgccggcgcaggcgccggcacgtgcggtgctgggattggtgaactacacccagaacgatgtgacgatcaagggtccggaactggccggtggcgcacagacctgtggcgttgcgcagacctgcgcattcgtctttgatggcgccgatggccagtggcacggccgtcgcggccgcgcgcacttccagccgaccaccgcgcagctgccgaagatgggccagcgctggaccgacatagtgctgtccggcccggccgaggatgtgatcaccccgcgccacatgcagctgccggtcgaggcggtcgatggtgacatcattgagttcaccgatgtgtcgggctcgcgcttctacaccgtcaataactcggtgattagcggcgacaagcgcacctaccgctacgacgccggtaacggccgttggaccgtcgcatcgtactga

SEQ ID NO: 532914 - DNA, 408 bp, Stenotrophomonas maltophilia
atgaatcctctttcctgcgctacggcgctggccttcgcgctgacgtgtgccgcctcggttgccgtcgccggcgaaacgcatcttttgcccaataccaatggtggacgtggcgccctgccttcgggctacagtgcgctgcatttcacccaggccaacggtgaccgggcagcacagctgtcccagtcggaggcgccgcgcagctgggatcgcgtcgtactgagatcgagtgcccaccggggctcgcggctggacgtggcgaagaccgtgtttgcagatctggtctacacgcccattgatgcctcggcgaatctgaggctggactggtccgggcaactgcagcgctggatcatctttgccagcgcatccgtgcgcagtgtctcgatgtgcgtcagccggactgacaaatag

SEQ ID NO: 532915 - DNA, 222 bp, Stenotrophomonas maltophilia
gtgtcgcgcctgctcgatgtacgcatcgccgcattgatgtccagcttttcccgactgtcgccgcatggccagaagcggttcctggatctgttgaacgtctacatctatgcatcgccggcgcaacgacggcagctgcgtagcgcctggccagacgtggtgatcgagccgtgtggctgccatgaggatgcgcagcaagaacgggttcaaaccggcactcgctga

SEQ ID NO: 532916 - DNA, 168 bp, Stenotrophomonas maltophilia
atgcgccacaggttgcggcggtcctggcgggtattcagcagcggcggcagctgcaggttggtgttggtgttggtgtcgaagccgttgccggaattgatcgacgaccagttgctgacgatgtcgctgttgcattcggagaagaggcgcggctttcccctgcagcagtga

SEQ ID NO: 532917 - DNA, 1497 bp, Stenotrophomonas maltophilia
atgaacccaagaacgaacgctgcgatttcgaaccacatctacgacatagttccagccccgaatccgaaggggccagagttcgctatcattgatggaacaaggtatgaggtactggcccgcagggattctgccaacggataccaaggcgccatctaccacaacagacaaaccaacgaagtcatcgtcgcccatcgcggcaccgagttcgaccgccagcctttgattgacggcggcatcgatgcggcgatggtcaccgccagaatcaatgcgcagattgatgatgccctcgtgctgaccaagcaggcaatcaagctggctgaagcaaatggctatggtccggtgtccgtcaccggccactccttgggtggtgcgctcgcacagatcaccgcgcaccactacaacctccccggcgacgccttcaatccctacggcgccgctgggttggcgtaccgcctgcccgaaggtcagccggccaatgcggcacccttcaccaaccatgtgatggcaggcgacttggtcagtgctgccggcccgcactacggcaaggttgagatgtacgcgctgccaaaggagttggaggctctgcgcaatgctgaacagggccagcgcatcgcctccctcgggtcacttggaatgaaaagcggtcatgtcatgtccgccgccgtggcggtccagctgggtgactcccatcgcatggtccatttccttgaccgtatgaccgacaacggtccggtactgtccgtactgggcgaccccaaaacccgaatcacagatcctgaggacctgcgtcgggtagcggagtatcgcaatgacatccaccagttgcgcgtgggagcgaccgtccttgtcggtggcggacccgtcctcctgcgtgatggggtcaattttcttcgcggcaccgaggaagccggggcgtacgcccgtcgcgaagccgacgccgaacaacgcgaagaaaacgcattgaagcttggggagcgtctgatccaagaagcaaccgacaagggctcaccctctctgagcaacccaggcttcgctcccaagagcccattgcaggaaagcatcgaatcaaccttgggcaaggcaggcctggacccgcgcaaggaaggccaccccgaccatgcgctctatcggcagattcgcgacggtgtatccgctgtggatgccaagcacgggcgcagcttcgatgaaaccagtgagcggataacgaccagcctgttagcatcagctaagagcagcggcatggaacgcgtcgatcatgtcgtcctgggcaacccaccacgcgatggttcgggccctcgcatgttcatcgtgcagggagtactcgacaatccggcacacctgcgggcgtcggttccgatcagcgaggcggtcaacacaaccgtggagcagtcgctcgcaaaggtcgagcagatttcgcaggcacagcaagccgcccagcaagaccacactcaagagcaaacccaggagcagacccgcgcttcgatccgcatgggctag

SEQ ID NO: 532918 - DNA, 639 bp, Stenotrophomonas maltophilia
atgcggaaatctctcccagcccttcctagcatggcattgatcgcattgatcacgctagccaatctcggctgccacaaagagcgctcatacccggtctaccgcaagaatcccgcacccaaagatgcactgtcaattgtgattcgggtccacgatgcacctgtggagatcccaactcccaaggtttttgtctcgtatgaggtagatccactctgtctcccgccgatcaacaacttcgagggtgtgcaatacgctccgaaaagacagtcagttgagttccccgtaaagcgcatcagcgagaacgagttcactactacggtgtttaaggatgggatggaggtagctgactattacgggcgcggcccttgcacatgggcgccgagcttcgtgcaagcatcgttcgccatcatcattaatggtcgagagatttacaccgccgcacccgccttcttcccagaaatcggagatggcaccccctccaccacatacgtagagaaagcactaacgcccgttatcgatggacaaatccctgaaagggcaaaaacctggtcgcaggccttgttcgacaggctctcaatcgccgatcgccagaagtactttccaatagaaatttcctcaaggactgacggaaaagcgccatga

SEQ ID NO: 532919 - DNA, 168 bp, Stenotrophomonas maltophilia
gtggtgcagcagctaggagcaggccgagtcggtgccgaactatgggtgaccaggcacgaggccaggctgcgggaggatgtggccaccatcttggcctggcaggagaaggtctgcggcaaccagctggccaaggccgacctgaaaccgccgttcggctggatggggtga

SEQ ID NO: 532920 - DNA, 765 bp, Stenotrophomonas maltophilia
atgggcgggtataccaggacaagcaatcttggagaaggcatgaatgacctccttagcttcctcatatcgttccagccgaagcaggcagtccacgagtccagacgcgaccaaaacatcgcgagggcgaagcttctcaagcgcacgaagcgcccagagggacagctccgcatcatcgctccgaaaaccaatcccaacaagaaacaaccacgcgacctcactagcgggatcgcgccttacaagatccaaaaggtggtgacgcgcgccattgtcgtcacccgcctcaagcatcctggtaatttcattaatatccatcaaggtcgctctgcttcattaacttctgacaccgatagggaacgcacccaagcatgcagcgcgccaagctcccaccccagacgcccggctatcgaaatcaaccatagcgcgcgtgcaggttgtcttacagccctgaatatggctttggcagtcagcaatgaagtcatcgtcatccccgtcggcacacgcagatctgatcaatgcaacagccatccgcgacgctgggctattcggattcagaatgccgttcggacctgcccccaacatctcacccaccttaacggcatttctgaggctatcgctgttgatctttggaccaaaatcccagttgccgttcggattgctgaggtcgcccccattgtacgccccaacggcacccggggcgcccgtgaccacgggggggcgggggcagcaaaggaattgcctgcatcccatcggggtcaatcgaggtaa

SEQ ID NO: 532921 - DNA, 306 bp, Stenotrophomonas maltophilia
atggcgtggatctactggccgccggccaattgtcgaaggcggggcactgtgggtttgcggggtgtgagccgcatggatgcggcgaccaaggctacatggacgtacttgcgccgtccccgcacacccacggtgccccgccatcccacggaatgccagctttcgctgttgacgttgctgttgcctctgcaggtgcagggcgcagccctgccgaacaccctttacaacggcagcggcgcctgcgccgggtcgatccgcccttcgccgcgggtgatcttcttgaactccgcgcggctgaccgatacgtag

SEQ ID NO: 532922 - DNA, 435 bp, Stenotrophomonas maltophilia
atgggagcatggggagacggttcatttgagaacgatgacgcctgcgatctggcctgcgacctgacggaatgcacggatctgtcacttttggaggaagcgctgagcgcggccatcaaccccgacgactatgtggaagctcccgaagcaggcagggcgctggcagccgtggaggtagtgctggctctgctgggccgaccgacggctgctattgccgaggaagaagagctgatggcttgggtagctgcatgcaatcaagtgccatccgccgggctgttggcgctggcacacctggcactacagcgggtacaagccgaggactgcgaactgcgggaactgaaggaggaatctgacggtctggaaacgtggatgaaggaagtgcaggcgcttcagtcctacctttcggcagcaggcggtacggtagatgggacggcctag

SEQ ID NO: 532923 - DNA, 276 bp, Stenotrophomonas maltophilia
atgattatagcagttttccgcagtcgtgttgccaaggagcacggtggggagtttgaaagaagatacgccgagatgtccgcgcttgtcgaagccattcctggttacggaagccatgagcggttttcttctcctaacggtgaagatgttctaattgtcgagttccttaccagagaagctttcgatgcttgggataagcatcccgaacacaaaaaagccaagatgcttggcaaagactacgtttttgaacggcacacaaagccggaggtgaaattatga

SEQ ID NO: 532924 - DNA, 246 bp, Stenotrophomonas maltophilia
gtggggattaagctgttcggtcataaggactgccacaaaaccaagatttaccagtcgtacttgaaagaaaaaggaatcgagtttgattttttagatgttcacgaagacgacgcggcagctgatgaactgcgatccctttatactactggaaagttaaatttcccgacaatactggttgggacaaagaagctgagaaaccccaagttcaaggatctcgacaagtggttggaagcttcgatgaaataa

SEQ ID NO: 532925 - DNA, 441 bp, Stenotrophomonas maltophilia
atgttcaactgggaaagcattaacaactatctcgataacggcactcccgctcctcctagaaaagtagaaaagagcgaggaagagtggaaaaaaattctgacgcccgctcaatttaatgtcatgcggaagaaaggcaccgagcgccctcacactggggaactctgttcattttatgaggcaggacggtatgcctgcgcgggctgcgacactgaactgtttgattcgaacgttaagtttgattcgggaacaggttggccgagtttttctgagcccgtcgccgacaacgtaattcaatatgaactggacacgacttacggacgaagaatcgaagtgctatgcaatgtgtgcgaagcccacttagggcacgtttttccagatggtcctgagccctctggggctcgattctgcatcaactcggagtcgttgaagtttgtagagtaa

SEQ ID NO: 532926 - DNA, 261 bp, Stenotrophomonas maltophilia
atggaccgggcatacgaaggcaatgaaacccgccaacttgctctggacctgggattcattccggtcgtgcccccgaccagcaaacgccttgatccttgggaatacgaccgggccatgtacaagcgccgcaatgaggtcgagcgactgtttcgtcgcctcaagggttaccggcgcatcttctcgcgcttcgagaaactcgatctcatgttcctcggcttcatcagcttcgtgcttgtcgcagatggactgagaatgtgttaa

SEQ ID NO: 532927 - DNA, 2916 bp, Stenotrophomonas maltophilia; identical to SEQ ID NO: 94635

SEQ ID NO: 532928 - DNA, 348 bp, Stenotrophomonas maltophilia
atgtacgtcgatctggtgatcctggatgaactgggctacctgccgttcacgcagtcgggcggtgcgatgctgttccacctgctctccaagctctacgagcgaacgagcgtggtgatcaccaccaacctcaccttctcggaatggagcagcgtcttcggcgacgccaagatgacaaccgccttgctcgaccgcctcacgcaccactgccacatcgtggagacaggcaatgagagctggcgattcaagcactccagtgccgctggcgcggcaccgtccaagccacgtgcaaaagctcagaaaggagatcgaaaagcagcagacccgatagacttatccacaaccgagtag

SEQ ID NO: 532929 - DNA, 933 bp, Stenotrophomonas maltophilia
atgatcgaagcagagcgtacgcctgggttcctccatcttctccagatgaccggcggtgcgtcgtggttgcacatgtgcatccaccaccgcgagacggaaggttttctctcgagcgcgaccggcctggacaagctgatcgccgcagcgatggtctctgaagatacccggtcgcggttgcgcgtccacgggcagggtgtgatggttctgctcaaagcgatgcatctgagagctgatggagtggggcatccagaggacatggtgtccatgcgaatctggattgatgagcgtcgggttatcacgacccgcgaggaggatgtggatcccatcctcgaacttgcagaagacatctctcaggggcgcggccctgcaacgccaggtgacttcctttgcgatctcatcgaagagcacctcgcggaagtttccgagcaggtcgagatgctggaggatggggtggatctgatcggcggccttctggttcagcaccagacggaagcggcatgcccgagcatggccaatacccagaccgcgatctctggctttcttcgtcatcttggcccccagcgagccgttcttcaaacgttgacaactctcgtcgtcccgccgctgaatataaatcaccgaggccgactggaggagcacctgaaccagctgttgcggttgctcgaaacgctggagaatttgcgtgaccgtatcgatatcctcagtgaccaggcaaaccgcattcaggagcgacagctgaatcaaagctcttatgtttttgccgtggtatccacaatcttcttgcccttgaactttgtcactggcctgtttggcgccaatcttctgggactgccgttcgcagatgccaccaatggcttctgggtgttggtaggtctttgcttactaatgagtgttgggttggtagcggtctttcgctggttcaaatggctttag

SEQ ID NO: 532930 - DNA, 537 bp, Stenotrophomonas maltophilia
atgggcggcacgctgcgcgacttggtccggcgctttcatggcacaggtcgacttggtgccatcgttctgcgcccggatcgcctcaaggacgctgtgtccgtgcaggaggccagggccgaaccgggtctcgggctgattggcgatcaccgctccctgcggcttcgtcagtcggatgcgcaacgccatcgcgagctgagtctgatccaggctgagcacctcagcttgctcggggtctggacggggcaagccccaattgccccggagcgtttgcggcgcaacctcgtgatctcggggatcaacatcgccgcgatgcattcacctttccgggaagagcgctttgtctggcgaattggcggttcggtccgcattgaaatcacggggccatgtcctccttgttcacgcatggaggacgagctcggtgaaggcggttacgccgcgctgcgtggtcacgggggcgccacggcacggatcgtcgtaggtggcgtgctacgggttggagataccgttaaccttgacgttgaatccaccgtgggctga

SEQ ID NO: 532931 - DNA, 447 bp, Stenotrophomonas maltophilia
atgagcaacaagatccatttgcgccagaccatgctggaccttgccgaagggcgcctgcggtttgctgaacaggcctatgcacaatacctggttggtgcggcgggccgcggagatgaacccagtgaaagcgatgcggcgtcgcgggccgtcaacaatgccgctctggcgcaggcgttcgaatgccccattcacgatcatcaggaggccctggaagtcttacgtcagatcgatttcggtccccgggattcggtggagacaggcgccgtggttcgcatcgacgggcgttggttcgtgattgcggttgctagcgatgccttccagtgcgacggcaacacctacatgggaatttccacccaggcgcccatctacgcagcgatcgcagatgcccgagccggtgatgttgtcagcttccggcaacgcgaactgcacatagaggaagtcttgtga

SEQ ID NO: 532932 - DNA, 978 bp, Stenotrophomonas maltophilia
atgactgatcgggacagactgacagagcatgttctgcaagggttgacgcgaccacaaaaggcgctctcatccgcttggttctacgacgacgaaggctcgcgcctgtttcagcagatcatggcgctgccagagtactacctcacacgccttgagcacgagctcctgcgttcacgagcggacgaactttcccggtggatagaccctcggtgcagcccgatcgatttgattgaactgggcagcggcgacggggccaaaacgctgtcgttgtgccaggcactggcacaacgtgacgtggactgcatttacaggcctatggatgtgtccgcacgcgcactagcggatctgagccgccgctttgacacgtacctcccccgcatggccatcgagccggtgctgggagactacttcgagcactggcctcaggtcgccgaagggcgacgccaggttgcaatgttactgggcagcaatctgggcaacctggacgaacacggtgccgtcaagctgctgcagcgagtgcattcgaatttgcgcccgggtgaccttgtgctgcttggtctggatctggtcaaggacccggccatgctgcgcgcagcttacgacgactctcaaggcgtgacagctgcgttcaatctgaacctgctgacacggttgaatcgcgagttgggcatggacttcgatcttgcgaaatttcgtcattacgccagctactgtccgctggaacacgtggccaggagctttctggttagccaggtggaccaggtggtcaacagcaagaccctcgaccgaggtttcgttttccttgccggcgagaccatctacacggagcaatctcagaagtacacgatggcttctattgaacacctcgcagcccaaagcgggtttgacaacacctgcaccctgaccgacccccgaggctggtacgccctcacagtctggcaccgcctaccgttcaccccaacgcaacaaacgtcgacctga

SEQ ID NO: 532933 - DNA, 930 bp, Stenotrophomonas maltophilia
atgagtcgcccgacggtggctgaggtgatggcataccgcgcgcatgtggacgagtccatgcatcgtctgctgaaggaaccactggagcccgcagtcgcggctttggtagagctgggcatgcagcatgaacaacagcatcaggagttgctgatcacagacatcaagtacatccttggccacaacccattgcatccggcgtatgaccctcagggcatcggtccgcaagatgtgacggccgaacacgatggcacctgcccacccctgaacgattggctgagcgtcgacgggcagacgattcgcatcggccaccaggggccagggttcgccttcgataacgagtcgccatcgcatttggcgctcattcaaggggtagacatccgtgtggcgcttgtcaccaatgatgaataccttcagtttatgcgcgacggagggtatcagcgccattcgctctggcatgcagaaggttgggactgggtgcaaacgctcgaacaccgtgcgccaatgtactggctgcccgacccagcccagcctcacggatggagtcactacacgctccagggtgtggcgcctctcagtagccaggcgccagtctcccacgtcagttactacgaggcacatgccttctgcgagtgggcggggtggcgattgcccaccgagttcgagtgggaggcagcggcaagccggctcgactggggacgtcgatgggaatggacgcgcagtgcctatcagccctatcctggctttgcccgcagcgagggcgcggtgggggaatacaacgggaagttcatggtaaaccagcaggtcttgcgcggagcatcctgggccacatcaccgggccacgcccgtctgacataccggaacttctttcacgctccgttgcgttggcagttcacggggattcgtcctgttcgctcgcgggagtcggcatga

SEQ ID NO: 532934 - DNA, 609 bp, Stenotrophomonas maltophilia
atgcccatcaaccgctcattcagcggccgcaatcgcgatgtccacaaccacggcggtcgacttccgccaggacagtccctgacggaaggttttcccgtgctgactgcgggccccaccccaaaagccttggcgcttggcgattggcgcttgaccttgaaggtcggtgtgcggccggttcgcgtttggacctggagcgaattccaggccctgccccagaccgagcaggtggtcgatatccattgcgttaccacctggtcgaaattcgacacccgctggcgcggtgtgacgttggacgctttgttgcaagcagccggactggaagcgcccacgccttgggtgctggcgcattcccaggacggctactccaccaacgtgccgttggccgatctgacacaagggcgcgcaatgatcgcaacgcactacgatgaccgaccgctcgcgcccgagcacgggggaccggcacgcctgttggtgccgcatctctatttctggaagtcggccaagtgggtcaatgcgctgcagttcaacgagcgcgacgaggccgggttctgggaactgcggggctatcacatgcgaggtgaccccttcaaggaagagcgctatggatga

SEQ ID NO: 532935 - DNA, 1410 bp, Stenotrophomonas maltophilia
atgagcggggaacagaggttcgacgcgatcgtgatcggagccggtcaggccggtccctttctgggcgcgacactcgttgcccggggtatgaaggtggcgctcatcgaggagcgtgacctgggtggtacctgtgtcaatcggggctgcaccccaaccaagaccctacgcaagtcggctcgtgtggctcacatggcgcgccgggccagcgaattcggtgtgcaaaccgggtcggtccaggtcaacttcagggcagcgatggagcgcatgcaacgccgggtggaggaggctcgctctggcctgcaggcctggctgggccagttggaaggactcaccatcatcaaggcgcgcggtcgcctggcgggccgtgaaggcgaacagttcgtggtgctggccggcgagcatcagctggtggcgcccaaggtggtgctgaacaccggcacacgtccctttgttccgccggtgcctgggctggacgagctgccgttcctggacaacgaacggctgttggcgctgcgtgaattaccgtccaggctggtgatcatcggcggtggatacatcagcctggagatggctcagatctttcggcggctgggaagtgaggttgccattctggaaacagggccccgcctcacggcccgcgaggacgaggacattgcagccgctgtgaccggaatgctgacagcggaaggcatcgaagtgaacaccggcgtgcgcattgagcgggtcggcaaggcggacaacgacgctggcgtgcgggtgcagttggctggtggccgcagcgtggatggcagccacctgctggtggccaccgggcgaataccgaacaccgactgtctgggcctggaaacggtgggcctggaggtcagtgcgcgaggctacctggtcaccaacgaccggctcgaaaccgcggttcccggcatctgggcgctgggtgacatcaatcagcgcggggcctttacccacaccagctaccacgatcaggacatcgtggcggagaacctggccggagggcaacgcagcgccgccgcgcgcgtcggcatttatgccatgtttaccgatcctccgctggcccacgtcggtctttatgaggccgacgcgcgaaaactcgtgaccgaagggcgacgcatttcccaggcggttcacgccatgaaggacgtcagtcgcgcgaaggaagaaggcgaaaccgtgggcaagatcaagctcctcatcgatgaggacagtggtcatttcctcggagcgaccatgctcgggatccagtcggacgagatcattcaggcgatcggtctggtgatggccagtggcggcacctggaagttggtccgggatgcattgcccgttcacccgacggtcaccgagttcctgcccaccatcattgatcgacgcaagcccttgaccgcaagttctgggtga

SEQ ID NO: 532936 - DNA, 282 bp, Stenotrophomonas maltophilia
atgagagccatctggaaaggcaccaccatcgctgagagcgatgacatcgtggaagttgaaggcaacgcctatttcccacacgacgcgttgcgcccggaacatttcaaaccaagcgatacgcacaccacctgtccatggaaggggcgggccagctactacgacgtcgtggtcggcgaagacgtgaacgctgacgcggcgtggtactacccgtcgcccaaggctggtgcggaggcggtgaccggcagggtggcgttctggcgcggtgtcgaggtgcggccatga

SEQ ID NO: 532937 - DNA, 1221 bp, Stenotrophomonas maltophilia
atgagcagcgaaaaggtaggcttcgctggcagcagccagggtctgctggtgggtgtcttggaacgcccggaccatgcaccgttacaagccctggcggtgtttgcccactgctttacctgcggaaagaactctctcgccgcgacccgcatcagccgggcgctggctcagcagggcatcgccacgctgcgctttgatttcaccggtctgggcgagagcgaaggcgacttcgggcgcggtggcttttcgtccagcgtggcggacattgtggcggcggtgcactggatgcagagcacgatcggcatgcctgcactgttggtcggacacagcctgggggggacggcggccatcgcggcggctgcccgcctcgacggcatacgggcggtttgcacgctgggcgcacccgcgacggccgaccatgtgcttcgtcacttcggtccgaccaagtccgaagaggatgggcagatccaggtcgacctgggcggccgggcgttcaggatcgcgccggccttcattgaagagctccaggcccaagcccacgagaacccggtcaaggggcttcgcgcggccttgctggttatgcacgcgccaagtgacgcggtggtggacatcggcgaggcacaggacctgttcaaggcggccagacatcctaagagtttcatcagcctggacgatgcggaccatctgctcacgcgcccggccgatgcgcagtatgcggctgacctgattggcgcctgggcctcgcggtttctgccgatgcgagccgagcgaaacgatgcgccgtcggaccttcgtgcgggcgaggtgtgggtgggggagcacgatcacgccttctggcgatcgatgcgagcaggtccgcaccacctcgacgccgatgagcccaaggaagtgggtggtggcgaacgcgggcccgatccttatgaacttctgctgatgtcgctgggcgcctgcacgtccatgacattgcgccagtacgccaagcgaaaaggctatgcgctcaaggatgtccaggtcaggttgcgtcatgagcgcgcgcacgcgaccgattgccaggagtgcggggatcgctcgggacaggttgaccacgtcacgcggcagctcctgctgagcggaccgttgagtgaaagccagcgacaggacctgttgcgcatcgccgatcgttgccccgtgcatcgaacgctggagaaccatccggtgatcaccaccacactgattcgggactga

SEQ ID NO: 532938 - DNA, 972 bp, Stenotrophomonas maltophilia
atgaccacaacgaaacaggaacccggtgtccttggcgaagcggccgctcccctgggtgtgacccggtgggtggacgcgtcgggccaggcgctggaacacttcgacctggaccgcatgcccggccggttcaagctcatcttctgttttcaggacgcctgcccggggtgccatgcgaccggctttccggcgcttgcccgggtggtcgacgcgtttcgggggagcgacttcgtcgggttcgccgcagtccagaccgtgttcgaggacttcggttcgaacacctgggagcgcatgctggccaatcactcccgctacgcgctgggcattcccttcgggcacgacgccggtgacgaacaggacggcgcgggttcggagctgatgcgccgctaccgcaacggcggcacaccctggttcatcctgatcgatcccgatggcagagtggtctacaaccatttccgaatcgacgccgacaagctcgtcacctttctcaagcggctggaaaacgaaccggcggcaccggagcctgggcccgacatgttgacttggaaaggagtgattcaactggtggaaacgggcaacccgacgccaccgcgccgagttgagcgcagcgaagccgagtgggcccaacagctgacgcccgagcagttccgaatcacgcggctcaagggcaccgaacgggcgcacagctcctcgatgtgtacgctgttttcgcccgggatctaccggtgcgtgtgctgcggcactgaactattcgatgcgtcgaccaaatatgacagccgcagcggctggcccagcttcacgcaggccattgccccgggtctggtgggctatcacggagacaacagccacggcatggtgcgggtggagacgacgtgcaacgtctgcgacgcccacctgggtcacgtgtttcccgacggacccaagcccagcggtctgcgctactgcatcaacgccctggcactggagaaagcatga

SEQ ID NO: 532939 - DNA, 1533 bp, Stenotrophomonas maltophilia
atgcgtgcgtccacaccaaaggccgtgtcggagccgaagacgccggggacgggcccggcgtttcggctgccgtttgacaacagcttcttccgggacatgcaggggttctatgtgccttggaagcccgagccgtccccggccccggcctgggtgcagttcaacgacgccctggcgctggagctggggctggagccggcgacgctgaagtctgcgaccggtctggcgtggctgtccggcgtggaaatgccggctgaggcggcgccgctggcgcaggcctacgcgggacaccagttcggccagttctcgccacacttgggggatggccgcgccttgctgctcggggaactcatcgacacggcaggacagcgtcgggacctggccctcaaggggtcgggccgtacgccgttttcgcgccgtggcgatggcaaggcggcactgggcccggcgctgcgcgagtacctcatgggcgaggccatgcacgcgttgggcattcccacgacgcgtgcgctggcggtgatccggaccggtgagcgggtgaaccgcgagggctcgccccccggggcgatcttggtgcgcgtggcggccagccacttgcgggtgggcacttttgagttcttcgcggcgcgggaggaggaggtgatgcttcggcggctgctcgactatgccgtggcgcggcatgaccccgccctcgccaagctttccgacaagcccattccgatgctggaggccgtctgtgagcggcaggcgcagctgattgcacgctggatgggcgtgggcttcatccacggggtgatgaacaccgacaacatgagcatttcgggcgagaccatcgactatggtccgtgtgcgttcatggagggtttcgatccggccacggtgttcagctcgatcgaccgtcaggggcgatatgcctacggccagcagccggccatggcgcaatggaacctggcccgtctggccgaagcgttgctgccggttctggacgcccgcgatatcgacgtcgtggaacgggtggaacaggtggtggccgggtttgccgtgcgctttgaccggcattggaccgggcagctgcgcgccaagctgggcttggccgctgaagagccggacgaccgcgccctggcggacgacttcctgcagctgctgcagcgggaaaaggtggacttcacgctggcgttccgcctcctgtccgacgccatcacggggccggatgccgcactgcacgacctgttcggacgggagcgcccggcgctctcggactggctggcgcgctggcgccagcgcatggcccgggagggaaggaccttgcaggactgcgccgcaacggcgtggtcggtcaatcccttcgtgatcccgcgcaatcaccaggtggaggcggcgctgtcgagtgccgtggacgaggccgacctcggtccgttcgagcgcctgctggcggtgctggggcggccgtacgagacggtggagtccgcgcggccattcacgctgccggcctcgcccgaagtggccgcagcccaccgcaccttctgcggcacctga

SEQ ID NO: 532940 - DNA, 489 bp, Stenotrophomonas maltophilia
atgcaatcccggtgcattcaacaggcgcccgagctgcgggtgccgtggtggatcgacggcgaagggcgcagcatggcaccgctgaagctgtccgatctgggcgacgggttcaaagtgatcttctgcttccagcactggtgtccgggctgccacagccatggctttccgaccctgcagaagctgatcaaggcgttgggcgatcgcggcttcgcgtttgccgcggtgcagaccgtgttcgagggcgccgagtccaacaccttcgagcgcctgcgcgagacgcagttgcgctacggcttgaacattccgttcggacacgaccctgcgatcggacgcgcgtcgtcgctcatggcggactacgggacgcgcggcacgccgtggtttttggtgatcgatccgctggacgaggtgctctacagcgacttcgagctcgacgagcggcagctgatcggggcgttcggcgcttcgaacgatggtctcaaggcggcctga

SEQ ID NO: 532941 - DNA, 510 bp, Stenotrophomonas maltophilia
atgaacccgagcgaaaaagcagtcctggccggcggttgtttctggggcatgcaggacctggtgcgcaagctgcctggcgtgttgcgcacccgtgtgggctacagcggcggcgatgtgcccaacgccacctaccgcaaccacggcacccacgccgaggcgttggaggtggagttcgaccccacgcagacgagctttcgcgacctgctggagttcttcttccagatccacgatccgagcaccccggggcgccagggcaatgaccgcggcagttcctaccggtcggccattttctacacctcggacgagcagctggccacggcgcagcagaccattgccgatgtgaatgcctcgggtttgtggccgggcaaggtggtcaccgagctcgcgcccgcggggccgttctgggaggccgagcccgagcatcaggactacctggtcaagcaccccaacggctacacttgccactacccccgtgcgggctggaagctgccgcgacgcgagatcggctga

SEQ ID NO: 532942 - DNA, 852 bp, Stenotrophomonas maltophilia
ttgaaccaaagcactcccttgccgaacgcctctctgctgaaccagctgttacggttcacccccacggcgcgcatgtttttctcgggaaatctctgtaccctgacgcagggatccgaggctgacggcctcaagcaggggacgatgcacctgctgagtcgcggcgagctgcaactgacgcgcaagggctttgcgccgctgaacgtgcgggcgcccagcgtgctgttgcttccccgcgcgttggagcactgggttcagggctcagggccgcagggggtggacctgatgtgcgccaccctcagtgaattggcgccgccgctggacatgatcttgccggacgtcacggtgattgacttgaccgccacgtcatcgctgcagcgaccggtagagctgctgttcgaggaggccgaggcacgtgcttttggttatcgggcagcgatcgaccgcctgctgcaatacaccttcgtggtgcttgtgcgtcacctgattgatcggcaactgctgtccggcggtgtgctggaggccatggtcgacagccgtctgggtgtggtgctgtccatgctgcacgaatcgccagagcacgactggacgcttgacagcatggcggagctggcgcacctgtcccggtctgcctttgccctgcgctttgtccaggtggtgggcataccgccgttgacctacttgacccactggcgcatggcggttgcccgcaacctactcgcgcaagggcaggcagtgaaggcggtggcctctcaggtgggctacggtaatgccaccgcattcgcgcgagcgtttcaacgggcctcggggcaatcgcccagcgcttggcagatggagcatctgagtcagccgtag

SEQ ID NO: 532943 - DNA, 1860 bp, Stenotrophomonas maltophilia
atgccccccccgtccctttcgtccagcatctctcgacaccaccaagctcccgcagaaattgagggccaggcgctcaggacgtcaaacttcctgcgccaggtcattgaaaaagacctcgccaccggcacctacgcccagcgccaatggggcggcggcccgggtgatgccgccttccacgacgccggccagcccgacccggccaagatccgcacccgcttcccgcccgaacccaacggctacctgcacgtgggccacgccaagagcatctgcctgaacttcggcctggcgcgcgactacggcggcgtctgccacatgcgctttgacgacaccaaccccgagaaggaagaaaaggagtacgtggactccatcctcgacgcggtgcagtggctgggtttcaactgggaatccaacttcaacggcaagcaggaaagccacctgtactacgcgtcgaactacttcgacttcatgtaccgcgcggccgaataccttatcaccgccggccacgcctatgtggacgagcagacagccgaagacatgcgcatcaaccgcggcgacttcggcaagcccggcgtggacagccccttccgcagccgcagcccggaagagaacctggcccgcttccgcgagatgcgcgacggcaaactggccgacggcgccgccgtgctgcgcgccaagatcgacatggcctcgcccaacatcaacctgcgcgacccggccatctaccgcatccgccgcgccacgcaccacaacacgggcgacgcctggtgcatctaccccatgtacaccttcgcgcaccccatcgaggacgcgctggagcagatcacccacagcatcgccacgctggaatttgaagaccagcgcccgttctacgactggttgctggagcgtttgtgcgaaggcggcctgctcaaggccccaccgccgcggcagtacgaatttgcgcgcctgaacctgacctacgtgatcaccagcaagcgcaagctggcgcagctggtgaacgagaagaaagtcagcggctgggacgacccgcgcatgcccaccatcgtcggcctgcgccgccgcggctacacgcccgaggccatccagctgtttgccgaacgcatcggcgtgaccaagagcgactcctggatcgactacagcacgctcgacggctgcctgcgcgaagacctggaaaacaaggcccaccgcggcatggccgtgcttgaccccgtcaagctggtgctcaccaactgggccgaagtgttcggctctgacggctacaccgaagactgcacccagcccgccctgccccacagcaccattgccgaaggccagacgccgccgcctgaccgcgtcttcaagatcggcaaggacgtgtggatcgaacgcgaagactttgaagaagtgccgcccaagggctacaagcgcctgttcccaggcaacgtggtgcgcctcaaaggcggctacgtcatcgaatgcacgggttgcgccaaagacgccgaaggcaaagtgaccgaagtgcacgccaaggtcatccccggcaccaagagcggcacccccggcgccgacagcgtcaaggccaaagccgccatcacctgggtgggcaacgccgacggggtgagcgccgaagtgcgcctgtacgaccgcctgttcaccgacccgcaacccgacgcgggcggcaagaacttcctggacgcgctgaaccccgacagcctgaaggtggtgacggcggttgtggagccttcactggctgcagcgaagccagaccagaaattccagtttgagcgccacggctacttcgtggccgaccgtgcggaccacggggtgggcgggaaagtggtgttcaaccgggtgacggggttgaaggatcgttggaattga

SEQ ID NO: 532944 - DNA, 843 bp, Stenotrophomonas maltophilia
atgggtgtgtggcatacctcccccgacaacagggcgcacgctttacgacaagttgatgcggtgtctgggcgagattgcccatacgcacgataccgactgaagtacccgccaccaacttcggcgactaggatggccataatgagccaaatccaacggggtctacggttccagcaattgcacactgccgaggccatctttctgatgcccaacgcttgggacgttggtagtgcgctgatgctcgcgtcctgcggctttcccgctatcgccactacgagtgcaggcgtggctttctcgctgggattccctgatcaagaagctgctgtgagcagggagaccatgctggatcgcgtggggtccattgctgcggcaagtccacttcctgtctccgccgatctccagtcgggctacggtgcgagccctgaagaggttggagaaaccatcgcggctgcgattcgtgctggtgtggtgggcgcgaacatcgaggactacagcggcaatcctgcgcaagccctgttcgacagagagcacgctgtcgcgcgcgttcgggcagcaagacgcgccgcggacgcgtcgggagttccttttgttctgacggcccgatccgatgtctacctgactggtgcgagcaatgtttttgcagaggccgtcgagcgatgcaatgcgtaccgagaggcgggtgcggattgcctctttgtgccgggggcttccgaccccaagaccatcgaagcgctcgtccgggagatcaatgcccccctcaccgtggtcatgggcctgacaggttcacctctcaccgtgccccaactcggatctttggggtctcctcgttttcagtgcaataagtga

SEQ ID NO: 532945 - DNA, 2916 bp, Stenotrophomonas maltophilia
atgcagggttggcacacaacgtttttggggatgcgtgggctcccccgcgatatcagcgacttcgagatgaaggcatttttcaccttcgatggtgccgagcgcgacgcaatcaatgcacgccgaggtgattcccacaagcttggtctggcgctccatattggtttcctgcgcatgagtgggcgtttgctcggtgcctttcgggtaattccagtagccttgtggcgccaccttggcaacgagcttggcattgcagcaccagaagtcgcctcgctgagagccatgtatgaacgcgggcgcacgctattcgatcaccaacaagtagcctgcacggtccttggattccagtggatgagcgagcaccagcgccgctcactggtacgtgaactgcgcgacgaagtggcgcgctgcgccgaccgcgatcagctactcgtgcgggcgcgtcaatggctgtacaagaacaagctggtgatcgtgcacgagcgggcaattcggacactgattgcggcggcacttgcccagcttgaagttgaaacaggcaccgccatcgccgccagcgttgatccagcaacacttgatcgctggcgagcctcagtttcagagctgcgcccagatggacaaacccagcagagttggctatgggctgcaccggcgaaacactcaacccgccaaatcagcgaggtactggagcgcatcgacctgctttacacgctggacgttcataagcacctggcagacatccccgatctcatcttgcgccgctacgcgcgccgacttgtctccaggccgccctcagccggagccaagatcaaagagccagcgcgcaccgtggaggtcgcatgctttcttcggtattgcctgttcaccaccacagaccagttgatccttatggtgcagcgccggatcgccgatctgtggcgtcaggctgccgccgatgtccccgctaccgtcaattgggccgcaatgtacaaaacgctgctcggcgaacttgttgccttgagcgcgcaaggtgcggtgccagatgctgagttgcgtgcccgtcttgaagccttgatcaccgaaacccagaaacgcaaaccaccgagcagggcctccctggtccgcgagggattgattgatggaattcgccccgtgcggtcgttgctcgtcgccattgcaaagctgccctggcaggccaccggcgagcatcctgccatcgagtaccttgccaagctgcaagctttatatctcaaaggatccagaaagctgccagttgaagtggtggcaccaagtctgggaatgatctggcaggtttcgatctccagcccagaccgggaacgggcgtttcaggcgttggaggtggccaccctgtttgccctgcgccgcgcggtgcgcaatggctcggtctggattgagcacagcctgagctttcggggtcgtgcgcgcttgttcttcacggacgagcgttggcaggcagagtccaagaaacactatgcccgtctatcgttacccagcaaggctgccactttcttgaagcctttgctggccagagtaactgccggtgtcgatgcggtggccgctgcagcccgcagtggcgtactgcgcgtggatgatgaactccatttgtcgccattgcccgcagaggacgaagacccagaagtgaccaagctgcgcgcggctttggatcaccgcatcggtgaggttcaattgccggaagtgattctggccgttgacgcccaggtgcgctttagctggatcatgctcggacgtgagccgcgctctaccgacgagctgctgatggtctatgccggcatcatggcccacggcaccagtctgactgcggtcgaatgcgcgcgcatgattccgcaattgtctgccaccagcattcgccaggccatgcgctgggcgcgggacgaacggcgtctgagccaggcctgccaggctgtgctggaattcatgcagcgacacccgattgccgccacctgggggcggtccgatttggcatcttctgacatgatgagcatggagaccaccaaacgggtgtggcaagcccggcttgatcctcggcgcaacacaccttccattggaatctactcccatgtaaaagaccggtggggcatcttccatgcgcagccctttgtgctcaatgagcgccaggcgggcgtggccattgaaggtgtcatccgccaagaaaagctggagaccagccagcttgctgtggatacccatggctacaccgactttgccatgtcacatgcccgtttgcttggttttgatctttgcccgcggttgaaggaactcaaacagcgccacctctttgtgccacgcggcaccaaagtgcccgcagaaatcgctgcggtgtgcgaagccaatgtcgacgtcgctttgatcgaaaagcattgggatagtctggtgcacctggcagcctcggtcatgagcggacatgccagtgcggtggcagctcttgcgcggttcggttctgccgcccagggcgatccaatctatgaggctggcgtgcaattggggcggttgctgcgtacggcgtttttggctgactactttgtcaaggacgctttcaggaacgagttgcgccgggtgctcaatcggggcgaggctgttaacgccttcaagcgcgccatttataccggccggatcagcccggcgcaggccaaacgtgtcgatgaaatgcaggctgtggccgatgcgttgagcctgatggccaacatcgtgatggcgtggaatacctcacagatgcaggcggtcctggatcgctggtcgaaccgccgccaggtcattccaccggaactgatcgggaagattgcgcccaccaggctggagagcatcaacttgcggggtgtgtttcgcttcccggttgaccgctatgctgaccaaatcctgccttcgcggccaaatgcatcgataactggcaccaatggatga

SEQ ID NO: 532946 - DNA, 1398 bp, Stenotrophomonas maltophilia
atgcctgacgccgccgaactttccgccttgggcaacgcagcagtggtggcgcctgccgggcatggcaaaacggagatcattgccaatgtcgcagccttgggcggtcgcgcgctgatcctgacccacacgcacgcgggcgtgcatgccattcgagcgcgcataaagcgcttgggaatccctcacgtgcgcgtcgccgtcgataccatcgctggatggtgcatgcgctacgcgcatgctttccccggcgtggctcaaccgcctgatggcatgccgcaaaccggcgagcaatggaatcagctctaccgtggcgcgacgtgcgccctcggggtcaaggccgtccgtgaagtcattgcggcctcctacgaccgcatcttgatcgacgaatatcaagactgccacggcttgcagcatcaactcgcggtcgaactctcaaacatcgtgccgactttgatcttcggcgacccgatgcagggaatcttcgagttcgccggcgcgacgttgagctgggacgacgagatccatccttgcttcccgtttgctgggacacttgaaacaccgcaccgctgggccggcaagaatcccgaactcgggcagtggatcgccgagacccgattgaagctcatgcgtggcgaagccatcgacttggccgaccctcgcatcagctatcgtgaatccgatgatgccttcgatatgggaacgctgttcgaaggcatcgatggcaaggatggcagtttcgccgccatccattgcaacaagactatctgctacagactggccaaagccgcgaatggtggataccaagccatcgaggaaatcgccgcaaatcgactgcgagatttcgcatccgcgtgggatcgggcgactgatggcgctggcagacttcgagcgtttaccgctctcattgaggactgcttccacaaaaaaccggttgtggaaggtgagccgcttgatcccgaggacgcggcgcttcagcaggcgatgcgggacttggtgcctagcctgggcactggcaatggagcggaagccgtcgcccagatgtttacgttggcccgcaaacgcccaagatggaagctctaccgcaatgaactgtggcgcgatgccgaacgagcagcgaccgaagtcgcagcagatcgagccgagacgatggcagcggcgaccctcagcattcgccagcgagtcagcaactcaggccggaggctgcccaagcgcactctctcgaccccgttgctattgaaggggctggaattcgaccatgtggtaattcctgacgctacccacttcgccaatgagcgtcaggctcaggcgaagctcttttatgtagctatttctcgggctactcgatcactgacgatttcgtcgccggagcggttcatccaacttcctgtccccagcatctag

SEQ ID NO: 532947 - DNA, 1728 bp, Stenotrophomonas maltophilia
atgcaaatccgacaactcaaaatatcgaatttccgaggcatctccgcgctggactggaagcctgattcttccttttgctgcttaatcggctcgggtgactcgggcaagtccaccttgctcgatgcagccgaagcggcactctcgtctcgctggttctcgttcaccgagcccgacttcctcgcctgcgacacctccagccccatcgtcatcgaggcgacagtcggtgaactttccaagtctctgaaatcggatgagcgactcggcctttacatccgaggctggacggctgctggccagctacgcgacgaacccgaagatgatgatgagcccgtgttgaccgtccgcctcaccgttgacgccacgatggagcctgtctgggaactcgtatgtgatcggagcgaggaaccccgcacgttgtctaaccgtgaccgtgcgctgttcggccttgttcggttggccggtgaagacgcgcggcatttggcttggggccaaggatcggttctggctaggctgacaggggacaacaaagaagcagcagcccgtctcgcagacgcgtatcgagctgcccgagcaagtgccaatctgggtgacatcgaagcgttagctgacacggccgaattggccgaagggtttgccaaaggattgggcgcatatgtcgagggcgcatatgagcccggcttggagcttgggcgatccgggctttcttcgggctctatcgccctccacgacagcggagtgccgcttcgattgtccggccttggcacccgaagactcgccaccctggcaatccagaaatccgccatttctgaaggggctatcgtcctgatcgacgaaatcgagcatgggcttgagccacaccggatcatcggtgcgattgcgcaactcaaaaccgatcaagtcaaagcaaaggatggaggcaagcctgcagggcaagtcttgatgaccacgcactccgatgtcgcaattggagaggccggcgcaaccagtctgcgcgtgatccaaacatcccgaccaggacgagcggccactatcgctcacccgaattcccctgactccatccgtgcgctgatgcgctttacgcccagggcaatgttcgcccgtcggatcttggtgactgaaggaaacacggagcttggccttcttcttggtctgcgggaaaactggccagcgcgtcatgccaatcggccgattgagcaactgggagttgcgctcgccgacggtaatggcgaacaggcatcatcaatggctcttgcgctcgctggcctcggctacacgactgcaatctatcgagattcagatacggttttgtcccccgccattgtggccgcgctggcggcggctgatgttcccatttttgaatacggcggtggactcaacaccgagcaggccattttctcggcggcaagcgatgctctggttcaagagctgctggtctacgcacgcgaagaacgcggcgacgacgccatcgacaacaacctcgacatcaaaatccccgacctggatatagcaacgatcagaggcaattttgcagcctgggagcttttttctgaaatggatggtgcccggcttcgagaagcaattgccgaggtggctggccggaaaaaatggttcaaagatcaaaggatcggtcggggcctggcgcctatggtctggcggattgctgcggaaaatcccgcctcaccccttgcgacaaccctgacccaagccgaggcatggctgtatgcctga

SEQ ID NO: 532948 - DNA, 663 bp, Stenotrophomonas maltophilia
atgccggtctgcggcagacggccattgtatcgggtggcgatgcctgcggcaggcagaggcatacggcaacagcgaactgcaacagccaaagcgctggcgcttcttggtgctgagggtgagccggggtgctgtggggtggcaggggacgccgtaaacccgtccatgggggcttggtcgccgcatccatgcggctcacacccctgccaccccacaccatcccggcctcgacaggttcatgaggcggagcggatggcaaaggcaggagcaagagcggtttctgatgtcggagaaactaatgtagagccgagcccatgctcggctgggtctaccgcgagcagcagccgagcgtgggctcggctctacaagaagcgcccagcgaagctgctttgcttttgctcttctttcttctcttccgtgggtggacgcacccggaaattgtcagaggccgggcggggtgggttcgcgggggtgtcagccgcatggatgcggctgccgagcttacatggacgtacttgcggcgtcccccgcgaacccatgcttccccgccaaacccacagtcccgctcttgccgctgctccggcttcaaaggcgggtgcagggccgcaggccctgcaatgcagaaaacctcacttaccccgcagacggctgtgcctgaagccgtag

SEQ ID NO: 532949 - DNA, 222 bp, Stenotrophomonas maltophilia
atgtacgacacgaagaagctggaactgcgcctgcggcaggccgaggcgaagggcgaagcactgcaggaactgctggtgatgctgagcaaggtgctcattcctggatctcctgcagcagcagcgatccaggcgcaactgcgagaagcagctgcatacacagggccgtccgttgcaaagaaggaactggcctctctcgcccgcaccatcggcaaccagcagtag

SEQ ID NO: 532950 - DNA, 330 bp, Stenotrophomonas maltophilia
atgagccatacaaagcacaccccgggtccgtgggtaatcgagaagctttcgggtggctggggagttatcgccccgaattggggctatgtcgccttccatgtcaccagcgatcttcctcactggaatgaagggcaggaggcaaataggcgcctgatcgccgccgcgccggatctcctggaggcgttggagcgaatcgcccggccgcacgactgcggatgcgttccctgcactgggcagtgccgcagccagattgcactggaaatcgcagtggaagaaatgcaggaactggcccgtgccgccatcgccaaggccacaggagaaggcgcatga

SEQ ID NO: 532951 - DNA, 150 bp, Stenotrophomonas maltophilia
atggctgaccagctgctcaccgctgcactgacctggtcgatcgccggtaccgggttcctggccggcatgggcgcgctgtgggcgatcagccgcgcatgccgcgccgcgcgcaatgggctgcgctggtgctggcaaaaggcggtggcctga

SEQ ID NO: 532952 - DNA, 996 bp, Stenotrophomonas maltophilia
atgccgcgccgcgcgcaatgggctgcgctggtgctggcaaaaggcggtggcctgatgaagatccaacacctggtcaacgtctccggcggcaaggacagcaccgcggtctacctgcgcgcaatcgagctgggccggccgttccgtgctgtgttcgctgatacgggcaacgaagaccagcgggtctacgactacatcgcggagcttccgcacaagacaggcgggcctgtgattgagacggtgcgcgctgacttcagccgccagctagcgcagcatcgcgcctacatcttggaaaaatggccattggagggaatctccgactccatcgtgcagcaggcggccgcaatgcacgagcctactggaaacccattcctggacctgtgcatcagcaagggccgcttcccgtcaaacaaggccgcgttctgcactggagagctgaaggaagccccgatcgtcagccaagttgtgttgccgatgctgaaggctggccctgtccttcagtggcttggaatccgggctgacgagagccggaaccgtgccgcgcaggcgcgattcaacagacatgaaactgggtcgatggtctggcggccaatattcacctggaccatcgaagatgtttgggctcagcaccggaagcacggcatcgctccgaatccgctctacgcgctgggtatggggcgcgttggctgcatgccctgtatcaactgccgcaagaccgagctgcgaagcatcgccgacctcttccctgaccacattgagcgcatccgacagtgggagcaggtggtggctgctgcgaacaaaaggcgctctgcgacgttctttgcgccatccaaggactccaccgacgcggacacccccggcgtttactcgagtatcgacaaggttgtcgagtggagccgcaccgctcgcggtggccggcagttcgatctcttcttccaggcccaggccggcggcggctgcacttccgacctcgggctctgcgaacgaggtgcgccatga

SEQ ID NO: 532953 - DNA, 246 bp, Stenotrophomonas maltophilia
atgaagaagatcggcgaaaatgaatctggcggaccgatctacgaggttcctgacaatccagtgatacgtatggagcaggaacgaaagcggaaagcacggatggaagccgagctgcaggatcaacgtcacaaggaggcgtcggaccttgcgcgctcatcagcacgtgcagcatggcttgcggtctggatatcggtggcagcgctggtgctttcattcgtcgcaatcttctggaagcagggcggttag

SEQ ID NO: 532954 - DNA, 207 bp, Stenotrophomonas maltophilia
atgaacgaagcccctacccgccttagttacaacagcgacgaggcctgtgaagtaaccgggttgaacaggacggccttctacgcggccatcgccaaaaaccaaatcaagacgttcaaggttggccgccgacgcatggtgtcggcccgcgcgctgcgcgagttcatcgaggccagggagaaggaatcaagcagcggcgcagccgcgtga

SEQ ID NO: 532955 - DNA, 384 bp, Stenotrophomonas maltophilia
atggctactactgtaccgcatccagcggcagatgccatcggggattcccccgacgcgcattcagaaaagtccgatggctaccgaccgcacatccactggtccgacatgtcctgggatgaaaggcgcctgccaggcatggcaaccatccacctgcagcacgtggaccgcgcgctgcagtcgatgggcgcaatcagcgaggttctcacccgcgctttccacgcgcagtacgacgagagcggcgaattggacggagcgctcctgagcgcgaccactcaggaggggctgcacctagccctgcactgcctctggacccaggccaccgtcaccatggcagaactgcggaacgatgagcgggagtgctggggcaaggcggtgcgccgatga

SEQ ID NO: 532956 - DNA, 204 bp, Stenotrophomonas maltophilia
atgaagcgccgcgccttctacgagcaccaggcgggcgccgcgaccccgaccgaattcgcgttccagttcgtggcgtggatgcagtccaggcgcacgccggccacgccgagcgacttgtctgaccgctacggcatgtcccgagcaacggcctggcggtacttgcgcaagtaccgcgatgctttcggagaggtgtccggccaatga

SEQ ID NO: 532957 - DNA, 183 bp, Stenotrophomonas maltophilia
atgaacgccctccttcgcgatgagcttgccgcgctgatcgcccagcacgccgagcctgaccaacccctcagggaagccgcccgaggcgcgctgcgcgcgctggagtgggcctgcgcccttcgacccgactttgcccccatgcgtgacgcgctgcgctccgcactgcacgaggtgaccccatga

SEQ ID NO: 532958 - DNA, 261 bp, Stenotrophomonas maltophilia
atgaagcgtttccgcaatcgaaagcctgtccgccgcaccccggccgatcgatcagccgaagaggtgatgcacgacaccctgcgcatgatcgaacgcgcagacatgaaggccctggccgccaaccccgtttcccgccaggcgctgcagggcgtccatagcaaggcgatccaacaggttgccgagttccgcagggtgctggccttggccgagaagatcgagcaggcctacgcggcagcactcgcaaccacggtggaggcgtaa

SEQ ID NO: 532959 - DNA, 324 bp, Stenotrophomonas maltophilia
atgcacattccaacagccaaagccggccagcgctacgacgctattgtgactgcacaggagatcaagcatccctcgtatgccgccctggagcctgtcgcccgcgcgctgcttatcgagcttcgcagcctggagcagccatttcagattccggtggtctcgatcagcgttcgtgaagcgatgagaatcctgggcgttggacagcgcccagtggaacgagcattccgggaacttgaggcgcacggatggaccgaagaaaagcgggtggccggtggccgccggcgcgttgtccttctcaagagcccgtgccaggcgtcccatggctag

SEQ ID NO: 532960 - DNA, 201 bp, Stenotrophomonas maltophilia
atgcccaaagtgaagctgatcgacgcgcttacgaagcgcgcgctggcaaagcagttgatgcgtgctggctgtcccaaacaggaggcggagcaagtcgtgtcccgcctcacgcagagagagcgctggcgaaagctaccgcagaccgttcaatcagagatcgcctggaaagtggccaccaccacggagaagacagcaccatga

SEQ ID NO: 532961 - DNA, 270 bp, Stenotrophomonas maltophilia
atgagcatagataccgaaatctacactgcggcccaggccttcaacgaggctgcaaccgcccttgccgatgcgatgctggccaagctgcagacgaccgaccccgagctgacggcgaaggttgcccacgtcctggagcgcggcgagcgcatggtgctggcgctggagatcaacccggaagcgccggccatatggtgggcgaccatcaacgattaccagcaactgcgccggatcatgacgatccccggcacaggcggagcgcagcagcattga

SEQ ID NO: 532962 - DNA, 1170 bp, Stenotrophomonas maltophilia
atgcccttgcccgacgacattcagcacatcaacgccagccttgagaaggttggaaccaacctgaaggcctacaaggaaagcacagaggagcgactcaacgcgttccaagccgacatgcaggcgctgcagcaaacggtcgctgccggtgcgcacaacctggggccgcagttcagcaccggcccgtcggtcggcacgcgcgctgccgaagcaatcagcaccgatcccagcttcgccgcagcccgcgaccaggccgagcggaacatgaaagtcagccagttcgctgcgcgcgcgaacatcgatgcgtcgatcaaggcagcgctgacgaatgaaggcaagggcaatacaggcgataccggcattcccagccaggccgagcggcgtggcctctttggccccgtcctggccccgctgcggctgctggacgttctgcccagccgacccaccaaaagcgacgcagtggagttcatccagttcagcggcagcggtgaagcggcggaacaggaacacgagggcgacaccaaggcggaactggagttcgaaggcaccgctgcgcgtgccgagatcgtcaccatcgcaggctggacaaccgcgtccaagcaggttctctccgatgccccggcgctgcaggcgcagatcgatcgtgtgatccgccacaaggtgctgtccaagctggaagatcgcctcatcaacggtgtggggggccaaggcaagatcaatgggctctggaatcaggccaccgcgctggtgccggccatcggtgagactccggcggacatgatcggcgaatcgctggtgaccatggccaacgcaggctatgcgcccagcatcgtgctgatgaacccgcttgactggttccgcctgcagatcacgcgcaagaacgataccgatgacgagtacgtgttcggcagccccaccgctccagccgcaccgtcgctgtggaatacccgcatcgtgccgacgccgagcatggccgcgcgccgagtgctgaccatcgacacgtcgctggtcaccgtgctcgaccgcgaacagctgagcgtcgtgctcagcaacacccacgccgactacttcgtgcgcaacttggtggccatcctcggcgagctgcgcgccggcctagagatcctcgacaccgcagcagtgcgcaagttcgaactgcctgctgtcgggccctga

SEQ ID NO: 532963 - DNA, 2094 bp, Stenotrophomonas maltophilia
atggccaccgccggcagtatcgtcattgacctcctcatgaagacgggctcgtttgagaccgacacccagcgggccgagcgctcgatgaagcgcatgaagggaaccgcccaggacgcggccaagggcgttggcacagccttcgccgctgtcggcgccgcggttggtgctggcgccggcgctgccgccgcggcggtggtgaactggacccgcgaggtttcggagctgtcccaggaggtggagaagctctcccgcctctccggcaccgatgccgtgactttccagaagtgggcagccggcgccgccagcgtcggcatccagcaggacaagctggccgacatcctgaaggacacacaggacaaggtgggcgacttcctgcagacgggcggcggcccgatgaaggacttcttcgagaagatcgcgcccaaggtgggcctcaccgctgaccagttccgcaagctcagcggcccgcaggcgctcggagcctacgtggaggcgctgcagcgcgccgggctgtcgcagaacgaaatgaccttctacatggaggccatcgccaacgactcgacgctgctgctgccgctgctgctggataacgccaagggcatgcgcgactggggcgaccaggccacgaagttcggcgcgatcatcggcgacgacacgtccaaggcgatgaaggagttccgcgagcaggccaaccgggtcgaactgatgtcgcggggcatgaaaatcgagctggccgagggcctgacgccggctctggtggatctcaacaaggaactgaacaaccccgaggctcaggaaggcctggcctcgatggtgaagctgatgggcgacatggcgcgcggcgcggccgaggccacgacgtgggtcgtcaagctgaccggttcctacactggttggctgaagggcaaaggcttcatgcccagcggcgccgacgacccggtggcatccatgcaggcggagcgtgcgcgcctgacggaacagctgggcagctggcggatgcactggttccctgactcgaccaagagcgacgtgcagaagcgcatcgccgagcttgatcagatgatcaaggccgccccgttccggggcgtgacggccaccgtcgacagcacggccaggccgggcggtagcccgccggtgaccttcgatccgaacggcaacaacggcaacaagcgcacggcggcggtgaagaaagaacgcgatgcgctcgccgagctgatggccgactacgatgccctctatggctcggccaacgacaaggcttcagggctgatcgcccagcttgaacgcgagattgcgctccacggggatgcgagcgaggcggcgaaggtcaatttcgacatccaggccggtgcatacggcgccctcagcgatgctcaggccgagatgctccgcaacctggctgccgtgaaggacgcccaggacgactacgcggcgctgtacggcgatggcctgcagaagatggccgactccacgatggacaagacctcgaccatgaagaccgtcgcagaccaggcggcccgcaacatgcagacggcgtttgccgacttcctgttcgacccgttcgaggatgggctgggcggcatggtgaaggggttcaccaaggccatgcaacgcatcgccgccgagctggctgcgtccgaggcactgaagctgatcggcaagtttgcgtcgagttacagcggcgccggcgccagctgggtcaatgcgatcggtggcgcgatcagcgggtccgctggcggccgcgccggcggtgggccagtggcggctggcagcatgtaccgggtgggcgaaggtggccggcctgagctgttcgaccagggcgggaagacctacctgattcctggtgatgctggatcggtgcggccgatcaccagcggcatgccggcatcctcgatgggcatcggcggcggtatcagcaacaacttcagcaccacgttcaacgtgaccagcgatgggagcagcaacacgcagcagggcgccggcaccgaccaagcgcgccaggtccaacaggcgttcaaccagatgatcaatcagtgggcagtgcagcagtctcgccccggtggcttactccaccggatgagcacgaacagctag

SEQ ID NO: 532964 - DNA, 498 bp, Stenotrophomonas maltophilia
atggattggttgatagctgctgttgaaaccgcatttttcagaaacgtcgcattccttgtgggcgttatggttgctgtgctttccgtgatcagtgtgcgtgccacggcgcgcagaaagcagagcgcggatgtgatcttcgcgactcgaaatgacgaactgcttaggaaaggtattcgtctcatccgtgaggaggccttgcatgagaactccaacatcaggaagtacgccagggctccagaggcccagagcgaaaacgccgccgcgatccgatatgtgctgaaccactttgagtacgtggcagttggtattcgtaacggcatttatgacgaagggatgtttaaggaagcttcctacagcacaatcatggaaatccggcggcattcggaaacatacattgccgatgtacggacagagcagaagcgtgacacgatttatcaagaattctgctggctctgcgagcgttggaagaagaagccgcttaagccgcgctctaagtag

SEQ ID NO: 532965 - DNA, 894 bp, Stenotrophomonas maltophilia
atgcgcaaactgctttttagcttactcatactccttgcaccaacaactgcccttgctgctcaagaaccttattggtcaaaactcacttcatcgaatttcctggtgagcccgagcactgcccatgttcaaatttttgatcagggttcaagtggcatcatcttcgaatcctcgtcaccattgttctatggagatgttgtctccgatagcatctcgatccaatccgaaacactaagaccgaagaagaagccaagaggacggatctatcgatttttccatcctggccaggaacggatctggaaaggcatccatccagatctcagagaaaagatggaggcaattcaggatgtcatggaagcggaagggtttgatttacgtcccgtagaaggttacagaagccccgagcgccaagccgccctcctcgcctcagcatcaggagtcacgagtgttggagcttggtcaagctgccataactatggcttagccctggacgccgctatctacgtgggaggaaagccgagctgggacctgagcgaccctcaggtcattgcgggctatgagcggttcggcgagctggctgagatcctcggattgaactggggtggccggtggacttctccgaaagactacccgcatgtcgaaatgagagctgagtgtggtcagtccaaatgggcaaagcgccacggccaacctctacccaatttcgtcgcgagcgctggcgaaccatcatctttgattcttgaacgagcattggtatcaacctggtgcccaatgggcttggaagccacctgcatcgctatgggtaaagatcggttcctttcctggggatggactgttcagcacccaaatagagcatgcatggcccggcccgacctcttcaaatacgctttttcctaa

SEQ ID NO: 532966 - DNA, 693 bp, Stenotrophomonas maltophilia
atgcggctcacgcccctgcgcagccccacccgcccggcctctgacacagtccggcggttccgcccgccacggaaagaaaaaagaagagcaagagcaaaggcaaaagctgcattccgggttgatgctggctggaccaaccccctaccccacttcggtccgagagatctcatccacgcatggcgtggatctaccgcgtcgaccacggtcgacacctacccaccgtcaccgggaaaccgtcgaagacggggcggtgtgggttggcacgaccgttggcgccacggatggcgccatcgagcccccaagggtgagggcgcttttgcttgcgaagcactgcttcgcaagcgcccgaacgcacagccgccagcggctgggccggtctgggggttcacggcgtgtcctgccaacccacgccgccccgcccaacacgcagaaacccagagccgatttggctttgggccttggctttggctttggcctctacgggtgcagggcgaagccctgcaaagaaaaaggccgcctttcggcggcctcacttctctttacttcagcttgatctcgcgcaggcgctcctcgaggaagccgtgggcggtgatcggctccgggtaccggctcgggttctccggggtgatgcacgagggcagcacgtcgatcaggaagtccgggttcgggtgcaggaagaacggcaccgagtag

SEQ ID NO: 532967 - DNA, 177 bp, Stenotrophomonas maltophilia
atgctcggcttgatttatcgcaacctgtccgaagagcagccgagcatgggctcggctctacagaaagcaaaaacccgcgctgtcgccagcgcgggtttttgtttggatcagcccttcagtgcagcctgcacgaacggcggggtcaccagcacgccggtgtgcagcgcggcggtgtag

SEQ ID NO: 532968 - DNA, 165 bp, Stenotrophomonas maltophilia
atggtgcggcgggtgctctgcagggactatcgggaattgccggtgaagcggctagggggattcctccagaccgttggagtgcgcctgcgcgcttcgcagcggccggtgttcgcgatcgagtgtcggaactcaaccggtatgacgtggaacaacgccggggaatag

SEQ ID NO: 532969 - DNA, 2049 bp, Stenotrophomonas maltophilia
atgaagatccataccttggttgtagccattgcggccgcctgcctgtccatgcaggccaacgcgcaatcgatcgattccgcactcaccctgggcaaggtcgatgtccacgcacattcggaaggccagctcacggcacaccaggtgctgacctcggttgatgtgctggctgcggaccagattgaagacaagaatgtttcgcagagttgggaactgctggggcagatgccgggcatccagctcaccgaaacccgccagggcgccgagtctggaaaggtcagcttccgagcgttcaacggcgagggctacctcaacgccatcaagaccctgatcgatggggtgcccagcaatgtcaacagtggcaaccagcgcttcatcgatatgctgttcccgctggaaatcagttacatcgaagtggtgcgtggcaccaatgatccgcgctacggcttgcacaacatcggtggcaacgtgaacttcggcacccgccagggtggcaactacactgatgcgcggctgggctacggcagctacaacacacgcagcgcccagctggcgctgggccgggaaggcaatggatttgcccataactacttcgtgggctaccaggactccgatggctaccgcgaccacgatacatcgaagaagtatagcgtcggtggcaagtggttctacggcagcctggaagaggacgggctgcgcgtgggtctgaccgcccgcgcctaccacaacgaagccgaagagcccggcttcatgacggcagaggaactgaattcgcaccgccgtggatccgatctgcgcaatcgcaacgacggcgacgatcgtgacatgcgccaggtagccgcccatgtcgatctgaagttggccgagaacctgtacctgggcagcaagctgtactacaacagctatgaagatgatcgccgcatcaccttcagcgacctgcccatcggtaatgcgccgcggcagcgacgcatctgggacgaaagccagttcggcatgctcaacaccctgacgtggaatgccagcagcatgctgaccctggaaggtgggttcaactatgagctgcaggacaaccgctaccagcgcatgcgcttcagctacgctgagccgaccgacttctgggcggtccccgcgcgcatccagaacgatgagcgatacagcttcgacaactggggcgcgtatgtgcaggccatctaccagcctatcgaggcattgaagatcgttcccgcttaccgtgttgaccgcttcagcggcagcacgcgcctggtggatggtacgaccggcaggttgcagcgctacggaaacatcaaccaacccaagctgagcgtggtctatgcgctgacccctgctgccaatgtctacgccaactgggggcgcacggcccaggtgctgaccggcggcacagcgccggcatacctgacgccagggcaggttgcgatgagcccgtccaccaacaccggtatggaactgggagtgaagttcagtcccttccacagtacacaggcgcgcctggccgtctggcagcaggacgccgagaatgagatttccaacatgcccgcgaccggcactaccgtgcagctgggcaggacccggcgccggggcgtggatgcgcagatcaccgcacagctcggtgaacgctggacggtgtgggcctcacatgcgtaccaggaggcgaagatcgagcgcgatggccgcgtcggtgtggaatcgctcgaaggcaatgaagtggctgcggtgccacgctacatcagcaacattggtgtcgattttcgtgccaccgacgcgctgaagatcggtgtgcagggccgagcgcagggtgactactacctggaagagcgcaatgtggctggcaagtatggcaacttcgccttgctcgatcttagtgcaagttaccagatcgcccccacctggagcgtggacctgcagctgaagaatgcgaccgcgcgcaagtacgcctacgtgtggtatgacagtttcttccagagccagacgcagccgatgttctctccctcggccggccggcagctgtacatagggctgaacatgaaactgtga

SEQ ID NO: 532970 - DNA, 723 bp, Stenotrophomonas maltophilia
ttgagcatcccctcccccgttgtcgacatccaggaccttcgggtcgcttatgcgggtagaaccgttctgtccgatctctcgctgcgggtggccgccggaaccatctacgcactgcttggcggcaacggggcaggcaagtccaccaccctttcggtgctgctgggcttcctgaagccggccactggccaggtcaaggtgggcggcttcgtgccttgggaagcgccgaccaaggcgcgcagccagttggcgtatctgccggaaaacgtgtcgctgtatgagcacctgagcgcggtggagaatgcggactacctgctgtcgttgagtggaaccacccccgaccgtcaggcgatcgccgatgcgctgcgcgcggttggcctgcaggaagcggcatggcatcagcggctgggacgcttttccaagggcatgcggcagaaagtggcaatcgccatcgcgctggcccgtcgcgttcccctgcttctgctggacgagccgacctccggtctggacccgggtgcaagcgctgatttccatcagttgctggagtcggtacgcgcgcgaggcacgtcggtgctgatggtcacccatgacctgatgggggctgttgacgtggctgaccgcatcggcgtattggaacaggggcgtatcggctacgaggccgaccgcgctcacttcgacctgccctcgctgcatgcgcacttcgctggccgggcggccgtggcatga

SEQ ID NO: 532971 - DNA, 1440 bp, Stenotrophomonas maltophilia
atgagcgcctggcgatcggtgatgcgcaatgagctacgcgccatgctgcgtgatcgcacggcgctctcgggcgtcatgctgcttacgctgctggcgctggccgccacgctggtgtcctggaaccacatgcaatcggcagctgattaccgggcccggcagcaggctgccgcccagcagtcattcgatgcgcagccagaccgccacccacaccgggtggtgcattacggtcacttcgtctaccggctgccctctgcgctggcggccttcgatcccggcgtggacccgttcaccggcagcagcctgtttctggaaggtcatcgccagaacagcgccaacttcggcgatgtgatgcagagctccatcctgacccggttcgggcagttgaccccggccttcgtgctgcaggtgcttgcgcccctggtcctgatcttcttggggcacggcgtgcttgcgcaggagcgcgaacgcggaaccctgcggctgttgatgctgcagggcgcgccagcacggtcgatcctccttggcaagctggccgcgctgtgggtgatggcggcggtgttcatgctgccggcctgcacgggcgtggtgatactggccgtttcgggcgagggctcgctgggtgtttcgctgctgttgatggcgggctatgcgctttacctgggaacctggtgcatgctgatcgtggccggctcggccgtgctggcgcgccgtcgcgatgcgttgctgggcctggttgcgatctgggccgtatcgacgctgctggtaccacgcgtggccccggacctggcccatggcaccttcccgctgccggaccggctgcagaccgaagtggcaatcgggcgtgatacccgtgcgctgggtgacagccatgatccacaggatccctacttcgcgacgttccgccagcaggtgctggacacttacggcgtgacgcgcatcgaggacctgccggtgaactacaagggactgctggcactggagggtgaacggatgacctcgtcactgatcaacgcctacgcggcacgcaatgccgaagcacagcaccaacagaaccgtttcgtgggtcgtttcggcctgctcagcccgtccgtcgtgctgtcacagctgtcgatggcagctgcacagaccaatttggctgcgcatctgcagtttgtttcccaggccgaggcctaccgataccagatggtgcagaacctgaaccagctgcaggccgatgcggtcagctacgccgacgataccgccaaggatgccggtgctgacgcccgcaagcgtgttgaccgtagtcactggcatgacattccccggttcacgttccagccgcagactgtggcctcgatcgtggcgtccctgcagtccggcctactggcactgctgggatggttcggtgcgggtgtgctgctgctgtgtgtggctgcgcgacgcatggagattgcacgatga

SEQ ID NO: 532972 - DNA, 1281 bp, Stenotrophomonas maltophilia
atgaaggtctggcgctatgagtgggtgctgctgctgcgctcgaagatcgccgtggccgggcttgccctgttggcggcgctgaccgtggccagtcttgtctcgggtatcgaacggatcgacagccaacggcgagcaatcgcacagattcctcagttgcaaggtgaagacctggcggcagtcatcaaagccaacgccgctgccggcgacgccgggcaggcagcctattacaccttccatcccacctggaaccctccgtcggcgctggcctttgccgcagtgggcatgcgtgatgtcgcgcccttcatgcttcgggtacgagcgttgggccttgaggcgcagatccacgatggcgatgtcttcaatcccgaactggcattggccgggcgtttcgacttcgcgttcctcctcaccttcctggcgccgctgtttgtgatcgtgctgttccacgacctccgctccgccgagaccgaatctggccgggaaaagttgcttgcaagcctgccgggccagctgaagtggatctacgtgcgccgctccctggtcaggctaatcgcgctgggcctttgccttggccttcccttcgccgttgccgccctgcaggaggctgtcgcgccggcgcagattgccggggtacttgggttgatgcttgcatacctgctgttctgggcgtccgtggccgctcttatcgcttggcgcggctggacttcaggcaccaacgcagcggcacttgccacggcctgggccgttgtcgcgctgatcctgccagccgtgtccaatgtagttattgagcgcgccattcctgtgcgacaaggggccgagattgcgcgggcgcagcgcgaagccgtcaaccatgcatgggacattcctcgcgagcagaccatgcagcagttctatgcaaaatatccgcagtggagccattccgccccgctcggcacggccttccactacaagtggtacctcgcctttcatcagaatggagacgacgctgtccagccacaggcgatcgcgtatcgcgatggaatcgagcgtcgtgcgtcggccgcttcagcactgggatgggtgttgccgcccgttggggtgcaagcctggttgacccgcatggccggtactgacatgcaggcacatctggcttaccaggaccgcatccgcacctaccacgccgccctgcgtcagttctactacgggtatctgttcgacgaccgtcgtttcggcgagaaggactatcggctcgcgccggccttcatggtcgcacctgccgaagcgagcgcagaccacgactga

SEQ ID NO: 532973 - DNA, 366 bp, Stenotrophomonas maltophilia
atggaacggtggtatctggcaacacttccagccttgatcctgcaccagatcgacgccgcgttctggcatgagtggggcatgttcagggtccccgggggcattcaaggattcctggtcttcaacctggctgctgtgggtgtcctgctgcacgggtatcatcaggtcgcgctgcccaagccatccgcgcgagcgtatgcccgcctgtgcggagtaacaggtgtcggcacagcggcaatccacgtcgcatttgccattgccggccgtgaggaattccatctcccactgtccatcgcggccctggctgcatgtctcattgccggtgccggcctgctgctgagcagccggaaaccgtcaacccatcagtag

SEQ ID NO: 532974 - DNA, 669 bp, Stenotrophomonas maltophilia
atggttaggcgcccactttccaataagctttccaagacggtcgtttggatcggcgcgctcatcgtcgccgcccctccgcttgagaacctactcatttccacaatcctgaaaaagttctttgaaatcgatcttggaatagagacgcccgatctctatacttacattgcaggcacaacggtcatcgccctcgggttgctgaaccacttcgcgtacatctttttgaacttgaaacatgagagggagcagggcgaggcgagagtgtcagagtttagagagctctggacgcggattcacacaatggcagacagcacgcttcgactctcgaatctttacgggggtgcctacagagattcagatcagacgtatctgagcaaggcgcatgaagacgtcacgaaagttcaagagtacgttggtctcaacaagccatttattccatcgcaggacattgtgagcaaatccctggcgctggcccagaattgccgcatggaggctgaggcttttcttggtgtgattgacatgaagaagtgcccctcatcgaactatagtcttgcgcgagcggccaaagaggcttctgatgcaggcgggaagatcgaggtagcctacgaagaattaaaagcaatgattgccgaagagattggtcgcctgaagaatcgcccatcgagctactga

SEQ ID NO: 532975 - DNA, 357 bp, Stenotrophomonas maltophilia
atgcttttgattggcgcccttcggcatctgggtgacatgagctttgaaggcaaggtctgctacgcgcaggcgcctgcatctgtgtcgatggaaaggaggggactgatcgacatagattcctgcctagtacgatttattcacgatacaaatcaccataaagttcaggtcgatgagctggtcgatcatgacttccatgccgagttatcagttgcatggcaggaaatgagctttgatgaagatgatagtgttctgttgattgagggggtggagcggaggacaaagcagaggtgcagcgtgtatctccagtttcagggtgaacaggctttttcgaaacctctgatgtcgcagtcagcctga

SEQ ID NO: 532976 - DNA, 876 bp, Stenotrophomonas maltophilia
atgtctccaaggatcaaagtcctgagcctcgctgcattggccacattggcaggagccgggatctggtatggaacaaaagactcaaactcgcagcccaacggcgtcacggcttcgcaggaagttccggcccaggcggagcaagcttccccgacgccatcgcactctaccgaccgactcgccgcctcgaattcctcacctgactcacccgccaacaggttcgttcgagtgcgtcgtctttctggaagggcctacgccgtcgaagactttgggcaagtcccgagcggcaccgtcgatcaagtcattgcaaaactctcacccttggcattggccggtgatgcggcggcctcgtacgggatcttcctgaagctcaatgaatgcgcaaacatcagtcggcgtgctgctagaggtagcgcgttaggagcctcaccacaagtcgccgcagcatgcgcggacctttcagtagacaacgaaatttcttcgggcaaatggctatcgctggctgcagagcaggggaatataggagccaggctcctctacgccgccgattctgaatcggcagtcggcggtcccgcagaaatgctgcggaacccggatcgagtgaaggaatacaaagagacagccgttggctatctaaacgacttggcttctcaaggcagcgttgatgcgctgctgcagcttgggaatgcctaccacgctggtgtactcatcgacgaagaccctatcacgagcagagcctacttcgaagctgttcgtcttgcggacccaaaggtggtgccagatcagcaagtaagcgctttggacaaaagactgagcgcacaacaactatcccaagcactgagaaaaggaaatcaaatacatgattcgtgctgccgctaa

SEQ ID NO: 532977 - DNA, 471 bp, Stenotrophomonas maltophilia
atgtaccaactcactgaagacccggatgtgattcgctgcgtcgagaccggcgcgttcattccgcgcggtcactacctatggccgaccgaatggctggatcagaacacgccgctgacggcatctgcgccgggccttggatttgagctgcacacgccggcgcactaccgctacatccgtgatcaagcattcgcctggatgcgcgccgaggcggtagagcgcggctacgacggcatcgagtcgtgcgccagctactacaacagcggcgtggcccgataccgcgcggaggcgcgggcgatggttgcatggtgcgatgctgtgaagcagtcgctggagcagctggtgctggcgccgccggcaagcatcgagacgtgggagcaggtgcgcgcgctgttgctgcaaccggggacattcgcctggccggagaaggcggagctgccgctggagacggcgagcccgttcgttgttctctaa

SEQ ID NO: 532978 - DNA, 261 bp, Stenotrophomonas maltophilia
atgagccactcggtcaacctggaaaagaccaaggcaatctcaatccccggatcgccacttgtggtggcatccggccaggatctggacgtcgcactgagcaaggccaggcttctcaccgatcatgtacaaggcttgccgtggcaaggcatgcgagatgccgatggcaaggacgtctcgttcggattcgacgaggtcgtgacgatggattttcttctcgatatcgcgaccggcctgtatcgagccgcaggagccgaagcatga

SEQ ID NO: 532979 - DNA, 309 bp, Stenotrophomonas maltophilia
atgaatccggtttattcgcaatcgatggtcgagcccatcagcgttcaagaacgctcagcaaccgaaatcgcactgcgttacaaggtccagcctgaaagcagccactactccggcggcgtggattacgagcgcgtcggcaacacgttgcgcgtggtcattggacgctgcgcggtgggtgccccctgcgaacccatggccaaatcggtgatcccactggatgacacgtggcaggcggaagtgcacctcccctacgacggatcacgtgtggtcgttgtgcattccgacggcgagaaacaggtctatccctga

SEQ ID NO: 532980 - DNA, 906 bp, Stenotrophomonas maltophilia
atgtctgatcaagggaagcaaccgcaagagcgcgtggtactgggcatccatacgaacacggagcccggggcgccccttatagatgggcacgcctggctcaccatcacccgtggcggcaagaccgaggcctacgggctctggcccgcggaccatccgcgtttcagcgcggagacgacgccgcccgccaccgacattcgtcgcggcatcgagagcaacttcgacgcaacagcaagccgatattactctttgtcgaccgaacagttgcgcgagttcgaggcggcattgcgtgagaaggtaacttggggctatacgaatacttgtgcgtcatgggctagcgatacggcgtatcgcgttaccggtgagcgcgtgaacgcgtccgagattggtgggctaactgacacgccacgggaaatccgcgaaagcatcgacgcacttgagcgccagcaaaacacgtcccgtgatgcaccccgtgaacctgtcgacgcaccgaagcaacgtggctcgtcatctagctcactttccatggaagaagatcgggcgatgctgcagtccatccgcgagcgcgttgctggcatcgaccagcagcacggccgtgagtttgacccaaccagcgaacgcctctctgccagtctgctggcaacggccaagagcagcggcctggaacgcgtcgaccacgtcgtgctgggcaatccccctgccaacggctctgggcagcgcatgttcgtcgtgcaaggcgagctcgacaacccagcacacctgcgcgcatcagtggcggtcagcgaagcgatcaacaccccagtagagcactcgcttgccaaggtcgagcagctctcgctggctcagcagcaggtggcccagcaggaccacgcccaggagcagacgcgggccgcgatgcgcatggggtag

SEQ ID NO: 532981 - DNA, 762 bp, Stenotrophomonas maltophilia
atgcttgattctgtgatcggttacgcgactccacgcttgaatgtgcaagcgtcctcaacgataaaggcggcatgtggcactgccgcataccggaccagggatgatccgaagcatgacgcggggcacagctccgcgttctcgttcccgccggcgctgtgttcgtccaggaaggagaacagggatgttggaacgactgaagaccatttcgtgtgccgtgctggcgatcgttgccgctggctgcattgcgccggctgttgtacaggcgcaggaaagcaagatcacctggcgtatttcgcagcccggcggcaattcgacgcagtacaagacccagcagcaggcggtgcaggcgatcaagagccttcccgcaccaagtccattcccgccggagttccagttcggctggcagtctgtggacaagatcaagtcgaaagtcgtggacttgaacggaaacacgtcgatcacctactggatgggaaaagcgcaaccttcggatccagactggacctatctgagcacggcggaatttacgaccgaagaggcgatggtcgcgagctatctcgcgggcgtccaggccgccaatcctgtctgtccgggtgctgctgtgactccacagggagactggttctccggtgtgcccgaaatggagggcgtggtcgagtccaggtattatcagatcacgcatatgattgggcagaacacagccgaatcgccctgcacgccccacgtgggtcaggcggccttcggccgcaagcgccgccttga

SEQ ID NO: 532982 - DNA, 225 bp, Stenotrophomonas maltophilia
atgaacgcgttaatgatttgtgatcggtgcatgacgtggctccgccgggcagcgcaccgtgactctctttcgaggtgctggagccgtcttgccggggccggtggcgggtccgatgcgctgccggacaacccgccggacgagcgcggcaattcgccgatcctgccgtggcgcaacattgatgagctggccgggcagctgcgtgtgctggggttcctgcaccgctga

SEQ ID NO: 532983 - DNA, 558 bp, Stenotrophomonas maltophilia
  misc_feature (356)..(365): n is a, c, g, or t
atgtttggatggtttgctaagaagagcgcgaagacacgggaactcccgagctcatactatgaccaaagtggcacgatcgacgccaatggtcacttgatgacactacttataccaaagttcaaggcgtggatcgctcaatgtccgggcgaagaaaagcagcgcgttgccgcatgtgaacggttgatcgcggccggatcgctcgaagagttgaaggttgcactagaggagggtgctttcgttgattgctataccggctatcataaatctcccacgcctttgacgaacgctgcttgctctggagagcttgatcagatcaagctgcttttgaactatggcgctgatatcaatgacatgannnnnnnnnngagggacttcggagagtcccacctccgcgtttcgaggattttttgcatcgtggacacgtcgctactcggcagtgaatgtgaagcgacgcggataaggctggacacctttggagtatggcttttaatgggtgtgaggggcttctctccttgtcctctcacccagggtgtgtgtgttccagcacacacaccctaa

SEQ ID NO: 532984 - DNA, 771 bp, Stenotrophomonas maltophilia
atgacgacgatagcgaccaacttcatcacgcttcacggcgaagaagagcgtcttcgaggacttgcaatccaggccatagagaacactccagacttgctggtccatctcgaaatcactcatcgagcgatggacgtgctggacatgctccgaaagcacttcactgctaacagcgatgagctggcgattagtcacctaggaattcgggtgttcaacgcctttgcatctgccatcaaactttccctctcgggctactaccaagccggtgtgatggtcatgcgagacgttatcgagacctcggagcttgtcgagcttttccagctcgacaggctacatcttgaacgctggaaggttgcagatcaggcaacgttgatcagggagtttggaccggcaaaggtgcgcaaggagctggacaaagcggcaggcaagggaaagagtcgcagagaagagatctataagaagttctcacactacgccgcgcatccgagcgtagaaggctttgcaatgcttcgcccaaaaggcatggatagcaggtgcggccccttccccgacatcacggctctccgagcggtgttggaagagatgggtgagcttgcagtgcgtgctgggtttgccttcgccatcttcctagacagcaggatcggtgagtgcaacgccgtcaatcataaattcctgcggacagcaatggaattcgctgagcgctatcacggaaaaatctactccgatcaggatcgcctggaagtagatcgactcttcggcgacacgccccaatga

SEQ ID NO: 532985 - DNA, 1311 bp, Stenotrophomonas maltophilia
atgcggtctgctcgaaacgcagggatatccgtgacgggtgacttgcccgattcagttcgcccgttgttccgtggtcaggacgtgtttttcagtggattcatccctgggatttcgggcatcccaaatgttgagcacaagaactcaaagcgcgtcgtgctcaaagcctgctcgttcggcgattcgaacgtctatctgcgaaatgcgctgaacctgctgccggctgctgacatcaacaagatcgaagagtggttggagccgcttttgggagcgatcaagctcaagatcgtgttcgatgagtctaaggacttcgacatccatgcgcacgcagagctaaacggtcgttggacgccgttggagctgcttgggacgggcttcctgcaactgattcagatcttctgctacatcctgctcttcaagcccaaaattttgcttattgacgaacctgatatccatcttcatccaacgattcaagagaagctggcaagcagtttgttggagatcgcaagagcgcaggagatcaagatcgtcatgtcaacgcactctcctttcatcgtaagaggagcgccggttgacgctaatgtggtctggcttgcagacggtgagatcaaatccgacgataggtctgtggtcgaactggcgctgggttggggggcgttcggtaagcaggtgatcatcgtcagcgaagacgcgaagaacgagctattaaagaagctcattcgacagtggcccgagatcgagcggtctgtgactgttctcccaggccggggctacaagcatctcctgaccaaggctgaggcagtagagctcagggagtcactaggtggcaagttcaaagtcttggttcaccgagaccgcgattcgttgactgacgacgaggcggcgcaattggtggatagttatgcagcagagggcattgccctgtggcttacagaccaatccgacatcgagtctgagttctgcaacccaagcttcctgtcatcgcttactggcgaaacgcttgctacatgtgagggatgggtgaatcacatcatcgcgaacaacaccgtgcccatctcagaccagttcgcaaaacagcgtgtcgcggcgaatcaagagcttcatggagcaggcggtggccctacgaatgcagatgtttgggcggcgctgcaacatcgaccattgaagggtgcgaaagggaagtttgtgatgggtcagttgaagaacagggtccctgggaacgtctactcagaggcgagtgtagaggggcacagcgacttcccggagcttgccccaagcctcaagaacgccattgagctgctcattgcccaatag

SEQ ID NO: 532986 - DNA, 165 bp, Stenotrophomonas maltophilia
atgggcaacatagatgtggtcaactactcggtcctcaacgccagtggtgacgtggtgggcaaggtcgaatacaccgttgacacagcggttaagggcttcaaagtcacgcataaggccgttagaactgacttggaaggtaagactgtcttgcagaaattctggtag

SEQ ID NO: 532987 - DNA, 306 bp, Stenotrophomonas maltophilia
atgcacggtgaactgctgatcgaccgcatgcagcgtgaggtacacctgcacggcgccacggtggacgtgggcaccaccgaattcgaaatcctgtggctgctggccagccagcccgtgcagatcctgtcccgtgaccagatcctgcaggcggtgcgcggtatcggcttcgacggcctggaccgcagcgttgacgtctgcatcggcaagctgcgtcgcaagctcggcgacgatgcgcgcgagccgcggcggatcaagaccgtgtggggccgcggctaccagttcaatccgccggcctggacggcatga

SEQ ID NO: 532988 - DNA, 600 bp, Stenotrophomonas maltophilia
atgttcaacggtaaccaagactccctgccccctcttttctttttcttggagagggtcgtgagggacaaaatctggttcacgtacaaggctcgaataaaagcccacgaacgattggagagaatggatttccattcgcaactccttttggtctggtacgcaattctgagctcgatcctagccattctgagcatcagatatccaactatacttggcgataacaccgacatactgggcgccatactttcaattggcctgctagcaatctcactatctgtaacgaacagggatttcagaggccgtgccatgctgatgcgagggaactacttgcatttgcagaaactttacaacgacatccagccaaccggcccaactctcgcagagcaagatttatacgccggactgctcagggacagcgagaatcatacatcaatggatgacatcttggcgcgggtgttatccactggcctgacaagcagaattcccactaaaattgagtacgcaagaggcatcgcatcaataatacttaggtacatattgataatcagcctctatgccacccctttaattgcagcgtactgcgcaatggatacttgccaatga

SEQ ID NO: 532989 - DNA, 138 bp, Stenotrophomonas maltophilia
atgcgggtctgcagggccgaaggtctcggggccgcgtatttccacggctacctgtacgtcgatcgcgaacagggcggtgcctgcacgcaggacgacaacctcgaacaactcggcgggcgagggacgtgtttccgttga

SEQ ID NO: 532990 - DNA, 1134 bp, Stenotrophomonas maltophilia
atgagccggcgtgtgttgttcgtgttgatgctggtgtgcgcgctggccgtgctgatgccacgggcatgggcgcagtggccgccagagacgcatcccaccgatcagagccgggacatcgtgatgacgtgggaccgctcggccgtgcccggtgacgtggagctgtgggcgccgaggacggtgctggggttcagtcatgacgtggcgatgaagtatgggcagatccatgtggtgtgtgggtcaaattctgattcggagcttggtcgttgtcctactgatgggttgataggtcaggaccttgggaggacgcaaatcatcctgcgtgctgtggagcagcgaaccggccttagggctgagatcggagcagtgggattcatgcagagaatcatgtcgggtcgagtctgcacaagtgatttctggaataggtcagagcgaaatctctatgaagcactttggtttcagtgcccccccaatgatccgatcggaaccggagtccagctgacactgcctcaatcggagatttcgcgtctcgtcgcaggccactggaaggccacgatgcgcctgtacatcaaggccgaccccaccgcagctcctgtagccaccgccacgttcaacttcgatttcaccgtcaccgactacgacgcgatctcgatctacttcccggccttcgacaccgtcgcgccgctggtcaacatggacctgcgctacgaccccatcaagcagatggtgggcggccgcaagcagctggagatgtgcctctacgacggcctcggctcgcagagcgagttcctcggcgtcaccgtgcgcgacagcgggccgcgcccgccacccggcagcgacttcgcggtctggcatcgcgacggcggcagcgacgaccgccagcgcctggactaccacgtcagcctgaactacggcgggcgcgatatccgcatgcggcatggcgtggaagagctgctgcatggcatcgacagcgccgaactgcgcctggtcatgctgcccggtatcagccagccggtctattgcgtgcccacgccgctgacattgctgacaccccccacccctatcgccagcaagcgccccggtctctacgagggcgagctgacggtggaactgcgcgtccccaccgccaaaccctga

SEQ ID NO: 532991 - DNA, 396 bp, Stenotrophomonas maltophilia
atgcgctaccactcgctcaccctgctgatcactttgctgtcagtcgcaccggccatggcccagcaactgccgcacacccctgcgcagagccagccgctgggcccgaccggcggcgccatccgtcagcagcccctggatgccggccgcgtcaccggcagcgtcgatattccgcagccggccggcgaggcacaggtgaccgtgcgctcgctggaacccagcagcgtggttggccagtaccgcatccgcttcagcgaccttgacgtgaatggcgacggtttcatcagccgcgaggaagcacaggccaacccggcgctggccgatgagttcaatgcgttggacgtgaagcgtcgcggcaagctggaccgtgccgacctcgccggctggctggtggattga

SEQ ID NO: 532992 - DNA, 1068 bp, Stenotrophomonas maltophilia
atggcgcccgttactgaaaccggcatcggcctgctgtgcctgtgccggcagggtttcgagcccgagctggccggcgaactgcagttccgtgccggcgaagccggtttcgccggttatgcgcgcacccagcgcaatgacggctacgtgcttttcatgtgcgacgaggccgcggcgctggcaccgcgcctgcgctggcgcgaactgatcttcgcgcggcagaagctggttgtgctcgctgagctgccacagctggatccggccgaccgcatcacgccgatgctggaggtgctggccgatgcgccgcgcttcggcgacctgtgggtggagcatcccgattccgacgctggcaagccgttgtccgggctggcgcgtgccttcggcaacgcgctgcgcccggcgctgcgcaaggccggcaagctcagcgacaagccgaacacccgcctgccgcgcctgcatgtggtgttcgtcgacggtacgcatgccttcgtctgcgtggccgacccggccgacagcgcgccgtgggcactgggcattccgcgcctgaagctgctgcccgaagcgccttcgcgttcggcgctgaagctggacgaagcgctgctgaccctgctgacgccggaagaacgcgagacgctggccaagcccggcatgcgcgcggccgaccttggcgccgccccaggtggctggacctgggtgctcacccggcagcacatgcacgtgctgagcatcgacaatggcccactgcgccagcacgtgctggacaccggcctggtcgagcacctgcgcgccgatggcttccactggcacccggaacaaccgctggactggatggtctgcgacatggtcgagcagccgcgccgcgtcgccgaacgcatggccacctggttccgcgaaggctggtgcaggcatgcgatcttcaatctgaagctgccgatgaagaagcgctgggacgagacccggctgtgcctggacctgttccaggaccaggccggcaagccgctggaggtgcgcgccaagcagctctatcacgatcgtgaagagatcaccgtgctggcctcgccgctgcgctga

SEQ ID NO: 532993 - DNA, 561 bp, Stenotrophomonas maltophilia
atgctgtacgcgcaagttcacctgacccttcccgcctggatccacgaccagatcgacctggatcgtcgatatccgggcgatgaggccaaggtcgcgctggcgatcgagctgtcgcggctgaacgtcgagcacgccagtggcggcccgttcggtgccgtggtgttcggcccggacgacaaggtgatcgccgccggcgtgaaccgggtaatgccgcacgccacttcgctggcgcatgccgagaacatggcttacatgctggcccagcagcgcctgcagaccccgcgcctgaacgcggtgctgtcgccggtcaccctggccaccagctcgcagccgtgctgccagtgctacggcgccaccgtgtgggccggcatcgaccgcctgctgatcggtgccagtgcagccgatgtcgaagaactgactccgtttgacgaaggcccgctgccggccgactgggtcggcgagctcaacaagcgtggcatcgaagtggtgcagggcctgaaccgcgacgccgcgcgcagcgtgctgcgtgcctatggggaaagcgatggcgcccgttactga

SEQ ID NO: 532994 - DNA, 723 bp, Stenotrophomonas maltophilia
atgaccacgacgtccaccgccctcctcccactgctgcagcaggccctgcaggacgccagcgtcgccagccgcatcgacggcaacgcgctgctgctggacagcggactgcgcctgaccccgcatgcgatggccgcacacgcgcgcgacaacggcggctggcagacctccaccgtcatcgaaagccagcatccgctgctgttcgctgacggcctgttcgagtaccagcacgccaacggtacctatgaacaggcatcgctgctggccggcttccaggcctgggcacgggtggacctggtgaccctgcagaccgcgatcggcgccgaagacgcacaggccctgccaatgatgggcctgacctatccggccggcgatgggggccgggaacacgaacgcaccgtggtgctgggtccgctggcgcattaccgcgagcacgaggtggacgccagcacctgcagcgaggacgaccatgggtcctgtccgtgctgcctgttcaccaggagcatggacgccttcgacgagctgctgaaggcgcgcccgttcctggccatccgcctgttcgcctcgcgcgatgccgatggcctgtgcgaggccgattgccgggtcaatggccacgagttcgccgctgccctgccattgctgcgcgcgtatgccgccagctggccgcaggccgggctggagttccgcaagcagtacgtggtgatccgcaccggctcgcccggctga

SEQ ID NO: 532995 - DNA, 654 bp, Stenotrophomonas maltophilia
atgatcaccgccctgtccgccctgctctggttcatctcgcagcatccgctgctgacgttctttgcagcaatggtgttggccgggctggtctcgtggtggcggcgttcgccggtctacgccatcgtggtgtttccgctggcgatgctcaacatcttcctcggcagcttcctcaacgccactttcctcaatgcggtgggcgagcgcggtgaagccgtgatcgtgaaggccgaggaaaccaattccacgctcaacgaacagtacatctggcgttacgaagcgctgttgcgcaccgccgggggccgtgacgtggaggtggtgttccataccaacaccgcctcgctgtggccgctggagaacgccatccgtatccccgcgcaggaccagccgttcgtcgtgaagtacacgccgggcttcccacgcaacttcgtcatcctcaccaacgaatcgccgcacggcatcgcgcaagcccgtgccagcgcgcgcgagcgggtggaggtggcggcgcgcaagctgcacttcagcccgggcaatgccgatttccacgcggagtatcgccgcgaactggaaagctggctgcgcgaccacggcaacgacccgcagcagcagtccgacgcgcagcgctatcgcgccgaacttgacgcgctcgaccgctag

SEQ ID NO: 532996 - DNA, 1749 bp, Stenotrophomonas maltophilia
atgtccgagcacacccccgccagccccgagacccccgccgacagccacgagaagcgcgatttcatccgccagatcgtgcgcgaggacctggccagcggaaagcaccaggcgatcaagacccgcttcccgccggagccgaacggctacctgcacatcggccatgccaagtcgatctgcctgaacttcggcatcgccggcgagttcagcggcgtctgcaacctgcgcttcgatgacaccaacccggccaaggaagatccggagtacgtggccgcgatccaggacgacgtgcgctggctgggcttcagctggaacgaactgcgccacgcctcggactacttccaggcctactacctggccgccgagaagctgatcgaacagggcaaggcctatgtctgcgacctgtcggccgaagaagtgcgtgcctaccgcggcaccctgaccgagccgggtcgcccgtcgccgtggcgcgaccgcagcgtcgaggaaaacctcgacctgttccgccgcatgcgcgccggtgagttccccgatggcgcgcgcaccctgcgcgcgaagatcgacatggccagcggcaacatcaacctgcgcgatccggcgctgtaccgcatcaagcacgtcgagcaccagaacaccggcaacgcgtggccgatctacccgatgtacgacttcgcccatgcgctgggtgattcgatcgagggcatcacccactcgctgtgcacgctggaattcgaagaccaccgcccgctgtacgactggtgcgtggacaacgtcgatttcgcccatgacgacgcgctgacccagcccctggtcgatgccgggttgccacgcgaagcggccaagccgcgccagatcgagttctcgcgcctgaacatcaactacacggtgatgagcaagcgcaagctgatggcgctggtcaccgaacagctggtggacggctgggaagacccgcgcatgccgaccctgcagggcctgcgccgccgcggctacaccccggccgcgatgcgcctgttcgccgagcgcgtgggcatcagcaagcagaattcgctgatcgacttcagcgtgctggaaggcgcactgcgcgaggacctcgacagcgccgcaccacgccgcatggcggtggtcgatccggtcaagctggtgctgaccaaccttccggaaggccacgaagaactgctgaccttcagcaaccacccgaaggacgagagcttcggcagccgcgaagttccgttcgcccgcgaagtgtggatcgatcgcgaggacttcgccgaagtaccgccgaagggctggaagcgcctggtaccgggcggcgaagtgcgcctgcgtggcgccggcatcatccgctgcgacgaagtgatcaaggatgccgacggcaccatcaccgaactgcgcggctggctcgatccggaatcgcgtccgggcatggaaggcgccaaccgcaaggtcaagggcaccatccactgggtcagcgccgtgcacggcgtgccggccgagatccgcctgtacgaccgcctgttctcggtgccgaacccggatgacgaatcggaaggcaagacctaccgcgactacctgaacccggaatcgcgccgtaccgtcaccggctatgtcgagccggccgcagccagcgccgcaccggagcagtcgttccagttcgagcgcaccggctatttcgtcgccgaccgccgcgatcacaccgaagccaatccggtgttcaaccgcagcgtgaccctgcgcgacacctggtcggcctga

SEQ ID NO: 532997 - DNA, 429 bp, Stenotrophomonas maltophilia
atgaagctgtatctaatgttcctaccgctgtcgctaatcattttttttatggctgaaaacgtaacggacacagatcagatcgaagttcaaagcggaccatcacccaagtttcttgaacagatgaagcgcgagctgccgagactcagattacaaacgaagcaagcttttgaagagaacttgattgtcagcggttacgctgaaaagcaccccgagaattcgttgtgtgtcagtgcgtcgctcgatagcaaacgtctggcgagagaggcagccgctgactacttcctggctagtgcatatttcgagggggccgctgataggctagccaagctcaggcacgggtttgctaactcccagcgatctattgatgcctctcgtatgtgcatcgaagccaacagctcagacaactattacacaacaggcaagaagtga

SEQ ID NO: 532998 - DNA, 198 bp, Stenotrophomonas maltophilia
atgaagaacgtcccatatccatttttgcttacagccgtgttgttgagcttcgtcaccatgctcgtgttctggccgaactatggagcgaccggcgctcagctctctgcatacatggcctcagctgctcttgcactggctctgtgcttgatgcgcttgaagaagatcttggtggcagagcgagtaaaggccaagcgatga

SEQ ID NO: 532999 - DNA, 507 bp, Stenotrophomonas maltophilia
atgagctttcttaccaagttctccaacatcttgaaccagcaaaacaaggaagctgtggaccaggggctcgatagcatccgtggtgaccaagtcgctcaccaggctgaccgggcccgggactatcggggacaggcccgcactgcacagttcgagaacgtgcagcttggcatcaacttgggcaacgccacgagcgagcttgaagtcaccaagaaggcgctcttgaagtccaagtgcgaaactgtccgaatgcaggggttcgttgagagctacgcagcggcgatgtgtgtcatgaaggatgtcattgaagaccttcgtcgcgatgagtccgaactccgtgggcttgatgatacggcttttgcccaaatgctcaacgacgcggtcgagcagatgcggatgtcagccgaaggaaagaaggttggccgagatcgcgttttccattttgtcgaaggctgtgagttcaccaatcctgacggtggctttatttttgagtatcctcatttcatctaa

SEQ ID NO: 533000 - DNA, 975 bp, Stenotrophomonas maltophilia
atgaccctgcgttacctgcccctgcgcaccgccctgctgctggccctgtccgccctgccactggccgcgctggccgaagccacctcgcccgcgcccacccagcaggtgcccggcgtctaccaccagcgcgtcggtgcgctgcaggtcaccgccctgttcgacggcgtggtcgcgctgggccggcaggaagtggtcgacgtgccgccgacactggtcagccgcctgttggaaggccgctacgtgcccgaagacaagaagggcctgcagaccgcgatcaacgccttcctggtgcgccagggcaaccacctgaccctggtcgataccggtaccgcgcagtgcttcggccccggcctgggccaggtgctgggtaacctgcgcgcctccggcgtggacccggccgaggtggacgaggtgctgctgacccacgcccatccggaccacctgtgcggggtgctcgatgcgcagggcaagccggcctacccgaatgccaccgtgtggctgtccaaggccgatgccgactactggctcaacccggccagcgaggcttctgcgccgaagggtgtgcgcttcgccttcccgctggcgcgcaacgcggtggcgccgtaccaggccagtggccacctgcgcacgttcaaccccggcgatgccctgcccggcggcgcggtggcgatggacacccatggccacacccccggccacgtctcctaccggttcgacagccagggccagtcactgctggtgtggggcgacgtgctgcacttccatgcggtgcagttcgcgcacccggaggccgcgttcgaggccgattcggaccgcaaggcggccatcgccagccgtcgcgggttgctgcagcaggccaccgccaacggctggtgggtggccggtgcgcacctgccgttcccgggcctgggccacgtccgcagcgaaggccaggcctacgcctgggtgccggcggagtattcgccgttgaactga

SEQ ID NO: 533001 - DNA, 786 bp, Stenotrophomonas maltophilia
atgagtatcagtgattacgaacgaagaaaactgttggaaaaagctgcaaagcttaaagctgaaaaagagggtggatcatcttctccaagtcctcttaacaagcagcaagttcaagatcggaagatggatcagcgcctggaacagacacaggccgcagccaaagcaactgcacaagccacgagcaaatttgccaaagagcttgcggccaagactgccaagcttgcccaagcgaaggttgacgcttggaagcaagcacaacatgcaaagcgagcaaagaaggaagaggtcaagcaaatcgagagtgctaagcctgatcaggtggaacctaacccggccatcgagagcacacctgttgtccacaccaaagcgctatcgaagcccactttcaagatgctggcttccatagcagccttcaccgctctttcaggagcaggtgcatggttctggactcagcacgagagcgagaagacccctgagctgcaccaggtcgctgtgccttccacactgcctgttgcgccagctcctcaggtccaggaagcgcccaaagcttctgagcccgtccagatcatagagcctgttcaaacgcccattgtcgaggaaatgccaaagtcggttgaacccaagccccagaaggtggaaggatcacctgcacccaacgcggttgttcgcgcacccaaaaaacgatcagagttgcgacaacagactgaacaacccaacgcccaaaaaaatgattgggtagacaaagccaacgatgatctcgatcacttcgcagaacatttaaagtaa

SEQ ID NO: 533002 - DNA, 1071 bp, Stenotrophomonas maltophilia
atggagacagcagacaaaattgggatcgagcaagtgaacgaagcgaagcaaagttcgcttgatgatccactgacgaatttcagcaaaaccatttcacaattatcatcacgccaatcattccatctgccagcaaagcttcgtgagcagttgagatcaatgcagacctcttgcccgatctgcgcgtgtgacttctcccagcaatcatcaatcatcgttgctcagatcgttcctgttgagctggggggaccggatgacttctcgaactgcttcctttgctgtgagcgctgcaatcgctggcgcggcacttcagatctgctcagccttggcgaaccgttctgcagcccaaccgcgtccccacccgttccttcgcacggccgcgccctaggcttttctccaaccgacctggtgcagcggcgtctggagttgctagctcgctctgccaaccactggacgccccacacccgcaattcaatgaagagcacagtgttgaagcagctggccaagcgttgggctgagccgcgctttcgtgtcttcgcacaccactcttctgacctggccctgatcggcttcggggcgcgctcaggtgacgctcagagcttgggtgctgctcgtgtgctaaccaagttccagagtgtccgcctagtgcgactgggagaagctgtgagcgtctaccagataaatcaagagcacttcctacccttgatctggtcaatcatcgagctcaacgcgctggtcgtgtcggtccgcgttcctggcaaagacgcactggctcccggtagcgagtggcaggacttctggtcggaccatgtgcgttcagtcgctgcactcagatctcgcctccggcctgatcatcccagtaagttcggtgagctcgcccgctgccctgacgcaagacgggcgctgtctgacaagcctgacgcactgcggaagcgtcggaaaagtgccgcgagggtagagcgaaaccgcagccagcggctcgctctctatcaccaaaagcgcatcgaggaggcttgccagaacagcgcttacgccgtcctggaagctcgcctttcctcactccaacccagctga

SEQ ID NO: 533003 - DNA, 288 bp, Stenotrophomonas maltophilia
atgagttttattgatttgactgagttgcagtccgcagatttcagtgtcctgatgcactacgatttggcaagcctcattcagcgttttcttccgcaggatgttgaaattgaggatgcttattgcgaaatcctgcgtcatgctaaatgggcgatttgcgtgggggtgttgcgcacccgaaaaattgtaaatgtcatcatcgggtttgatttttttgggcactcaattcgtgttgaagttcacctctccgcgtgtgggatcatcttggatgtcgcggaggatgctcaatga

SEQ ID NO: 533004 - DNA, 819 bp, Stenotrophomonas maltophilia
atgacgattgatgcgctggaaagcctaagtgaaagcgagctctttgatcgagctttgcaggaaatgtcgaagtgccctggatatccgaagattggcgcagtcatatccaaaggtggagtggtgctatcaacaggcttccgtggggaggtggccggtatccatgccgaacgagttgccattgagaagttgagtgcggatcaactcaatggggctaagatccatacaacactcgagccctgcgttgagattagtgccgaacaacccaagaaatcatgctgtgacctaatcctggaatcaggaatatcgacggtcagcatcggtgttctagatccaaatggtcgtatttacgcaaagggggtcaactttcttcgccatggcggaataaatattgaggttttccctattgaaatgcgtcagagaattgaagctgcgaccttttccttcgacgactttagtaaggcgattggtgatgggcggcgccgaatccggtcggtaaaaaacgggaagaagttcgaagttcagttttcgatagacgatcaaagaaagattagctttcgtgtcagtcctctctccatgccactcgaccgcattgatcttgtgtccgacaatgactcagtgcgcttagcgccggatatcacaaagtttggtgatatccctgatccaatgctctaccaggacccgtcccattttgcgagacttggggtgggggagatagcggtcattgctaaagccaacgctaccatggcactgctcgtgaagatcttagatattagcagcactgatatctttattcagtgggaagtgagagacattccgtga

SEQ ID NO: 533005 - DNA, 1053 bp, Stenotrophomonas maltophilia
atggtaggtgtagtcggtgaccacgccattggcatccttgaccgacaacggccgcccgagtgcgtcgtaggccaaggtctcgaccgtctggcccagcgcattggtcacactgcgcaggtcacccttgcgataactgcaggcaccattggtcgcgcatcccgcgtcgtccgcggtgtagtaggcataggtggagatatccgccacatcactgcgtgggccatccacgctacgcagcagtcccaccagcgggcactccggcccttcggcctcacagtaggtctgcgtggtgatgcgggtatcaccggtcaccctgtcgcgcacggtgatggtggttggctggaggcgcgcattgcgtgcgatgcgaatctcacggttaccgatggcctgctggaccagccgattgctgtccatggccacgtgcgtttcgctggtgcgctggtccggagtaccggccgcttcggtggtggtggtcacactaacagctcctgcggcagcgtcgctggcctcggcataggcgtagctggtgacgacaccacggcgatcggtcaccgactgcagccgacgccggaaatcggtcccctcgggcagataggcgcgagtgatgctgccgttgctttcggtgatgccattgaccttgcgcggaaggccgctggtaccgctggcggtcaaggcgtaggtgctctgcttgcccagtgcgtcggtgacgatggtggtgcctgccggggtgtactccaggcgcacgccatcaatgcctacgtcggcctgactgcagtcgccggagtgacggctgcaggtgacccgtcccttggcgtcgtagccgtaccaactgtagcgctggctgccttcagcggtaatgccggtcaggtagccggggaaacgggcgtcttcatagtggtatgtacggctggcgccgtctgcataggtcgcagtggtcagctcgccagcaggggagtacgtgtagctgaccacaggctggccggcaaccaccaaggccgagatcagcgaatcgtcgcccggcgcgaggtactggacatcaacgcgtcgaccggttga

SEQ ID NO: 533006 - DNA, 705 bp, Stenotrophomonas maltophilia; identical to SEQ ID NO: 328275

SEQ ID NO: 533007 - DNA, 834 bp, Stenotrophomonas maltophilia
gtggcgctgatcaacgtgccgagcgccggcgtgccggaactggcctacgtgcagccggaccatctgggcacgccgcgcgtggtgatcgatccggtgcgtgatgtggcgatctgggagtggagcaacaagagcgaagtgttcggcaaccagattccgagtgccgatccggatggggatggtgtggcgttcgagctggcgttgcgcttgcccggccagcaggccacggatgcgagcgggtcgttctacaactaccagcgggagtacgacccggcagtggggcggtattcgcagagtgatccgattgggttggaagcaggtgtgtcgacatactcatatgccgagtcgaatccgaactcaaatctggatgcgttgggtttggagtctgggcagttccaattcggaaagtatcgaatgaagcagcctgaggcgctgccagcgacagacatcggtgatgcgctcgtggcgggaagaatactttcaagttataactcggagatgaagtcgaggagcataaccggttcagatcagttctatcattgcttggcggcttgtcgcgcgacccaggtaacaagtaaccccagagtcgtattggagctaatggcaatgaaagaggtgaaggactattatgcaggccgggtcggcctctacggggatggtcgccgaagggggcattcagagatgcagatagataattatggagacatggccgcaaatcgccaaggagccgcgtgtgagttgggtgaagattgtgctaggcgttgtgccagctatgtcccggtatcctctcgttttcttctgaagaattacatcccggagtggaagggtgaagattaa

SEQ ID NO: 533008 - DNA, 2727 bp, Stenotrophomonas maltophilia
atgtccgcctcccacaaggcgttgcgcccgggtccgctggtgctcgcgctgtcgtccctgatgctggtctcgctgccggccttcgcgcaggaaagcgcacccaccacattgcaggaagtgaaggtcaccggctcgcgcattccccgtgccagtgtcgaggggccctcgccggtgacggtgatcagccgcgagcagatcgatgcgcagggctaccgcaatgccttcgacgcgctgagcgcgctgaccgagaacaccggcaacgtgcagggcgaggacttcggcaatacgttcacgccggccgccaacaccatcaacctgcgtggactgggtccgaaccgcacgctggtgctggtcaacggccgccgccaggccgactacccgctggcctacgagggctcggtgaacgtggtcaacctcgccaacattcccagcgccctgatcgagcgcatcgaggtgctcgctgcgggtgcgtcggcggtgtatggctccgatgccatcgccggcgtggtcaacatcatcctcaaggaccgctttgaaggcgtggacgtgaacgtgcgcgccggcggcacccagcagggcgggggtgacaaccagcgcgcgcaggtggtcggtggcagttccagggagcgttgggatgcgctgttcggcttcgagttcgacgtgcgcaaggcgatccacgcgcgccaacgcgacttcatggattcactggacgatgatccggccggcaaggcgccgcaggcgaccgcgatcgcctatcgccgcaatgctgccaccggccgcaacatcgatccgggcgtgagcggctgcgacgcagcgtcgggcatttatggcggcagcgtgttccgtgccaacaacccgcgccagggcgggtactgcggcagcaacgaggccgccgccagctactggaccgtgcagacccagaagcgcaacctcaatggctatggcctgttgaccttccacgtcaacgacaccaccgacctgttcgccgatgtcgccgtgggcagcgcgcgcatctacaacaacacgcgcgcgccgacctggacgtcgtcacgcaactacttctacaaccagaacagcgggaacctggagagctggtaccgccgcttcgcgccggaagaaatcggtggcctgccgcgcaatgccaatcgattcctggagaactcgtggtcgttcaacgtcggcgcacgcggccagatcggcgacagcggctgggactacgaggcggtctacagccggtcgcgctacgagaaccgaacccgtcgcccggtgctgctggccagcatcaacgagtacctgctgggcccgaagctgggcgcgcgcaatggcgtggaggtctatgcgccggacccggtgcgcctgttcaagcccttgaccccgaacgagtacgagggcctgtccgactatcaggaaagtcgcaacgcggcatggctgcagaccttcagcgccagcatcaatggccgcctgttcgcactgccgggcggcgatgctgcgctggccgcagtggtcgagaccggcagccagggctaccgcaaccgcccggacccgcggctgggcaccggcgagttctggaacaccagcgccggtatcggtgccggcggtgatcgcgatcgctatgcggccggcgttgaactgcagttgccgttgctgcaatcgctgaccactacgctggccggccgctacgaccagtaccgcgcaggcggcgagcacatcggcaaggcgacctggagcctcggcgtcgagttccgcccgatcgagagcctgttgatccgcggctctgctgcgaccagcttccgtgcgccggacatgaactacgtgttcgccaccgagacccgcggctacaacccgggcatgaccgattactggcgctgccgtactgcaggccagtcgtacgacaactgcgactacaacggcctgtcgatcgactacagcaaccgtgccaacgcacagctgcagccggaaaccgccaaatcctatgggttcggcgtggtctggtcgccgctgtcggggctggacttcagtgctgactactacgacatccgcatcgacaatgaggtcaccagcctcgacaccagccgtattcttcgtgatgaagccgattgccgcctgggccgcacgttgggtggcgaagcgcgcgatatcggttcaccgctgtgccaggacgcgctgtcgcgggtgatccgcaacccgtccaatgccacggtgcagccggaccaggtaacccgcgtgctgatcaatccgatcaacgcggcctccgaatcggtgcgcggcctggacctgaagggcaactggcgtttcgatgccggccgctatggccgcttcaccacgcgcctggcctacaccgtggtgctggagcacaagtaccggcagttctccgatgatccggagcgtgacatccgcaattcgctggatgattaccagtggcgcagcaaggccaatggcagcatcacctggaaccagggtgactggaccaccacgctgtacggcaatcgtttcggttcactgccgaagaccgatggcagtggccgcatcgcgccgtacatgacctacaacgccagcgtgttccgccagttcggcgagaacctgtcggtgggcgtgatcgtcaacaacgtgcgtgacagccgcccgccggcagacaggaacgggggcggctggccgttctacccggtcggcaactacgacccgtatggccgccagtactggctgcagctagactaccggttccgctga

SEQ ID NO: 533009 - DNA, 912 bp, Stenotrophomonas maltophilia
atgcgcgatggtgttggccagttccgtcagttgcgccgatgtgggcgcacgggtgcggtgcaggcgcggcttgcgctgcggacgctcggtggtgtcctcgtacacgccgtcgagccacagcatgtggaagtggatgttgagattcagcgcgctgccgaagcgctggatcagggtcaccacgccgcattgcgccgtatcccgcggcacgccggcctgatcggcaagccaaccggcgatcacacgatgcacgatgcccagcaccgggctgatggcctcaggcttgctggcgaacaggaagcgcaacgggtacgggaaactcagcacccattgccgcaccggccgcgggccgaacacctcgtccaccagatgccgcgccgactcggccatgcgccgcgccccgcagctcgggcacagcccgcgcttcttgcaggaatacgccaccagcctctcggcacgacagtgctcgcagaccacgcgcaggaagccgtgctcgagcacgccgcagcgcaggtaggtctcgaactcctcgcgcacatactcgggcagcgggcggtcttctacctcacggcgcgcgagaaagtccggccaatgcgcctgcaccagcgcgtacagcagggtgcgctcgggacggtgaggcgcatagcgagccgtgggcagatgcgctgccggcgacgttgcgtgcgccacggcatcctgcagctgcgacacggtcgcggcgaagcgcggcacgaaacactccggtgcagggaatggctgctcaggcttgcgcccgccccggccggttcatatcggccttttccggttttcgtatcggacatcgccgaaaagcagttgctcgaagtcgccgatcagatgttatacaaagctaaaacccaaggccgcaatcaaaccagtgtgttcgccacactgtaa

SEQ ID NO: 533010 - DNA, 663 bp, Stenotrophomonas maltophilia; identical to SEQ ID NO: 54504

SEQ ID NO: 533011 - DNA, 225 bp, Stenotrophomonas maltophilia
atgctgattcagcatggaaatcaggcttggttcgctgaacgcacgcatgcgctgatgctcgctcacccgcatctgcaccagatggcgccgacgctggcagagctcacccagacggcgctgccaagctgctggcgggacgtaacgggtcagcttgagaacgtcggccatgtgagccagaaccatggcatcaatgcgatcggtcttggcctgcttcccggtggctga

SEQ ID NO: 533012 - DNA, 201 bp, Stenotrophomonas maltophilia
atgagctgggcgcaacggctcaagcgggtcttttccatcgacgtcaccacctgcgcccactgcggcggcgcggtgcggatcgtcgccagcatcgaagaccccaaggccattcgcgccatcctcgcccacttcgagaaacacggcgcgctggagcaagcgcactaccggcccgcagcgcgcgccccgccgcccgccgcgtga

SEQ ID NO: 533013 - DNA, 1062 bp, Stenotrophomonas maltophilia
atgcgactgctacaaggccgacgcatcaactctctttgcacatatgaacacgtgtgcctcgtctcgctgaactttcaggaacgaatcaagccagcaaagagcagcgcctctattcgcaatcacccttcccaacttttcagtcaaacaccgcgcgcactccattcctccagggctttccccttggcaggtccggcactgagccatcgtcgtcgtggtcgccgggcgcgattgatacatgatcttcgtcatcaagttcacagcttgagtgtgggacgacatttcggcgatcctgttgatacggaaggagccgcgcttggcgcggccaccccttatgcatcaacgacgattgtcgcgatcgacactggccttttgggcctggccgccgctcgactgagcaggctcagtaccgttcggctgctgctgttgctgcccttcttttccggccaaatcctcgccgccgagatccttcccgtccgtttggctctgctgaccgggatgcttcttatcggcatccgagttgcgactgtcgttctgattctgggaagtgttgttcatgtcttactccgatgcagccatttgctgccatcccacaatggaccccagcgtgttacgcagccgtgcccgattgccaccagtatgaacaagcgccatgaacaggccgccgattggaagggtgtacagtgcagctctaagaggagaagaacatggaacgcaagaggaacaaggattttgttgacgtcgaacgtgaactcacacactggggcttggcattcaactctggtgcgctacccgccattagctttcgctatgaagttgaccctgtcattcggcttgcatgtgacatctacgtcagagacccgcatgggacacgcgcaaattggctgggcgaactcgagggcaggcttgcgtcccgatccagtctccgcggtcaccctggcgcagcggagatggcaggccagtgctggacgcgcctctcttgtgcctaggaacgttcctttcgcgacgctgcgtcgttcccttctcgcatcagctggtcattcaacacgtggactatggacatga

SEQ ID NO: 533014 - DNA, 5100 bp, Stenotrophomonas maltophilia
atgggtctgatgcacacgcctaccgatgccggccgcctgatcatcaccccgcatccggtgatgctggatggccagcgcaacctgcaggccgacctgcgcccaggcgagagcctctatgccttccttgcgcgccatgtggaaggtctggacgggcaggcgtggctcgtaaccatcggcggccggtcggttgagcggcatctgtggagcaacgtttacccgaagcatggccaggtgatcgagatccggggcatggtcggtaagagcgcgatccggctggtggcccaggtcgcactggcttacttcaccttgggcggtgcagccattgcaggtttcagcatcggcacctccacggtgttgggtacgacgcttgcgcgcgcggctgtctacgccgccggcagcctgctgatcaacaaggtgctgggccctaagctgcccagcgctgccgcctcggctccggccgacacactcttctccatttcggcgccccggaatcggatgcgtgcctatgagccgctgtcgttcgttctcggtacggtgcgcatcgcgccggacgtggccagcaagccctacatgaactatgagggtgacgagcagtacctgtcgctggtgctgacgccggggctcaacgttgcccgcgtggacgagctgtacaacggtgacgccctgctgagcaactacgagggggtgcaggtctggcacagcggcttccccggcatgccggatgaggccattccgctgtacagcaactctggcagcgtcgacggtggtgtgatcctggacaccagcagcgaccccaagcacacgcccagcaactgggttcagcgcaccagctcggcgggtgcgatccggctgcaggtgaacatggatttccgcatcttcgatgcggacaagaagggccgcgactacgagaaccgcgaacagatccagatccagtaccgggctgtgggcgagggtggctggcgtgtgttcggcaactacaccgtggccggtcggacgcagaagtcccgccgtgcgacctatggtcttgatgtgccgcccggtcagtacgaagtgcgagtgcgggctgcgggtctgaacaccgacgggagcaatgcgcaggccagcttcagctggaccaacctggtcagtgtgctgcccgacacggccagttatgacggcatcccgcgcatcggcatccgcatgaaggcctccgggcagctcaacggcagccccgacgagttgcgctgcgtggcgcattccttcccgatcccggtgtggaagggcgacgccatcggctgggtcaccgaagaaagcagcaacccgggcgcacagatcctggcttacgctcgcggcattaagtcgccggcgggcattcggattgccggcatgggcctgcccgacagccagatcgacgtggaggcgctcaaggccttcatgctgcactgcgcggccaatggcttcacttacgactatcaggtggccgagaagcgaaaccaccaggctgtgatggacgcgatcgcgctggccggcttcggccaaatcgcatggccgaagggccgtctggccgtggtgtgggccgctgatgagcagccgctgtcgggcgtggtcaacatggccacgatcaagaaggggcagttccaggtcgagtacaccttggccaacggcgccgacggcatcgaatacagctacctggaccgtgccacgtgggaggcaaagaccctgcgcgtgcctgcgccaggcgtgaccaccatgctcaatccggcacaggtgaccggcgagggcgtcaccagcgaggcgcatgccgcaatgctggcccggtggcatctggcgcagagcctgtaccagtacaagtcgatcagctacagcaccgatatcgagcacctggcctacggccgcatgtcggtgctggcgctgcagcacgacctgacgcaatggggattcggcggtcaggtcctctcggcgtctatggggccggggcgagtcgtgacgctgcagcttgacgtaccggtgcctgcccccgcgcagggcagcgcctacatcggcctgcgcatcccgggcgagcgggtgtaccgcgtgctgcgggtgcgcccgttcaccggagaaagcgacctgctgcagctggccgacccgtggccgaccgatgccgatctgccgggcaacagcgacagtaaccctgcatgggacacgatctggatctacgacttcaagcagacgccgggctaccgcgtgcgagtggtgggcatccaaccggagaacgatctcaagggcgccgcggtcgacgtggtggccgagggcccggagtactggcaatacgtgaagaccggcgagtacatcccgccggagaacggctcccagctgggcacccggccggtggccagtaacctgcggatcaccgagcgccaggtggtacagggcgacacggtgttttccgagctgcaggcctcgttcgatatcaccgggccggtgggcgagatccgcgtgttgtcggacctggaccagaattcggagctggagcaggtcgcctcgaccaccacgcgctcggccacatggcgcattccacgcgcaggcgtatacccgatcaccgtgcggccctacagcccggccgggcaggctggcgtggcggtgacggtgacctatgccacgcacggtgcggacgtaccgccggtgctggttgacctgttcgacgtggaagagcgcagcggcggcgtgcggctttacacctggggctggctgggcgacacgacgcgatcggcggactttgccggcgtcgagatccgctacatgccggggaaggacatgagcccggactggaatgctatgacgccggtaggcgagacgggctaccacacggcgccgttcgaagcggttatccccgagtcgggcgattggacgttcgcctgccgcagcgtgaacacctcgggcgagctctccaccggcatgcgcgtggtggtcaagacgctggggaacaacctcggcgagcagatgcaggagacctgggaagaggcggagagggccaaccagcgggtgggtcaggagatcatcgatcgactggccggcgatctggctgcgatcaacgaggccgtgggcaaggcacgtcagtacaccgacgagcaggtcgccgcacttaacggcatcttggaggacattgtcggcgctgacgaatgggcagccggcacgacctacccagccggcgacttcgtgcgccgtgctgggacgctctaccgggcgctggccgagaacgtggacgtggagccgggcactgacccggcggtgtgggaggccatcggcgattacacctcggtgggcgatgcgctggctgcggccatcagcatgtccaccaagaacgccagcgacattgaggctgaggccagccgcgtggatgccgtggttgcgcggatgccggcgggcgctggcacgctcgccacatctgcgcaggtggccagcgagcagcaggcacgcgccgatgctgactcggccttgggtcagcgcctcgacaccaccagcgcagcgctggacggcaaggcgagcacggccagcgtgaatgcagtcgagcaggccagtgtcagccgagacagcgcgctgggcgaacggatcaatacgaccaatgcggccttggaaggaaaggcctcatccgacgccctgcagcagctgcgcagcgaggtcaccgagctggacggggttgttgatgccaacagccagctgatcaaccaggtgcgtgcatcgcagtccggtggcgtgaattcgctgcgcaatgctgacttcggtatgggtacgtccggctggcagttcgcggtcaatccgtggcaggcggttttgcagaagaacttcgcagggcttgactggacacctgtcggtggcgcccaagccggcttcagcgtcgggggaaggccaggcggtggtgttgcgctggaccacgatgcaaggccagtggtgatcgccggggagaactggatcgcctcggcatatctggcaagccaccgatgctattcgtacctgcagctgatcgcgcttgatgtgacggggcgcgtcatcgatttcgtcagttcaccggtgtcgcgggcgtttggcggcaagctgctcgggcagtgggcacgtgtgcatgcgcgtttccccaacggcctgcccgaaggcaccgttaccgtgattcagcgctggtggacggagggcgcgaacggcgattcgcccttctcatggattacgcagcccatgcttgagaaggcggctcctgggcagacagggccgtcctcctggtccgttagtgctgccggcatggccgaagcgacgcaggcgctgtcggtgcgtgcgacgacgctggagaacggccagtcgatgatgttcgccaaatacacgatggccctggacgtgaacggccattggattggcatgacctcggtcaacaacggtttcgtggggcgggtcgacgtagtcgccgacgtgttcagtgttgtggatcccaacaacaccggtagtacgacgttcgagggcggccgctggatcacccggtccggggcctacatgatggttcacggcaagccgttcggcgtgtccaacgacctgatgatgtggatcggtgtgggttccaacccgggcaatgccagcaaggcgaacggcctgttctggatcgacaaccagggcaacggctacttcggcggcagcctgtcggccggcgtgctcaagaacgctgtgcagaccacttcgaccaacggcaacgccgagatcatcaacgggccgttctccaccttggggcgcgccaagaacgtcgtggtcagctacgacatgaccaagaccgacacggcgaacacgggccgttggaccggggtttccgggccagtgaacgccactatcgcgatctaccggcgggtgggcaatggcgcagagcagttcatcaccaacttcaacgtctcgggtagctacgaggtgctgaacgagcagggtggaccgtcgcagttgacctcgcgcatggcgggctcgcacaccttcaccgacaacaccccgggcaccgagcagttcacctaccgcgccatcatcgtcacccgcaacgtggcaaccggcacgccgagtggcggcccggtcggtgtggctatcaatcagacgctgggcatcatttccgtggagcaatga

SEQ ID NO: 533015 - DNA, 3663 bp, Stenotrophomonas maltophilia
atgacctctactgccgcaaccatcgacgtccagctgcgtgcgaacactgctgcctatcgcgccgagatggtgaactcggcgcgtaccaccacgcagcagcttggcctgatccgtaaggaggcctcccagacagcggtttccatagcgaatctcaacaaggcggcggttggcttcgtaggtttcgaagcagtcaagagtggcgtgtcggcactgctggatgcacagaagtcgatccagcagatccactacggcctgatgggggcaacaggttcggcccaaacagcagacaaggcctatggattcgtcgcgcagacagcgaaggaccttggcctgaacttggaggaggccggaaagagcttcaccagtatgtcggcggctgctacggcgaacggcattgccatgaaggaccagcaagagctgttccggcagctgtcgcgctcggcgacggtgatgcacttgaccagtgagcagatgggtcgggccaccaccgcgctcgggcagtccttcagcaagggcaagttccaggccgaggagctccggcaacagcttggcgaagccatccccggcatcgtgccccgtttcatccaggcggttgccaagatgaacgaaggaactgctcttgccggcaagtccttcgacaagcttctgcaggacggcgacctgagcgtccagaagtacctgccggcgatgatcaaggcgctggaagcctccggcactggagcagaggaggctgcaaaagggctaagcgcagagctgaatcgcctttccactgcatggttcaacttgaaggtcaaggctagcggcggggtgttcagcgacgccgcaatctcgtccgttcgattcatggccgagaatctggagaacgtcgccggtgccgcgacggtggctgcgggtgtcatcgctggccgtctcgtcggcgtcggtgctggcaaggcatatagcgctgtcaacgcaccgatttcagatcggatggctgcatccagccaggcatcggacttggcaagcgtcgcgcgggagcgtgtcaaggaggctgccgcaacagtcaaccaggcaagggagtctgtacgccttaccacgacgtggaaagcccaggctgcagccgcccaggatactgctcggggccagttggccgtggctgcggctgcccacgaagccgcacaacggacgctagaacaccagcagggcgcggcaacactgtctgccaacctgcgggcgcagaaggaggctcaagccgcagtggttgtcgcccaacgcaaccttgagcgagcccagcgcgagtacaacgcagcatctctgtccggaacgcgagcagatgcagcagctaccgcggcgaaggggcggctgatcctggcccaagaggctgctgccgtagcaaccaacaacctcaccgcggcgcgcgggagggaggccgctgcggcgtcggcatccacactcggcggaatgctggctggcggactgcgcagtgctggtagcggcttgttaacgctggctggtggcccatggggcgctgcagcgatcgccattggggcgctcggcatcgcgtatgtggatgcccagaagaaggccgaggcggcaagggctgagttcgatgcccaagtgaagtcgatggacacgcttcgtgtcgccatccaggacacctcagccgaatatgggcggatggatggttccaagtcgattcgctccgctgctgaggactggaaccagtacggcgtggcagtgcgcaaggccgatgccgagatcgagaaggtcaagaaggagattgcagactaccgtcgggatatagaggcggctaaagaccagttggagatggggggcggcgggctgggggttggcttctacaccaccaagctggaggatgcccaggctcgactgcagcagctgtcgaaggagacggaatcgactcgcgttgccttccagacactggagggacagctgaagaagtcgatggatcccgacctgttcgaaagaatgcgccaggccgcgttgaacgcagacgacgtgaagtttgacagccttcgagcaaagctcgacaggacgagtcaggctgcgctcgacgtatatctcgccattcaaaagatcaacagttccggtgacgacgacgtgtggaaccggcggcttgagaggctgaagcgtgaggacggggagctggcggcgtgggatgctgagaggctcaagtcctacgcctcggcaaagaacatcagcctggaaggtatctcgcctgcttcgctggcggatcgcaacggaatggctgcgcagatggctctctccgcgctaaccagggagcaactgcgggactaccgcgctcagcgtgctgaggtggccgagaacatcgcggccgagaaggcatggaaggagtcgaagaaagacaccgccaaggccggtcgtgactcgctgagcgagtccaaggcgcaggagagtcagtacgcctcgatcatggatcggatcaaacggcagattgctctggataaggagcagatgggcctgaccgacgacatgacggcggcgcagaagctccaggtggtcattacgaacgagatggcctcggccaagagcaagctgagcgaggaggagcagaagcgcgtcaaggcgctgcttgacgaggcggttgctcagggtaaagctctggcggcgcaggaatctgcgaagaaggccgcacaggacatgctgcggctccagaaggagctgagtgaggctgccgttacccagcagcaggccaatgcgattgatctggccggcatcggcacgggcagcgagcagatggagcggatgcgccgccagctgcagctcaaggaagagtacgaccgccggctgtcagcgctgaatgaccgtaacgccagtgctaacaacggcaatgggtacaccaaaaaacagtacgcccagcagctggacgagctggacaagtaccacaaggaggcactgcagcgggaggcgcagtatcaggcggatcgccagacttcgatcaccaactggtcgttgggcgcctaccgcgccttcgaggactatcgttcccaggcggccaatgcagcagagctgggcaatcaggcgttcaccaacgcattccagggaatggaggatgcgctggtgaacttcgaaatgaccggtaaggtgaggttcagccagctcgccaactcgatcattgcggacctggctcgcatcgcggccaagcaagccacatcagcgctgttcaacgccggattcaacgcatttgccgggccggttggggcggtacagcgggagcggatccagatccccgggttcgacggtggtggcttcaccggttacggcgggcgactggagccggccggactcgtccacaagggcgagggcgtgctcaaccaggacgacatgcgggcactgggtggcccatccgcattccacgccctgcgcgcggcgttgaggcggggttacgacgctggtggcatcggtggacaggttcccgcccgtgtttcactgagcggccggcagggtggccaaggcgggccgttcgtagagatccacaactacagcggcagcaaggttcaacagcgcgaggaatcgcagacgctgccggatggatcggagatcaggaagctgatcgtccagattggcaacgaggagctcgatggtggttcgtggggccggataggccaggcccgctacgggtggcaggacgcgatgggttga

SEQ ID NO: 533016 - DNA, 291 bp, Stenotrophomonas maltophilia
atgcgccaacataccgctgctttgatgctgatcgtggcgttgccgctctgtggattcggcagctgcagcaggggccagaagccggacatgccgagggtcgtttacgtcacggtggaaaagccggtggcaccgccggcagcgttgaccgagcagtgcccgatcagccgggcacaagaccgaaccgtcgagaaagttgtgtccgcctacaacgccaacatcctgagcctgcagcagtgcaacaagcagctcggcgagatccggcagttgggcgttgaccaggtgaagcggtga

SEQ ID NO: 533017 - DNA, 429 bp, Stenotrophomonas maltophilia
atgctggacccactacgcccctacgccgaccttctaaaggtgctggcggccctggcgctggccggtggtctgtttgtgagcggctgcgagcgcggtgaagaccgccagtccgctagagaccaagccgccatcgcgaaggccgacaaggcgcgcgctgttgctgaggcagatgctgccgagagcctgcgcgctgccaacgcctgcggccaactgctgcaggacgtgaaccgccagacacaggcgtcgatcgacgcagctgctaggcagagggcagctgccgacgaggctgcgcgccggtcagaggcggcggcggccgagagccagcgacgggccgccaccgccgagaaggcgctgcaagcggccaagatcaagccggcatgccggtcccaactggagatggccttatgcgccaacataccgctgctttga

SEQ ID NO: 533018 - DNA, 246 bp, Stenotrophomonas maltophilia
atgagcagaaagtggaacctggggctgtggctggtggactcgctgcgaagaccttctaactcggcccgaagcgagggtgtcgaagcgaagcgcttggcgcacgctgttcagaaggacatggcagaagcggactctgccatgtctttggcgatcagcggtttgcagagtcctttgcaagtgcttcaaacagtggagaccattggtcaccaagagcggctagttctttctgaaacacctgatgtgtaa

SEQ ID NO: 533019 - DNA, 576 bp, Stenotrophomonas maltophilia
atgtggtgcgctaaccatggagtaggtatgaagttcagcgacgaacaacgcctcatcgtgtacatgctgtgcggtatccaacgtgcactgaaggttgagaacgagttggaccccgatttcgtcggaaaggtcaccgcaaccggggaggaatgggctatcggcgagaagtatccatggctactccgcagcgaagagttgtctgagccggactacgtctccgaaactcgcagcatcctgcagaccttcaggacgatcaggcaaagtatcaataatctggatcctgccgatgccgcgcgggttgctagtggcgctgccgccagtattctcgagtttgatgggttcgacggaaacaacgagtctgagcaccttgcggccgcaggcctgattacgcgggatgccggtcgttggcccgagctggcagatctcgtcgtgaattcgcacagctcgacgcttgacaggtacagagtactggtcgagggggtggctgcattccaagctcgtaaccccggtggccttctatcatcggagcaactcctcgagctcgctgagttggtacggcgttcgcgtcagcaatag

SEQ ID NO: 533020 - DNA, 483 bp, Stenotrophomonas maltophilia
atgagttttccagtaaatgcgttccaaacctgtctcatcgagagcctgagcaagggcgagttttttgcgtatgggggtgagtggtatctcgcggtcgactatgtcggtgcaataaacggcccgaaggtgagtgctatccaggtcaccagtacctcaacacctgcggggcagacttgggtggatcctcatcccaaggacaaggtgctgcgtatcgccaagccgtattcaacgatgatctttactgaggcgctcccggctgcaccgacaggccagcccggcatgcctgtcaccgttggcgcggagcccgtcctcatggcaaaactgggttatgacgaggtcctgttcaccatctcggggcacaggcggcctgacaaatccgacctcgtgcgtcccacgcagttctccgattggtcgctatggatcgtgaaggaaggcggtacgaaggtgggcagtaagccgctgtttgaagtggtttcgcagtaa

SEQ ID NO: 533021 - DNA, 384 bp, Stenotrophomonas maltophilia
ttgagcaagcccccatacggagcagttgtcaggggggagtttgtcagcgtccaagacggctatgattttatggccgacgtgttcaagaacaatgagtgcccttggtgccactcaaaggactgggacctgatacttagggccaccgaggtggaggatgatcaggaagacggatacgtcgtctacaccactgagcactatgtgggaacgggtgaggaagatggcatttcggctaggcctccatcacatccttttacttatcccatgttcttggtgatttgtgatagctgcgggttcgctagaacgcactcactgttgtcattgcagcgctggaaggaacgccgcaatgctgacagcgaggagaatcagcgagcggaggatgaatga

SEQ ID NO: 533022 - DNA, 612 bp, Stenotrophomonas maltophilia
atgagccccaatccttatggatcatatactcgacgtggaagatcaagcccgcgcaacacagtggcgcagacgcggctgcttcttgagagcggtatgtacggggaacgcgttgaaaagctatcggcagacggtgagcgcaccagaatgggtgatctgaatcgagaagaagtcaaagcaaggctcgaaactgcggaggcacgcattgccacggcggtcgagtctatgcgagctgatgctgcagaactcaggtctgacctgcacactggtctggaacagatgaaagcccaaggaatggtagctcaggccaacgctgacaagttctatgcgcaagcaggttcaatccttgcggactcaaagacgctcttggcggaaattcgacaggcaggcgagaaaaacagagccgatatgatggggatgggctacaaggcgctgacttggatcttcggcgcagccctcacactgtgcgggctttacttcacgatcaaaaaagctgtgacacctgtgcccgcgccttcgccagcggtatccgccccgaacggctacccgtcagcacaaccaatgccaccaacgcaaatgcaagcgccgccctcgtcgacatcgactgggcaataa

SEQ ID NO: 533023 - DNA, 438 bp, Stenotrophomonas maltophilia
atgcagcccgatctacgtgagcgaatggaggcggctgccaaggagtccggcaggtcgctgaacgcagaaatcgtggcgcgcctggaacagggcggcggtaatgaagaggctgaacaactccgaagtcgcttgcaggcaacggaaaacctcttgtcggcgacaaaccgcatgctctccttgcttgcttactacctggccagatgcgcagagcgcgtgccgcgggatagcgaagacactaagcgcctgatggataacatcgggcttatggccgatggtctccaacgcggtgatttcgcggctggaatagtcccgctgaaagagatcattgaactcggcaaggaactcggaatcatcaatcccgagaccggaaaggcctattccgagcacatcgatccgcagctccagcaaacggaccggaccacccggaagaagcgctga

SEQ ID NO: 533024 - DNA, 171 bp, Stenotrophomonas maltophilia
atgcacgaccgcaagatcaagaccagcgacaccaacccgtttgggctgcgtatgcaccccgtcgtgcgcgaacgcgtccaggcgacagccgacgaactggaacgcagcctcaactggaccatcaaccacctgttgaaacaggccctgggcctcaaggagccgtcttcgtga

SEQ ID NO: 533025 - DNA, 732 bp, Stenotrophomonas maltophilia
gtgacaaacctcgtaaccctcagcggcgacatcgccgtaaccagcaccctgaccatcgccaaaaacaccgacaacgagcacgccagcgtgatcgtgctggttcgcaaatatctggccgacttacaggactttgggcaagtcgatttgaaatcgactcgacctgagcgcggcgggcatcccattgagtacgccgagttgaacgaacagcaggccaccctgctcctgacgtacatgcggaacagcccgatcgtgcgctctttcaagaagtccctggtgagggccttctttgatatggcccagaaggtcaagatgcggtcctccgacccgatggccgtcctcaacgatcccacagcgatgcgcggcctgctccttacctacaccgagaaagtgatcagcctggagcagacggtcgcggaacaggcgccgcaggtagccacgctgaaccggatagctgcagccgatggctccctgtgtatgcgagacgcggccaaggttctgcaggttcgcccggttgatctgcggcgctggctggtggctcatggctgggtctaccaacgtccgggccacagcggctggctcgcctatcaggagaggatccagcaaggggtcatgtgccacaaggtcacgactgtccaacgcgaagacggaaccgacaaggtcgttgagcaagccagggtcacgccgaagggcatcgctcggataggcgccgaactgacgaaggcggccgcatga

SEQ ID NO: 533026 - DNA, 255 bp, Stenotrophomonas maltophilia
atgagtagggaaacgcctacccctgttggaaagccaatcgtcatgaaggtaaaggcgggaaccaccgtctttatcgggaatggcattcaggttcagctgcgcggcgcacacagaaaccgagccgagatccacgtctatgccccatcgaacatggacgtagaccgggctgtgaccttcgagcccgattggaacctcaaaaacaacgacggcccgagcgcgggaacgctcgagccgtctgccaagccgcacccgtaa

SEQ ID NO: 533027 - DNA, 252 bp, Stenotrophomonas maltophilia
gtgtctgacactcccctcaccaaagaagaggcgttcagcctgatcccggtgcaggacaatgcccccatgttcaaggtgtgcgccggtatcgacaccgctcacagcgacttgaaggccagcatctacttcgactacgtgcaacgacagctgagcaacctggatagcgacaggatcaccgacgacgacatgttcgtacttggcgaccttctcgaaatgtgcagggcgctgcgctacgccggaggcgcccaatga

SEQ ID NO: 533028 - DNA, 261 bp, Stenotrophomonas maltophilia
atgagcaactcagacaacgtggcaaatactaaggagatcgcaatctccggatcaccgcttgtggtggcatccgggcaagatctggacgtcgcactgagcaaggccaggcttctcactgatcacgtccaggcactcctctggcaaggcatgcgagatgccgccggcaaggaagtctctttcggatacgacgaggtcgtgacgatggattttcttctcgatatcgcgaccggcctgtatcgggctgcaggagcggaagcatga

SEQ ID NO: 533029 - DNA, 315 bp, Stenotrophomonas maltophilia
atgagcatgtttgatgatctgctggatatgggccacgtggagcaggaaccggacttcctggttgacgccaagggggtgcgatgcgttcgtcgggccattacgttcgggctccatgcgctggtacaagtccagaaggccaaggaagtccagagcgcaacggatggagacggccagtcgtggcccgatgatttgcgtctcgcgatgcctggcgagtccttcgtcgcaagcattggggagctggcagatgcgttgctctggattgagtacgccagccacgtgaaggagatgcgcgatgacgctgcagctgatcgctga

SEQ ID NO: 533030 - DNA, 492 bp, Stenotrophomonas maltophilia
atgacgctgcagctgatcgctgaactgcggtccgccgctgccactcttcacctccctggtggcacgaccaccgaccggatcagcgccgagctgctcgagcgggcggcgcagaaaatagcgctgctgcagcgcgcgccgctgccggcgactaccgtgagcgatctcgtgccaatgaagcaggacggctggtcactggagggctactgcacgtgggcgatccgcgcggccgaacgagcgcatggcattggtggcgaacctccgaacccgccgccacccacctgggccgaggcaccgcacggctacaacttccgagctatggacagcgacggccgctggtactggtttaagaatcgcccctataccgagacgctaggcacccacgacggctgggacagcgacgagagcatccgcgaggctcgcggcctgcacttctaccctgggtgggcaaatacaatggaggcacgaccggaggtggcaaatggccgagcatga

SEQ ID NO: 533031 - DNA, 252 bp, Stenotrophomonas maltophilia
atggccgagcatgaccacaccctcgcagccctcgccgccctaattgaaggcgaccgctggctaaatgcggactcttgtgccgtcctcctaggtttgacgacccaagaaggaaagcccaaccggcgcggcttcctcgaaaggctggcatgccgccctagcttccctcccccacttcaaatcggaaacgagaagaagtggaagagatccgagctcctacgttgggcggatgacgagaggaggagcggcggctag

SEQ ID NO: 533032 - DNA, 300 bp, Stenotrophomonas maltophilia
atgttcagcaacggcgccttcaccaccggcagcccattgcacggcctgtatgccatcggcatcttctcgatcctgaccccgctgctgttccaggtggcactcggtgccgacgcatccccgcgcatggcctgggtggcgccggcgacgtcgctgctgggcatgggctacctgtggctgatgacgtccgggtttgatccgccgccgtaccggggcctgacccagcgcattgcgttgctgccggcgttcggctggtacaccttcgctgcgctggaattgcgccgggtgcatgcacgtcgctga

SEQ ID NO: 533033 - DNA, 1101 bp, Stenotrophomonas maltophilia
atggcgcagacatctctggaaacggctgtacgtgccagcatccaaagccagtgtgcaaagctgctgcagcttcggcgcctttacagatcagcctgcatcgcggtctatgagaatctcgcgcgcgaacagcaccgcaaagcgaagctgactcgccctcggtctgctgatccttccaaggaaaaagcagaagccgctgctcactgccaagctgcactggcggacgccatcctcgccgcaatgtcgtcgcttaccgactactacgcgatgctctgtgcgatacggatcggcattccagagcagaacatcacccttgtgcaacatgactggatcaagcgcccattcctgtcgtcgaaaaaagccgattcagagaaaaaggaacctcgcgatgcattcaaggaattcctggcggcctacaaggaaaagtggaaggagtactccgacacagaccgccccgggttctggcttgagttgcacgcggcatccatcgaggaacgcctgaaaaaactcggcgtaaagctcattcgagaacatgagaagaacctgccgggctggccgctcaagcaggtaagcacctacttccattacatccaaccactcatcagcaatgcgttcacaggtgaagggcttcgatatcagttgtattcggagatcaacaacgtcatcaagcacaacatcaaccagcctccaaggataacggcggagacattcgattcagaccagcactggtacacgtacatcgagatctccgaaagcaatcgcccttttctcaaggaaggcgtcctgcgcaggttgctttccatcgatttcgatcagctcagaacatggttgtcagagcaccagcacgcgcgccctgacatatgtccgattgcacagtacctcggcatcgacgacaggatcacgattgacaccgagaacggcatttccagtcccgaccaggccaccctgtatttcctcatcgacactgtgctcgtcgggaaacgtcgtgatggcattctgatcgaggccggcaagacgctctccggtactgcggcgatgctctgcgacaccgtcttgagaggtcctgccatggaatctcagccagcgcattgctgcgccggctga

SEQ ID NO: 533034 - DNA, 411 bp, Stenotrophomonas maltophilia
atgaaatccaagcgactggttatcacttctgcattccttgccttactgctcggcggctgcgccaccgctccacccggctccaatcttcccgccgaattacagaccgagctcaatgcgcctctctattgcaatgatgctgccgagtgcaaggctatgtgggagagggccacatactttgtcactgaaaatgcaggattcaagctgcagattcacaatgacaccgtcatcgagacatacaaccctacagatgcgtcgccccgacttgcattcaacatcactcgcgagccactgggaaatggccgctatcagataaggacaaaggcatggtgtgcaaatatattcggctgccagcccaatcaatatgaggcaattgcaaaggcgaaacgatatatgcgcacagggcaaaaatga

SEQ ID NO: 533035 - DNA, 240 bp, Stenotrophomonas maltophilia
atgcagaactttacaagcgccctagaaagttttgggcaagaaacaaaagagaagattgacgctgcccgccttgagcttgagcgggtgaaacagctagccatggaactacttggtgaagaaattgatttgatagaggacatcaactttgatcccaatgcgcaagccttctataacgtttctgctccgcccggcgtgcttgaaaaattgcgcaacgcaggtttgctgagagatgacacctga

SEQ ID NO: 533036 - DNA, 396 bp, Stenotrophomonas maltophilia
atgacgcgaaaagccaagaagccgaagggggatgctcacgtacggatctactggtatgaagagcgctgccttgcatggacaaccatgtctcctgacccccgcgccctgctaattgttttgcgcggcctgtatagaccgtcgcagggaaacgttgtatttctttctattagagaggcgatgtctcgtctgaacatcggacagcggcgcgtgcagcgcgccttttgcgaccttatcgagagggagtggataaaggtcgagacgccgggcggattccaacaaaaaacgcgacacgcgaccagctacaggctggccaatgagtctagctgtgcgccgggtgcagtgcctgacaaaggctaccttcgatggagtcctgacggctcccgcgaaaatcggtag

SEQ ID NO: 533037 - DNA, 192 bp, Stenotrophomonas maltophilia
atgataagccctaacgacatcaattgctggatcgtcaagattacggcaataaaatctcgcctcagcctttacgccctctcaactgacagccccttgccggggctggtggaggcttccgataacttggatcaagtcacttgcgacttggaggcagcgcgcgctgcattgctggaggcgaattgtgagcgataa

SEQ ID NO: 533038 - DNA, 1230 bp, Stenotrophomonas maltophilia
atgccaaagaaagcagccgaagggctgacagccatccaaatccctgaattgaggccaggattttattctgagggcaccgttaccgggctctatctacgcgtgacggccaaaggggcaaagagctggattctgcgaatcgtcatcaacggccatcgccgtgacatgggcttgggtggctctccttcagtgaccttggcagatgcaaggaaggcagcccgcaaggcgcgcgaagccgtcgcccttggcgcagaccctgtatcggatagaaaagcgtacaggagtgcgcacaaggccatcccgacattccagtggtgcgctgaacagacgattgccgcaaagcgccccgagtggaagtctgccaagcacgcggcccaatggacgagcacgcttgccgccgatgtctatccctgcatcggtaaggtttccgtggatcagatcgagctgtcgcacatgctggatgtgcttgctcctatttggacggtcaaaaatgaatccgctacccgcctccgtgcgcgtctggaggcggtgctggcttgggcgaccgcttcgggctaccgcagaggcgacaaccccgcgcgctggaaaggcaaccttgatgccgttctagccaagcccagcaaggtagccaaggtaagtcaccacaaagccctgccgattgacgagatgcactgctttgtagcctcactaagattgcagcaaggcatggcagcgcgcgcgctggagttcctcattctgaccgctgcccgttccggcgaagttcggggggctacgtggcatgaaatcgacctaggcggcgctgtgtggacggttcccgcccagcgcatgaaggccagtaaggagcaccgcgtccccctcagcgcgcgggccattgccgtcctcaaggcattgccgcgaatggcaggtacttcgcttgtctttccagctccaaggggcggaacgttgtctgacatgactatctctgctgtcatgcgccggatgcaagtcgatgccgttcctcacggcttccgctccacattccgtgactggtgcagcgagcgaaccaactatccacgcgaggtcgctgagatggcgctcgctcacacgataggcaacaaggttgaggctgcatatcgtcggggggatctattcgctaaacgagtggcactgatgggcgattgggctaggtacgtcgaaacgccgccgcgtgctggaaacgtcatttcaattattggggcatctgtcaatgactaa

SEQ ID NO: 533039 - DNA, 513 bp, Stenotrophomonas maltophilia
atgagaacgacccgcttcgccacgatggaatgcccgacggcgcgggcactggactgcattggcgaatcctggagcctgctgatcctgcgcgacgccttccagggctgccggcgcttcgacgacttccagcgaagcctgggcatccccgccaacaccctcacccgccgcctgaagcacctggtcgacaacagcctgctgcagaagcaggcgtacagcgaacgccctccgcgccatgagtacgtgctgactgccaagggccaggagctgttcccggtgctggtggtgctgttcgactggggcagccgccacctcacccctgaaggcaccgccgtttcgcagatcgaccgcggtagcggcgcgccgctgcaatcgctggtggtcgaccgccgcacccgtacgccgatcaccgtcgatcgcgtcctgctgcagccgggcccggtggcctccgagcaggtcaggcaacgcgccgcacaggtcgaagcgctctggaaagacgtccccctgcccgaatga

SEQ ID NO: 533040 - DNA, 1359 bp, Stenotrophomonas maltophilia
atgaaccccacggtccctgccgccatgaacaccgcctctctctctcccccctatccgctgggctatcgccgcgtcgtggtcaccggcatcggcatgatcacgccactgggcatgaacgctgcgaccagttggcgcaacctgctggacggccacagcggcgtgcgccagatcgatcgcttcgacgccgcacacctgccctgccacgttgccggactgctgccgcgcggcaaccgcgcaagtggcggcttcgatccggccgactgggccgacagcaaagaactcaagaagatggacgacttcatcgtctacgcgctggccgctgcgcatgaagccatccacgatgccggctggttgccgcaggacaacgcgcagcgcgaccgcaccggcgtcatggttggcgccggcatcggcggcctgcccggcatcgaagccaccgcgcgcgtgcttgagcgaacctctgcgcggcgcatctcgccgttcttcatcccctccacgctgatcaacctggccggcgggcatatcgccatccagtacggcttccgtggccctgcgcatgccgccgtgaccgcctgtgcgtcaggggcccacgccatcggcgatgccgcgcggatgatcgcgctggacgacgccgacgtcatgatcgccggcggcaccgaagcagcggtgtgcgaactcggcatcggtgggttctgcgcagcgcgcgcgctgtcgacggccttcaatgacacaccggagcgcgcgtcgcggccctgggatgtggatcgcgatggcttcgtcatgggcgaaggcagcggcatccttgtgctggaggaatacgagcacgcgcgtcggcgtggcgcccacatccatgccgagatcgtcggctatggcatgtccggcgatggctaccacatcgtatcgccgccggaagacggcaacggcgccgcccgcgcgatgcaggccgctctgcgccgcgccggcatcgccccggagcgcatcgattatctgaatgcccatgcgacctcgaccatggccggcgacctggccgagatcgccgccatcaagagcgtgttcggcgcgcacgccaccacaggtgcgatgtcgatctcttcaaccaagtcctcaatgggccacctgctgggcgccgccggcagcgtcgaagccatcctctcgatcctcgcactgcgcgaccaggttgcaccgcccacccgcaacctggacaccgcatcggaggcctgtgccgggctcgacctcaccgcgaatgtgccgcgacatcgccgcattgattacgcgctgtcgaactcgttcggcttcggcggcaccaacgcaagcctggtgttccgcaggctgccggaacaggacatgaccactacggcgtaa

SEQ ID NO: 533041 - DNA, 414 bp, Stenotrophomonas maltophilia
gtgattcaacgtactcgacgatttcaaccgcgagggactggggatcgaggtcgacctgtcgttgccatcggccgggtcatacgatcgctggagcagatcatccaatggcgcggcaggccaagggttattcgctgcgacaacggccctgaatacatcagtggcgcgctgcgggcctgggccgaacgcgaaggcatccggatcgagcacatccagccgggcaagccgcagcagaatgcctacgtcgaacgctacaacagcacagtccgctacgcctggctggccacgacgttgttcgacaccatcaagcaggtgcaggacaaggccacacgctggctatggacgtacaaccacgagcgccccaacatggcgctcggtggcatcacgccatcaatgaaactggcgatggccgcatag

SEQ ID NO: 533042 - DNA, 465 bp, Stenotrophomonas maltophilia
atgaagacatcccgttttaccgacagccagatcatcgccgtactcaagcaggccgagaccggcacgcctgtgccggaactgtgtcgcgagcacggaatcagttcggcgactttttacaagtggcgcagcaaatttggcggcatggacgcatcgctgatgtcccagctcaaagagctgcaggaggagagccggtgcctgaagaagatgtatgccgaaacgcagatgaccgccgaagtactccgcgaggcaatggcaaaaaaaatggtgaggccatctcaacgccgggagatggccaggtgggcggtggcggacaaggcgctgagtatcgggtacgcctgtcatgcgcttgaggtcagtcagacctgctatcgctatcaagccaaagcgagcgaggacaacgccaagattgctgattggcttgtccggctgaccacgacctatcgcggttggggattcggcctgtaa

SEQ ID NO: 533043 - DNA, 762 bp, Stenotrophomonas maltophilia
ttgcgcaagccggcgccggcattcgtctacggatttgcggccggtccttatgtccatgcacggcagcgcaacctgcattactactcggtggatcgttccgaggccgaactgcggcagctgtttgcagctaccggcgacatgcttggcttcttcgccgagcgcgccgggctggcttacgaaggcgactatcagcaggcgctggtagccgaaaccattggtcaggaaatggccggcatggcggtgatgtccgaagcctatggcaaagaggtgctggatgatctcacgcagaccgacctgatcgcccacgaagccgcgcaccaatggtggggcgtgcgcgtgacctgtgctggttgggagcacttctggctgaatgaaggttttgccaatttcatggccgccgcctggctgcagcagtcgcatggcgaggcggcttaccaggcgatggtgcagggctgggagaagcgtatgcaggagcttcgtaccaaaggcgcggatcgtcccttggtgtacccgcaatggatcaagcccagcgcggatgatcgcgcagtggtctacaagaagggcgcctacgtgctgcaccgcttgcgccaggaactgggcgaggaggtgttctggcgcggcttgcgtgagtacacgcaggccaatgatggtcggtcggtggtgactgccgatttccagcaggcgatggagcatgcggcaggccgctcgctgcaggcgttctttgatgcctgggtttatggcgtgggtggcgagctgggctga

SEQ ID NO: 533044 - DNA, 549 bp, Stenotrophomonas maltophilia
atgcagaagttcacggttgccggtgcatgcgcggtagtgtcgttgttgctgtcagaccctgcgaatgcagcgcagctgcgtgcattcgacatccttcattacgccaccactgtggacgaggatatcgctgccggtactctgcatggcgagacctcggtgcgcttcagcgcagttactgccggtgcccgcgaactgcagttggacagcggtgcgttgacgatcgacagcgtgcagcaggacgaggagccggtgccattcgtgctgcgcgatgcagtgctgcatatcaacctgccgaccgcagtgcgtgcgggcgaagtgcaggtgcgttaccacggcaagccgcgattcggcctggagttcgcaccagcacgcgaggaggtctacaccatcttttccaccgcgcagtggatgccctcggtgaatgcccctgacgaacgcgcaaccctggccttggcgctgtggttgccgcagcacctgaaagcgacggcggtgggcgacgccttgccatcacggcagctcgacgatggccgtatcgagcgccgctggtag

SEQ ID NO: 533045 - DNA, 1524 bp, Stenotrophomonas maltophilia
atgaagggcaaccccaagcgcggcttgatggtggcctcggtgatgctggccaccttgatgcaggcgctggacggcaccatcgccaacgttgccttgccggacatgcagggctcgctttcggcgacccaggaccagatcccctgggtgctgaccagctacatcgtcgctgccgccatcgtgatgccggtaactggctggctggccggtcggctgggccgccgacgcctgctgatcatcgcggtgataggcttcgtgctggcctcgctgttgtgcggcatcgccggtggtcttggcgagatggtgttctatcgcatcctgcagggcgtgtttggtgcatcgctggtgcccttgtcacagtccttgctgctggacagtttcccgcgtgaaaagcatggccccgccatggcgatgtggggcatgggcatcatggtggggccgatcctggggccgccgctgggcggctacctgaccgagaatttcagctggcattgggtgttcctgatcaacctgccggtgggcttgctggcgctggccggcatcgttgcgagtgtgccgaaggagccgcagcacaagcgcgcgctggatgcggtcgggctggtgttgctggtggtcggcatcggcgcgctgcagatgttcctggaccgcggccagggcgaggactggttcgacagtttggagatccagattgaagcggtgctggcggtgctggcgttgtacttctatgtgctttggtgggtccggcagcgcgagcgcgccttgctggacctgggcttgttcggcaacgccaacttcgccgtgtgctcggtgatgatcctgatcgtgggcatggtgttgtttgccacgctggcgttgctgccgccgtacctgagcggcctgatgaactacccgacgatgctggtcggcctgctgctggcgccgcgtggactgggcactatgatcagcatgatggcctgtggtcgcctacttggccgggttgatccacgcgcgctgatgttcgtgggcatgtgcttgatgatcgcatcgctgcacggtatgacccagttcgggccaagtaccacgcagcaatcggtggtggtgctggggattctgcagggcttgggcatgggcttggtgttcgtgccgatctcgacggtggcgtattcgacattggctgcgtccaagcggaccgaagcggccggcctttttggcctggtgcgtaacatcggctcgtcggtgggtatctcggtggccatgaccttgttggccagggccagccagatcggccacgccgagattggtgcgcgcatcccgacgttcggcgcggaaacctcgctgctgccggcaagctgggatccgtcaacgctcagcggtgcagcgttgctcaatgccgaagtgtcgcggcaggcctcggccatcgcctacctcaacgattactggatgatgatgtggctgagcgtggcggccatgccgttgctgttgctgatgcgaccggcgagccatcgtgcggcgcctgccgcaggcgccggtgctgccgatgcgcactag

SEQ ID NO: 533046 - DNA, 1086 bp, Stenotrophomonas maltophilia
atgcccagcactgcaaactccaccgccaaagcggtgtcgcctccctctgcaccggccaaacggcgcgttccgctgtggctgtgggcaggccctgtgctggcggtgctggccttcttcggctggcaatggcagcaatcgcagcgcagcgtcgctaccgacaatgcttatgtccgcgccgaaaaaatcctgatcgccccgcaggtggaaggccgcgtggtcgaggtggcggtggcgcagaaccatgcggtcaaacaggggcagttgctgttccgcatcgatccggcgccgctgcagttggccctggccgaagccgaggcgcagctggcccgcatcgacaataccgccaacgccagccgtgccgaggtgcagtccacgtccagcagcatccaggccgcacgcgagaccttggcctgggcacagcgtgacctgctgcgcatgcaggaactggccgcccgccaattggtggcaaagaagatggtggatgacgcacgccatgcggtggcaagtgcgcagagcaacctggtcaacgcgcgggcgctgcaacagcaggcctcggccaacctgaacggcaacgccgccacgccgacccgcgatctgcccgaataccgcgcggcgctggccaagcgcgatcaggcacgcttggacctgatgcatgcagaagtgcgcgcaccggccgatggcgtggtaggcatgcacgacctgcaggccggcgagtatctgagccagggtcagacggcgatgccgctggtcgccagcgcaccgatctgggtggaggccaacttcaaggaaaccgaactgacccatctgcaggtcgggcagcatgccgtgctgcgtgtggatgcctatcccgacgcgcgctggcaagccacggtggcctcgatcagcccggcctcgggcggcgagttcagtgtgttgccggcgcagaatgccaccggcaactgggtcaagatcgtgcagcgcgtgccggtgcgtctggaaatcagccctgacagcctgcacggcgggccgcaactgcgcgctggcatgagtgcggacgtggatgtggaactgaaggatgtgcttgcccccgtcgccgttgtgcactga

SEQ ID NO: 533047 - DNA, 453 bp, Stenotrophomonas maltophilia
atgaacagcactgccgaaacgcccagcctgggctacctgctcgccgatatcagccgggtgatcggccgcgtattcgaccgccgtggcgccccgtccggggtgacccgcgtgcaatggcgggcgatcaaatgcctgcagcaccagcagggccagacccaggttgcgctggccgagctgatggacatggagcccatcgcagtcgggcgtgtgctggatcggctgcagaaaggcggcttcatcgagcgcaaggccgatcccaacgaccgccgctgctggcggctttacctcaccgcgcaatgcgaagcagtaatcgtgacgatggacgcggtggccaagagcctgcgcgaggacagcgtgcgcggtgtggacccgcaggaactggcgaccacgctcaaggtgctggggcagatccgcgaaacattgatcgatcttgatcgcagcccgcgcggctga

SEQ ID NO: 533048 - DNA, 471 bp, Stenotrophomonas maltophilia
atgacactccacttaaccgaatccaaccacgacttgacgtggcaggagcaggagcaggacgtcgaccgtatcgccgtggccttgttcgactttggcgtttttcaggaccgtacgacactaagcaagctgcttccgctgatccttccagcgaggtacaacgcgatcgacagcgaggcgcagaagctgcacaagaaaacgctaaaggaattgaacgaaaagatgctgccggcgttgatcgatcatttgagctcgtggagcgaacttggcctcaagaaacgggatccatttttcggctcctggttcttaagtgtgcctcagctgctcgtcctgcttgatggcgtgagcgagccgacggaattcttgtctcggcttagattcctaagaggtccgacttaccagacctacaacttctacgctgaggtcaagcacggcctgacgctacggacgaagattgctaaaaagtcgcactag

SEQ ID NO: 533049 - DNA, 198 bp, Stenotrophomonas maltophilia
gtgtttctgtataccacggtgcaactatgcatcgtgcatatggtcatgcacagctttaactatgtgtcgtggaagtggcgactagaagtggcggccgacctcaagcgcatctacacctgcgccaccgccgaggaagctgagcaaaggctcaccgagttcgaggcacgctgggacaaggagtacctgccgattggctag

SEQ ID NO: 533050 - DNA, 180 bp, Stenotrophomonas maltophilia
atggggctgcgaaaactaaccaagcaccgcggcgtgtttccgagcgacgaagctctcaccaaactgctctacctcgcgttgcgcaacatcagcaaacgatgggccttacccatccgtgattggaaggcagccctgaaccgatttaccatccagtttgaggggcgactccctcagctgtaa

SEQ ID NO: 533051 - DNA, 1230 bp, Stenotrophomonas maltophilia
atgggtatcgaacgggagtttcagagctacggcgcccagctggtcaatcgtgcgtgggcggtttccgcggtcaccgacgctccgcgcgaggtggtggtgagcatctggcaacacaaaatcgtcgaacgcgacggacggtggatctacgacgattcgctcgcgcggtggaacggcgcgggtaagaacttactcaaggaacacctgagtatggcctaccgcgaaaggttgcgattgcgcgcggtcgtcgccacccaacacaaccgcgccgaacgcgagcgaaatccaagcaaggccccgcgcaacacgttcgaagcacgccccgactgggtgggcggtgtagagctgctggacggtgaccatttcgtgttggtgttcgaccacgtcagcgagacggccaacgcccccactggggcaaagtattggcgagttgccgaagcggtggaagcgatggagggcggcacgctggccgaggtgggcgaatggatagggacctacttcccctcggaccccatcgccgacttaagggccaacctggagcacctgacggtcagctcccccagtcggccccactacaaccacggccgatccgactggcgcaccgatcaagaccacccccacgaccggttgttcaagatcgtggacgccggtcctcccaggcgcacgcgctacgtgcccttcaacccagccgtccacggccacttggaccttcagaagggcaacgacgggaagtgggtggtcctgcccttgatccaggacgaccaaacgcgtgcggaagcgcaaggccaggccgaagcgttcgagcatgcacctcccatcgacaacgagcacgacgcccgggtgtgggccatgcgagccgtcgcacaacgtcgcggccaaccgctctttcgtgctcgcctgctcgacgcctacgatggcaagtgcgccatcaccgcgtgcccagctctggaagtattggaggcggctcatgtgcttccctacaagggggaacacaccaaccgcgtcgacaatggcctgcttcttcgcgctgatcttcacaccctgttcgattgccaactgctctggatcacggccgagaacacggtggtcctagctccggctctcctggccaccgactacgcttctcttcaaggtcggccgcttcgtctgccggtgtccaaatgggaccaccccaacccggctcaccgggccgagcacgcgacggcgtgcaaggcccgccactcgctgcaatag

SEQ ID NO: 533052 - DNA, 423 bp, Stenotrophomonas maltophilia
atggaatacgcggtcgagaaagatccggaactggccataggcagcgccaaggagctggtggagtcgtgctgcaagaccatcctgggcaagattggggtggagataggcaagagcgatgacatgaacgacttggccaaaaaactggccaagagcttggacttggtgcccgaagggatcgatgaccaagccaagggagccgagtgcatcaagcttatcctgagcaacctgaaccaaatcgccggtaacctggccaaccttcgccgcctctacggcaccgggcatggcaaggacggcaagcaccggggtctgcagcctcgacatgcccgcttggcggtggcatctgctgtggcgtttgtggacttcgtcaccgaaacctaccgaaatcggcaggtcaaggcgaaatccacgtcaaccgaacgctga

SEQ ID NO: 533053 - DNA, 357 bp, Stenotrophomonas maltophilia
gtgttcggcgcgttggacgacaccgagtttctaagccgcatctacgagcttcggcggttgccatccaccgatccgcgctacaaggacgccgcgggggacatctaccagcaccgggtcaacaattttgactgggacgattactggatcttcgacgacgaccgattcccgttgctggatggtccggccgataccttcctaaggttcctggcggaaatggtccacccggtggtgaggcctgaccgggaggaggccgccaccatcgttgagcacctcaacgaccaattgcggcaagcggtttggcacctggtcgaagtcgagcggatcgcagggcgggcccggtatgaacccgcccgttga

SEQ ID NO: 533054 - DNA, 192 bp, Stenotrophomonas maltophilia
ttggctaactacaagagacctgaggacctgatcggggagaacggcctgctaaagcagttgaccaagctgctggttgagaaggcgctcgatgcaaagatgaccgagcacttggggcatgagaagcacgagccggtggccaacggtgctggcaacacccgcaacggccgcagtcgcaagactgctcaagggtga

SEQ ID NO: 533055 - DNA, 822 bp, Stenotrophomonas maltophilia
atgtgtcgtctgctcggggttgctcgagccggctattacgcatggcgtgagcatccggtttccgatcgagcccaggaagatgcccgcttgcttcggctgatacgcgcgtcgtttaccgctagccacggcatttactgcgcgccgagggtgttccttgacctgcgggagataggggagacatgtagcaagcaccgtgttgctcgcttgatgcgagagaacgggttgcaggcgttacatgattatcgcatacggcacattgcggcgccgaagcctcatgtcctgattcccaatctgctccagcgtcagttcaacgtatcgcggcccaacgaggtattggctacggatatcacttacatccgcacttgggaggggtggctatatcttgcagtcgtcctcgatcttttctcacgcagagttgttggctgggctgtcaggccgtcgattcatcgagaacttgctcttgaggccgctatgaaagccgtacgcagccgacgtccacgcaaggccttgatccactcggatcaaggctaccaatatgggagtgatgcatggcgacgcttttgcaaaggcaaccatcttgagccaagtatgagcagacgcgccaactactgtgacaacgcggtcgctgattccttcttcagcagtttgaaaaaggagcggatcaagaaacgcatctacccccgtcgggacgtggcgacctcggacatagccgactacatcgacgggttctacaatcccatacgccgccacactcacctcggtggtgtcagccctgacgagttcgaggcaacgcatcaccaatgccgagcaggtgtccactaa

SEQ ID NO: 533056 - DNA, 366 bp, Stenotrophomonas maltophilia
atgacagatgcagatttggccgacgcgcccgcgaacgcggcgctaattgacttgactgtggactcctggaagttcgctaggttgtttacgcgggtaatttctaagttggacgccggggaacaagcccgatacgccaaccagatgcgcttcttccagaagcgaattgacattgccgccgaagtagctggggcccggatcgtgacgatcgagggccaacccttcgagcctggcatggcggcaagtccgctcaacctcgaagacttcgctgacggagacgcgctcttcgtcgatcagatgctggaacccattgtgatgggcaatgacggcgtgcttcgcacgggcaccatgatgctgaggaaactgtaa

SEQ ID NO: 533057 - DNA, 2487 bp, Stenotrophomonas maltophilia
atggcttactacgcgggtatcgaccttggcaccactaacagcgccattgcaacatgggacggttcaaccctgaaactctggaagagttccgagcagaacgacgtcacaccatctgcaatctatttcgaccggcgtggacgctacgtcggcaagcgcgcctatgacattgttccgcaggatcgcagcaagtccgccacgctcttcaagcgactgatgggcaccacgacgccgatcaacataagcggccaggagccagtgacccccgagtggtgttcggccgaaatcctcaaaaccctgttcgcctacctgccagaggaagtacgtagccaagtccagggcaccgtcattaccgtgccggcggcgttcaaccaaatgcagaaggacgctaccttgcaggccgccgaaatggcgggtatcggtgccgtgaccctgatgcaggagccggtcgctgccgtgatgagcgttatgcgggcgcgttcgtccaatggcacgttcatcatctatgacctcggtggcggcacgctagacgtggccattgccgaaggcctggatgggcgtgtcagcctgcaggcccatggtggtatcgaaatgtgcggtgggcgcgactgggatcgcgccatcgtcgccaacatcgtccgcccttggttagagaaaaacttcgtcctgcctgaggatgcaccggccaacccggcgtatcgcaagctgtttgccaagcttgattgggccgcagagaaggccaagatcgagctgtcttcccgcggcgaagccatcatcagtttgtcggaagttgaagtcggtgttcaggaccagagtggtgctgacatctacttggacatcccgctcagcaaggagcagttggacaagctgattgaagacaagctcaaggattcgattgagtccgtgcgtgaaaccatgacaaaggcgcagctcagctctcaggatgtggatcgcgttgtgttcgtcggtggtccaacccaatacaagacggtgcgcgacaaggtcgccttcgagcttggcttgccgggcgcgctggatgtgaacccgatgaccgcggtggccgaaggtgccgccatctttgccgagtcggtggactggggttcccaacgcaaggggcggaaagcatcgcgcggtacggtggcggctggttctgccttggcattgagcttcaattacatcgcccgcacgccggacatcaaatccaagctggtggtgaaggcccagggtacggtcgccgcaggcagcgagtttcaggtcgacagcctggaaacgggttggagttccggccggcaagcgctcaaggacggtgcgtccgtggagttgaccctatcaaaactgggcgagaacgaattcaaggtgttcgtcttcgatccgggtggggcgcccatcgctttggagaacgaccgcgtcaccattgcgcgcacggcggcgacgatcgactcgatcccggcctcgcattcaatcggcattgcatcgctcgtaaaggcgggtggccaaccggtgatgtcatggcttgttcgcgcgggtgatccgttgccaaagaagggctcgatgaagttcttggcgggcgaggccatcaaagcgggctcccagaacagtctggatttcaagatctgggagggcgaaatcgcgtcgcctgtgatcgacaatcgctgggtaggctccctcaagatcccgggtaccgaactagaacagggcgtcattgccaagggtgcagaactgatctgtgagtacgaggtcagcgactcgggcaacgtcacgctggaagtcaccgtgccgtcggtgggtggttcgttcaaaaccggtcacaacctgtattcgcgacaggagtctgggatcgattactccgccgttgggcagcgcgttcacgaagaggccgagcgccaattgtctcggctggatgaattttccgagaaagttgatgacccgcaaattgaaagggcccgcgagaaactggaccaagcgctcgccgcgagtgcagaagacggaaacccggaacagtccaaagaagcgatggatcgggtacaagatgctaagaagctcattgccaagatccgagaggcgaatctcaagaccattcgccaggttgaattggacaatgtcgaggacttcttcgacgaacatgttcgtcaacacgccaagccgtctgaagaaacgcaattcgacaatgccgtgcgcagtgccaagcgcgccattgaaattaacgactcctcgtttgaaaactatgtggacgacctgcggcgcaagaatttcgacattctctggcgccaggattcgttcgtgatggctaggttccaatggcttgccaagtcgcctcactacttcccagatcagcctcagttccgacagttggtggcgatgggccagaaggcggcccaggacgacgatatgcagaagctgcgcgaggtcgtggcgatgatgatgtccgttcgcattagtttgggcggggacgacggcatgtccgaagacgccaacatcatcatggcgtga

SEQ ID NO: 533058 - DNA, 1425 bp, Stenotrophomonas maltophilia
atggcaatcgatccttggcttcctcgcgggttttctcccaaggccggtaccgttttgcagcggtgcctgctcgcagaggatcgctgccagatctatgacacacccaacaacggcagggtgttggttgccgacaccgaactagctgatcagtggcttgaagatggtctgctgactggggcagaacaggatggctttgtctacggcaaccagctttttgcgctggtgtcgggtgggcgaggttatcgattggagccggtggacgaggcggaaacccccgacgatttcacggattgccaagcgttcgccgcggccgtggccgaatcccgcaagctcatcccggacaccggattgcatgacgcggtctacgtcgagcgattgtcgcggttgttgccgtgctacacgccagccccgaagactgacgatgccacggtggtgggtttatggatcacgggaggagtcaatgtctcgatcctctcgacgcgtcgcatgcgctcactggctccatggttgaaggctcgtcaattgaaccaattagccgtggccttgaacctcgtcgagcccgaagtcgaagtgacagacgagcctgtgactgaaagtgtgcccacgcagaagcaggcaggtaaatccaaggctgtggagaaacagccgctgggtgagttcaacttgccgggccgcccacttcttgaagcctttttcaatgagcaggtcatcgacctgatccggaacgaggaacgctacaaggcattggggatcacgtttccaggcgcggtactcctgcatggcccgccgggttgcggtaagaccttcgcggtcgaaaagctcgttaaacacttggattggccctttttctccatcgactccgggagcatcggtagtcccttcatccacgagactggcaagaagatcgccgaggcgttcgcgcaggcttccaaggttgcgcccgcagtggtggtgatcgatgagatcgatgcatacctggccgcacgtgacaacgtggcgggggggcagcatcgggtggaggaggtggccgagttcctgcgaagcatcccgaaggctgtggaggacagggtgttggtcattggtatgaccaatcgcctggatagcttggaccccgccgttgtgcggcgcgggcggttcgatcacatccttgaagtcggcatgccgagcgaaatcgaggtgcactccctgttgacggccaagctggcggacattcctaccgagggcgacatcgacattgcggcgatggccaaggccttagtcggtcgccccttgtccgacgttggtttcattattcgcgaagcctgccgcttggccgccaagtccggtgtcagcaaggtgggtgccacccatatcaagacggccttggatgcctcgccatcgcgtgtgcccaccgaggctaagccccgcaagataggtttcatctaa

SEQ ID NO: 533059 - DNA, 1638 bp, Stenotrophomonas maltophilia
atgattgccagcgataatccattcgccatcctaaaagcatcaactcgggaccgaaaatcccacttgaacgagctggcagatgaggctgccctgcatggcgatcatgatgcggccgttaatgcgcgcaatatcctctccaatcctcgcacccggcttgcagcggaggtggcctggtttccggggttgagccccaagcggatcacgctcactctgaagcacatagcccagggtggcgctcctgcgctggacggcttcaatgcgttgagctgcgcaaactttctcgttgaaaccttggaagcgtcttccaagggcgggccgggggagcttcgggaaggcattgaggcgctggcgtctcacgtcgagaacatcgatgtcgaagatgtgctgcaggcgattaatgatgatcgccaagctgcaggtttgccggctgtaacagatcagtcactgatagatgtggaaatcaatgagcgggtgaaacattacgagcgcacagcgaccgcgctcctggaagacctgccaagcatggacatggtggcggtctatgaaggcctgatttccgatagcaccaatgaaggtgaggatgttggtcatcgccttatcgacgccttgattgacagctatgagctgaaggccagcagtttccttaccgaagaggcgggccggatcaagggtttggtcgagaaggccaaggctgcggccgacaagcacgtctctgaaaagcaggtgcgtgcaagtgtcaacgaaatcatcggtgcattgcggacgtgggatcaggtggctcaacctatccagctcgcttacaagagtcgcggtatgacccacgacgaaagtcaggatttggctttcaccgcgcgtggcctgggcatccatcttttcaacaagcatgattatctggacgacgccaagctcatgagtgaggcgatccaagagctgttttccgaagttgcttcagtcagcgataaggtcgaagaagacattgaggcgctggatgacattgcaaccgagcgtgctgagcggcagaagaacgaggctgaaagtgatgcggaattcgccagggagatcacctataccaccgaattcgggctgattttcaaggataagttccacatctcgcccgaggggtttgactacaagggttcactgatccccctggaccagatcaccggtgttcgatggggtgctgtcaagaaatcgacgaacggcattcctacaggaactgactactattttgcttacggcacgaagacctcgtccgtgctcttgcggcccaatcagcatcaatatcaagccatcattcagcgggcatggcgtgcggtctgcattcgcatcctgttgggttggatggcggattggagcaaggggcgcaaggtgacgatcgctgacgtagacgtgtccgacgatggcttggtgttacgacggggtcggttcttgaaagaagatgagttaaagttctttacatggttcgaggtcagcaagggagcccacaatggggctctgaacttctacggaaagcccgataagaagttcaccacctcgtttagctacaaggatgactggaacgtccatatcctggattttgcaatcgacaagatatgggaaggcaaggcgagcaaattgagcaagatcttcggaaactga

SEQ ID NO: 533060 - DNA, 1353 bp, Stenotrophomonas maltophilia
atgagcgatcccgagaacaaaaaccagggaaaaggatttaagggcctgcagtcgttgggctcagaatcatctgagcctcctgcacccgcggagcacaagccagacccggctgcgttgccgccagcgtgggaagaaggcaccactcaacagaccacacagccgcagccaacccaaagccagactgccgccccgccgtggcgtggctgggtgatagggctagggatcttgggtgccatcgctgcatttttcatttgggctggcaaccaatcctcctctagctcttactattcgccgtcgaccgcaacggactactcatcttcggcgccggtcgagcctcctcccgggccggcgatcacgatgccgccggttggcaatggccgcgtgctgacaagcgatcaaattcggtattgcgtctacgaagatcggcgcattaagggtgccgagcgggccgtcaataactatgaccaaacgtccgtcagtaccttcaacgctatggtggatgattacaacagccgctgtagccatttccagtatcgccaaggcgcattgacgccaattcagatcgaagcggatcagatccaagctcagttggagcaagaggggcgggaccggatgtttaatggtgatgctgccgcggctgacgctgcgcaagctgcagctgacacggcggccgcggctgctgacgctgctgacgcatccgtcaatgctaccttgtcgtcgaacgacagcggcagtcgcaattccggcgatgactactctgatgcagcagcggccgattcgacagagggagcctcgggcggatcggcagcccagggtaactctgcgagcgtggatccagagaaccttcagacttgcctctctggtaattatccgtcgctatgcaaacgatctttgctaactgagtcccagaaggcccaagtcgcggatgcagagcgacgcgagaaccttcagacgtgcttgtcgggcagctatccgtcgctttgcaagcgctcgctattgagtgagtcggagaagctccgagtggcagatgctgagaggagcgagaacttgcggacctgcgtgtcgggcaactacccatcactttgtaaacgatcactcctaactgaagcagagcgaactcaagttaacgaggctgagagacgcgaaaatctccgaacctgccttacagggaattacccgacgctttgcaagagatccttgctaactgacagcgagcgggaccaggttgatgaggcagagctgcgcgagaatcttcgaatctgcctatccggaaattacccatccttatgcaaacgatctcttctcacagacgcagaaaagatccaagtcgcgcgggcggagtcacgcccatga

SEQ ID NO: 533061 - DNA, 690 bp, Stenotrophomonas maltophilia
atggcataccacgcacgcatggcactgctaaccgacatcaaagctcgaagcatcacccccggaagcgcagctctgctacacggcggagttaccggcctgagcctgcttcctccacgtacacggaagggccaaggcaagtgggtctcgcgctacgtaagccttatcactggcaagcggcaaaatgctggcttaggcagctacccgcatgtgggcgtcccacttgccggcaagctggctcgcgcggtgcgcgatcagattgcactgggacaaggccgcctggcgatcaaggagacctcagtggccgcacctatgatgccatccttccaacaggcagaagaacaggtacacgccgaactgaggccagtctggaggaatgctaagcacgcagagcagtggatcaacacacttaaatatcaagttcaactagaagacatcgcggttggccatgcctgcagagacggcggtcaccgtttcttccagcgtgtcgtgcaggcccactccggcgatccgatcgccaatgccaatgtgtatcggctcaaatgggtgtgcggcatcaagcagctccctttactagtttgtagtacagatttgctgggaaagaaagcgggaaatcatgggcgtgactccgcccgcgcgacttggatcttttctgcgtctgtgagaagagatcgtttgcataaggatgggtaa

SEQ ID NO: 533062 - DNA, 372 bp, Stenotrophomonas maltophilia
atgtgggcgtggttcagtagcatctggcagcgcaattctcaggaattcacccaaactcctacggttggagctgcgctgatcgaaatcaacctgcttgagctcaatgttgccgacgcaagcaaccgcgttcaatgctatccgtctgatcttgagactgctcagctagatcagttcctcgcctcggcccaccaattgttagccgagaagccaccgtacaacgcaggcgaagttgcttgggaaccctttggatatcaagcccgttttttaaacaggagcttcgcctccctccgagagcaactcaacacgtctgcgagcaaacccttgagacaaaacccaacgccatccgaaggaagcgtcgaccctgtcgcctaa

SEQ ID NO: 533063 - DNA, 423 bp, Stenotrophomonas maltophilia
atgcaactgacctttggcgacgccgagcaacaaggccgacgcaagcgcacactccgcgagatcttcctgtccgagatggagctggttgtgccgtggaaagtgctgttggcattgatcgagccgcactacccaaagacaggcggcccaagccggcagtcatatcggttggaaacgatcgtgcgcatccacctgctgcagcagtggtacgcattgagcgaccgggcgatggaagaggccttgtgcgatacgccggtgatgcgccagttcattcaaatcggcggactggaagagattcccgatgagaataccatcctcaattttcgacgtcttcttgaggagcatcagctggcggcagcaatgttcaaacagctcaatgcgcaccttgcacgtaagggcatgagctgcgcgccggaaccatcgtag

SEQ ID NO: 533064 - DNA, 201 bp, Stenotrophomonas maltophilia
atgaaggctcatattggcgtttatgagcactccgggctcgtccaccatgcgcattgcacggcagccaacgtcggtgacgtgacccagatgcagcacctgttgcatggccgcgaggaagaggcctacggcgacagtggctacaccggcgcaaagaatcgcggggagcatcaggacatcaaaaacagcgttcttgatagctga

SEQ ID NO: 533065 - DNA, 255 bp, Stenotrophomonas maltophilia
ttgatagctgagaagccttccaagctgcgcgcgatcaggaacaaacgcggcttgaagcatgcacgacgctgggagcacttcaaggccagtgtgcgtgccaaggtcgaacatccgttccgagtggtgaagcgccagtttgattacaccaaggtgcgctatcgaggcctggccaagaacgcggcgcaggtgcttacgctgttcgcgctgtcgaacttgtggatggcgctgcggcagttgctgccgcaggggctgtag

SEQ ID NO: 533066 - DNA, 156 bp, Stenotrophomonas maltophilia
atggacttcgtcagcgacgcactgtttgacggccgccgcttccggatgctgaccgtggttgatcacatcgtcgtggaccagtcgctacacggggaacatgtggccgaggcaatgacaaagttggcatcccgggcgatgatcgccgcgcgctattaa

SEQ ID NO: 533067 - DNA, 978 bp, Stenotrophomonas maltophilia
atgaacgaaaaaaatacgaaaacgtccgagaaaaaactctccctggaaaacctaggtagcgtttacgatccagattttccgagcacccattttttttacgagtacgatggagagcgagaagttctaccagggaagatggtatctcatgccattctgctctggcacgaacaaatgctcgcaaatccccttgacgatactagccacctttgggaatttgcggcgtcgttgttggatcaggatgagctgccggcgatgtgttcaaggctcgaatggctgcgcttccaagtcgtcattgggggactgacgcccgactcatggaagagctcggacccgtatccctacaagggaatgctaatcgcagcgctttatatccaagaagcacgtcgcctttgtgaggaagaagatcccactcaccggctgtggcatgtaatttcaatggcctactacaatcttggactaaactcgcgcctgagtgcgaagaagacctttgcctactactccgtaaaggacaaagccgaagactcggaggaccgccgagtctatgtactcgaggttctaaaaagactgcagggcaacccaaaaatcaccagtatcgagaaagccaaggatgcagttatcgacttcatatgcacccacaagaacaaagacggtgaactcgcactccttgctgcatttgagaagcttgatcgctatgtcccagagggcaacaagcacaacaaagataacaacgcaatggaccgcctgaggaatacgctcgacgactgggctcgcccgaatgggccttatccacagatggcagaagccttcgctgccttccgacgcaagacatccaagacagcctcctctccgccctcagctccacgaagtactcaagaaaacatcgagatctctaccaaagagttccatacaagaatcgtgcttactggctccacagagtttgaacgcatactacatttctctaatgacaacgaaaagtga

SEQ ID NO: 533068 - DNA, 384 bp, Stenotrophomonas maltophilia
atgctgtctaactcaaattctccgtccaaagcgtcgaccctgacttcccgtgcaacgcaccgcggcgccgcgtcgctgcctgatgacaatgccagggagctactcgagcgtttcaaggaaatcctggacacctcgcctcatcgcttgtgggagagcaatcgcgctatccgtttgcccgaggtcctgcacttgctcggcattggtaagagtacctggtacgagcgcttgaatcgcaattccgccaactacgatccgtctgcgccgaaaccgttcaagttgggtagcagcgtccgttcaccttccgtctggtggcattcggagatccaggcctacctttccatgcgagcttccgcctcccgcagtgcgaacgaggttcgttcatga

SEQ ID NO: 533069 - DNA, 366 bp, Stenotrophomonas maltophilia
atgagcaactctatcaacagtgccctgttgggcaacaaatcctccctggagaaactgaagctcttcctcgaggaggaagtcaagagcagcaagaaccagaaggtcatcgacttcgccgaagcctaccccgtgatcgagcagcatcttattgccagcattccgcagaagctgatgttggagaagttcaacgcagcatacggacacaaaatgcatgcgccgcagtttcgcaagctgctggaggcggagcgcgcgaggcgcaacgagagcggcgaagtcatcgcgtgctcgctgtgcgggacatcgcctccgcggatcaaggaaaacgtcaccaccgtagacgctgcccctcccgtcaccaacagctaa

SEQ ID NO: 533070 - DNA, 1473 bp, Stenotrophomonas maltophilia
atgagcacctcgatcaacttccctttccacaagctgccgaacctccgcgcactgccactgcctatctttcagtcggcaacggaggaagtcacacgccttctcatgactccccccaagatggccatctacagtgcgctcgcagtgtgcgcgggtgcagttcagatgttaattgatgtcgagaagcccgctggcggagtagtcggaacgaatctttacgttcttcaggaaggcaagtccggtgaacgcaagacgactgtggacaacttcttcacccgttccattcgtagctttgaaaagtcaaaaaatagtgcgtatgagagcgtcacggcactccactcagccaagttgagcgtatggaacaccaagaagcgagcgctcgagaagttgttggcgaagtcgctgggcaccgacgacactactgcattcgaagaacgactcatcatccactcactggagaaaccagtacggcctcccaagatcaaactgatctttgatgacacaacaatgcaagcattgaagaacggactgaaccagttccgtagcgccatgatcctcagcagcgacagtaaaaaactgatcaccaaccttctgattgcgaacgatgccgaattcaacaaactctggagttgcgaggacgttgctgtagatcgcgtgaacagttcgagttacaccatcgaaaatgcacgcctgaccgcttcattgatgatccagatcgaagtattgcgccgaatcatgcgtggcaagggaacggaggcgatggaatcgggtctttttgcgcgctttgtcttcagccacgaccgcagtactcagggtgaacgaatcatcgatatctccgtggacagcacaccggccatcgacgcgtttaatgcgcgcgttgatgagcttcttgctcggatagaagccgacgggctggacaaagatttcaagcgcgaaactctgaagttctcgagagaggccgctgcggcgtggaccctctatttcaatgacgtggagacaaacatcaaaaccggcggtcgctacagcctcgctggggaccatgcttcaaaacttgccgacaatgtggcccgcgtcgctgctgcactccatttttttgagggttgcacaggcgacattggtatggcagcgacgctgagtgctatcacaatctgccacgaggcctccaaggactatcttgagtaccttgtccccaaggaccagaaggaactggatgcactagaacttcaagcctggctgatcgataacgttcgtagcccgcgtgcaggcaggaccagccgctatgcgaatatgaaccatatcagcaccctcatgaatcgagtacattccaggttccgaggaaagcatcttcacgaactactcgaaatcttgcgtgaaaagggctttttgacgatccatcacggcgtcccgggccgccgcggcttagctgcgaccatcgagttctgtagtccaaaccgcaccggcggcagcaatcactag

SEQ ID NO: 533071 - DNA, 738 bp, Stenotrophomonas maltophilia
atggcgacatattttgcaaagttcagcaccggaaagaaaggaacagctaccgaacattcgcggtacgacgcgcgacaggggaagtggcagagccggaacgatctggtgtctgtcgagtacgacaacatgccggattgggccgaggacgaacccttgaaactctggagggccgcagatcggtacgaacgcgcaaatggctcggcctatattgaggcaacaattgcactgcctcaggaattgaccaaggagcagaacagacacttggcgaaagaactggcagagatcattgcacctggccttccacggcaacttgctatccatgatcccgtgtcagcactagcaacagtgcgaaatccccacatgcacctcatgtactcagctcgaaggcctgatggcattgggcgatcaccagaacagttcttccttcgctataacgccaagaaccctgagcagggagggtgccgtaaggagcgcggtgggcagactgcgcgtgcgatgggggatgagctgagcgtgctaagagcgaagatagcgcagaagcaaaacgaggctcttgcatcagcaggtagtgatgcaagggttgaccatcgaagcaatcacgacaggggcttttacgacgttcctgagtcgcatctggggcctgcaaagatccgcgggatgacggcagaacagaagaaaaggtacatagaacagcggtgggcaaaattggcctctcgggcccaaggtttgcccgaatga

SEQ ID NO: 533072 - DNA, 624 bp, Stenotrophomonas maltophilia
atgaagaagataggtatgctggcaggcgccgcatgggccgtactggtgctggtgggttgcaagaaggaatcgaccctcactcaggcaggtgacatcaaccttgctggatgcgaagtgccggcaggtttgacacctgcacaggcagaagcggttagctgcacacctgcgcaagcagagccgcagatcactgcagggccctctgcagctgctccggaggagagtgtcatcaatgaagctctggctcgagatgctttcatcttcaatcagtcagaggaagacgtagaagctaggcgctttgccgagggtgacctcaatggagacggtgtcagtgacaaggtggtgctgttcgtattgcaggccactgatggcggcaacgcttacgccacgcacctggctgtcttcctcaaagaaagtaatggtttgacgtatgcggactcactgcctgtgtcgggttatggggagggagttcaggagttcgcagtgcagggcgggatggttgtcatgaagatcctggtacaggggccgagtgatgccacctgctgtccctcggtggagaagaatgtgagctacgttcttcataacgggaagttgactgaggctaaggctgtcagtgcagcgtactga

SEQ ID NO: 533073 - DNA, 954 bp, Stenotrophomonas maltophilia
atgaaaaatatcaactacgctgcagccatgctggctgcgcttcttcttggtggttgcagcaagccagtccttgactggcgcaatgcagaactgagtaacggcaagatctatgaatccggctccaatgaaccctctgacggacgagtgaccggtgtaccgcacaagcagctcgaaccgctcctgggctctctgagaaccatccttcagaacctcaataccaatcagaccaccagcatgaccgcactgctgggtaacttgaactatgtctgcgatgtggaggtggaagaaggattggtaggcggccagtacatctgccgctatccgcagtcacaggttgtcgcctacgaaggtaagcgtactgacggcggcctggatggggagaccgtattccacacgaagacgggcagtcctggcgtcatcctgacgatgcagaacgggcgggtggaagggccgatcaagatctacttcgccgaaaagcccgggcagctgtcctaccagaccacagctgtgaacaacggcctggaaggagaagcgatcagctactacctgaatggtcaggtcaaagtagaagccaacttcaaaggcagcgtgcctgtagggctgtgggaagcctactgggaagagaacggagccgtctcggagcggggcctgtatgagggcggaaagctggtctcacagacccactatctgcaagacggcacggaatacctgacggaaccggagatgtgggcgctccatcgttcgatctcgcaaagcgatgatttcactctgacgcccaagcaggaagttcttcttaccgaggcggagaagcgatacaacgcagtacgcctgctgacgccggcccaacgcgaagcgaagtaccaggcggagcaggagagcatccgggccgacaagatcgctcgcggactagatccggactgctgggtctgtgatggatcggacaaaaggaactga

SEQ ID NO: 533074 - DNA, 270 bp, Stenotrophomonas maltophilia
atgggatcaagaatccgaaagatgctcaccgttgctctcattccgctggcgctgtgcgcttgtaccagcgagctggacaaggtccgaggccagttcatagacaactgcatgagcagcggcgcaccgaagtccaactgcaggtgcgccttcgacaagctgcaggaccattacggcgagcagggcctggtggccatcaacagacagggttacccaccgtccgacttcgccgagcagctgttcgttgctgcgggccagtgtcggaacccgtga

SEQ ID NO: 533075 - DNA, 330 bp, Stenotrophomonas maltophilia
gtggctccccacatccctaagaagaagctcctgggagcgctggatagctacggagagaggctgcaggcccaagacgttgtcgtgctcatcgacgacaccgtcttcggcggtgccagggagggcgtactaatcaccgaaacccagattcggtgcaaggccaagttcgagcaggctgagatccggttactgggttgtctgacccacatcaccgctcacggtgcgcacatccggatccatggcgagccctttatcacattgagtgttcctaacccggatgacctgcgacggctgttcagagccgtcagccactatttgcaagaaaccaactga

SEQ ID NO: 533076 - DNA, 159 bp, Stenotrophomonas maltophilia
atgtcacaagaagccctagcggacgttgctggagtagatagatctcacatgggaaagattgagcgcggtgaacgaaacgtcaccttcctcaacattttgaagatcgcgaaggccctcgaatgcagggcatccgagttgctgatcgaagctaatctttag

SEQ ID NO: 533077 - DNA, 225 bp, Stenotrophomonas maltophilia
atgcagctccgcctcaacgctaggccacaagtcgctatcttgcgaaagcagaccgtagagcacgtgttcggcacgctcaaggcgtggttgggtacggcgccactgctcacgaagacgcttccgaaggtcagaacagagatcagcctggcggttctggcttacaacatgaagcgcatgatcaagattgtcggaatgcaaggcatgctgagagcgatcacggcctga

SEQ ID NO: 533078 - DNA, 225 bp, Stenotrophomonas maltophilia
atgacagcgttggctgaccgtggctacttcaacgcccccgagatactggcgtgtgagcaggtgggcatcatcccgttggttccgaagccactaacgtccaacagcaaagcggaaggaaggttcgacaagcgggactttatctacgacccagtggtcgatgcctatcaatgtccggcgggcgaattggccatccaccgctttttaccaccgaagagaacggactga

SEQ ID NO: 533079 - DNA, 879 bp, Stenotrophomonas maltophilia
atgaagcgattcgtcgatggcgttgatcggtcacagggacttttgctgcctgatcggctcgaagattacgtccacgaagacaatccggtgcgggtggtcgatgctttcgttgacgcgctcgatctgagtgtcctgggctttgggaccgtcgatcgcgccgctggtggccggcccgcctaccacccagccacgctgctcaagatctacatctacggttatctcaaccgcatccagtcgagccggcgtctggagcgcgaagcgcagcgtaacctcgaactgatttggctgaccgggcgattggcgccggacttcaagacgatcgccgactttcgcaaggacaacggcaccgccatcacgtcagtgtgcagtcgcttcattgcactgtgtcggaacatgaaggtcttctcgcatgctgtggttgcgatcgacggaagcaagctcaaggccgtgaacagccgagagcggaacttcaccaccggcaagatcaaggcgcgtcgcgaactgttggaccagagcgtcgcgcgctatctggccgagctggatcgggctgatcgtgatccagcgctgctgccggaggggcgagtcccccatctgaaggacaagctggcgaaggtacgtgatcagatgaaaacgctcgatgccatcgaacaacagctcaagggcaagccggaccaccagatatcactaactgatcccgatgcacgttcgatgacctcaagcggacgcggaaccggcaccgtgggctacaacctccaagcggcggttgacgccgaacatcatctgatcgtcgcccaccagatcaccaacgccggtaacgatcgcgccaactctttggcatggctacgatggccaaggacgcacttggaactcagcacatga

SEQ ID NO: 533080 - DNA, 375 bp, Stenotrophomonas maltophilia
atgaaattggccgtcgatactcagcagatacagttcaatttcggcacagaggctgaggcggctgaaacattcaagatggccgtgcgacagagtgttgaagaaaaaatggcaagagcgatttcactttcaagcatgaatatatttctctttgacctgaagtatccctctatgtatggccaggacgatgatgaagacctaaaagcaactttcatgatcgcccatgctgccgacgggtatcggcgtagaaccgcttgggcgttcatggaggaggcattggttcgacaaaagttgaaatctcaaaggcgtaatagctggattgccggaatcctgatggcgattgcctccgtatttgtcctgtacgccgttgccggttga

SEQ ID NO: 533081 - DNA, 576 bp, Stenotrophomonas maltophilia
atgaaagacgactacaagaacctggtgagaaaggcagtctcagcttcaacatccctcggcctgctgagcgagaacaatgcaccatctttcagctcggatgacattcaagcaagcttgattcatcccatcctgggggagtttgtggaacacctttactcgcgtggactcgacagttcgcgatcgctcaatggcaactgcatccaggtccatgatcagctgcaagctcatctgcagcgccgcggcgtggagtctcacctgacaatcggcagcatgcatggacagggatgggactattgttctacatctttggatgagctcctggctgaaatgacagatcccgatcccgagcgagaaatccgggctcatacctggctgactctcaatgacggatcagtgctggattggactggacaggcttggtatgacatccaagcaaatgcaaaccatcccgctgaatcctgcttggtctatttccagcagggcgtccaggacgagatgcactactaccatcccgtccttgtggggcgggagtacctgattcggaccggaagcattcgtcgcgtgcccacccgctga

SEQ ID NO: 533082 - DNA, 459 bp, Stenotrophomonas maltophilia
atgcatcttctcgtccctatcggcttcatcgttgcgttggtattagccatcccaacggtcggactctcgctcgtcgtattcttcgtgttgaagttcgccattgactcccaaggctcatcttcaatcgtagccgcggccttcaatgccgcgcgaacagatcaaacggtagttgcgccatttgtaaataacgcggcgatccgcaagtttttcaaaaagtacggaaccaccgaaaaaaagtacgactctttctttggcgccggcatgacgtttcttgggtacgtacggttgaccggtgaggaaatcgtcgtgcttgttgtgaagagccgtgatgcaacactcgtatcaacctatgagcttccatatgcgttcgggaacgacttgctgtcccttatgcagcgcaaggcgtttatcgacgagatagctactacggccggtcgtccggctgctgcgacttcgtga

SEQ ID NO: 533083 - DNA, 231 bp, Stenotrophomonas maltophilia
atggcctcgtcggtgatgagaaggttgcggccagcacccatgctgtcatgggcaaatgatgggtctcatgcggtccacgatgacctgtatatggttccgaactgcggcgcggatgttctctatctgaaggtcttcaggcgcattttcgacaaccttaagcagagcgaccactatcggatgatgatggacacggacttcacgccggagttggaggaagcagaagctgcgtga

SEQ ID NO: 533084 - DNA, 675 bp, Stenotrophomonas maltophilia
atgtcaggatcaacagggggcccgccgccattgccgaacaggggtgaaagtggcagcccgccaccactacccggcgggctggctaatgggcccgcagctgacggcccatctaatcacaatcccaaacaaactcgccctgaaagaaatcgtcaaggtggatcattgtggattgtggtgaccctagtggtcattgtcattggatttttcggcgctggggcgatgactcgagcactatccaacaaagcgtcggacggcagcacattttcgcggacagccgaggcagtcttgtccgctgccttgattgcagcgtgttggaacaataaatctaatgcgttaaataaatttgagcgaaacccgcgagaccctggtgcctattcttccggaagcgtgacgccgttttactccatttacaagaaagacggcgcagttgtcgtcagcattattgggccatccccaagaggggcggaggccaataggtttttgcgccaagctgcaattgcggttcaatgctcatcggacctttcttctgacgatgcggaagaagtagtggatcgacttctgtcaaatgcacagagatctgctgttggggttgggacggtggaactgccttcggagaagagaacgtttaagttgctgattcaggacctaaccatgttgcgaattgaagaaatttga

SEQ ID NO: 533085 - DNA, 1188 bp, Stenotrophomonas maltophilia
atgcgacaggacgaggtacatccaaccttgcaccccggactagtccaggtaacagataggcccaatgtattggctgtgcgcccgctgccgacaccacgcagcctggctgggttggagcggcccgcggtctcccgcccgctactgagggaagcaggccaatccctggtcgacctgatccgtgatgtggcccggtggaaggattgggatgtcctaacccggacagccgcccgccgcgaggcggtcctaagctcccagatcgaagggaccaaatcggacctcgatcagctcctcgaatacgaagtcacccgcgatgccgacgggatgcccgctgacgtggtggttacccacagctatgtagaggcgttgaagatcggccttgccgccgtgcgtccggaaggacgttctgcactcactttggatttcgtcaaccagttgcaggcgcgtctgctggaaggggttatggccccagagttgctgggccgatatcgggaaaagcaggtgtggataggtgccagtcgacggatcgaggacgccacctacgtcccgccgccggctgagctgatccttgggctaatggaggagctgcaggcgagcatgctggactaccagccccgcgaagatgagcagggtgagctatcggtcatactgcagttggccttcgcgcatgcccagttcgaggctaatcacccctacgtcgacggcaacggccgcaccggtcgactcctgatgccgctgatgctggccgcttccggttacccgccgctctatctgtctggctttctgtgcagggaccggcagggatacttcaacgcactgcgattagctcagttgggtcagacatggacgccatgggtcgagatggtctgtcgcgcggtgctggagtcagtcgcggagacgaaggcgctggcaagtgaactgcaagcagtccatagcgaatggttgcaacgtctgggtaaggttcgccgtgatgctgtgctctgggacatcacccatagcttgctgagtaatccaaacgtgacggtcaatactgcgatggaagaccacggtgtgaccttccgcgccgcaaacttggccgttggccggctggtggaggcccacatccttgtcgagaagacgggtcatcggcgcaatcgcgtcttctacgcaccacaggtgatcgaggccctgtccaggccgtctgccggctga

SEQ ID NO: 533086 - DNA, 591 bp, Stenotrophomonas maltophilia
atgctggagctgctacatcacctgtccgagccggtgcagctgaccaatttccgaaccactctgccccagaaaacggcggcagagtgggatgcgttggcctttcacccggtaaagcaggctgtgaaggctgtgcttcggcaagagcaaggccatctttgcgtctattgcgaggttaaagttgcaacgggcgatggccacgttgagcacatcaagccaaaggccggaccgaatgcgcaggcgaatctttgttttgtctattcaaaccttgcactttcctgcaataccaaggaaacctgcggtagcaagaaaaaggctggcctattgcctattgagcctgggccgggctgcaataaggagtggtcgctttcgacggatggcacgatcgagccattgccggacttgaccaaagcccgtcgacacgcagtcgtacagacgcgtgacatgttggggctcaataagagttctgacttggtggacgagcgcaaacgttggttagcctcggcggtagagatattgaaagcagcccccaatgatctgtcagcgtttctggcagacgcaccctatcgcaccattttggcgacggcattttga

SEQ ID NO: 533087 - DNA, 1368 bp, Stenotrophomonas maltophilia
atgaatcacgattcgaaaaacaaacccgccttgcgaattgacagtttgcgtctgcgcaactttcgctgctttgatgaagtcactgtcaaatttcacgagcaactgacagtgattgttgccaacaacgggcagggcaagactgcggtaatggatgctgttgccattgcgctgggaccgttcgtcagtgcatttgatgatggcaaggaccggccctttgaacgtgacgatatccggttgattcgtgtgggccagggcaaccggatggagttggccgatggcggcgtgaggttggaagccactggcgttgttggtcacaaaagcgagtcctggaagcgcgagcttgcaggggcgaagtctcgcactacgcgcaaggacgctcgagtgctgacacaggaagccaagaagttgcagagtcaggtgcgccaagagactgagattctgacgaccgccacctgtttgccgctggtggcgtactaccccactgaccgcctttggaatatccgcaggcttccctacaaaaagctgccccgcacgtctcgcatggtggggtacacccattgcttggagtcaggttcggattttcatctgatggccgattggttccgatactggagcatcaactcgctgaagcgacgcctacacgcccagcaggctggcgaaatagttgtgccgaatgagttcgactacgctttggaagcagtgcgcaatgcgatcaatttgtgcctgaagccctcaggatggggggggatggactacagtttggagcgtgaagaaatcgtcgcgagtcatccgctgtacggagaactgcctgtcggcatgttgagcgatggtatacgcagcatgctgacgctagtggcagatattgcattccgcatggtcaagctcaatccaaatctcggtccccacgcggcaaccaacgctgacggggttgtgttgatcgatgaagttgacatgcatctgcatccgacatggcagcagaccgtgttgacctctctgcgtgaggcctttccatgcgtacagttcattgttaccacccatagcccgcaggtgctgagtacggttagtaaagagcacattcgggtgcttcagcacgtcgatgatctgcatagcgcagaacaaccgagtttcagtcccttggcgcatgaatcgggcgatgcactggccaaggtgatgggtacgcagcgtgagccagaattggcaatccaggatgccattcgccgctatgaacagctggttcgccaaggcagagaagagagtgaagacgccggaattttgcttaacgagcttgagcaagaaggctatcaattccacgaaagcgatttggcgacgtggcgcttcttggccaagcgcgcaaagaaggcggtttga

SEQ ID NO: 533088 - DNA, 3534 bp, Stenotrophomonas maltophilia
ttgaagatcgaggccatagttagggggcagcgactggtgggggtggatcctgcggggcctgtggaagtggtcgcagtgattccaggtggtttggatgccatcaccttggtctaccgctcttcggcaggtgtcattgccgaacgcatgttacttagagaggacgagccgtccctcgcagaagccactatcacccgtccgtggtccttcatcgcagaaggtgaggctttccaactggctgccgaagcgctgcgcatccgcttcgcccacctattcgatccgatgatggcggttcatacctcggacgtggagccgctgccgcaccagatatcggcggtgtacgaggcgatgttgccacggcagccattgcgcttcgttttggccgatgatccgggcgccggtaaaaccatcatggccggcctgttgatccgcgaactgatcatgcgttcggacgcccagcgcatcttggtagtgtcacccggctcgttgtcaggccagtggcaggatgggctgcgcgacaagttcggcctggagttcaccctgttcagtcgcgaacaacaggaactttcggccaacggcaacgccttcacccagactgatcgaatgatcgcgcgcctggaccaattggcgcgcagtgaggatctgaaagagaagttgcgggcgtcgcactgggatctgatcatcatcgacgaagcgcacaaatgtgcggccagcttctcaggtggtgaggtcaagaagacccaacgctacgagcttgctgaactgcttggttcagtatctcgccacttcctgcttatgaccgcgaccccgcacaacggcaaggaagaagattttcagctgttcatggcgctcttggatggcgaccgcttttatggaaaattccgcgagggcgctacccgcgtggacgtttctgacctgatgcgccgcctagtgaaggaggagctgctcaagttcgatggcaccaagttatttccgccacgcctggcctataccgcgaactatgacctgtcaccggcagaggaggcgctgtacgcccacgtttcggactatgtacgcaacgaatggaaccgggccgaacagctggatggtaagcagcgcaccagtattggctttgcgctgactcaattgcagcgtcgcttggcgtccagtcccgcggccatctaccagtcgttgcttcgccgtcgcaagagactggaagagcgcctggcggagaccaagttgatcgcgcgcggaagccgcgttgaagaggatcgaccacgctacggcaaagtggtggcgatcgacgtgccggacgatctggacgacgccgaggatgaactctcccctgaggactttgagaatgttgccgaccaagcggtagaacaggccagcaacgctcgcaccgttgtcgagatggaggctgaactgttcacgttacgtgcgctggaggctgaagctcgtgcgctctatgacagtggcaatgatcagaagtggcgagagctgtcgcagatactgcaagacagcgagttgatgttcgatacgaacggcaaccgccggaagatcatcatcttcaccgagcatcgcgatactttggcttacttggccagcaagatcaccagcctattgggaaggccggaagctgtggtcccgattcatgggggcactaatcgcgacgagcgccgacgtgttcaggaggagtttcgtcagaacaaggatgtccaggtcctattggctaccgacgctgcgggtgagggcgtcaacctccagaatgccaatctgatggtcaattacgatttaccctggaatccgaaccggcttgaacagcgtttcggtcgcatccatcgcattggtcagcgtgaaatctgccacctctggaatctggtggcggacaagacgcgtgaaggcgctgtattccagcgcctgttcgaaaagatcgaaatcgagcgacaagccttgggtggtcgtgtgttcgatgtcttgggcgaggccttcaatggcaagccgctgaaggacctgctttgggacgctatccggtatggcgagcgcgaagatgttcagcgggatttgttcaaggtgatcgacaacagcttggactccgagaaattgatggagattttccggcgcaatgcgttggtagacaatcacatgggactggacgccctgcatgccatcaaggaagagatggacagggccgaggcccgcaagcttcaaccgcactttatccgggcgttcttcctgaaagccttcgaaatgctgggaggggatgcccgtcagcgtgagggaggtcgctacgaactgccgcgtgtgccggcagcgattcgcgaacgtgatcgacgcattggcgtgacgcgtcagccggtattaccaaagtatgcgcgggtgtgctttgagaagggcgatatccgtttgcttaacaggccgatggccgacctcatccatccagcgcatccgctaatgggcgctgtgatcgacatgaccctagagacgtgcttgccggcgttgaagcagggcagcgtactggttgatcctgcggatctgggtgcagagccacatctgctattgatggtagaccacgaagtgcgcgagggagcaggtagtgccgaacgtacaatatcgcgtgaggtccagttcctacgaattagtccaaacggggagatcacatttgccggatgggcgccgcatctggatcttcgtcctgtaactgagatggagagcaaacaggtcgagcccctgctcaatgcagcatggctcgacaaggaacttgaaaggcgcgcgctggaatgggcgagcggacacttggtacctaagcatctgtcaggcgtgcgcgagcgttgtttgcgtcacattgatcgggtcagtcaagccgtgcatgagcgattgagtcgtgagatcaacttcctctctcatcgtgccatctcattgcaagaggaagtgagagttggcaagcaaccccgggttcagccagaaaacttgattcgccgtgctgaggaattgaccgcgcggcgatctgcgcggctccaagagctggatgcccagcgacacatcgtgccggccacgcccaaaatcgtcggaggcgcgttggtcgtgccgatcgggtggtttaaggcagacccgctgaccgcaacagcggcatcgttcactgcggatccggccgcgcgtgcgcgcatcgaacggctagcgatggaagctgttgccgcagcagaacgtgccatgggttttcaccctcgcgacgtgtccgcgcagaagtgtggctgggatatcacctcggcggttccgtcaacggatgacaccttgcccgatgatcgtttaatcgagctgaagggccgtgccaaaggcgcgacggtcatcacactgaccaagaacgagatcattgcggcgctcaacaagcctgagcagttttggttggccattgtcttggttaacgatgatgacagcaccgagggtccgtactacctacaaggcccagtttcgcaggctccggattgggccgaagtcagcaagaaccttgagctggccgaactgttgacccgtgccacgcgccacgggcagggggcgtga

SEQ ID NO: 533089 - DNA, 387 bp, Stenotrophomonas maltophilia
atgccgagagtgcagtgctgcctgttgttgtgtctgctgctggcaggcgccgttcacgcgcagacccaggtctacaagtgcgtggagggatcccatccggtctatcagcagacgccctgccagggacgtgcggaatggcgctgggaggttccggcggaacagtcattgtcgcgtggccctgggcctgccgcggccacacccgcgccggcccgccggcgggcgtcacgccccgggcgcgcgcgggctgcgctgatcccgatcagcgccgatccccgcgcctgtgagcgtgcgcggcagcaacgcgggaaggcgttggccagggccaggcgcctggacttcgtacagcgccggcagctggatgacgcggtgcacgacgcgtgtcgctga

SEQ ID NO: 533090 - DNA, 378 bp, Stenotrophomonas maltophilia
atgtaccgcacccttgctgctgcattgctctgcgctctctttgccgctcccgtcgctttcgcgcgtaacatccccggcgagctccctgcccggctcgacgcccaactgcaggccaaccgcgaacgctacggtattgccggccaggcagtgctggtcgcgcacaacgggaacgtgctctaccaaggcgccagcggtgagcgcgacccggccacgcatgcgcctgccaccgtcgataccatcttcgccgcgcagtcgatggccaaactgctgaccagcacgctggtgatgcagctggtggaacaaggcatggtggacctggatgcaccgccagccgctatgtgccggacttgccctctgcatggcaggcgatccccgtga

SEQ ID NO: 533091 - DNA, 537 bp, Stenotrophomonas maltophilia
atggtgcggccgctcaatggtgtgcgggggctggcaatgagccggaagtacgcgattgctttgcacgcatcggtggtattgcctcagcgcgacgcgtggatccatgccgcatgggacgacgttcccgtctcccactttcagagtgatgaggatctcaacaactgcagctttctcgacctgaaggtcaacaagtgggagatcggaagcgaagagcgtgcggaagagagcgagcccttcatcagggtcgagattcttcgagcccacgcactggtggagcatctgggcgaaaccgtatatcgccaaccggtggatgccgcccaggagattattcttgttctggagttggacgacggtggcaatgaactggacgaagggttgttgaaacgtctggtgtcgatcctggcagagggcaacaggttgtattgctggaaggatggcttccggttggcaggcatggagtttgcgcaggctgtcccgacattgaaggacgttcagctgggacttcagcagaaaggcggcacgtttcgaaagtcgtga

SEQ ID NO: 533092 - DNA, 483 bp, Stenotrophomonas maltophilia
atgcccgcctcctcgctccgcgcctttcgcctgctccgagcgttcggtgcccttgagttcgcactgaaacgagtccctggattcaccggcgcgcactcggaccgctctgcaaaggtgaattggcaagcggtcgacgctgcactcgaagcgatgcgaccagatctgctcacgttggcggtgtctgactcgaccaagcagaagatcctgggcgggacccgggatcgtcccatggttcaggtggtgactgtccgcggcggccacaacctcacctccttccaagccagagccctgagcgcgtcagacccgagggcactgatgcaagccgcccgccgggttcgtaacaacctctttcacggtggaaaagaagatccgcttgaagagtccttccctggcgatgacaaccagtggattacagccgcgaccgatgtcgccaagggcgttcttgatctggtcgtgcatggacggctccggcccttgccctga

SEQ ID NO: 533093 - DNA, 885 bp, Stenotrophomonas maltophilia
atgattgtcacaggaagtaaccaaaagacgtatacagaggatgacatccagaatgcattgtcacttgccgaaatgcgttcaactgttcttttcaacaacaaatcgcagatcgttgccccagtcaaccacccaacacaaaagcacttcagggtgttaggaaaaccgtcgaatgcgaaactgaaaggcgatccgcacgacacgaaccacgatcgctgcatcgcgtacttagagagatttcttaagaacgccggcgattcttttgagatcgcgtcctttgttcccaagttcagagcctacattcacaagaagaccggacgtccagctgcaagcataggcgaatcgaaaacttacgagctgcagaccgtattcagcgccattgcaggcagcgggtacagatggttcactgggcccagcgcaagagtgatttatccagatggcagttacatcgagtcagatctttgcggcagagccaccgccacgttctaccccaccagggtaaagccaaatatcgtgatcgaggtgattcgctcgcacccacccgacttcgacacattcgaaagacttgtcgaactgtccaagaacaatacatttgtattgttctttcttatacccgagaacgatgacaactctgtcgaatcccagttcaatcgtgcttggcgaaaggatcgactccaacttcgcgtatccttctacctgatggatggcatgttctacgaggctgccgtgcacatcccagactcgggaaccaaccggcgcggagtgtacgagcagcttgtttctggcgtcctgaataccgtcaggaaagaggctcttagccccgagaagtatcaggctacgcgcagttcaccccgcaccaccattaccgaaaacccgtccaaatcataa

SEQ ID NO: 533094 - DNA, 132 bp, Stenotrophomonas maltophilia
atgagtagtcagtcatgctttgcctccattaggctgcagtgggccccgatcttcgccgtgctgcagcctcggggtgcgtttgccttgggtgacgcagacggccgcgactgggattcgacccggccaaaatga

SEQ ID NO: 533095 - DNA, 1023 bp, Stenotrophomonas maltophilia
atgatcatcgcagcacggacggtctttgatcattggcttgaatgctggcgtgtgtacgtcttggcctgcagtgatgggaagtccgtcaattggagaaaggctccacccgttgcgagggatggcgctttctttgcgattgcctcgcgcaaccgcgaagagcttgaggacacgtgtcgcctgatgaacgaacaggccgcgcttcagatcgacgccttggcgtccgatgagcagcgggtgtcgctccgactgaaggccgagaaggcgctacaggccgccagccgtctggctgaagaagagggcttgatgctcgctcaggcacaagcgcgcaaagcgagaagcgttttcaatgaggccaatttggttctatccgccaaggcggaggagtatcgcgatctgatcgtagagaagttgcgtgagcacgcttacgtgaaaatcatctccgtgcggagaaacagccgtcacctggtctttgtaaggctagaggacgggagttggtccgatccaatgtgggccaatcccaagctcctagttgcatgctaccgcgcgagaatcgccaatgggtttgatctcagttccttgagtcactggggaaagaccaaggccaagattcgtcagatcttgttgcccagagcggctcagctcctccagttggaaggtgtcaaacgactcttggccgatgcgcttgcgagggggcagcgggctgtggtcatgggctcgtttgttttttggtatgagagcttcaacaacgttggatggctggtgaaggagcgtgcggcggacggcgcaggaggcgatgccgacgctgtttggagagaggggaagatcgtctcaagaaaccacggtaggatcgtggttcttccttacacgaaggagaatggggagaacgtcaacggtcatacgaagaactcagcgcatgacggtaaggccaagcccaggcaccccgatgacgttgtggagattccatttgaagaactcaagggtgatcttatgatcagcttgtttggggagcttcagtatgagtag

SEQ ID NO: 533096 - DNA, 309 bp, Stenotrophomonas maltophilia
atgcccgcctttgcagaagccgaagcgcaactgcccggcgtcgtgtttgtcatggtgaaccagggggacgagccatcgactgcgctggcgttcatccaggacaaccagctcgcgttcgaccacacgtacaccgacccgtcgtccgagaccatgctccgcttcggcgcgcgggtgatgccgacgaccctcttctttgacagtcagggcaggatggtggatatgcatgtgggggaaatgacccttgccgggctgaaggcaaaggtgcgccagtactttggtgccgagtccagccaaggggcgctagagtag

SEQ ID NO: 533097 - DNA, 516 bp, Stenotrophomonas maltophilia
ttgaacagcctcggccccctctctatcgatgtgttgaccttgatgctgtccgccacggccgcttggtgggtggcgcgcaggtggcgcaggcgccaaaaccccgaggaggccaaacgggcggcaaggatcgtggtggatgtcatcggggcaggacttctggctgctcgcctcggattcgtggtgcagaactggcaggactatgcgtcccacccttggtcgatcgtgacactgggtgacggcggctattcttggatttcgggaatgctggtgggggcgttgttggccgctgggttggcgcggggcgaggtcggagtcaggagaaaagccctcgtagacctcgcctttggcggcgcggcttggttggccatgagcttttcgttggattggatgagccgcaccgcgccgcgggtagaggctgttcatgggagtccgttggtgccggcagtcccggcgctgtcggccgcggtcgggcgtccagcggtggttaacctgtgggccgtgtggtgccagccgtga

SEQ ID NO: 533098 - DNA, 1341 bp, Stenotrophomonas maltophilia
atgaacccgcacttctctgtccacgcaccggagaaccccctcccgaaagccctttacgtgcaagtggatttcatcgagcccttaggcgaagggctggccttggttggcttggacggggtggacgcggagtggttcgctgaattcagcgaggaccatgggctgagcaaaaacgccgcaaccgtcgacgtatgcaaagcattcgctcagcgtgcaccgctgttccacctgcagctgacgatgttcttcgatgaggcaattcgccggcttagggcaaggaccaggcactggctgcgtattgatctttccgctgaaggcccactgcgcggggaactgtatccaacgctcttttccccggcccaggccgtcgcgtttgacgccgcgccccttcctctgatgaaccgcagaagtcggcaactgaacagcctcacgcttgtgccagcccaaacaccgatgccgcacgcaccggctacgcccctgcacattgaggagcttgccgtgctcgacgtgggccagggctcggccaacgcattgctgtgccgcgaaggcgttgcacgcatctactttgacgtgggctgcggcgtctaccgcaatgctccgacgaggccaccgaacatcagcttctgccagtgcgaggatcctattgtcgtcctttcccattgggacgcagaccattgggccggggccaccattgatacagggcttctgacgcgcacctggattgcccccatcccggcaaccatcaagcacattgtgttcctcatgaacatttggactgcgggaggaaaaacgcatctgctcagtacttccgccactgtccaccttggctctggaatcaagctcgttcgttgcaaagggcctgccagtgaccgcaacgagtcaggactggcgctgatcgccgagcgcaaaggcaagcgctggcttttgccgggtgatgccagttaccacaacgttccaggggccctgaaacgtcccgtcacgggtttggtggccacccaccacggggctcgcgtccatggcaccggcgctccggtgccctcgccggcgcccgactatgcccgattggcctactcctttggccccgggaacgcgcacggaaagtacggggtctcccacccccgccccgcaggagtgcacgcgtatgacgccgttggctggactcacagcggttggggcgttctcccacttggcagcgctatcgccggtcctccgggtctcgcccgagcaacggcacaccaccccaccgcccatttgaatggcatccgcatcggctggaccgtgccagtcggcgtgctcccacacttgaccgcctgcccaaaggcaatgccccttacgcaaacgtaa

SEQ ID NO: 533099 - DNA, 204 bp, Stenotrophomonas maltophilia
atggaccacagtcccaacaacaaggactacagtagcttggggcacgactggcaacaggccatggacgtacttccagtcttgatcatcgaacggaacgaggcttccgtcattagcaccgatgcgttgatcgcagcggccaaatcgggcttgagggacgcctaccagaactaccggacggcactgatcgagcatcgagggacttaa

SEQ ID NO: 533100 - DNA, 561 bp, Stenotrophomonas maltophilia
atgatctcgcgaggcgtgcgcggccttggagacgtgcgccgctggtggtgcccggtgtgcaatgagtgggacgcgatgcgcggccctgcgcattacttgcgcggcggcccggagcacgggttggagcgtgtggctgcgttggcctgccgcggcctatcagtccatgccattcagaagcggacgggcatgagctggggcgcggtgcagttgcgaatgcagcggttggcggatgaagccaagaaccggtatcgcgtgagagcacccggtgtcggctctggatggtggtgcgtggcgttgccagaaacctttcccaaggtgggagtggccgcggtgggaaagcaacggcaaagctatcggttgctcgggtgggccaccggtgcggaagcagggctgatcatcgagcagcaaatgggatgtgcgcccctgctggcaggctcgaaccttgcaagtgcctggctcgaacggagccttggcagtcatttcagaggttggacagaagccgaacagcggctttggatcctgctggcctggtctaacgggtggaaggcggaggccccctaa

SEQ ID NO: 533101 - DNA, 1086 bp, Stenotrophomonas maltophilia
gtgcttatcgacgagacaacgagtgttgagaatgctgaagttgagattgctgactcaggaaaaccgccgaggaagaaaaactcaaacctgacagcggccaagcgggccaagaacgacgagttctacacccgcatcgaagacattcagaacgaaatccagcactacgcctctcacttcgaggggaagacggtcttctgcaactgcgacgaccccatctggtcgaacttctgggtgttcttccacgactgcttcgaccggttgaagctcaagcgcttggtcgcgacctactacaccaagaacgggaagtccgccggcaagctcgtctgccatgacgagaagcgcgacgccgccggcaagccggaagtcctgacctatgacctgcaaggcgatggggacttccgtagccccgaatgcgtggcgctgctgaaggacgcggacattgtctgcaccaatccgccattctccctcttccgggaatacattgctcagctgatggagcacggcaagcggttcctcatcgtgggcgacatgaacgcgatcacctacaaggaagtgtttccgctcattcgagcaaacaaggtgtggctgggagtttcaacgccgaagcgcttccgaaccgagcgggaccaggaggtgtatcagcaatttggcaacaagtgctggttcacgaaccttacgcatgagcagcgcaataccgacatcccacttttccgctccatcaaggacaaagatgtccggtatgaccggttcgacaactacgacgctatcaacgtcaacaagacccaggacattccctgcgatttcgaaggtgccatgggtgtgccgatctccttcctgtcgaaatacaacccggagcagtttgaaatcattggtatcaccaagacgtgggacaagctggcaatcaaaacctacggaaagcaaattcaggtggacgcaagtggaacaaggaaagaagtttccaagctcaacgatgggccagccattcgcatggacaaggcgccccagggaagcacctattacaccgttgacggtgtcgcatttgtccaagcctatgcacgaatcatagttcggaggaagtcacgttga

SEQ ID NO: 533102 - DNA, 525 bp, Stenotrophomonas maltophilia
atggatcgcaccaccatcacggaaggcccgagccttctgacccggaacagcacccggatcacaggatcgctcgcgctcgcgctggcgctcatcctccaactgctggctgtggcgcccgcgcagtcggccgggcgtgatatccgttatgtggacacggccagcgcgttggttcgcctgcaaccggaaggcaccgtcagtgaaacggtcagccgcggtacggccgtcatcgtcaaccggatcgatcgcgggtgggcaaacatcgatacggaccgtcattcagggcactggatctctgccagtctgctgtgcagtggcgcaggctgctggaatcgatcagccccgtccgtcggcaacgcgcacgcgctgccagccgctgccggagcgcgccttgcgcccgccagggcggcgccccgcgcatcctcgtccagtgcgtacagctgcccctgctcggcacgctacaactgtactggccctcgcggggggcagtactgcatcacctcggggggcaacaagcgctatcgatga

SEQ ID NO: 533103 - DNA, 312 bp, Stenotrophomonas maltophilia
atggctgacgaagaaccgaacaccgcccaatccgcggagccgccttcgtattaccacggccctgtgtgggacgcgttcgggctcacccgcgccgcctacctggccgtcccgcgccggaccctgcagtccatgccgctggaatggcagcagcagttcgtggcgttgatggatgaggcgcaagcccgcctgcccgccgaggctttccccgaatacaccgtgcgccgcgtggtcaacggcaagttcgtcgccgacccactgcgtgactaccgccacaccggccccatcgctcccaaggactcctccaatggctga

SEQ ID NO: 533104 - DNA, 180 bp, Stenotrophomonas maltophilia
atgagccgccatctcgaaacccagctgcgtctgatcgccgctcaggcgcaatccctggcagacaaggccagcacgggaagctactggtgcggcgaaatggtggatggcctccgcgtgatccgcgaggcactggacagcgcaggccgagaaatcagcgcgcaacgctcgggggatcggtga

SEQ ID NO: 533105 - DNA, 1032 bp, Stenotrophomonas maltophilia
atgagcaacgaaaagacaactctggcggacgcgcagcccggtgggagggtgaggctggaaccggagcctcgcgaccatcgctgggacgacgtgggcgaacgctgcctcgactgcggcgacaaggactggataggcggtgcgtgtagcggtccgcgtgcacctgaaatctctgctccctggtctcccatcggcagcgccccgaatgatggccgaccgcacatccgcgggctgtgggtaacctcgcgggtagacggcaagccagacacccgtgaatggcgtcagttcattggtctggtcaatgacgacggcgcgttcgttgatcccgactatggcgagaccttcggctgggaggcggaccagttcgaggcgtggatgccggtagccgatgcaccaggcgccgccctctccgcccacccctccccgggtggtcagggggacggcgtgtcaatcagcgacgatgatcgcgcggtgctacagcgcttgcaggatgccctgccgaccgcagggatcaatggctgggccaagggcgtggatgttctggaacgcctgctgcgcgaatcgctcgccgcccgccatccggtcgaaacccagctgggctacacgttgtcggatgtgcacgaagcctactcacgtggaaagcgtgatgccgcccgccagccggtgggtagcgagtacattgtgagcggcaccatggaggatgctgaggctgcgtccgatggcatgcttccggccgcgctggttccggttgctgacgaatggtatcgcctgtgcgagcgccggttcgccgtggaccgcatccggatcagcggacagctcgcggaagcaatcgtggaagcggtgtgcgccgccgcccccgcgcaggccgtggacctggggcagttccgggaggcagtcgaatgcctgaaatctacgattgaagatggcatagctgacgccaagcacatgcttatcgcaaccgacgcgctcgattccgatctggcagaggccgaccgcttgcttgccctgatcgacagcaaggcggtgggcaaatga

SEQ ID NO: 533106 - DNA, 756 bp, Stenotrophomonas maltophilia
atgcgcttgattattagtgttcaagccaatctgcgaacgacgcccgttggcaggtccgctgaggaagtgctgcggttggctgtgctggcgacgaaggctctggacccactctatccatccctcaaggattggtttgcactgccgccgagccgcaagagtaggtatgtgcctatcggcgagagggaggcgttgatagagcagatgaggcgggacatcgagaaggatcgtaggagtttcggtgacttcgaaggtcttggcgcttcgctcagtttggccaacgtgaacaacgaccgcgactggcgcgagcctggtttagccgtgctcggcatagatccgacagcaggtttcaacaaattccgtctggaagagcttcaggcttttggaatggaggcgcccgatctcatgctcaaggcattggtcgagctggtgaaaatagtaaggccctcgttcgcgtgcgtcgatgtgaagtccagaacgcccgagaaggggcttgtttcatatcaaatagaccggcgcctgtatcaacaccgtcagttcttcggctggatgggattcgttccagctcaggttgagcacgcgcagctcccggatgcgcacgctgtccataccgtcgatggcctgggcactgtgatcgtctcggtgccaggtgtgtttgaccccgccgacgacgcgcaggtggacaaggtgcatcgcgtcgaaatggatctgtccagctacaacctgttgccggtgaccgatcctcacttcaagggctga

SEQ ID NO: 533107 - DNA, 516 bp, Stenotrophomonas maltophilia
atgcagtgcaccattcccgttactctgttcaatcgcggcgtgctcctacaggagcttgccccagcaatcatcctcttcatctgtgccataggcctcgcattccatgacggcctggccccaaggaagaaggcggctgcaattgccatcctttgcatgatcggcgccgcaacttcagcctccacagcgatgctggcgctgcgttcgaagatcgtagtcgaaggggatacttccactttgcaggcgggcttctggaaggccgagctgccaaccgtcgcgctggtgggtatcggcgcaactgaaccggtgggtgattcactagggaagcgcaggaacggtatgagctcgcgcggtgtcaatgtgggctggttcgaggatccgagcgggaggcgtgtcttcgccctgtccgctgggcgtagccccgttcttctgcccatcagcggtggcttcagcgtggtgttggaccaatcgacagttgatgatcttttgcagtgtgatcgccgcacaccagctcgctag

SEQ ID NO: 533108 - DNA, 771 bp, Stenotrophomonas maltophilia
gtgttcttcattgatgaagaccagcgtgtcacgctcaaagatgtcggcaccaaggaggccattcggaactttgcaatcgcccgtggagcgacggtagaggagtatgtcctgtcctcgcagttccgctgtgcgggctccgatggctatctcgcctggttggatgacgtgctgcagatccgcccaaccgcgaacaccacgctggatgagggcagctacgatttccaggtgttcgatgacccgtccgcactgcatgccgccatcgaggccaggaacggcggcaaccgcgcgcgcgttgtggctggctactgctggccttggaacagcaagaagaacagcaaagagatggacattgtcatcggcagctatcgccggcaatggaacctcaacgacgatgggagcctctggatcatctctcctgattcagtcgaccaagtgggctgcatccacacctgtcagggcctggaagtcgactacatcggcgtgatcatcgggccggacatggtcatggaagacggcgctctgaagaccgtccctcgtgcgcgggaccggcacgacaagaccatgaagggattcgtgaagctgtcaaagtcccatcccgccgaagccgccgagctcgcggacaccatcatcaagaacacctaccgcaccttgatgacccgaggaatgaagggctgctacgtctacgccaccgatccgcaggtggccgcctacttcagggcccggctgcagcatgcggccgccgttgagcaggcaattgagatggaggcctaa

SEQ ID NO: 533109 - DNA, 903 bp, Stenotrophomonas maltophilia
atgctcatactaggtggtagatatggaagtgtggacccacagacctctctgagttatacggagttggagtacgattatgcgctaagtcagggtaagccaatattttctgtggtgatcgaaagtcaggcgttagagaataagatcaggctggaaggatccgctgcgctcgaggctgactatcccaaagagcttaagttctttagagagaaggttctttcgaaaatttcgtctttcttctcggacgaaaaagatattaaattggctgttcatgagactctggccgattattcaaagcgccttgactttaccggttggatatctggccgtgaagcggtggatacaaaaccattgcttgaagaattggctcgtctaagagaggataaggaaaagctgcaggcccgattggactcgatgattcaccaggccccaaagcaggcttctggtgctgccaaaaaatggcctgatgaagatatgcgcgaaatagtggagatgcttaacgaaatagaggtgtccacaagagtgttcctaaaggaagaggatgcggagccggtttcttatcccgtcatgagaattgtctcggtgttgagggataaattggtcaccggggtgaccaataaaatgggctcgagtaaggtggataactttctctactataacgttcttcccaagttggagatctatgatctggccggcctcgagaaggtggctggtatgcagtggcagcgctataggcttactgctaaagggaaggcgctcattgcgtttttcgacaaggatgcgtcaaggaaggtatcgaaatcagctgcggcggaaggtggccaaggtgaagctatcaaagcggtggatatggtttccgaaacgcctagaaaggccggcaagtcaaaggcaaataagggcgagtga

SEQ ID NO: 533110 - DNA, 324 bp, Stenotrophomonas maltophilia
atgcagttcgtagaggttcggccagggcacggcttccagttcgtggagcggtatgaagacgcctctttccagattcactgcaggggcgtgcccgtgttgtggctggagaggcggcagcagcatgtgctgttgcaggcctcactggatgcgaatcagcgggcgcccgccgttgtgccgttgcgtgcgctgcttcaatggcagttggagcccgtggactatctggagcaggtgctggctggcgtgccggagcctgttctgatggatcgggtgttgcagatgttggctggcgaggtgcctgatggggcgcgatgtggcacgccgtag

SEQ ID NO: 533111 - DNA, 1287 bp, Stenotrophomonas maltophilia
atgttcctaagaggcactgatggcgagtacgagccgtcatttttcataattagacttcgcactatgctggacatcagccaggcagccgccgagaacactcagacctttgtccacgagtacgttcattttctgcaagacttgtttctgccgtactgtattcgtgagaacctcgtgcgaatcgcgacgttctttgatttcatggaccgagcaaggcatctgggcgagattcgcctgcccaactcagcctctctagagggagcggaactgacttcgcttcaaacgtctgtcacgtggggggacagtcagttcatcagctcagttggcagaattgaaaatattaagataacggaagtgccagttgataagcacaaattcatactctaccaatacgacctcttactggatgacgggacagtctatcagcttggtgctcgagacttgcttgagtatattgcgtggaagattgaatccaagcactttgcagtagatcagcagctgccggatctgccttacaactcggtagaccttctctctggatactttgacctctctgaacttaaccattttaagcgcgtcgcccttgcagaatactgcttacagaacgacaatccagctcacagactgatgatgttcctgaaagacctcaagactggaagcattgatgccgatgcgacaaaatccgatgaagccttcgtcacgtacttgaaatcggcaaactggatggctcgcggggttatctttgagccggtttccgataaaattgctcggcgctgcaacgagttgcgccaaagtctgcaagctaaattccctcaaggcgcatttccaagcatatattcgtggctggaccgagtgatcgactatgctcacgcgaaccttgcaggaagaagcttctttgcggaactctggaatttaaacagtgaagaatttttcggaaagattagccaaatcctgagagatgtcggcatccctttaatagttaatgacactggagagctgggaacttcactgggtgacggagtggatagggatcaatttatccaactcttgctggcctatgaatttatggattaccttggtcacgaggatatgcaatgccccttgcttgacgtctgcgagcgcgacaagccagagcttatagacaatgattgcatggatgcaccgtttcgtagagctctcaaggaccacttgtgcccatttggagcctttgcaaagacgcacggccttgatcagttacgttggcatgtgaaagatagattggtctcgcgcgagagttcacgctggccctga

SEQ ID NO: 533112 - DNA, 855 bp, Stenotrophomonas maltophilia
atgtctagcctgcccgtcaccgatacgatcgcccacgccctgatgcaacttgtggatgattcaaacaatagcggcgcgtatagggagccctctcacgctgacattgaatttcatgttaatcaagctggattgggagagtttgacccaaagcagcaggggcagcttgtagggaaggctaagcgagttcgcgctgtgctttacgcagctatggacttcaatccacctgctgcaagtcggtttgcttccggcttgcttgcaaaggttcgcgcatgtggcggctttcgagccgagtccgcgaactacgtgggccgcgaggcgttcgaaaacgctaaggctgcctttgatgtggaaggctttgtgctgaccgaccatggttcactcgagcccaagttgctttcctcactgaccggcgtgcaactgaccgatgcgctagccgcctacgctagacgtgcccagaaaggcgcggaggatgcggcccttgtcactggcacgggcaaagacttgactgaagccaccgcggcgcatgtccttcaaacgcttcaagggggatacccaagtggtgcgaatttccaagcattgcttggcatggcttttgtcgcactggaacttgcagttccggaaatgcctgagcagccgggcgagccagcagttaggctaatggagcgtggactcttccagtctgctatgggggcaaatcgtgtacgcaacaaggaaggggctggtcatggtcggccatggttgccggcgctctctgatgagcaagctagggcggcgatcgaagttatggggacagtgtccgcctatttgctagcgaggctacagaggcgggagcgtcgtcgcactgcgccgccctga

SEQ ID NO: 533113 - DNA, 648 bp, Stenotrophomonas maltophilia
atgactttgggacttcggaccactgtaatgctcctagaccatcttgaccaagatatggcatggaggatcaaggagattcatcagttcaaatccgcggtaggccaggcaagaggaagcaatgtcgaggcacacattcgcgctggcgtctccatgctctacgcgcactgggagggtttcattaagggatctgccaatgcttacgtcaactatttgtcatatcgcgcagacagcagccgatctctaaagccttgtttcattgcactggccatgaaggctcggcttgcgacctcaagcgaatcagccaagtccgatgtcgcagttgaggcggtttcctatctgctgggccagctagatcgccccatacgacttccccgagaagatgccatcagtgcggaaagcaacctaagctctaaagttttcgtgaacatttctggttggattggaattgactattctcagtattcaactcgatttgcattgatcgacaatgttcttcttaaaagtagaaatagtatcgcacatgggcagcatttaacaattacacctccgtccttccataatttggtcgacgaagtgctggagatgctgcgctggttcaaaactgacattgagaattccgtggttaatcagtcgttcttggtggcatag

SEQ ID NO: 533114 - DNA, 1119 bp, Stenotrophomonas maltophilia
atgactgtgcgggaactggccgctgagctgaaggatgctcgcaggcaagtagtcactgatggctacgatatgtcgttaggtgagcttgcttcaatgtacagggagcaagagctggtaatcgacccaaattatcagcggctctttcgatggcatccatcgcaacgcactcgttttgttgagtccctgcttctcggaatcccggttccaccgatctttgtgttccagcgcgaatcaggggtgtgggagcttattgacggactacaacgcctttccaccgtgctgcagctgatgggggaattgcgtcatccagaccaaggcctctatccgtcgctgatccttgaaggaacaaacttgcttcctggcctggcgggaatgaaatggaggcaggagaatggcgacgcggcagacttggcattcgacatacctatgcagcttgagttgaagcgtgctcgcatgcgagtcgagatccttcggaaggagagtgatgaagatgcaaagtatgaactcttccagcgactaaacacgggcggctcgcatttgagcgagcaagaagtaagaaatagcgtgcttgttatgctcaatgcgcagttctacgattggctggtccagcgcacgaggctgaatgccttttctcaaactgtccagcttactccgaagcagcacgaggagcagcaggcggtcgagatcgcactacgatttttggcataccgccgccatccttacaagagggggttggatgtgaacgagtacttggacgtcgctgctcgtcagctggcgaaactcgatgaccgtgctctaaacgaggagctcgatatgttcaattggacgttcaacagtcttcttcagttgtgtggcaatgatgtattcaagcgttgggatggtcagcgccacttgggtggtttctcgatttctgcattcgatgccatcgcatatggggtggcggttaatcgtggcgcaattgaagaaattcccgcccaagatcgtcgcgcttggcttgttaatcgtgttcgcgacctctggggcgacccgaccttccaggctaattctggctctggcgtgcggggcaccacgcgcatgaccaatctcctcccgtatgcagctcagtattttcagccatga

SEQ ID NO: 533115 - DNA, 690 bp, Stenotrophomonas maltophilia
atgcaggcgttgcagctcggcccccagcgatgcctctgcggcgttggtcggtacgttgtcgcgcacgcgcacggtgatgctctccaggcgttggctgcccagcagccgcgaggcggccgaggtgtacggcacgtagaccgtgggcgttgcgccgccggcaaaggcattcgcccccaccacaccgatcacctccaccggcatgccgcccagcagcaccgtgctgccgatcgggttaccggcgaacaatgccttcgcagccttctggtcgaccacgcccacggcgcgatgtgcgtccacttcgtcagcgctgaagaagcgaccggccttcagccgcagcccgcgcacgcgcggcagatccgcgccgacgcccagcacctgggtattggcgcgacggctgccctgcaacgccgccaccgatccgctcaggttggggctgacactgtccacgtaactcaatgcggccagatggtcggcgtcgcccaccaccaacgtctcgatctccgccgagcgcgggtcgccgaaatcggcgccggggtagatctccagcgtgctggcgccgagctcgttgatctgcgactcgacctgggcctgcgcgcccttgcccagcgccaccacggtcaccaccgcagcaacgccgatgatgatgccgagcatggtcagcaacgtgcgcaggcgatgggcaagcattga

SEQ ID NO: 533116 - DNA, 786 bp, Stenotrophomonas maltophilia
atgggtgatttcggccccatcgatccgcgggcgaagatgccttacagcggtgagcgcgacgacgacgtactgcgtgaggtaacgctgagcagctacgcactcggcgccaaaaagatcacctacgccgacttcgacgtctataccgatgcaactggccagccccggaccgcgcagtacccgttcgacctagagtacaggaacataccggacgacctaccggtaggtgtgagctgggaggctgcgcagcagtactgcgaatgggtaggaaaactgatagggcggaagatggagctgccgacagaggcccagtgggaatacgcggcgcgtaaccggggccagttcgtcatctggcccaccgatgatggcagcgtcgacaatggaaggaacgttggggatttcgagacaatcggtcgctacgcctctaagcatggctacacgatcggcccaaccccgctgggccagtacccacccaccccgctgggtctgtacgacatgatcgatcatggatttgagtggatgtttgactggtatcatgatccctacaacatttccgacacacgagatccgcgcgggcctgcgcatggtgaggaaaaggtgcagcgaagccataacagtcgtggcggggactcgctcttcatcgtgtccatgacatttactcgattcaagcgcaatccaaatccgggtccagatccacttctgaagggcgatgagaagtatcttttcgaccccaatagcctgaacagattccgatgtgcatctcccacatctccaggcccgacggagtaa

SEQ ID NO: 533117 - DNA, 3093 bp, Stenotrophomonas maltophilia
atgagttctggaaagttcaccctgttccgccatgacgggcatggcaacgtcgtgccctgcgcggacgtcacctatcgtatccgcgatgtactgcatggcttcgccgtcgtggcctccggcacgaccaacgctcacggggacaccgatctggtgacgctgccggagtgtgtgcagaccccggcaccaccggccctccccaactggcgcagaggctggccgaacctcggcgccgggccggccggcctgaagctgccctggccgcggcgcaatgtgccggacgcagctgccggagccgggcagggcgcccgcctgccgcagagtgagcatcgataccagctgcaggtccgcgatgatgccagcggcgagtggaccgatccgctgctgcacccggactgccacgagcccgcgcagctgggcccgtggagcgaggatccgcatgctgatgcgtcgctgcggcctgcattgcaggtacggcggctgcggttgcggccgtttcaccagctgcagttgcagcggcagagcccgccgacaccggtggcggaggccggctttgtgggctaccgccgcgaccgcgatggaactgaggtggtcgccctcgacgtgcacgggcggccggtccgtggcgtaacggataggcaggggatgaccccgcgcctgttctgcgaacaggatctgcggctggtgttcacgctgccgggcagccgcagcgaactgcgcagcgcgctgtccgagccacgggtggtcgggcaaccgcgcctggtgccggtggtgccggtgaagatgcatgcggtggtgagcggccccggcgaaggcgccacgctggagctggccgggaagatcagtgcaccggcgctgctgaacgtggccgacgaagaactcctgctgctgacccccgaggtctgggaggagttccgcgaggttgcgcgatccattgaaggcagcctctcagccgtgccgcgcgcccgctggcaactggaggaggcgctggccggccgcagcctggaggcggtggcccaggccgagaagaacctcggcatggccgaggaccgtgcagcggccatgctcaaccgcaccttcgcgcgaaaggccgatctggtcgaagtgatcacctttgagagttacagccgaaaaggcgacggccagccacagcaggaggtgggccttcgccgcaattacctgccacggttcaaatacgatgaattcaaaggccgccgggtgatgggcgtgcctacccacgtggatgtgggcatgtcgacacgggcgggcgacagcacgatgtccgtgggcagcgcggcccggcagaaggggccggccttccagaactttgattcacgcaagttcatggaatcgctgatgacgatcaaggcccagattggccggagcgtcaaagcgccgaacatccagttcgaccttatcgagctgggtgggaaccagttctccgagctggtgcgcgcgtcggagacctactcggtggagacctccgcgcagtggctgcggtttgtggcgggtgccggggccagtgcccaggcggagtgggatcccctgcaccgcaaggccagcgccaaggttgaagcgagtgcgcattacaaactggcgctgtttgaagcaaaagccgtgcatacgtggtcgattccctcgcgtaccgggtggatgcagcgctacggcgatatcgacctgggcgcgatcgtattccagatgtcgctggaactgcacggctttgccggagtgaaacgggcgttgatgggcgctgccggcgtgagcatcgatcgcggcactgtcaaggtcgaggcgcagccgcgcgatcgtgatgacagcttcgtgcccagcttcgatatcgtgcgcggcatgccgcgggctgacatgggcgatccgccgggcgaggacggccggccgtcgagacgggtcgtgatggctgcggtgggcgagaagccgccggagaccttgaatggcatgcaggtgaatgcagaagcgttcgtaggtattgaggcggttttgacgcctgcgggtgaattgcagtggctgccgccgcagcagggtacaccggtgacgcttgcgaaactgagcctggatacggccgcttctgctggggcgggggccaaggcgcagctgtatgtgtattacgcggacgggcgtttccggatcaaggtcagtgcgcggctgtgtttgggcatcggctgcagaggggcgctggattttgtggtgggggtggaggggatgctggagtttgccaagtgggtgtactaccagttggcgcacgcggggtttaggaagttgctgtttattgcgggggaggctctggaatatctctcccaaattgtgtacttggctttctcccgagatggctccatcgctgagtacctgactggcggcattggtgaggctcaatacagagtgaagacgatgatccacgcaattgacgtggcggaaaatagaactaatctggtgcggcacatcaactctgtcgcagcgagtccatccaacggtagtggggcatggcttttgtacgccactcctatgactcgcgggatgcttctctacgcgataacgcgccacagctggatgagtcacatgcagaatccagccgatgtcgagggggtacttgatccccagctgcactaccttcctgatcacaaaaaggctgtgatccgtgtgataaagggcatcactcttgtcagtgagtggcaggtcatgtttcaacacatgaccgctgggggggagctcagcggtgaaaagccaggcaagcttgagggcgatgtagttaggtttttgaactacggctattcgttgtccgatgatctaaagggcaaagtgattgatccaatcaatgcagagggtgatgcgccttcgggccaactggggaacagctaccttgagcagtttcttgcccatcgcaggagactgctgggtagcttcccgaaggggtatgagctggcgcgcctgcaattgatggatgtcgatacacttctggcgcttgatgggagggatgcccctaccttcgccagcctcgatggaagctatctcaatccactggatcatgagcgacgtggcatcgctaccgcctctagagctggcgtatccgaaggcacatcctaa

SEQ ID NO: 533118 - DNA, 588 bp, Stenotrophomonas maltophilia
gtgactggaaattcgttctctcgcttctacgatgcgggttcgctggaagtgagtaccaaggtgcttggcgactttggccttgatcctttgtccagtgagttgatgttgaagctcggtttgccgtcaagacttcctggtgaagtacccgttgtgcagttcgaagcgccgcagatggccgatttctacggcgaggcgcttctggtcgtggcgcacgagccatggggaaaggaactgctgctctgcctttccgtggccggaaaggtgattgcggcaggtgacggcggacatcagttcgtcaatagtcgcctttcgtgcttccttggctttctggaggcgtatgaggtatttcaagcgcaggcaacatcaagcgattccatgccggttgtctactctcaggcagtaatgcaggccagacttgaggcgttcaagcgaggcgagattcacgcgcgtccagcaagacaagggttcaatcgctatgatgcaatcaaggcgatggcggcggcatggggaaggcttgatcctgctgcacttgccgagggttcatcgtggtccgtcgtgctggagcagctcgaagacggcccgatctga

SEQ ID NO: 533119 - DNA, 750 bp, Stenotrophomonas maltophilia
atgaaaactgaggtcgatgtgtcgtcagagaagaactcgcttgatatcgaaatcggaatcatctccgatctgcgcgtcaagcacgttttggaaaatgtattctggcgagagagtgatccatcaggtatcgcggctactggcgccattgccgccgcactggggctgagcggccctgcagctgggatggcgatgatgtctgctgaagagatggctgagccggttgccagggtcgagttccgacttggcgaaactaaagtggaagggttgctttggaactggccattcggtgaaggggaccgagtaaaggtcgttggaaagaggggcgaagatgggaaattctttgctctgtcagttctggacgagaataagcggctgattgtgtcatacccccatgtcagctctggaagttgggcgcattggattggtgtcatgaagtacacgctgatgttctcactgccaagtgctgcgctatacgttctggttgccggctttggttcgattaatgaagctccctgggactggtattctctgaaaagatttttttacatatttcttagttgcgtttctgtctcgtgcttcattggggttaggattggttctcgcttcacgcgttatgcaaggatggctgatgcaatcttcaaatctcttggttgggtcaatggtaaatatataaatctaaggcgtatcacgaagttgaataaaagtgtggatgaccatcctgctttgggtgatacgtacttcaggtactga

SEQ ID NO: 533120 - DNA, 732 bp, Stenotrophomonas maltophilia
atgatcactggaacccaggtaggtcctactagcagcggtccgcttgaaactgcggttgggacaattgtggacctcagggttcagcattgcgtaaagaatgtgttctggcgggagggggatcgggaggggatggcggccaccggtgcattcgcagcggcgctaggccttagtggaccagcggcaggcatggccatgatgtctgcggaggaaatggacgagccagttaccaaagtcgagttcagacttggtgaaatggctgtggaagggcttctctggaactggccttttgacgagggtgacatcgttcgagttgtcggtgcacggaacgacgaaggaagattttttgccatttcggttcttgatgagaatagaaggctgattgtttcctatccgcatgttagtgctggcacgttggcgcactggatttcggtgcttaaatattcgcttgtgatttcaattccgtggtggggattggtaatagccttctatgagtggaaattttctgcgccatttcacctgttggttcagtcatatttggtgggggttcttgttttctgtctgattggatatcgagttggtcgtaggtttgtcagtttcgccaaaatggcggattcagttttctctacgcttgggtggaagggggccaggcgaatgaatcttcgtagagtgactaagaggaagcgacggccgggcgaccatcccgccctaggcgatacctatttcagatattga

SEQ ID NO: 533121 - DNA, 2904 bp, Stenotrophomonas maltophilia
atgacgcgcgatagcaaagataggtacgactccagcgggcccttcacgggtgaaagcaacgtcgggatccgcagcgcgggcagtccagacatcgtcgatcttccggcggttgccgccacgctgccggacgagacagagaaatcagcctgcgacgtctgccgctccactgggctggccatcctgccggtgcgctacacggtggtgcctgccagctgcaacgtgggccttggtggcctgtcgcccgcacacgccagcgacgttgatgtcagtgcggcgggatacacctacgcgctcagaacgttgcgccagggtctgctgtacctgtactacgagcagggtccctacggtccggagtactgggagtgctacgccatcgccggaaacggcaccctgtggcggcaacccaccgcctacagtgcgcgcgcgatcgcaggcggtggcctgcccagctgtggccgcagtggccacgatccgatgcgcacggagttcatcaccatccagcgcccgcatgtatgcgggacggtctggctggcctactcccaacacccctggacgccagcgacgttggatcgctatggatccgacccggccctgcgcgccgagcggatgcaatcgatcgagccagccagatggatcacgtcggcgagagcagaaggcgaccaagcgccattgaaggatgccgccgggctggcctcgatcatggaatatcgatggctggataacccctcaggcgatccgccagaccttccgtacagcagcgcactcccgggtgcctctaatccggacggggcgcttcgcaacgtgcggctgcacgcgcatggcacgcgttacccctggtcgcggcgggattaccctcgtagcgacggtgtcgacccgcgccagcagcggtttgagcgcctgaagcaacacagcagcaacgggcgcatcggcagtgatcgtcaggagtacccgcccatgctgctgggcttgtgggatgcggttggcgtcgtgcacgagctcagtggttactgcaatgacctggtcgcctgcatcaaccagttcaagagcgagcgcgaactggaagtcagcgctgttgaccagatcgaacagatctcgcgcctgctggagctcaacggtgcggtgatggcagggaactacgcagcacagaccgtccgcgaggtggagcggcagcgccgcctcggcaatccctcgcttccctcatgggaccccaaggtaaagctctccgaggaggagaagcgggaactcgcgcgggagtatgagcgccagttcctgccgctctatctgaaggacgcccaggatgcgtggaaaaacaagtactggccgctgattgacgagccccgtttcaccgcgttcaagaggaacatggacgcgatgacgcaacaagtactcgaccggctgggaccgaagatgtcggtgctggttgcctggctccgccacgatctgctgctggcgacgctggaagactttgacggcaagtctgcggcgcaaggggagtggttcgaggagatcatcacagaggcgatcgccgtgcttggtatgcacgagataggccgtgcgttgctgactgaactgtcccacgatatagaagttaccggaagaaaatccctgctctggcgagtcattgcgaagaacgacgaagagtctcgcaaggagctgcagcagacactcacggcggcgcaggtgtgcgccaacacgattctcgatgtggccggcgcaggctgggcggcatttgtcgcaggcaccgcgcatctgaagtcttacttggccctttaccgcaagttggaggcggcgcagaaggaggccgcgccccccaccgccagtgcccgcatccttcgcgaaagtggcgttgatcgcttcgtcactaccgcaggtgcctaccttctgaatcgattcccgatgaagggcatccaggacaccgccggcaatgccatggtccggttcgtgcttctgacacgggcgttgatggagcgcgatgaggccatcagcctggtggctgaagaactgagcagtggccagcaaggcaagcgctacttcctggagcgtatccagttctacagaaccaagggcagcgcgctgccgatgcagttcgcgcttcgggacctggagctgcatcacggcgcgctggcgatgcgcaagcgttggcaggcagcggcggaaagcagccgcaatgttgtccgcctgaactcccttacggccgtgttggagatggtgaacttcattcatctggcaaccaaggttgacaaggacacacgcgactacgcgacgttactggcctctggaatgtcgcttgtagctgtgtataccggtgtgcacgaggctgtggcgaaagagttttttggtgcgggtagcgccagtgccatacggatgaaagttgccggaagtgtgatggcgggggcgggtagtttgattggggcgtactacagcctggacgaagctgatcggactgtgagaaaaggaaactacgctcatttcacggcgcatttggtcaagggcggggtaacaggagcagccggaactgctcattttctgacggcgcttgcttattcttgcccggtgatcgagcggactgttgggagaaatgcactgactttaggcctgagagggttgcatgctggacttgaagttgccgcaggaagggaaggcggacatatagtcgcatcgcgagccatgaaacgtgttggcgtgtggatcctgcgactgagtggctgggaggcggctttgattatgctggcaattgaggcgctgatctgggcgatcagcccaaacgaactggagaaatggtgtgagtcaaactctttcggaaaaaggcctgagactaaggtcggaagttcttatgcaacagcgcgggagcagcagttggcgtttgaaaacgctctcggtgcagtgtctgcgagggtgcaatga

SEQ ID NO: 533122 - DNA, 180 bp, Stenotrophomonas maltophilia
atggtcggcacccacgcgggcgacatgatcggagagatcgcgctggctatcgagatgggtgccgacgcagtggacatcggcaagaccatccacccgcatccaacccttggcgaatccattggcatggcggcggaagtggcgcatggcagctgcacggatgtgccgcctgcgcgcaagtaa

SEQ ID NO: 533123 - DNA, 711 bp, Stenotrophomonas maltophilia
atgactcagctgctccatctcgacgccagcgcccgccccggccgcgcgggcgaacacccgcacggatcgcacacgcgtgccctcacccaccgcttcgtcagccgctgggcgcgcgcccgcccgggcgatgccctgacgtaccgcgacgtcggcctgcgcccgcccgcgccggtcagcggcgactgggtgcccgccgccttcgcgccgcccgcgcaacgcacgcccgcgcagcacgccgtactggccgaaagcgacgcgttggtcgatgagctgctgcgcgccgacctgctggtgctgggcgtgcccatgtacaacttcggcccgccctcgggcttcaaggcctggctggaccagatcgtgcgcatcggccgcaccttcgactaccagcccgaacgcgccgacagcccctacgtgccgctgctggccgaccggccccggcgcgcggtgctgctcagctcgcgcggcggcctgggctacgaagacggcggcgagatggcggcgatgaaccacctcgacccggccgtgcgcacggtgctgggcttcctcggcatcaccgaggtgcacggtatcgccatcgaaggcgaggagctgggtggcgaggtgctggcccgctccgtcgcacaggccatgggtgccgtggatcggctggtcgatcggtggttggcggccaatcacccccgcgccgacgcggtgctgtgcgaggccgcatga

SEQ ID NO: 533124 - DNA, 912 bp, Stenotrophomonas maltophilia
atgaacgcacgggttctgccttcgctgtcggcgctgcgcgcctttgaagccgccgcccggcaccgcagcgccaagcgggcggcgcaagagctgtcggtcacgcccaccgccatcagccaccaggtgcgccagctggaggaagcgctgggcaccgcgctgttcgtgcgcacgccgcgccagctggtgctgacggcgccggggcgcgagctgcagcaggcgctgaccgcctcgttcgacgccatggccgaggccgtcgcccgcctgcgggcgccgtccgcgcggcaggccgtcaccatctcggccacgccggccgtggtggcgcgctggctgctgccgcgcgtcgaggccttgcaccagcgccacccgcagctggacctgcgctttcatgtgtcgcaccggcccgaggcgctggatggcgtgacggccgacgtggcggtgcgctacggcagcggccagtggccggggctggtggccgaaaagctgttcgacaccgtgttcgtgcccgcctgcagccccgcgctgggcctgcggcggcgcgccgacctgccgcgccacccgctgctgcactttgcgccgctgggcgtgttcgacctcgacgtcgattgggctgtgtggcagcgccgcgcgcgtgtgccggggcttgacgtgtcggccggcccggtgttttcggacgagacgcacaccgtcaccgccgcgctggccgggcagggcgtggcgctgatggggcgcgcgctgatcaccgccgagctggccagcggcaccctggtgcagcccttcgggcccgagctgccgggccagccgttccacctggtctaccccgtccagcgggcaggcgacccgctggtgcgcgccgtgcgtgactggctgctgcacgaacccgagcctgagcgccgcacaatgccccatgcctga

SEQ ID NO: 533125 - DNA, 834 bp, Stenotrophomonas maltophilia
atgcctgacgcgatgccgtctccgatcacgcgccgccacctgcagcgcctgcgccagatgtaccgctcggccggctggccgtgccaggacgtgctggaggtcgagctgctggcggcgggtttgctggaacgccgcacgacgcccgacggttgcgagaccctgcgcgtgaccgacgccggcattgccgccctgagcgccgcaacggcgggtcatcgcgcggcgctgtcggcgcacgagacgctgttgcgccgtgtcgcgctcgaccagcagcgcgcaggccgcatcgcctggcgtgggctggcgctgcgcgtgccgctgccggtggcggaggattcagagccaaatcagcctccaacgcccgccaaccgggcgcaagcagctatcaaatgggaagcgaatgtggaggacgctgacatcgcggcaacgcctgccgtgcgctggcacatggcctgcccggacctgttctccgtgagtctgaccagcgtcgaggcctacctggacccggtggtgcacgagatcaaggtcagccgcgccgacctgctggccgacctgaagcgcccgcacaagcgcgccgcctacctggccatgggcggcgcctgctggtacgtgctggggctggacgcgcgtggccgcgccatcggcagcgccgacgatgtgccgcccgaatgcggcgtgatggtggcgacgggcgatcgatgcctggtgctgcgcgccgcgccccgccgccccgtggagcgcctgcccttcgcgacctggatggcgctggcgcgcgccacacccctggccggtcgggacgatgacgatgcgcagtcggtcttgcgtgaatcggattga

SEQ ID NO: 533126 - DNA, 456 bp, Stenotrophomonas maltophilia
atgaataccgcattcgtcccagtaccgcgcacaggcatgcgcgcctcccggcggaagggtttctctcttattgaactcatggttgtggtggcgatcatcggcatcctggcgatgatcgcgctgccgcagtaccagcgtttttcggcgaaggcgaagctggccagtgcgctcgccgagatcgcaggcgggaaagtcggcgtcgaatcgctattggctgagggcagtgatgtcacatcggcggcatccatcggcctgcccgtgtccagttcccgttgcgagtggattacggtaacgagcgatgccacagatggagctacgagtatcgcctgtgtgctcaagagtgacgcaacgtttggcacgggaagcatgacgcttgatcgcgactcggagggcgtctggctctgcaagagcgatgtgcaggaccagagccttcttccccagagttgccaggcctga

SEQ ID NO: 533127 - DNA, 819 bp, Stenotrophomonas maltophilia
ttggaacttcagttcgaggctgtgattgattcacccacctatagtgcggacatgaagtcggcccttgacactcttcaaggcatctctgatgccacgagaaagatcaccgaatcaatccttacagacgagatcgtaaaaagaataaatttcaaaagcgacgtcagcaccaccctcaagaaaagctttaagggctcctttggacaacagttcagcctcgacatcaaaagcaagaaaaatgtagataaaataaatgaaattggcgtaaagaatttcgttgatattgtccactttatcctaatggaatctcggtacggggaaaccagagttctttcgagaaaggcaaagaaatttcttgaagagataaagtttagcgagaatgcactaattgaagagatacgcagctcgtgcatgaggaatgcgcacaaaattgctggaaaattcggccatgacgttacggttcgcttcaagggcccgagcggacgcagggtctttgttgggaaatttgacaagaattctgcgggcctactaaatccaaagttcgatccaagaaaagcgaacattcgcgctggcattacgcgactcaacatcaacacggggaacggcaggcttcaactggtcggcgagaacacgaccacagcttttgggttctcaggcgattacgcgagtgttgagctgcgactgaagaagctgttctcagaaaatctggatgacaacaatggcgtcagagctgacgcatggagctacctcgacctaacggcgcaacgcttggtactcaagaatggaaaaatcgttaaatacgtggttacggatgcagcatga

SEQ ID NO: 533128 - DNA, 735 bp, Stenotrophomonas maltophilia
atgaagaaatggcatttgatatcactagcgcttgcggtctgcgcactcccggcggcttatttcctttatttcggatcgatacttcagcacccgatctcccaggatccttctgagtggggagcactaggcgattatcttgggggcattgccaacccgctgctgagctttatttcgatcctacttattgtgaactccctaaagctccagcgcaaagcaaatgcctcgattagagtcgagctcaagctatccaaacgcatagagaatataagaatatttgaagaaagattctttagattaattgatgcactaaggagccagtacgaggagttggaaattgaattccataacgaggacgaaacaacaaccactctccgagcgaccaaggccgttaagagaatcgaagactcgatagctaaattcgtcgaatcgggcgcgaataacagcatcacgatgttcatcaagcagtgcgacgaggacgaccacatttactcctgcctccgtaggttttccgtggtcattagactcgtctccaatgatctatcagcctccaggggctataccgatcaagagcgacgcagatacttcgaaagcctcgttaatttttcggattttggactgattcgtcttgtagtagcaacttgcagctacaacgaatccgaggcagctcgggagattagagagaatgtggagttttccgacgtatgcaaatcactggggctaaccatttcggcgtag

SEQ ID NO: 533129 - DNA, 981 bp, Stenotrophomonas maltophilia
atgcctccgggaacagcaacaaagacatcctatactcagaacggctccgctggcctcggagccattgggataaccgcttcaattgggcagaccgggaactttgcgatccagcaggaagaaccactgctgacggcatttcgagaaatatctaagaacagcgcaacggagaatgttgtggttgttttagagaaccttgaatcaatatttgacaatgccgagcttatgaatgagctcgcccagataatacttttactggacgatccgcagtactcaaagtacaaggtaaaactgctaatagtaggaactccgaatggagtcatagactatttctcacgcacacgcaatcttgaatcagttgcaaatagaatctgcgaaatacagaaagtggttggattcaccgaaagggaagtgagtgagctagttagaaagggctttacctcggagcttggagttaaattgtcagaagacgacattctatttatcaccgaccacatctacaatgtaaccatgggcgtggcccagcgcgtccatgagtattgcgaacaacttgcatttctaatggaggacgcaggatggatttacagcagggaacaactgcatctgtctgaccaacaatggcttaatattggcttgcgccagtcttatgtcgtgcttgagcagaaactcaatagcagggacaccgcagtctcccgaagaaatcaagttatttatgctattggaaagacaaaggctcatcagttcgaccctgctctaattgatgccaccatcagaagagagttccctgaaaccacttcgggaaagaatctcggaattagtacaattctgacggagctgtgctcggaaccagaaccattactatctagaaataagactggacagtatcgagtcaaagatcccaggtacattatgtgcatcagaaccgcactatataaggaagtgcaaggcggaaaagtcagaaagaggaactttgtcgctggctaa

SEQ ID NO: 533130 - DNA, 828 bp, Stenotrophomonas maltophilia
gtgaccgccgccgccggtgataacggcggcccccggcgcttcgtgccgccgccacgtgcggcggtcgatccgcgggtattcaagcatccgctgtttggcgggctgcaggattttcgtgacctgttggacggcactgcatggccgtccatcgctgcgcttgatgcgcggctgggattgcccggcaagcgcctggtcgaacaggatgccgcgttgctcgccgacggcctgcattacgaagcacgtatcgccgaaggctgcatcgccacccgcgccgacaactggcatgacctgttcaatgcactggtgtgggcccgtttcccgcagctcaagcaggcactcaacgcgcagcaatgccggcatgtcgaggcaatgccgccgggccagcgcaaccgcgcgcaggcggcactgacccagttcgacgaaaccggcgtgatcgtgcgtgtgtgcgatgccgcgttgctcgcggcatgggatgcgcatgactggcccgtggtgtttgaacccgcgcgctggcaacgcggtgccagcggcatcgctgcggtgttcggccacgcgttgatggaacaggcactgctgccggggcgattgctggtgggcaagtgcgtggtggtgcagggtgatgacgatgatgaggcctgcgtcgcagcggtggccgcggccatcggcgagggcagggcggtcaccgatccggcgcagctgcggccgctgccgctggcgggtatccccggctggcatgacgtgcaggatgccgccttctacgcagacgccggctacttccgtccgctgcgcgaaggtcgcgggtacccgccgccgttgctgcttctgtag

SEQ ID NO: 533131 - DNA, 264 bp, Stenotrophomonas maltophilia
atgcgagccttgttcgtcggtggcgtggtcgacaacagtgaaatggacctggaaggcagccatccgcccgtgcactaccccgaggacaccggcggcggccactcgcgctaccggctgcaccaggtcggccatggcgccgacggcagtgtggcctatgcggtgtacggcgcgcccgacatggccgatgaagaagtggcccgggtggcggaagaacgcgcctatgcgcgccggttcgaggcgacgcccacgctgttcgagcattga

SEQ ID NO: 533132 - DNA, 1842 bp, Stenotrophomonas maltophilia
atgaacgcctccgctgtgaacctgtggattgcactggcactcgccctgatcgtggtcatcgccagcgtgcgccagctgcgtggaagtaccgcgcaccctggccgcacgtggaatgtggtcgcgctgcaggtcatcgccgccacgctgctgtatttctgcctggtgccgcccacccgccagcaacccgccgccggcctggtcctgctcggaatcgatgccgacagggctggcgtactccctgccagcgcaggcccgctgctgctgttgccggaagcctccgatgtgcccggtgcgcagcgcgtgccggacctggcgaccgcgctgcgccagcatccggccgccacgctcagcctggtcggtgccggcctggtcgcgcgtgaccgcgacgcgctgttgcctggcgacgtgcgctggcagcaggtccccgcgccgcgtggctggatcgcactgcagccaccggccgacgtcgcgccgggcgcgcgtttcgaggtgcgcgctcaggcgaacggcgtggcgcacgcaagtgcggaactgctcgacccggccgacagcgtggtcgatcgcaccgatgttgccgacggcggacgcgtgcagctcagcggcgtcgcgcgtgccgaaggccgcagcgtgttccagctgcgcctgctcgacgctgaaggccatgtggtggacagcgtgccggtaccacaacagaccgtgccggcgtcgcccgtgcggctgctggtccgtgccagcgcgcccggaccggaactgaagtacctgcgccgctgggccacggacgcgggtctgcgcgtgcaggcacaggccgatacgggggcaggcctcagcgtcggcgatggcgccgtaccgctggatgccgcgtcgctggcgcgcagcgacctgctgctgctggacgagcgcagcctggcggcgttgagcaccgctcagttcgccgccgtgcagcaggcgctgcgcgatggactgggcgtgctggtacgcagtgcgggcgcaccttcgcccagcgcgcgccagcgcctccgcgatctgggcctgccagtgcagggcgatggcagcaaccacaccctcatccctccaggtgacggcgaagccgccctgctggccgcgcgacgaggtccgcttgccgctggcacgctgccgaccggctacggcgaggaggccgaccgcagctcgcacagtgcgccattgcctgcactggaagcgctggcgctgcaggtgccaggcggcagtgccctgctgcaggatcttgacggcaagcccatcggtggctggcgcgccaccggcaagggccgcatcggcctgctgccactgaccgacagctggcgctgggtgctggccggccgcgatgaccgccacggcgaactgtggagcagtgtggtcgccacgctggcgcgcgcgcagggcggtggtgatgcgctgtggtcgccgcagccgatcagctgggcaggcgaacggcaggcgttgtgcggtgtgcaggcgccgctgcaggtcttcaacgaaggtggcgacggagtaccgctggtcgtcgatggcgcaacctcgaccctgcgctgcgccggctggtggccgcgcgacgcagggtggcagcgcctgcagcacggtgacagcatcgtctggcgctacgtgttcgatccgaaggaggcacctgcactgcatcggcaggcgatgatcgatgcgacctcccaggccctggcctccagcacgccgatgaacacgtcggcgatgcagtccgtgccggggtcgcgctggccgtggtggctggcgttcgtgctgtgcgcctcgctgctgtggtggctggaacggcggcgcatgcacggccctcgattgacgcaaccagcaccgtag

SEQ ID NO: 533133 - DNA, 1998 bp, Stenotrophomonas maltophilia
atgacgcagcctacccgtcgccagttggccaacgccatccgcttccttgccgccgatgcggttgaaaccgcaaagtccggccaccccggcatgcccatgggcatggccgacatcgccgaagtcctctggaacgactacctccgccataacccgagcaacccgcactggttcaaccgcgaccgtttcgtgctgtccaatggccacggttcgatgctgcagtacgcgctgctgcacctgagcggttacgacctgccgatcgagcagctgaagctgttccgccagctgggcagccacaccgccggccacccggaacgccacgagaccccgggcgtggaaaccaccaccggcccgctgggccagggtttcgccaacgccgtgggcttcgccctggccgagaagctgctggcacagcgcttcaaccgcccggagctggaagtggtcgaccaccgcacctgggtgtttatgggcgatggctgcctgatggaaggcgtgtcgcatgaagcggcgtcgctggccggcacctggggcctgcacaagctggtctgcttctgggacaacaaccacatttccatcgacggcaacgtcgagggctggttcaccgacaacaccccggaacgtttcgaagcctatggctggaacgtggtccgcgacgttgatggccacgacccggaaagcatcaaggccggcatcgaggccgcgctgtcgcagagcgacaagccgaccctgatctgctgccgcaccaccattggttttggctcgccgaacaaggcgggcaaggaatccagccacggcgcaccgctgggcaaggacgagctggaagccacccgcaagcagctgggctgggaatacggtccgttcgagatcccgcaggcgatctacgacggctggcgcgccaatggcgccggcaccctgcgccaggccgagtgggagcagctgttcgacaagtacgccagccagtatccggcggaagcgtccgagctgacccgtcgttcgcacggcgagctgccggccgacttcgttggcaaggccgatgcctatatcgcccaggtggccgccgaaggcccgacgatcgcctcgcgcaaggcctcgcagctggccatcgaagccttcgccccactgctgccggaaatcgttggcggttcggctgacctggcgcactccaacctgaccctgtggaagggcagcacgtcggtcgccagcgacgacgccaacgccaactatgtgtactacggcgtgcgcgagttcggcatgaccgcgattgccaatggcctggcgctgcacggtggcttcattccgttcgacgccaccttcctggtgttcagcgactacgcccgcaatggcgtgcgcatgagcgcgttgatcccggcccacgccatccacgtctacacccacgactcgatcggcctgggcgaagacggcccgacccaccagccggtggagcatctggcctcgctgcgctacatcccgaacaacgacgtgtggcgcccgtgcgatgcggtcgagtcggcagtgagctggaaggctgcgatcacccgccaagacggcccgagctgcctggtgttcagccgccagaacctgccgcaccagccgcgcaacgccgagcagatcgcccagatcgagcgcggtggctacgtgctggccgatgccgccggtaccccggacgtgatcctgatcgccaccggttcggaagtctcgctggcgaccgaagccaaggcccagctggatgcggccggcctcaagacccgcgtggtctcgatgccgtccaccgacgtgttcctgcgccaggatgcggcctaccgtgaatcggtgctgccgaacgccgtgcggaagcgcgtggccgtggaagccggcgtcaccggcttctggcgccagttcgtcggcctggacggtgcggtgatcggtatcgacaccttcggcgcctcggccccggccgaccagctgtacaagcacttcggcatcaccaccgcccacgtggtggaagcggcgaagtcgctgtaa

SEQ ID NO: 533134 - DNA, 1320 bp, Stenotrophomonas maltophilia
atgacagcagctgctgccgacaagaagaagttgcccctgcactggaagatgggcatcggctttgcgatcggccttgtcctgggactgaccgtgcacgccctgggtggcagcgtcgagggtctgcagggcggtgccaagtgggtaatggattacgtcaccaccccggcttcgggcctgttcctcaacctgatcttcatgctgatcgtgccgctgatcttctcggcgctgatcatgggcgtgtcggagatgggcgacatccgcgccctcggccgcatcggctggaagacgctggcctacaccgtgctgctgtccggcattgcggtgggtatcggcctggtgctggtcaacgtgctcaagccgggtgccggcgtcgacccgcaggtcgcggcgatgatgctgtcggagaacgccgagcgcagcaaggagatcgtggccggcatccatggcacgccgaagggcatggacatgctgctgtcgatcgtgccgagcaacgtgctgcaggccgcgtctgacaacggcgcgatcctgtcgctgatgttcttcgcactcatgttcggcatcggcatggtgctgaccgacaacgagaaggtcgccccgctgcgccgcgccattgaaggcgtgttcgaaatctcgatgaccctgatcaacctggtcatccgcctggccccgtacgcggtggcctgcttcatgttcaacctggccgcgctgttcggcttcgagctgatcatccgcctcggcgcctacgtgggcgtggtggtgctggcgctgggcctgcacatgatcgtgacctacggcaccgccgtgtggctgtcgggccgctcgccgctgtcgttcttccgcgatacccaggaagcgacggtgatggcgttctccaccgcatccagcaacgccaccctgccgaccgcgctgcgcgtggccgaccagatgggcctgccgcagcgcgtgtcgcgcttcgtgctgaccgtgggcgccaccgccaaccagaacggcaccgcgctgttcgagggcgtgacggtgatcttcctggcccagttcttcggcgtggacctgagcatcggccagcagttcatggtgatggcggtgtgcatcctcggtggcatcggtaccgccggcgtgccgtcgggctcgctgccggtggtggcgatgatctgcgcgatggtcggcgtgaacccgctgggcatcggcctgatcctgggcgtgaaccacttcctggacatgtgccgtaccgcactgaacgtgaccggcgacctagccctgaccaccctcgtggccaagggtgagtccgacgacggcccggcgctcggtccacagcaggactga

SEQ ID NO: 533135 - DNA, 1716 bp, Stenotrophomonas maltophilia
atgacgcgggtgatcaacatgcacgggtgctggccccggcaggtactggcagcgctgctgctgtggctgccgctgctggcctgggcgcagccgcgcgcctggctggaccgcgatcgcattgcaatgggcgatacggtcaccctcaatgtcgagagcgatcagggcgcgcctgacttcacgcccctgcgtaccgacttcgatctcagcgcgcagaccagcagccgccaggtggagtggagcaacggcagcatgcagcagcgcaacctgtacggcgtggcgctgacgccgcggcgcagcggtgcgctgctggttccgggcctgcaggtgggcagtgtgcgtaccgcgccgctgaccctgcaggtggacgcggccgccgtggcgggcccggacagcactgcgatggccttcatcgagacggttgtcgatgacgaaacgccatacgtgcagcagagcgtgggcgtggtggtgcggttgtactttgcttcgcagctggcgtcgggtgaactggtactggataccccggcgggcgcgtcattgcagcgcgtgggcgatgaccgcaccgatgtgcgccaggtcaacgggcgccgctacaacgtggtcgagcgccgcttcctgctgatccccgagcgcagcggcgcattgcggttggccggtgcgcgcttcagcgggcgcagtgccggtggcttcttcgacgacttctttggcgggggcgacggccgcatgaatgctaccggcgccgaccgcacgttgcaggtgcaggcacagccggcgcaagcgccgcagccgtggctgccgctgcagagcctgcagctgcgctataccagtgcgccgaccagcgcccgcaccggtgaggccgccaacgtggtggtcgaagcggttgccgaaggcgcgacgcgcgcgcagttcaccgatctgccggtgccggatgtcggcgccaatgcgcaggtgttcgccgaaccagcacagtacgaagagaccttcaacggcagcacgccacgcctgaagatcacccgccgctattcgatcgtgccacgccagccgggttcgctggtggtgcccggcccgcgcctgccctggtgggatgtgcgcagcggcaaggcacaggaagcaacgctgccggacctgacgctggcggttgcggcgggcaatggcggcggcaatacctcgccggccccgttgccgccgatcgacaccgatgccgcgctgcccggcaccgatggccaggacagccgcatcgcggccaccgacccgcgcgccagcggcatggccgagcggccatggccctggatgggcgcggcgatcgggctggcgctgctgtggctgctgaccctgctgtggggctgccagcgtggccgtcgcccgcgtgcagcggcgcctgtcgcaggcacgtccgctgtgccgactgtggcgagcgggcgtgccggcctggccgaactgcgccgggtgctcgatggcgagggcttcgaccaggtggaagcacagctgtgcgcgatggccggtgtcgaacgtgtcgagcaggtcatcgcgcgcctggacgatccggagcagtgccaggtgttgcaggacctgcagcaggcgcgctggggcgggcagggtgatccggcggcgctgcgtacgcgcctgcgcacggccttccgtgacggaccgcactggtcggcggctgcgggtgctgctgacactggcctggcgccgctgtatccaccgcggcgaacctga

SEQ ID NO: 533136 - DNA, 1851 bp, Stenotrophomonas maltophilia
atgatcgcgttggcgtcgaatcttcccgactggaacgcgctgcatttcctgcgcccggaatggctgtgggccctgctggcgctgccggtgatcctcgcgctgtcgctgtaccggcagcggcgcagcgatgcgtggcggcaggcggtggatccacacctgctgccgcacctgctggcggccggcacgcgtcgtcgtacgcgcctgccgtgggcgctgctgctgggctggacgctggcatcgctggcgatggccgggccaagctggcggcagcaggcgcagccgatgttccaggccagcgcaccgctgctggtcgtgctggatctgtccagccggatcaccgccaccgacctgccgccgtcgcggctgctgcaggcgcgggccaagctgggcgagctgctgcgcgcgcgcaagggcggccaggtcggcctggtggtgtatgccgatgacgcctatacggtggccccgttgaccgatgacggcagcaatgtcgcgctgtatctggatgccttgtcacccgaggtgatgccgcgcgatggacagcgtgccgaccgcggcatcgactgggccgcgcagttgatgcggcaggtcgctgcgctgcagggacagatcctgctggtcaccgaccaggcagacagtgaggccgcgctggccgcggcccaggcacgcagcctgggcctgcaggtttcggtgctggggctgggtacgccggccggtgcggcctatcgcgatggcaatggccagatccgccaggcggcgctggatgagggcagcctgcgcgccgtggccaccgcaggtggcgggcgctacgcgcgcatcgccgccgatgacagtgacctgcgtgcgttgggggtactggatgcgcgccagggcacggcgtcgcagcggccgggcgaaggcaggcagtggcgcgatgaaggcttctggctgctgccgccgttgatgctgctggcactgttggccttccgccgccgcgcagtgctggccgcggtgctggctgttggcctgctgccctggatcggtgacgtgcaggcgcaggcgccagcagcacccgcaccgccgcccgcgcagggcaccctgtggaagcgcgctgaccagctgcagcaccagcgcctggccgaaggtgtgcaggcgtaccgcagcggcgacttcgccaatgcacgcaagcagttcgaaggcatcgacagcgatgccggctggtacaacctggccaacgcgctggcacgccagggcaactacgatgaggccatcgccgcctatgaccgcgcgttggcgctgcatccgggcatggccgatgcggtggccaaccgcgctgtggtcgatgccgcgcgcaagcgcaggcagtcgggaggccagggccagggccagggccaggaccagcagaagccccagcagagcggccggcagaagcagcagaacgattcgcagggcaagcagaatccgtcgggccagcaaccgcagcaggggcagaaagaccccgggcagggccagccgcaatcgggccagcagggccagcccaagcccggcgatgacacttccccgtcgagcccgcagcccggcgagcgcggccgcgatggccagcaggcaccaccgcaggtggaagatgccaaggcgcaggcgcaggccgacgagcagcagcgccagcgcatgcagcaggcaatgcagcaggcacgtgaaggcaagggcgaacaggatggcaagcccgtgccaggcagcgaaggcaccaccccgcgccagcgcgaggagcaacaggccgtggaggcgtggatgcgacgcgtacccgatgatccgggcgcgctgctgcgagccaagttccagctggaaaacgaacgcaggaagagggaagggcgatga

SEQ ID NO: 533137 - DNA, 1005 bp, Stenotrophomonas maltophilia
atgaatctgctggcgagctactggccgtggccggacctgcagctggcatggccgctggcgttgttggcgttgccgttgccgctgctgatgtacgcgtggaagcgtcgcgctgaccccggcgcggcgctgcgcgtgccgtatgccgccagcgaactggaagcactgaccggtggtggccgcgtcgacgtgtcctggctgcgtaccctgctgttgtggttgggctggtgcgcgctgtgcgttgcgcttgcccgtccacagcaactcggtgaggccatcaccccaccgcagcagggccggcagatgatgctggcgatggacgtgtccggcagcatgggcgagggcgacatggtgctgggcggacaggccgtggaccgtctcaccgcagccaaggcggtgctggccgacttcctcgaccgccgcgccggtgatcgcatcggcctgctgatcttcggcgaccgtgcttacacattgacgccccttaccgctgacctggccagtgtgcgcgaccagctgcgcgacagcgtggtcggcctggccggccgcgaaaccgccatcggtgatgccatcggcctggcggtgaagcgcctgcgcagccagcccgaaggccagcgagtactgatcctgttgaccgacggtgtcagcaatgccggcgtactggagccgctgcgcgcggccgaagttgcccgcgccgagggcgtacgcatccacaccgtcgcgtttggcggcgacggcagcatgcgcgtgttcggcatctccattgccgccgaccaggatccggtcgacgaggccacattgaagaagatcgcgggcatgaccggtggccagttcttccgcgcacgcgatacggcacagctggccggcatctatgccgaactggaccggctggagccgatcgctgcgaaagggccgagcctgcgcccgcgcgaggaacgctatgcctggccgctgggcctggcgttgttgctgggcgcgctggcgtggctgtggccggagcgtcgccgatga

SEQ ID NO: 533138 - DNA, 450 bp, Stenotrophomonas maltophilia
atgagcgccaacctgccgctgcgcgacgtgcagctgccgccggccccgtcatggtggccaccggcaccgggctatctgatgatcggtgcggcggtgctactgctgctggtggtcgtcgcattcatgtggtggcagcgtcgtcgccgtcggcagcgctggttgcagcagttcgacggggagctggcggcgtgcaccgacagcgcggcggaactggcggcgatcgccggcctgctgcgtcgtgccgcgcgccaggcacgtccgggcagtgaatcgttgcgcgacgacgcctggtggcaacgcgtggacccgcagggcacgttgtccgatgcacgacgcagcctgctggccgagggcgcctatcggccacgcgtcgaagccagcgaagtggccgcagtgcgtagctggtcccgcgcgcgttttctggcgatgctgctggagcgtcgtcgatga

SEQ ID NO: 533139 - DNA, 900 bp, Stenotrophomonas maltophilia
atggccagcgagggcgtcgggctgcgcccgcagttggccgaactggtcgcgctgcgtcgcctggcacagcgcccgccgccgccacgccgcggccgtgccggcaatgcggggcaggcaccgtccccgctgcgcggccgtggcatggagtacgccgaatcacgcgagtacgtggccggtgatgatgcacggcatatcgactggcgggtgaccgcgcgtaccggtcgtgcccacaccaagctgttccaggccgagcgcgagcgggtcagcctgatcgtggccgacacctcgccggcgctgtatttcggcacccgggtgcgcttcaagtcggtacaggccgcacgcgcgggcgccgttgccgcctggtcggcgcagcggcgaggcgaccgcgtgggcgcgctgcgtggcagcgaccgcgagccaccggtcgcacccgcaggcgggccgcgcggtgtactgcgcgtactcgatgcgctcacccgctggtacgcgcagcctcccaacgatgatcttggtctcgaacgtgcgctggaccacgccagtcgtgtgctgcgccccggcgcgcgcatgctggtgctggccgatccgcagcaggcggcgcggattgcgccggtacgctggagtgcgctggcccagcaccatgacctctgcctggttctgctggtcgatccattggaactgcagccgccgtcggcggcgctgcagttccagaccgcgcagcagcgcatcggactcgacctgcgccgcagcgacgtgcaggcgcactggcacgcgcatttcgtcgagccgctgcaggaactgcggcgccagctcggcgcccgccgcgtcgacgtgcaggtgctgtccaccgatgcgcccagcgatgcgtggctggccccggcgccgaccgaggtgccggcatga

SEQ ID NO: 533140 - DNA, 1026 bp, Stenotrophomonas maltophilia
atgaacctgcctccgccgatgcccgaaaccgtcccgccgccgcccgcgccggccagctcccgcctgcacgccgccttcagccagctgcgcgatgcgctgtccgccgaaatcgtcggccagtccgcgctggtcgagcgcctgctgatcgcgctgctggccgacggccacctgctggtggagggtgcgccgggactggccaagaccacggcgatccgcgcgctggcagcacgtctggaaacggacttcgcgcgcgtgcagttcaccccggacctgctgccggccgacctcaccggcaccgagatctggcgcccgcaggaaggccgtttcgagttcgtgcccggcccgatcttccacccgatcctgctggccgatgaaatcaaccgtgcgccggccaaggtgcagtcggcgctgctggaggcgatgggcgaacgccaggtcaccgtgggacgccacacctacgcgctgccgtcgttgttcctggtgatggccacgcagaacccgatcgagcaggaaggcaccttcccgctgccggaagcacagctggaccgcttcctgatgcacgtgcgcatcggctacccggaccaggcggccgaatcggaaatcctgcggctggcgcgcgagcgtgcccgtggcgcattgggcgaagctgcgccggcgccggagaagctgccgatgcaggatgtgttcgcggcccgtcgcgaagtgctggacctgcacatggcgcccgcgctggaacgctatctgattgaactggtgctggcttcgcgcgatccatcgcgctacgacgccagcctcggtcgccgcatcgcgtggggcgcaagcccgcgaggctccatcgcgctggaacgctgcgcacgtgcgcgcgcctggttggcgggccgcgatttcgtcacgcccgatgacgtgcgcgcggtcgccgctgatgtgctgcgccatcgcgtgctgcccagctacgaagccacagccgaaggctgggatggcgagcgcctggtgcaggagctgctggcccgcgtgccggcgccctga

SEQ ID NO: 533141 - DNA, 621 bp, Stenotrophomonas maltophilia
atgacggctctgtcagtttcagtgccaccgatatctccattcccggcaacggtggcctggcggtgtcgctgggccgcagctatggagatatcggcggcagcgcaaacgacaacgagtacggaaactggacgctggatatcccgtcgctttcgggcacctacggagatcagccggaaacggcggtggcaggtcattggacaccgagcgcgcgctgctcgaccgtctccgcacctccgtcattggacgtctggaactacaaccatacccagacgaccgtgttcgcaccccatacctattgggaaggagtgcggttgtcactgcctggcggcagcggtgaaacggttcttgccggcagcggagatgcgcgccagcccaccccgcaactcggcatgcccgccccgtggaataccaagggtggatggttcttctcctgcctcagttccctcaagagcggccagccgggcgaaggcttcctggggcatgcgccggacggaaccaagtactacttcgactggatggtggcgcgccacaacgacccggctgtcatgcagccctacgacaccatcacccattcgacgctgcagcggaagaaggtcttcctctatccgtcgcaggtcgtag

SEQ ID NO: 533142 - DNA, 1500 bp, Stenotrophomonas maltophilia
gtgcgtacgatcgcggctgccgaccctggcacggcgcaggttgtccagtgcgtcgtactcgtacagtgcattgccgaagcccggcgcggtcaccgtacgcaaccggtccaggccgtcataggtcatgtcacggttgccgggtgcacccggcagcccgtcggagatggccatcacattgccaccggcatcgtaatcgtagctgtcatcgagtacggcagccgcagcggtggcatctcgactgcgctccggcaggccacgggcattctgggtcagggtatgcgcgatgccgttgccgtaaacgaatcgcgccagcgcgccattggcaaaatagctggcgctgtttgcgtaaccgccgaccgctgtagcccgccccagcgcatccggagcatagctgacgacgcgtccgcccgggtaagtgttgctggccagcgtgccgttggcatcgtagccgtaggccagactcaggttgcccagatccggatgctgcagcgtctcgctgctgagcaggcgccggcgattgtattgatagcggttgacgaccatcggccgggccgggtcgttctgcgtactgatttccgcgggcaaggcatccggcgtgtaggaccagcgctggtttccgcgcccatccgggaacgtcagggtcgacagtcgattggcggcatcgtagctgcgcgccaccacacggccgctggcaaaggcctcgctgcgattgcagtcggccgcgctgcccaggccggtcccggctgcggaccacagcacgttgccggccgcatcatagtcctgcaccgtcgcgccggtttccggctcgatggtcttgcacagctgctggtaaccgtcatagacgtagcggcgggtcaacgcctggctgccatcggccgtgcggcgggtgatcgccaacggcttgcccagcgtgtcgcgctggatctcggtcaccacgccttctggatgctgcagtgtcagtggcatctcgtagctgggctgatcgtaggcgagatgccgcgtggtggtggcctgcccgcgcgggttggtcaccttcaccgacaggttgcctacatactcggtgcgcgttaccagatcgcccagttccgacgattggctgaccaccaccggccggcccaacgcgtcgtactgcgtcgtggtgcccgtcattgctgcattgatgtcggtgagctgtcgcgtggggtacgacgcaaacaccgtcttgccactgctgtcgtagcgggtcaccaccgcgctgtcgagcgcgttgttggcattctcggtgaccagtaccgggcggaacatggcgtccagataggtgtcggtacggcgtccgccctgggtacgggagtgcttccacgcgccggccggcacacccagctgggcgccgcccagccgctgcaagtccatggtcacaccgttccagttcacttcatcgccacctgggaactgctggctgcgcagccgccccatgctgtcgtagctgaagctggtggttgcgccgacttcatcggtcagtga

SEQ ID NO: 533143 - DNA, 342 bp, Stenotrophomonas maltophilia
atgcctcgactgctcttgctgcttctgtgtctgctgcccgttgccgtaactgctgcggaagaggggcagacacccgtattgatctggagggcggccggttccgagggagtaagcaacgacgtcctgggcggggtgacgctgactcccgctgcgaaaggtgcgttcgtcgacacgcgcgtacatctgattggaagccagcgctttaaggcggtgtaccaggtgttcgattcaaacgccgctagcccgatgggccgttgcggtgcggggcacgagattcatctcttcgtctacgaactgatcccgcccacgccctgtcgagcggggcaggatgctgatcagtag

SEQ ID NO: 533144 - DNA, 603 bp, Stenotrophomonas maltophilia
atggccgaggagcgaatccagcgcaaggccaaaggccgattccgacccaagtcctctggcggctcatctcagctcgcccccaacctgctggatcggcaatttgcccccggaaccggaccgacggcgtgggtcggggatatcacgtatgtccctacccgccagggatggctgcatctggccgtggtcatcagcgtccagacccggcaggtgctgggctacagcgtttccaagcgtctgactgaagagctggtggtgaaagcatttgccaatgcttgggctctgcatccacaaggacccggcctgatcttccattcagatcgtggtgggcagtactggggaaacgagtttcgccagctgctgcagtcccatggcgtggtccaaagcatgagccggcctggcaattgctgggacaacgcggtggccgagagcttctttgcgacgttcaagacagaagaggctgccgagccttacgccagtaggcaacaagccagccagtccatcgctgcttacatccacggcttctacaatccagcccggctacactcggcgctgggctaccactcgcctaacaactatgcccggcagctccggactgccgcctga

SEQ ID NO: 533145 - DNA, 369 bp, Stenotrophomonas maltophilia
atgtggtattgcgctcacgcggtatttttctatcagtatgatgggcaggattcatttctcgtgcacgagaatgtgtacttgattagcgcggaagatgaagaggtggctatgttcaaggcgaaatcgatcgccgttgagtatcagcaggttggtggggatagctctcttgaatataatggtaaaagggcggaatataaattttcagggattaggaagctgatttctgttcaggttgattccggcgttgcagattcttctgctatttgctccggagtcgagcttacctactctgtgatggaggttgagagtattcttgacgtcgaacgaattgcgaatggtgaatcagttttagttagctatcttgagtag

SEQ ID NO: 533146 - DNA, 798 bp, Stenotrophomonas maltophilia
gtggcgatcaccgatgccaatggccaggtgatcgagcgcacggtgtacgagccgtatggcgcggtggtcaaccggccgttgacggatgggccggggtacaccgggcatgtgacggactcggagacgggtctgagttatatgcagcagcggtattacgactccgctattggatctttcataagtgcggatccagttgaagctaacgggcatacgtctttcaatttcaatcgctataagtatgcccttggaaatccgtacggccatgtagatcccgatggccgatgtgaaagcgtatccacatgccagatgatgagagatgatctggcagttatcaatggaaaaatggggctggatgagcgccggtctcgccaggaggcaagagcggccggagccgctgccggcgtttcagttctagccgccagtcgtattccggcagcgactgcagctgtcatcggtggtgctaagaacgtatttgtaaatgttgcaagtcgcgttgcgtcgctcactcgatctcaacagcaggcaattaagaaaataaacaacatcgtcgacaataacgcaaagcctcacgactttgacggggttgctaaagagcttcgcggtattgagaccggatttgatcatgtcaccgagatgcagaattcattgaaggggctgagctctgccgcaaaaagcttgaggggaagtttgaacaatccgagtctttctagagggcagcgtgctaggatccagagaacgcttgacaaggcggatgagaacatagcgaaaatgaaggagacgcttggtggcggaagatga

SEQ ID NO: 533147 - DNA, 321 bp, Stenotrophomonas maltophilia
ttggaagtacgcgaagccgaattgctggcgcacttcaccgaagagctgcgccgcgtcgacggcccgcgcatcatcggcgaagcgccggagaaggctgcggtggtctccttcctgatcgacggcgcgcatgcccacgatctggccaccctgctgaatctggaaggcgtggccgtgcgctccggccagcactgcgcgcacccgctgctgcagtactttggcgtagccgctacctgccgtgcctcgctggcgttctacaacacgcacgccgagatcgagcggttcatgactgcgctgacgaaggtgcggaagttgctgggctga

SEQ ID NO: 533148 - DNA, 375 bp, Stenotrophomonas maltophilia
atgcctctgcaggtgacttttgcggtcgtcgtgcagcggcgcagcatgggcaaccatagggctatgaactggctcttcttgttttcaatcgtttggattctgatcttctatccggcacacttctatttctgcactgaattcaagatgcgtttgcggcgcgatcaccctgagttgtccggaagaagtctggcatcattcgacacgacatacaggcaactgcgtgcggtaagggaagggcgcttggatggagtgctcttgagcaaggatgtctgcgattcgcaccggcttgcgaatcggttcctgcatctgggcatgatttctttcatgatcctgctcgccgtggggctttgcgattcggtatggggcggtaattga

SEQ ID NO: 533149 - DNA, 936 bp, Stenotrophomonas maltophilia
atgaacggactctctttgctgttgaatcgagcggtactcgcgctggtggtgctggtggcctgttcggcgccggcggttgcccaggaggttgtcgagtacatccacaccgatgcactgggatcaccggtggcgatcaccgatgccaatggccaggtgatcgagcgtacggtgtacgagccgtatggcgcggtggtcaaccggccgttgacggatgggccggggtataccgggcatgtgacggactcggagacggggctgagttatatgcagcagcggtactatgatccggagggtggatcatttctgtcagtcgatcctgtcagttcgcttgacggcggtggtgctcgctatgggtatgcaagaagcaatccttatagatttgtcgatccagatggtcgctgtgctgccaagctgggaacgaagatatgcatgaacgacactcgcctcaaagcagagttgacaaatctggagaaggtatcaaaggcattgccacattcaagtccggaaggtgcggcaagatatttttcggacaaagccataccgcttcaggaggcttctggcagggaggtcttcgcgaacatggaggagaggaatccgcgagatttcagggtcatggactggggtgctggctcttcaagtggctccgcgtccatagttccttacagcggtgcctacaagttgagggcaatgctgcacactcatccggagaacaatctacacagcggaaatggtgcatatgccgcttcaggaaaattcaattatgttgggatgacggatgaccacgacatcgcgagatcctttggaaaaagagtggatagctatgttgccaggccggatgggcggattgtttggtttaatcaaaaggcttggcgagccgcaggtgaagcctcaggagcggagcgtgtctatgcaggacattttgagaagatactttag

SEQ ID NO: 533150 - DNA, 561 bp, Stenotrophomonas maltophilia
gtgatcgggccgccggcgatcgagtcggtgatcagtgcgccgggcctggtcaacgtgccgcagtacagcctgagctggtcggcgcccgccaacagcgagagcttcgtgctggaagagagtgccaacggtggtggctggacggtgatgcacaacggcgctgcgaacagctttggtgccagccgtggcaagggcagctatgcgtatcgggtgagagcctgcaattttgtcgggtgcagcccgtattcgggagtcgtgacggtagcggtggtgctgccgccgggggcgacgagcctcaatgtggcggaatggttgaccacgcgtcgtccgccctatcaggtgcagtgctccgcagggtggatcgcagtagcagatgcaaccgagtatcaacttgagagcggcggaggtggcaagcgtctgtacacggggccatcaatctatgtgaatagtggtggcagtgcctactgtgcaaacgagtatcgcgtgcgtgcctgcaatgcaggtgggtgttccccctggtcggccgaacggccggtcacccgcggtgtactgagctgggactaa

SEQ ID NO: 533151 - DNA, 156 bp, Stenotrophomonas maltophilia
atgaaggtgagattgagcccgcactgcgcgcgcccgccgatgcagtacttcagcgtcgcggccacctgccgtacctcgctggcgtcctacaagacgcacggcaaggtcaagcgattcatggcgacgttggcgaaggtacggaagttgctgggatga

SEQ ID NO: 533152 - DNA, 636 bp, Stenotrophomonas maltophilia
gtgggcgccaccgccagcgcgcgcgacgacggcaccccgccggtgacgtcactggacgaactgccccgcggccaggacgtctccgacacggtgatcgaactggccggctgggtcgtcgcctccggcgacagccagggctatcccttcgcgatcatggacaaggccgccgcccagatcctcgtgttcggcggcgatggccgcctgcgcggcgccgcgcccggcctgttcggctccgccgtgggcgaccacaccgcccccggcatcgcgggcctcgccctgcgcgagatccccggccgcgaccgcaccaccccggccggccgcttcgtcggcggctacggtccgtccatcgatgccggccgcgtgctgtgggtcgactacgactccgcggtctcgatccacccgaccgcgaccggcgtgccggaggaaaagcgccccgagcgtctggcctcgccaacgccggatgacaaccgggtcacccacggctgcatcaacgtgtctccggcgttctacgagcaggtcgtcagccccaccttcgcgcgcggcggcgtgttctacgtgctgccggacgagggctcgctggaggaggcgtttccggagttcgcgggcgccggcacccggaagaccgccggcgactga

SEQ ID NO: 533153 - DNA, 219 bp, Stenotrophomonas maltophilia
atggcgccctggcggtatggcgctacgccccggcgcgggacggcgcctgacgggccggtcacggaacacggggccggggcggcttctgcgcaggtatcggagatcgtctgcgcgctggatgtgctggccgacaatatcgatccggccgaaagctgcaaggccttccgcgtccgcatgccgagcgccgatgccctgctgcgcaaccgcggcctgaagtga

SEQ ID NO: 533154 - DNA, 1113 bp, Stenotrophomonas maltophilia
atgaaccaggtcagggccgccttcctggagactctgcgcgccgtgttctcggaccgctacgcggtggtgacgctgatcggcgccgtggtgctgtactcgttcttctacccggtcgcctaccggcaccaggtggcttcgcagtatccggtgctggtggtcgacctcgaccatagcgccatgagccgcgccctggtgcgcaaggcgggcgcggtgcgcgcggtgaggatcgtcggcgatgcgacctcggtggaggaggcccggccaaggatcgcccgtggtgaagcgcagggcctgctggtggtgcccgcggggttcgaacgcgggatcctgcgcggcgggcaggggcaactggcgctgtacggcagtggtgcgttcctcggtcgcggcggcgtggtgctcgagggcctgggcgaggccgccgccgcgttcgcgcgcgaggccgccgtggtgcaggcaggtttcgcaggtgcgcccggcgcagcgccgctgcaggtggtggcgcggccgctgttcaacacccgcgagggttacggcagcgccgtggtgccgggcgtggcacagctgatcgtgcagcagacactgttgatcggcatgctggtcatggccggcacgcgtcgcgaacgcctgggtcggctggcgttctcgcgccgcggcctgctcggcatcgccgccgcgttcgcgctgatcggcgtgtgcagcatgctgtactacaacggtctggtgatgtggctccaggactatccgcgtggcggcaatccgcccggtacgctggtgggcggagcgctgtacgtggccgcggtggtggcgttcgggctgttcgcgggcagtttcttccgcacccgcgaacggcccttccagctgatgctcgtcaccgcgctgccactcttcttcctgtccgggctctcatggccggccgtggcgatgccacagcccctggcgtggctggcgaagctggttccctccacgcccggcatcaacctgatggtgaagttcaaccagatgggcgcaagcttcgccgaggcgcttcccgagttgtgcaacctcgcttttttgacactgctgtatggcgccctggcggtatggcgctacgccccggcgcgggacggcgcctga

SEQ ID NO: 533155 - DNA, 558 bp, Stenotrophomonas maltophilia
atggtgggcgcgctcgggcgcgaactgcgtgacggcagcgcgggcacatggctggccgagtgcggcgatcgcctgctgccggcggtggccggcaagctggcgccgtacctgctgctgttcaccgcctacggcacgctgtcgctgctctggctggcggcgatccgcggcggtgtggccggcagcgcggtactgctggtcgccgcgcaggcggcgatgtacctggcctacggcggcatcgcgctgctgctggtcggggccacccgcaatatgggcacgtcgctgtcgctgaccggactgtatgcgggcacgtcgctggcgttctcgggcgcgacgttcccggtgcagggagcgccgctgttcgcacaggtctggagccagctgcttcccttcaccgcctacctcaagctgcaggcgcagcagctcgacctgggtgcggcatggacggcctcgctgtcgttgctggggaccttgctgctgttcgtgctggtggccggcggcgcggggctgcgcctgtatgcgcgcggagcgcgcgatccggcctcctgggggcagcgatga

SEQ ID NO: 533156 - DNA, 1473 bp, Stenotrophomonas maltophilia
atgactgccaaggccctggccgctccgctgctgctcgccctggccctgagcgcctgctccagcgcaccgcagtatgccgatccgcaactgccggaaggttggttcagtgccgccggcgcgcaagcggcggatgccgaaacgctggccgcctggtggcgccagttcgatgacccacagctcaccgcactggtcagccgcgccatgcagcagaaccacgatgtgcgcctggccatggcacgtgtcaccgcagcgcgggctcagctgcgccagtcgcgtgccggcctgctgccgagcttcgacctgcccggctcggctagccgccagtgggtcgagaacgaccaggacgccgaacctggaagcccgctggccggctttatccctgacgatgatgtgatcagcgtcgacacctgggagctggccttgcaggccacctgggagctggacctgtttggcgccacccgcgcgcggcgtgacagcgcggcccggcaactgcgttcggcggaggcgcagacggtagcggcgcggctcgccgttgcctcgaacaccgcgcagggctatctgcaaatgcgcgcgctgcagggccagcgagccctgctggtcgaaggcattgaagtggcgcgcgagctggagcgcatcgccggactgctcttccatgccggcgaagtgacccgactggatgtggaagccacatccgccgagcgcgcgtcgcgggaagccgatctggatgagctggatatccacttggccgaagcgcagctggcgctggacaccctgctcgccgagccgccgggcagcaccgccgcgcgtttcgccgccaacgcgccggtgccactggccgaacagcgcatcgcccccggccagcccatcgacctgctgcgccgccgtccggacctgattgccgaagcggcacggctggacgccgccgagctgcaatcgctggccgctcgccgcgacctgtttcccaagctggcggtgcaggccgcagtgggccgctccggcttcgcgctgggcgatgcagtgtccagcgcgtcgaacttcgcccgagtcggtgccacattcggcctgccgctgctggactatccacgccgcggtgcagccatcgaccttgccgatgccgagggcgagacagcctatgtcgcattcgaacaggcgttggcccgtgcgctggaggaagtcgagcgtggcctgacgaggatggctggtcagcaacgccgacacgcatccctcagccgcacccgcgagcaccgcgaacgtgcgcatcgactggcgcagcgcagctatgagttgggtgaggccaacctgagtgaagtgctggacgcccagcgtggtgcactacaggccaagcgacaagcgctcgagggcaggacggagctagcgacggcccaggtggcgttgtatgtggcgttgggaggtgggtggcaggctgaggccgcagatgccgcggctaggcctgcagagaaatcggcacagtga

SEQ ID NO: 533157 - DNA, 3045 bp, Stenotrophomonas maltophilia
atggattttgcccgttacgccatcacccgaccggtcaacatctggattctggtactgatatgcctgctcggcggcatcctcgccttcttcgagatcggccgcctggaagatccggaattcaccatcaagcaggctatcgtcaatgtgcaataccccggcgccacggcgctggaggtcgagcagcaggtaaccgagccgctggaaagcgccatccagcagatgtcgcagatcaaggagatccgctcgcgctcaatgccgggcatcgccgagattcgcgtggaaatgcaggaccgatacgatggcgatgcgctgccgcagatctgggacgagctgcgcaacaagatcgacgatgcccagggcgacctgccgccggggatcgagccgccgatggtgaatgacgatttcggtgacgtatacggcatcttctacgccctgaccggcgacgggctgaccctcaaggagctgcacgaaacggccaaggacctgcgccgcgccctgctcactgcagatggcgtcggcaaagtggagatcgccggggtacaggaagaacgcattctggtggaggtcgatcaggcgcagctggccgcactgggcgtcgccccggacgagatcgccgcggccctgaccgataccgacgccgcggtggatgccggtggcgtcaatgccggcgacttctttgtgcgcctgcgcccgagcggtgccttcgattctctcgacgagttgcgtgcactgccggtcggccaagggccacaacgggtcgaactgggcgccatcgccaagctatcgcgagaatacgccgagcggccacaacagatcattcgccacaacggccagcaggcgctgacgctcggcatcagcggggtatccggggcgaatatcgtcgaggtcgggcatagcgtcgaagctgtcctgcaggccaacgagcaccgtatgccgctgggcgccgacctgcatccgctgtatgaacagcaccagatcgtcgacgagtcggtgaacagtttcgcgctcaacgtgttcctctcggtggccatcgtggtcggcgtgctgtgcattgccatgggcatgcgcgccggcttcatcatcggtgcggtgctgttcctcaccgtgcttggcacactgctggtgatgtggctggtgggcatcgagctggaacggatttccctcggcgcgctgatcatcgccatgggcatgctggtggataacgcggtggtggtctgcgatggcatgctggtgcgccagcgccagggcaagagcattctcgaagcctcgcagcaaacgctgcagcaaacgcaatggccgctgcttggggcgaccatcatcggcattctcgccttcgccgggatcggcctgtcccaggacaccaccggcgaattccttttctcgctgttctttgtcattgccgtgtcgctgctgctcagctggttgctggccctgctgctggtaccgctgttcggccattacctgctgcgcaatgccggcaccgacgaggaccccgatgcggcctacaacggcccctggtacaaccgttatcggcgcctggccggtggcgtgctgcatcggccctggctgaccatcggcgtgctgctggtgctgacggtggtcagtgccgtgatcttcacccgcctgccgcagagcttctttccgccgtcaagtacgccgctgttctacgtcaacctgttcctgccccagggcacgcatatccgcgataccgcgcgcaccgcgactgacgtcgaggagtacctggcggagatggagggtgtcagcggcgtgtccagcttcatcggcgccggggcctcgcgcttcatgctcacttacatgccggagcagccgaattcatcgctgatgcactttctcgtgcgcaccgaggatgcggatttgattgacgacctggtgcggcagatcaaccaggagttgccgcagcgctacccatcggctgacgtcacggccgctcagttcatgttcggtcccaatgccgaggccaagctggaggcgcgcatcagcggcccggatatcgacgtgctacggagaatatctgccgagggtcgcaagcggttgcaagatgagggcaaggtattcaacgtgcgcgacgactggcgccagccggtgctggtgctgcgcccgcagctggcactggatcgtcttgcagacgccggtctgacccgccaggccgtggcccgcgcgctcgcagccggcagcgagggccagcgggtcagtctgctgcgcgagcgcgacgaactgatcccagtgctgctgcgcgccgcgcccgacgaccgcatcggcagtgacaacctgctgcagcggctgatctggagcccagcgggcaacggctacgtgccgctggcgcaggtcgccgacggcatcgagccgaccagcgaggacagcatcatcgtgcgctacgaccgcgagcgcaccatctccattcgcgccgagccgcgggatggcgagaacaccaacgaggcgcacgagcgcattcgtccgctgatcgagggcatcgaactgccggtcaactacagcctgaaatggggcggcgactacgaacagtcatccgatgcccagcaggcgttggccagtacgctggcagtgccctatctggcgatggtgctggtcaccgtgctgctgttcgccaaggtgcgccagccgttgatgatctggctggtggtacccatggcgatctgcggggtgagcttcggcctgttgctcaccggccaggcgttcggcttcatggcgctgctcggcctgctcagcctgaccggcatgctgatcaagaacgccgtggtgctggtggacgagatcgaccggcagatcgatgacgaagtgccacgcctgaccgccatcatcgaggcctcggcgtcacgcctgcgcccggtgatgatggctgctggcaccacggtgctgggcatggtgccgctgctgttcgacccgttcttcgccaacatggcggttaccatcatgggcggcctgggcttcgccacgctgctgaccctacttgcggtgccatgtctgtacctgctgttcatgaaagtgcgaccggaggaaaccgcatga

SEQ ID NO: 533158 - DNA, 1080 bp, Stenotrophomonas maltophilia
atgacgtcaacgccagctttcccagtgtccaaggcctggttgacgatcatcgtctgtgcgctgccgctgctcggcggttgttcctcggaggccgagccggcgcccgagccaccacgcgtggccttggtcgagcccttgcagccggccgagccgaaggccgaggcgctgcgcttttccggcgtagtgcgcagtgtgaccaccacccagttgtccttcgaggtggctggccgcatcgagcgcatcctgatcgacgaaggcactcgtgttcgtcgcgggcaagccctcgcacagctggaccgcaccgactatcgcctgcagatgcgtgaggccgaagcgcgcctgcgccagctcgaagcagacctggcgcgcaagcgcaccctgctcgccgaaggcatcctcgcccccgccgccatcgaggcgctggaggccaacacggtggccgcccgcgtggcccgcgacagcgcccagcgcaatatcgatcacagcaccctgacggcgccattcgatggcgtcgtggctcgacggctcgccgaaccggacatggtggtcgcggtcggcacgccggtattcgagatgcaggacaaccgccatatcgaggtcagcgtcgatctgccggaaagcgcagcactgagcattccgctcgggcccgagctcaaggccgaggccgagctggtgatcgccgacctgcgcctgccgctgcgctacaaggaacacagcacccagccgcgtgaaggcgcgcgcacctaccggctggtgctgcagggcgaaccgccggaggatttcaacctgctgcccggtatggccatgcgcgtcagtctggagcgccccgcccggccacagaccgacgatgacggcttccgtctgccgctgtcggcattgcagaccgacagcgacggcaaacacttcgtctggcaggccgacgatggccgcgcccggcgccatccggttcagctgcagcaagtcgatggcgatcaggcgctgattcgcggcgacgcactgcaggcgcagatgccaatcgtggtagcaggtggcagcaagttgcacgaagaccagccgatcgaagcgcgggagcggaactga

SEQ ID NO: 533159 - DNA, 627 bp, Stenotrophomonas maltophilia
atggaaagccattcgcacttttcctttcggagttgctctgaaggaggtgtgcccttgaatgtagccgtctctccccgaaccgtttcgagcagtggtttgcctgctctggttctcaatgcggactatcggccgctcagctattaccctttgtcgctctggtcctggcaggatgcgatcaaggcagtctttcttgaacgtgtgcatatcgtggcggaatatgatcaggtcgtatcttcgccatcgttttccatgcgtttgccgagcgtgatttgcctgaaagaatatgtaaagccgccgcgtcatccggcgtttacgcgcttcaatctgtttctgcgtgatcgttttgaatgtcagtattgcggctctccgcatgatctgacctttgatcacgttaccccgcgttgccatggcggcgagacgacgtgggaaaatgtggtcgccgcgtgctccccttgcaatctgcgcaaaggcgggttgatgccagctcaagcacatatgtggccgcgtcagaagccggtcatgccgagcgtgcaggatctgcacaaaaatggccgtcttttcccacccaaccatcttcatgaaagctggctcgattttctgtattgggatgtcgaactggagccttag

SEQ ID NO: 533160 - DNA, 525 bp, Stenotrophomonas maltophilia
atgacatttgcacttaacaagccggttggcaaaattcagtcttggaccgcaggcatcatggcagtcggaatggctgcaacagtcggaacggctttgggcttcgagcatctggctggtttcatgccctgcaaactctgccttgaagaacgcacgccttattatatcggcgttccggttctggccgcagcctgggtttcttatagattgaaatggcctccggttctcacgcgcggtctgatcctgattggtgcactgctgatgacctttggccttgcgcttgccatctatcacaccggtgtcgaactcaaatactggccgggtccggctgattgcagcgcagccaccatgaagctcacgctggatgccggcaatctgctcggcgatctcaacgcgacccgcccgcctgcatgtgacagcgcaccgggcttctttctcggcctgtcatttgcaggatggaacgtggtcgcaagcctgttttttgcagcgattggctactacggcgcttttgcaaaaggtggaaagtaa

SEQ ID NO: 533161 - DNA, 591 bp, Stenotrophomonas maltophilia
atgctgcgccgtctctatgactggacgatctcgcttgctgcccgaaagtccgccgaatactggctcgccttcatcgcctttatagaaagctcggtatttctggtgcccgccgatgtgctctttcttccgatggcgcttgcgcgcccggaacgggcctatcgttacgcgctcgtcgcaaccatcttttccgttcttggcggcatagcaggctggtatttgggctatcatgcctatgagcaggtcgcaaagcctgtgcttgaaatgtatggcaagctcgacaccttcgagcaaatgcgcggaacgaccagcgccgacatgattctgctgatgctcatcacatcaggcctcgcgcatctgccgccgatcaaggttgtcaccatcctctccggcgcggcaggcatcaatatctggctgttcattgcatccgcgatcattgcgcgcggcgcacgattcttcttcctcgcatggctgttgaagcgttatggtgaaccgatccgcgaatttatcgaaaagcgtctcggcctgctggctggtctcgttgctgttttgctgatcgtgctcttcgtcgggattaaatatctgaacgcctga

SEQ ID NO: 533162 - DNA, 990 bp, Stenotrophomonas maltophilia
atgtctgacgcgaagatcagaacgcaccgatacgaacgtgcgaacacaggcgcaacactgagcagccgtccccgcaccggagcgctgcgtgccgcgcctcgccacaccccggcggcaagccgcgggatgcgcgccactgccgtccgcccacaccggttcgcggtacgcgcgccacgcgcccgagcgcacgctgctgtacgcgttggtagaggcgcactacccggacttcattgtacggatcgaagcggagggccgctcgctgcccggatatgtccgcgaggcgttcgatgcctacctgcgttgcggcgtgctcgagcacggcttcctgcgggtggtctgcgagcactgtcgtgccgagaggctggtggcgtattcctgcaagaagcgcgggctgtgcccgagctgcggcgcacggcgcatggccgagtcggcgcggcatctggtggacgaggtgttcggcccgcggccggtgcggcaatgggtgctgagtttcccctacccgttgcgcttcctgttcgccagcaagccggaggccatcagcccggtgctgggcatcgtgcatcgtgtgatcgccggttggcttgccgatcaggccggcgtgccgcgggatacggcgcaatgcggcgtggtgaccctgatccagcgcttcggcagcgcgctgaatctcaacatccacttccacatgctgtggctcgacggcgtgtacgaggacaccaccgagcgtccgcagcgcaagccgcgcctgcaccgcacccgtgcgcccacatcggcgcaactgacgcaggtcgccaacaccatcgcgcatcgcgtctgccggcacctgtcgcgccgcggctggctcgaaggcgaagacgaatccgtgtttctgtccgacagcgcggcgggcgacgacggcatggacgcgctgcggatgagttcgatgacctaccgcatcgccaccggtcgcgacgctggccgcaaggtcgtcaccctgaaaacgctacccggtga

SEQ ID NO: 533163 - DNA, 2472 bp, Stenotrophomonas maltophilia
atgctgtgcccccgcccccttgtccttgccctgtcgctggcctgcgccagcaccgctccgctgctgcctaccagcgccctcgcgcaggccgccacccgcagctatgacctgcccgcccaaccgctgcctgccgcgctggatgcgtacagccgcctgaccggcatcgatctggtcgttgccgcggcgcttcccgccggccacgccacaccggcgctgcgcggcgacttcgacgatgcgcaggccctgtcgcgcctgctggccggcagtggcctgcgcccacgtttcatcgatgcacgtcgtgccaccctggaaccggcgcccgctgatcgcagcgatggcagccgccgtaccgggccgctgcgcgtgcagggcgacaccgcgcatggccaggcaccaggcaacggtgccagccagtacgtgcccgccacccgcgatggcttcgctcccgctgtaggcagtgagcgggtggcgatggccgagcgccaggatggcaacagcctgctgcgctcgatgcccggaacccacagcttccattcgcgcagccagcccggcctgcaggtcaacatccgcggcatgaccggcgccggccgggtcaacaccatgatcgacggtgtcacccagaccttccgcaacaacgccggccatggatcgggtggcccgttcgcctacgtcgatccgttcctgctggccggcgtggacgtgcagcgaggcgcggtcgccggtggcgatggcgccggtacgctggccggcagcgccaacttccgcaccctggacatcgacgatctgctcagcgaaggccgagactggggcctgcgggcaggctaccgccatggcaacaacggctatggcagcggccgcacctttgccggcgcatggcgccacagcgaagacggtggcgaccgccagttcggcctgctcgcggccgccagcagcagccgcagcggcgaatacgcgacggcacgcgggcagaccaacaaggccgaccccggcagccagcagcccagcagctggctgctgaaggcgcgcctgcagcccagcgaccagcatcggctcgacctgagccacatgcgttacgaaaacgacttctaccacaactacccgtggcagatttccgcacgcaaccagcgcgccagctaccactacacgccctactccccgtgggtcgacctgcgtgcgaccttcgccagcaacaagacccggctgttctacccaccggtggaggactccagctacatcggccgccgtacccacagcagcctgaacagctggaccctcgacaacaccagccgcttcgacatcggcgcgctgcaggctcgctggaacaccggcatcaagcaccagtcggacatcttcgtggccgacacgcctaccctgcgcggcgccaacccgcaggggcgcagccagctcgacagcgtgttcagcacgctggaactgcagtacgacatctatgcactgaccgccggcctgcgccaggaccgctatggcatccgtggccatatccccgcctgctccgatgtgccgggccagtgcgcggagatcaacggcggcgacatcgatgtgcgccgcaccgagcgtgcgctcagccccagcctggcggtctctctgcaggccaccgactggctgcagctgttcgccgaagcctcgcgcacttcgcggccgccgcgtgtgcaggaaatgttcttcgagaagattccgctggagggcatgagcgatgccgacggcgtaggcgccaatccgtttctgcgccgcgagcgctcgcgcaacctgcagttcggcgccaacctcagcaccgactcgctgctggtcgacggcgaccttgcccagctgcgcatcacccgcttcgacaaccgcatccgcgactacatcaagccgcagtacctgctgatcgtgcatccgccggaagtggcgccgttcgtggtgccgatcgacagcgatccgcagctcaatgcctggaccgatgtgctggatgccgacgatttcagtaccaccacgcgctggatgaaccaccagggcatcgtgcgcatgcgcggcatcgagctggaggcgcactacgccagcgagcattaccacgccaccctcagctggacccgctcgcagaccagcgcgccggccatcgaattcgtcaatctggaagacatcaccgccctgcccgaccgctactggacgctggatgtgggcggccgctggtggcagcagcgcgtgcaggccggcctgcgcgccgagtactccggtcccaccgaggaaggctacgacttcttccagacccgcaagaccggcggcaccggcgtgctgctggacttctacgccagcttcaagccgcagcccaacaccacgctgtggctgaacatcgaaaacctgcagaacaaggcctatgacaacaatgcctcgatcgacagcatcttcagcccgatccttgaccgcggcaacggccgtggccgcaccgtctcgatgggcgtcaatgtggcgttctag

SEQ ID NO: 533164 - DNA, 684 bp, Stenotrophomonas maltophilia
atgctcgcccgccttgaccttgaactcgcccgggcagctgaaggtgatgttgccgccctccagcgtgatcgcactgctgccggcctgcagcaccaccttggtctgcgccagcacgtcgatgcgctcgtcggtggcggtgatggtcagcgcctgctcgctcagcagctccagctcgccatcgttggcctgcaggctgaccggcccctgcgcggcgatcacccgcagcgggccgctctgcgcgaacagcgaaacatgctcgccggacacggtggcgagggtctccccggcgctgacgtgcaggtcctgctgcacggtcatctgcaggttctgcccggcataggccaccgcgctggccgcagtggtccaggccacgtggtgcggcgcttcggccaccagcaacggcgtgcccagccgttccaccggctgttcgccagggctgcgcccgtcgctgccgggcttcatcgcgctctgcccgttcacctcgccggtgtagcggccctgcgccttcgggtcgatctgctcgcgcagttgcttggtgcgctcaaattcggtcaggcccggcacctgctgctgggccagggtctgctgcatctgttccaggctgcgttcggcgcctttgagctgcgccaccacgctggcgttgtccatcaccgtggatgccgcgcgctcctgcaggctggctga

SEQ ID NO: 533165 - DNA, 243 bp, Stenotrophomonas maltophilia
atggagtacctgaagggcctgctgccgcagatcgacagcctgctagccatgaccgaccagatgctcaatgagcgctcgcatctggatacggcaggcagagccttggcaggttggagctcccaaaatacggcctcgcacttcgcgacctacgcctttccggcactcatggagtttcgtgaaggcatcatcaaggacatagcactgcgctcaatcgagcagtatcgaggagcaggtgaacactaa

SEQ ID NO: 533166 - DNA, 762 bp, Stenotrophomonas maltophilia
atgacttgggcgacaccggaacaagagaagctcttccgggagacagcagaaagagcgtttgactatgctcgccaactatcgcggatcgttgctcgcccgtcgaccatggatgattttgtccactggcatctctggaacgatagcatcatcaatacccaccgagtgcccagattccgcgtccgaaccgacattgtcgtgcaaaccaatcaaactcctccgcgcactggcatctacgccgcaaaagacaaccccatggcttcacttcagtttgcctggacagggggatacggagaactatgcccggccatggcgctcaatgatattggaagagcggtcctgaagcaggttgggcgcgatggactatggggagatgcagcagcgctgtatcgcttcctcgacgggaaccggcatcttgacccctatggttggtctgacgtccaagccgcgctggcggaactggcagcgtcaacgatcgccgtttcggcattcgatctagaagattgcgagtggcattttgttgaaccgatccccgacgcattcgaggacatcgacggcagctacactggcaccgatcagccggatctccggccagaccgagtcgcagcaggaaagcgcgcgcctgtggccggctggtggtactcgcctgcacaaggcagcaggcgcttcttcaagcaaggcgatgtgttccccgccatcaacagcgactggggtgacaccttctggatctgggcgccagaccagacgccacctacgatgggttga

SEQ ID NO: 533167 - DNA, 534 bp, Stenotrophomonas maltophilia
gtgatcagtgcgccgggcctggtcaacgtgccgcagtacagcctgagctggtcggtgcccgccaacagcgagagcttcgtgttggaagagagtgccaacggtggtggctggacggtggtgcacaacggcgctgcgaacagctttggcgccagccgtggcaagggcagctatgcgtatcgggtgagggcctgcaatttcgtcggatgcagcccgtattcgggagtcgtgacggtggcggtggtgctgccgccggcggcaacgagcctttacctggcggagtggctgacgacacgcaggccgccctatcaggtgcagtgctccgcaggatggagtccggtggcagacgcaacggagtatcagcttgagagcggcggtggtggccaacgtctgtacacgggcccctcaacctacgtgaatgacagcggtgggacgtactgcgcgcatgagtatcgcgtgcgtgcctgcaatgcaggtgggtgttccccgtggtcggccgaacggccgctcacccgcggtgtactgagctgggactaa

SEQ ID NO: 533168 - DNA, 651 bp, Stenotrophomonas maltophilia
atgcatggatgggtagagccggccgctggccggctgccgggtccctggggctgccggccagcggccggcactaccaactgtgtttcatctgatgcgtggcccatgcatcgaggggtagagccggccgctggccggctgccgggatcccgcagctgccggccagcggccggcactaccggtggttgtgcagcgcgcgccggttgccgatgtgcgcgcatgccagcagcacgccaccaccggctgtcgccacgccatgccagagcagtgatcccttcagcggcaggtatagcgaggccggcaacagcaggagggcgccgacgcaggccagccttgcaggtcgccagcgcccatgccggtgaaccccggccaaggtgctcgccaaggccagcgacgaggccagcagcgcaaacacccattcccagcgcgacatcatcagcagcaccgtcatcgcgccatggccggggtgctggaacgagcgcagcgccatcatcgctgccggcaccaaggccaacagcaggggcagggcgatgcaatgggcggcgcaggccagggacagccaggccccggctagatcgaagcgggggtgccagcgtgccgaagctggcggctgggccaaggcccttgcaggtgtcctgggaatgtggtccataa

SEQ ID NO: 533169 - DNA, 690 bp, Stenotrophomonas maltophilia
atgagtgacaccaccaccacggccagcaaccccaatcctggcgaaggcggagctacgaccaccgcaaccgacacgcagcaggttcccaacggcagcgcgccgtcggcaaccgatggcggtggtgacggtggtggcgcaccgggcagcaacggtaagccgggcaaggtcgaagacggcggtgatgccggcaagaccaagaccgacaacgccacgactgcaccggagcagtacggccagttcaacctgccggacgggttcagcctggaaggcaaccggttgggcgcggccacagagttcttcaaggccaagggatggacgcaggagcaggcccaggaggccatcgacctgtacacccgcatggctggcgaggacgcgaccgcgatgcagcaggctgtcgaagcacagcgcctgcagcaagtcgagcagtggggcgtcgatgccaagcagcagctgggcggtaagtacgacgaaaccgtaggcctggccaccactgcggtgaaggcgatcaacgacccggagctgaccaaggcgttcaacgagctgggctggggcaaccacccgaccatgatcaaggcgttcgccttctttggcgggttccttcgcgacagcaagatcgacgggctcggcggaaccaccgcctcaggtccagccgctgccagcgacccgaagtcggtcctctacggcggctga

SEQ ID NO: 533170 - DNA, 357 bp, Stenotrophomonas maltophilia
atgaagcgccccggcatggatcctcgtgaagatgagcagcggcggctggcggagcggctggtcagtctgcaggtcactcaactgcgtgaggacatctgcagcgtgctgtcggatgcaaccggccgccgcctggtgtggacgttcattgaggcaatggacgtggacggtacggccttcaacacgaacgccatggcccagtcccgaaagattggccgacaggaggccggccagtggttcctgcatgtcatgcgagaagcatgccccgagcgcgaggcgcaaatgcgcgccgaggcgaacagttcaatgaagcggctgcagtcgcagctgcagcaaaccgaggaaagcgacgatgagtga

SEQ ID NO: 533171 - DNA, 555 bp, Stenotrophomonas maltophilia
atgcagatacgtcgcgcagtggagagctggtggctgtacgacgccctcggggattacattatcgtcaagggcaatcaaaaacgtgcccgctccttcgtaaacgcctacgccgcaatttgggcgtcgagttttgacacgatgatcgtcgcttcttacaacctaatagttacctcacaggacgggaaaccactcacgttggtgacgtttgcggacgagctcgactcccatggtcttgacccaagacttgtttcagcccttcgtgcaatgccaacaaagcaccataggtttgtgaaggcattgcagcgcatacggaacaaggccacggcacacgtcgatcgagccatgccgacacagcagcagttcaacgacgcacttctcggcacagaatggattcgcgagtttctgcaggatcttgtctacctctgccacgcggtgtcgcgccactcgagtaaggacatcgggctgccgaatgacgcggtccgggctcagatgcagcagatgctccatctagctattcgctatcgcgagcagatccacaccgacggaaatgcttga

SEQ ID NO: 533172 - DNA, 603 bp, Stenotrophomonas maltophilia
atgttcgccttaccgaagcagcaatttcatctgttcaatgccttggctaagcgattcatgggcatcgcgaagccactgggattgagccatgtcctgtgcctcgacgtcgcttccccactgttgcgcgacagaagcccgtcggagttgataggactgagctcgggcgatggccgcaaaagcgagctggacgggctcggcggattcgtcaagcaggtgcaggtcaatcaatggaatcttgcactcgctcgcgcctcgcagggcagcggcaatcgccgagtggtctcgaaccggctctccagggggatttttcgcggagttggtgctcagatagtcccgaagcagctccagttcatggaagtgggcgagggcgaagctacgtgcacgcctctttgcatccatgcgtttggcatttctgtctcgcgcggcgaagtaggcgggaacagcaattgccgcgacgccgacgatcacggcggatacgagctgagcccagttgagcgtgtccgccgtgttggcggccgcttcgatgatcagtgtcttgtgcatgttggttccccgtcccttgtgcagagcatgccgggcttccagcggcgggggcaagtctga

SEQ ID NO: 533173 - DNA, 216 bp, Stenotrophomonas maltophilia
atgcgagaagcccaatcgatccgcaccacagagcgcgccgagcgagaacgccaagaactgcagcagcagctggccgagatggagcgaatgttcataggcgcccccacgcagccagagctgctggtagaacttcgccgggttgccaagaacggatcgacagccgaggcgcggcaactgcttgcatccgtgcagcgcgtgcttgcccctctgcagtag

SEQ ID NO: 533174 - DNA, 333 bp, Stenotrophomonas maltophilia
atggtggatcatgcattccaggtactgggaggtggcgccggatcctgtgaccgctgcctgtttcgtttcgcagtcctgggcccgaaatgctgtccagctggcttgggctttcttcaggcgattcgcgatttccggttttgccgtgtcacctgccatcttcagctctgccgcgacaagcgcgtcctgccgaacaagctcttgggacatgcagtgacctgtttcgacctggctggtggttccccgaatgcacgtccgaaactccggagtcagatcatccaccgcctgcgcgtggacgcatgcggcgctgctggcgagagctactgcaacaagtaa

SEQ ID NO: 533175 - DNA, 441 bp, Stenotrophomonas maltophilia
atgttcgagaacctgccaaggaacaccacgcggtcccgctaccgcggcctgcggtcgcacctgcgctgccaggacgagtgccgggaagagcgcggccttccgctgcacccagccaatgccttcatcgcctgcccggactgcgagggcaccggcgaacacacccgcaacgacagcgccatcggcgacccgcagtgcgagtacggcgtggactgcggccgctgcaacggcgagggcgagattgccgacggcctgatcgacccgctgctgctggtggcgaagtaccgcaagggccgcttcagctgggccatgacggccatccgaaaggcggagcggctgcactactaccgcctgtaccggctgcgcgccatgcgcccctgcagcggtctggctgcggtcgaaatgaacctcatgcaccgcgcactgcagcaggtggcggcatga

SEQ ID NO: 533176 - DNA, 249 bp, Stenotrophomonas maltophilia
atgagcgcccctgtcgatgtgctggcggttctgcagaacgagattgaccatgccggctgccttggcccccgtgcgagcgatgcgcgcgcaaagcgtctggggtctgtacgcgccgcagtcgccgagatgatggaggctctcgtagaggtaaagcagtggtcggatgtgtcaggaatcgaccacgaatggccgaccgttatggagcgagtgaacgccgccctcgcccgcgtcaaaggcggtgccgcatga

SEQ ID NO: 533177 - DNA, 315 bp, Stenotrophomonas maltophilia
gtgacgccgcgcaccctgaccctgctgggcctgctggtctgcgaggcgacggacgtcgagaacagcgcgagcgtccgccgggagcgtgtggggaaggcccacgccgacctcttcaacgaactccgcgccgagaacctgcgctttgccgaagtcgtggaagcagctcgcgccctgctgagcgtgagcgaaatcccggatctgctccaagccgaagaacgcctgcgcgaagcgctggacgcctgcgaacccaccgacccacacaacgagcgcgaggccgttgaaggcctgtgcgtggaggaaaacgacgatgagtaa

SEQ ID NO: 533178 - DNA, 294 bp, Stenotrophomonas maltophilia
atgacccaccaccactacgaccgccgcgcgccgaagcgcacgggcggattctcttggggccgtttcccgaccagcccgcatgccctcatccccggcgtggaatggcgactcttccgccgtgacctcaccggccggctgcatgccgggctgcacctattcccgatcgaaaccgaacgctcggcgatcgctcaggcgctgctgattcaccgccgcgaactgcgcgaacgcgtcgacgccatcggctatgccctgatcgaggccgaacaggcctccccactgcaggaggttgcatga

SEQ ID NO: 533179 - DNA, 1239 bp, Stenotrophomonas maltophilia
atgcccctgatcaccgatgctaaggcccgaagtttggggcctggtggccaggcggtggctcacggcggggcaactggactcacgctgatcccatcggccacgcatagggggcgcggcaaatgggtgctgcgctttgtcagtccagtgacaggcaagcgccggaacgcgggcctgggcagctacccccaggttggcatcgccctggcgggcaagctcgcccgggagatgcgggaacaaatcgcggcaggaagcgacccgctggaaaccaaagctgcggaggatgccaagcctaagacgccgacgttccaggaagctgcggcgcagctccaccgcgaactaacgcccgggtggaagaaccccaagcacgctcagcaatggctcaacacgctgaccgagtacgcgttcccgactgttggttctcttccaatcgatctaatccagcctcggcatatcgcggacgtcctgcgccctatctggctggagaaggcggaaacggcgactcgggtgaagcagcgcctccacgccgtgatggcatggggatgggcgcacggctttaatggggcgaacccggtcgacgtggtcacccacctacttccgctgcagcctggcaaagccgttcgtcaggagcaccagccggccatgccttgggctacggttccgtccttcgtgaaggcggaactcgtcggtgcgggcgagctcgaggtgacgcgcaacgctctgttgttcctggtcctgaacgccagccgttctggcgaggtgcgagggatggcatggagtgaggtgaaccttcgtacgaagctgtggaccattccagctgcacgaatgaaggccaaggtaattcatcgggtgcccttgtcgctgcaagccatcgagatcctcaaacgccaggcaggtcaacacgacgagctcgtctttccatccgtacaggctcggtccgtgatgtccgatatgacgctgaccgctttgctacgcagggtgaatgcacccagcgacacacctgggcgcgtggcgaccgtgcacggattacgctcgagcttccgggactggtgcagcgaacggggctacgcacgcgacctagcggagcgcgccttggcacacgccgtcaaggacaaggtcgaggcggcctaccaccgtactgaccttttggagcaacgtcgtccgatgatgcaagcatgggccgactttgttctgtcagccaagaatgagctcaagaagaacaccacgactcatgacaactga

SEQ ID NO: 533180 - DNA, 378 bp, Stenotrophomonas maltophilia
atgtactcgtactatctgtccggcgttgacttcactgacatttacgttgaagaggcggcgatcagcgttgcacttagcaccgaaagccaggacgccccacccggagaggagctgccacctgatccttatggcatcgagcgctcgtcaccactcttattcaagatcctcgaggcggcttacaaaaatcgggataaagcgcgcgaggaaatcgacaccccatcgttggcggcagattttcgtaagctcaatgcttcctacacaaaaaaccctaagccgttcaacgacgggcgacatgaattcgccgcaacacttgccaatcccagctacagctattcgtccgacggcctagtgaaatcaatcttcctattgagaccgtag

SEQ ID NO: 533181 - DNA, 180 bp, Stenotrophomonas maltophilia
atggagccggcactccaaaacgatcgagagaagctggttgatctcttggtcggtcttggcttcttcgacagagaagacagtgatcaggtgggagcgtcggtctacttcattacggggaagaagtacctgcgcaacaaatacagaagcgaattcaggcacatccgaggcgatcgtatgtga

SEQ ID NO: 533182 - DNA, 1284 bp, Stenotrophomonas maltophilia
atgaatgagatcagtcagaccacctcgtacaccccggcaatcgccttcgactgtgacctgctcaaggagcaggtgcccaacctttccatcgcccccgagtctaaggctaccctggtgccctcggcagagcgggaacaccacctcttcgtacgtaagaccagtcaacgctacgggcacacctatgttgggcaggagcacaacttcatctactggctgctccgagcagagaaactcgtcgatgccatcgcccggagcgatgatcagccgattgaagtgacgcacgatcgaagggggcagccgtggtatcagctgaccaagatcggcaaggcattcttcaatgtatgcaagggctacaaccaagacagtgcggagtactacaagcaccaccgctttaatcctcccctgaccgttatgctgaaggtcgtcgaccagtgttcgcctgagctctgggctcacacccgtaacggcgatccggtactgattgatccacgaacgcgtgagattctcgagaacgcggctgcttccatccgcgcatcatgtcggagccaggcctacaaggacgaagtcgacaattacaagcgcaacgaagagaagaacatcgccagctgctgcgagtatctggcagcccagttccagcgtcgttcgcagctgctgatcctacgggttgatctctacttccgcccggcgttcaagggctggggctacactcgcgaagcggatggccactacgcgaggttcctgcgtgctctgcgcgaaaatcgaatcgttcccgacgtcctcggttacatcagcaagcgcgaggacgggatcgatcgtggcatccactttcacgtcctcattgtcctggacgggcacaagcaccgtgatgcggccaatctgacccgcatggtcggagaggactgggtccgccgctgcggccatggagagtacgaggatggggtggatgtcggcgagacgggcaagaaggccaaggcgagctatttcaactgctacacccggacggaccagtaccgtttcaactgcctgggtctgatccatccgacggacactgacaagctgcgcggcttgcgcctggcgatcgagtacctgtgcaaggaaaccacgcagctcaaacccagcccgccgaagtccctggcaggcgacgaggacgccgacaccgcgagcaagaaggggatccgcaacctgcgcaagggaatcatgccgaagggtcacagcggccgtggcgcgcccaggagcagcggcctggacacctcagccattgatcgagagttgctgaaaaagtga

SEQ ID NO: 533183 - DNA, 306 bp, Stenotrophomonas maltophilia
atgaaccatcaatgcaactactcaatcctcacgacctattcgccggacaccgcaagtgggcgactcaccctgccgtcgacgcgctccatgcgaattctgcgcaagaaggatttggcgaagaagctctcttgctccgagagcaccatcgataaccgcctgaacccgtcaagtccgtggcacgacgaaacctttccgcgcccagttgcgctcggggctggcggctcgcgcagttccgccaagggctggatcgaatacgtcatcgacgagtggctggaaaggcgcatggaggacgcgcgccgcatgtaa

SEQ ID NO: 533184 - DNA, 957 bp, Stenotrophomonas maltophilia
atgcatttggtacaaacgatggcctacgcaggggacaaaccctggcacggccttggcaacaaactggcgccgcagcagcccatcgagacctggcggaagcaggcgggaatggactggcagatcgaggagtccgaggtccggttcatcaccggcgggtccagcctgggcatcatcaatgccttcccggaacacaaggtcctctatcgctccgacacccgggcgccgctggcggtggtgggcaggcgtttcaacgtggtccagcccggggagatcctggagttctaccgtaacctgaccgcctgccatgggttcgaactggacaccgccggcgtgttgcgggaagggcgcaagttctgggcgcttgcccgaacgggccagagcacgcgcctgaagggccgggatcgggtggatggctatttgctcttggcgaccgcctgcgacggcaccttggccacgacggctcagttcacctcggtccgtgtggtctgcaacaacacgctgcgtgtcgccctggataacggtaacggggcggtcaaggtcccccaccgcagccagttcgaccccgagtctgtgaaacgtcagctgggcatcacggtgtcgtcctgggacgggttcgtggcccgaatgaaagccttggcggaccgtccggtggatccggactcggtcgacggactgctgcggcgggtgctgacctacacggggtccgacggcaagaacaccgtggccaacgagcaggccatcgccgcggcgcgggcgctgtacgagggcggagggcgcggagcccagctggcttccagtcggggtacggcctggggattgctcaacagcgtcaccgagtacgtggaccaccaccgccgggcgcgcagcgacgaccaccggcgtgacgccgcctggttcgggcagggcgcccagatcaaacagcgggcgtgggacgagctggtggggcttgtgtcgtga

SEQ ID NO: 533185 - DNA, 378 bp, Stenotrophomonas maltophilia
gtgagtcggcccggcagggctctccagcgggaggccgagccctggcacgttccccgcgaagaccaggaccttctggacgtcgcctacgtcgcgctgggcgcatcacaggcgctcgaggcatggccggcccgcagcgaagcgatggaccgcttcgaggggcagctgggctatatccaggcctgcatcgaccaagcgccgctgctgcatcgcctgtggcttgagtgcgggaacgagaacggcttggtgtggtgctacgaggtcgcagggcccttcggggcgcgctacggccggcacctgctggccggaggggacccgcttgaggcggaagcgatcctccgggccattctcgcgcccgggttgccaaccccgtccggttag

SEQ ID NO: 533186 - DNA, 912 bp, Stenotrophomonas maltophilia
atgcaagacgaaccgcttagtgaactgacccagccgcaacgcgaccggctcgcgttcgttgagctgcggctccggttcataggggagattcgccgccaggatctgatgacgcggtttgccatccaatccgctgcagcatccagggatctggcgctttacaaagagatggcgcccggcaacctcgattacgaccccaagggcaagtcctacgttttaggaccagcttttcacccggtgttcgacttcgcgccggagcgagtgctctcgtggctggcccaggggtttggtgatggcgagcccttgcagcgcaaggcgtgggtggccagcgaaagcccctcgaggctcacgctccccgatctggatgttctcgccaccgtgacccgcgcgattcacctgcaatgccctttaggtatcgagtaccactcgatctcaagtggccgcacagaaagagaaatcgtcccattcgccctgatcgacaccggcttgctgtggcacgtccgcgccttcgatcgcagaactcaagagttccgggacttcgtcattacgcggatcaagcgcccattgccgctaaaggggcaggcagtggcgcctcacgagatgagcgatcaggacattcaatggacccggattgtcgaactcgagttggttccccatcccgatcaacccaggcccgaaatcaccgcaatggattacggcatgtgcgacggcgcgcttcggctgaagctgcgcgctgcagtggcgggatacgccttacgcaagtggagcgtcgattgctcgcctgaccacagtttgcggggccaagagcatcgactttggctgaaagaccagctggccatctatggtgtccgtaatgccttgttggcgccgggatactcctttcatgatcaacgcatcgatgcagatgccgattga

SEQ ID NO: 533187 - DNA, 717 bp, Stenotrophomonas maltophilia
atgctcgccgaactgcgcgccctgttgtcttttgtggacgtggcagacgcgcgaaaggccgactatttcgatgccatccagacttccaattgcttaggcaagcgctcgggcaagacccggacgctcacttttcgacacctcgcagacctctacgcacttgatcgcggcctgctggtgttccgtgccctgcggttcttctggcagcgcgatgtggaagggcagccaatgttggcggcgctgtgcgcctactcgcgtgaccccatgctccggactacggctcccttcgtcttgggtttccaggaaggtgcctccgtcacccgcgagacaatggaagagttcatcgacgcgcaagagcctgggcgcttcagcaaggccacgctcaagtccaccgcgcaaaacctcaactcgtcctggacccagtcgggccacctctctggccgtgtccgcaaggtgcggggccgtgccgtagcgacgccaggcgcagtctcgttggccctccttctggggtatgtcagcgggctgcggggccaatcgctattcaagagcgactacacccgcatgctggactgctccttcgagcggacgttggagttggcggaggacgcatcgcgccgtgggtggatctcactcaagcgcgtcggccaggtgatcgaagtgctctttccaaccctgatcaccgcgcaggaaaaggagtggcttcgtgagcaccagaattaa

SEQ ID NO: 533188 - DNA, 3384 bp, Stenotrophomonas maltophilia
atgatgcaagcactcgaaaaagacctgcgcggcacgctggagaagaccgtcagagcggcccgcacggtcgctgaggccgctgcgcacgcggcggtagaccaactgggcgttggccacgacaagcccgatgcgttcttgagcgatgccgagaaggcgctgcgcaatcgcctgcgcacccacggcaagcagctcggtgacgcccgtgactccaagagcaccaacccgacctacggcaagcaagaggtgcagcacctggtgcaagaggtggcctaccagcactggcaccgcatgctgttcgcgcgcttcttggccgacaacaacctgctgatgtacgacggcgtggccgtctccatcgaagagtgcgatgagttggcacccgacgaaggcgccaagagcggctgggagctggccggcaagctggccgcccgcatgctgccgcaggtgttcaagcctggctcgccggtgttcgagctgacctttgcgcccgagcaccagagcgagttggaacgcttgctcaaggacctgcctgatgcggtgttcaaagccagcgatagcttgggctgggtgtaccagttctggcaggccgacaacaaggagcgcatcaacaagtcggaggtgaagatcggtgctgacgagctgcccgccgtcacccagctcttcaccgagccgtacatggtggccttcttgctgcacaactcgctcggtgcctggtggaccacccggcatccgggtaagccatgcccggttaccctcgactacttccgcaccctggaagacggtagcccggccgcaggcaagttcgagggctggcctgactcgctggccgacttcaagctgctcgacccgtgctgcggttcgggccacttcctggtagccgctttcctgatgctgctgccgatgcgcatggcggcagagggcctgagcgcgaaggaggctgttgatcgagtgctggccgagaacatacacggcctcgagctggacccgcgctgcgtcgagatcgccgtctttgcggtggcattagaggcttggcgctatccggacgcatcaggtaagccgctcggcgtccgcaggatccccctaccgaagattgcctgcagcggtctccaagtcgccgcaagaccggcggactgggagtacctagttccgaagaatcacgaagagcagcaatcactgaaggcaggtcttcggcaattgcacgccactttcctgcaggcgccgcttctagggagtttgctaagcccaagagagctccagaagaacgacctcttctctgccggttacgacaagctcaccggccttctggagttggccctcaacgcagagcgctctgagggcagcgaagtcggcgcagaaagctcttgggactcggcaataagtgctcggggcttgctatccgcagcagccatcttgacttcacgattcgcattgatcactacaaattttccgttcctcggaattgagaagcagacaacggagctacgcgaatacctgaaggatacctatccagaaggctacagagaactggccgtctcttttctattgagatcgcgaagcctgctggaacccaacggcgcggtggctgtcgtcactcccggtgagtggacattccttcggccgcaccgtcacttcagagatcatctgctgcggacgtccactctgaatagcatatgcaaacttggctggggtgcatttcagtccggtattcgggcgcagcccgtattaatcatttcacagctcaatagaagtcccacgagccaaagtgaaacaacgtaccttgaggtcaagggaaaggcgatcgaagagaagcaacatgagttgcggaattcctcgctagccctctgcaggcagactctttggattgatgcgccagacgcgcgaattggcctaagcagtggcgataaagtcaccacactgagcgacttcgccgaggctagaacggggatgtcggccggtgattccgagcgatttgagcgcaactactgggaagtgtcggagtatggaaccgcctggaatttcctgcaaagttcagtttcgtcaacatcaaactacgcgggccggtccaggatagttctgtgggagcaagagcaaggagctatgtttctgcttgcggaaagcgttaagcacttgaatcacgccgcgcagaactggagaagagggaagccaaactgggggaagcgtgggatcgtgattagcttaatgggcgatctcccgtgcacgctttataccggcgaaatctacgacatcaattgttgcgcgatcgtaccgaaagacagcaagcatctcgacgcaatcgcggcctacgcccttagcggtgaactgggggcggccatacgatcattcgatacatcgcttaaggtaggctcaccaaagacgttgctttcggcggattttgattacgagtactggtcgcagaatgcgagggagacctttcctgacggaatacctcgacagttctcaaacgatccaacccagtggatatttcacggtcacccacagccctctacggcgccattacaggtcgcggttgccagattagtcgggtatatgtggcccgccgagtccggtgaatgctttgacctttcgaccgaggcgcaccagtggctttccaagagcgaagcattgacgcggcatgcggacaaggacggcatagtctgcattccaccagttggccgagaggcctccgcgagcgatcgtttgctcaacctcctcgccgacgcctatggggacgagtggagtaacgacactttggcgcaattgctcagtgctgccgatcatgccggtaagtcgctggagacttggcttcgggataagttcttcgttcagcactgcaagctgttcgaaagccgtccgtttgtttggcatgtctgggatggccttcgcgacggcttcgccgctctcgtgaactatcacaggctcgactacaagacccttgaggccttgatctacacctacctgggcgattggattagtcgccagaggcgagacgtcgatgggagagtggacggcgcccaggaaaggctggccgctgcggaggcgctgaagaagcgcttggagctgatcttggcaggcgaagtgccctacgacatcttcgtacgctggaagccaatccaagagcagcccatcggctggaaccccgatctgaacgacggggtacggatgaacatccgtcccttcctttcggtgccggacgtaggcaagcgcggcgcaggtgtgctgcgcgacaaaccgaaaagcctgcattgggaaaaggaccgtggcagtgatgtgccgtccgcaccttggtacgagctgggcctgcagtatggcggcaaggtgggcgaccgcatcaacgaccaccacttgagcttggccgacaagcgcaaggcgcgggagaaggctaaatga

SEQ ID NO: 533189 - DNA, 2343 bp, Stenotrophomonas maltophilia
atgcgcgtgatcgaacatctggtcaagaccctgtgcgactcggcgatcttcaaccccgaggttcaagttgcgccttcgtgcatcttgtggcccgacaaggaccgccagtgggaggcggtgatcccgcgcctgcagagcgagctggcggaactgctggtgctgggcgactacgcgcccgagaaccgcatggggccgtccatttggctgcgctgcgtgattgcgggcaaggcgcccgatgtcactttgccagccgaccgcgtgccggtgttctacctgcctggcgtcagccgccaggacctgcgggcgatcgaagactgcccggacctcttgaagcccttggccgagctgcagtaccggggcgtgatctggtcgcaggcgaacgccaaggactggaccatcatggccttcttgaagtccgaccaaggcggcatgggtctggacgtggcccaggacaacgacgccaagaacgccatgcaactggcgctgtaccggctgctggacgaagagctcgagcttttgaagggcaagcggctggacaaggactacttcaacaccctgctgaccggcggtgacccggtgcgcgacctgctgcagtggctggatctgggtgacgcgttccagaccacgcgcggcgccaacgagtggaaggcctttgtggaggtctgcaagtcacagctggcgttcaacccccaggccgatggcgttctggcgggtgccagcaagttggcgacgcgcgagggaccctggcattcagtgtgggagcggtacagcgaagcaccgaagcgttaccccaacatcccgaaccgaatccgccagtgcaagccgcccaccttcgatctttttgtcaccgcagattttgctggcggctggccccaatggaacgaggagcaggagcaaaggctccggcgtgatctgatgggcctaagagatctacctgcgcacgaagccaggaagcggttgctggagttggagaaggcgcatgccccccgtcgtgagttggtgtgggccgagatgggtgaggcgcccctggcgctagccgccaagcatctggccgtagtggcggaggtcaccaagacagcgctggtggccggctcggtcgccgacttgcaagcagggtatgcgacagaaggatggcgtgccgatgacgcagtgctggctgccttagcgtgcgtggacagggcggcggacgtggatgcagcgacagtagcgatacggacaatctatctgccctggctggaagagtctgcacgctatctacaaaagctagtcgacggttccgcatacccaggtggacgaatagcagaagcgccagccttttataaagtcggcgggcaatgcgtgctgtttgttgacggcttgcgctttgataccgctcgccgcctatcggcagcgttggaggcacgcggctaccaggtagcggaggccatgaactggacggccttgcccagcgtgacggctactgggaaggcggcagtttctcctgttcggaacttgatcggcggttccgacgattgcgatgacttcgaacctcgcgtcgcagcaaccggccaatccttaaaaggtggctaccacctgcggaagctgttgaacgacaaccactggacggtgctggaccgtaccgagagcggcaatggtcaggggaacgcgtggtgcgaattcggtgacatcgacagcgaggggcatgagcgtggctggaagctcgccaagcacatcgacgcacttctcgcagaaattgtggaacgtatcggcgccttgctgactgccggttggaccagcgttagggtcgtgaccgaccacggctggctcctcatgccaggcaagttacccacgattcagatgtccaaggacctcaccgacaacaaatgggggcgctgcgcctcgatcaagcccggcgcttccaccggtgagcgcttgtacccctggttctggaacccccatcagcagtttgcactggccgacggcgtgagctgctatggcaagtccgttgactacaaccacggcgggttgagcctgcaagagtgcctgaccttggatctggtggtgactcggagcgggggcgcttcggccaaacaggtggccgaggtcaccgacatcgcctggaagggtttgcgctgcacggtggccgtggacggccagtacgcgaatctgtccctggacattcgcacccaggcgggcgatccggcttccagcgtggtcgtgagcgtgaagccgctcaaggacaacggcaccgcatcggcggttgttgaaaacgaagaactgcaaggccgtgcggcgtttctggtcctgctcagtgcgaccggcgagctggtggccgaagcaaacaccgtgatcggcggaggatga

SEQ ID NO: 533190 - DNA, 1467 bp, Stenotrophomonas maltophilia
atgaacatgctcgccccattccacacatttcgagctcaggaccccaatttcagcatgctcccgccgctggccgaagctgccgcgcgcgccgtgtgcgccaaggtccaggaggcctgcccgagcatggtgcggacgcacctgctgtcgatcctgtcctcggcagtggcgcccctctacacggtgatcccgcccaactggacgcccatcccgattggcgtgagcaccctgtgcgtcgctgatgtcggtgggagcaagagtccggtgcatgagctcctgatccggccgctcaaggaccatgccaaggaaagcttcgcgcggtacgaggccgcaacgatcgaagcgaacgcggcttcggacgaaacaaaattccacgtcaagctgctgaaggcggagatcgcgcgctgcctgcggaaaaacgattcggcgcaagaattcctcgccacgctggccgagctgaaccggacgccttcggtgaacccaaaacatcgtccacgcctggctagcaaccttgacctggaaagcctgctccaccagctggacggcgagtacgaagccgttgacttcatcaccgatgaaggcgacaagctgcttagctccagtctgatgcgtcacgtatctgacatggtcgatctgattgacggcaaggcattggagtaccgacgcgagaagaagaagcatctttacgccagccatccgcggggaacgtttggtctgctggcgcagtccgcagcaatcaccccgttccgtcctcggtgcaagcgcaacgaatataacgaacataaagccgtcaaactcggcttcttttcgcgcctcctcgtctgcgttgcgcaaccgttgccaatgggcaaccagtatgctcgcgccaatggggacgacgaggcgctctcggacctccacgaggcgctcaaggagctttacgacctacatcgggacaaccaggaaatcggtggcatcgcacccatcgaactcgtgttcgcacctgacgccctgggctactgggacgaactgtgccgcatcaccaacaatctcaagttcgggcagctcgcgcatatcgcagacttcgtctcgaagatgctcaatctgaccgcccgcctggctgcagtgctgcatgtctgggaaagcgaaacccactatgtctcgctctcttgcctccagcgcgcctgggcgcttgtctcctggcatgccactcagtacgagctcgtgttcgtcccgccgccgcctttgcctcagcaggaggcagacgtggcggccgttatcgagcacctgaagatcttccgctttgaaaccgactacaaggaggttcctacggagcccatcggcttgttgctgggcattcctagcaaccgccttcgcgcggccctcctacgcatggagcaacgggaactgatcgagctttgcggcggcaaaaccacgttcattaactgcatgaagatgttctcgaggtcgcgaaacattacttggcggtaa

SEQ ID NO: 533191 - DNA, 339 bp, Stenotrophomonas maltophilia
atgccacccagcaacgttaacgaaatggccgcgcagttcatcgcggcgtaccagacccttaaagacaagaaggacatcgagcgtctcctggcgctcatcaaaccgcagatcctttccgccaaggcggatggcatcagcgacaaggaattgatcgaactgatcaattccttgggcctacgtgagaagttctatccggcgaagctcaaggagctgcgggggcgtctggccaagtccgaagtagatgcttcggccaacgagagcgatgacccggtaacgaacgaagacccccacccactggcagccgcgcttagcggtcaccgcgatggggcggcagcatga

SEQ ID NO: 533192 - DNA, 255 bp, Stenotrophomonas maltophilia
gtgagcatcaaagagcagatcacaacggacctggcggtcgcaggttcgaagatcggggcggcagccagcgccaccgcagcgacctactcgccgggctacacgttgagcgactgggcgctgaccggcgcgatcgtgttcaccgtcgtccagatgttcaccgtcaggttgaagaactggggcgactggtccgcttggtggtccgcgcgcatgggcaatgccaagcgcctctggacgtggatccgccgccctggctga

SEQ ID NO: 533193 - DNA, 192 bp, Stenotrophomonas maltophilia
atgctgctctcaggaaaggcagatgacgcagacgcgtacgccgcctacaccgacctggccttcgatgccgacacttgggtgttctcttcactggagagcgacgacccggttgagcttgagcttagcgctgccgttagaaatacagagaccgcgcttcggggcttcgcgatgatggcagccgatcgttcataa

SEQ ID NO: 533194 - DNA, 462 bp, Stenotrophomonas maltophilia
atgagagacgcgtttgaaattgtcatggaggacgttccaagggggcgcgtacccacagtactggaggggatcggccacatggccgagtccgtttcgtggactgaactggagggcgagtcgatggcggctggcgagcggtctgcagaaagttccgatgaagtcgcgtgcagctcatgcgtgatctacacagtcaagggtctcagggtcggagcagtcctccgtattcctacgctgttgattcgtgtccttggctttgaaggaagggtaagcatcgatttttcattcgatatggattgggtggatgtcggtgcagcgatgtccgaactgcaacggcattttctgcagttgaaaatgctgagtggagcggaaactgtatacggaggcatggagcccgctcaggatatcgatacccgattcttcacggatgccgagcgcggccctctgcgtgtcaccgatgcctga

SEQ ID NO: 533195 - DNA, 459 bp, Stenotrophomonas maltophilia
atgaagcaacgctatatagctcagctatctgacgacctgaagcaactggacaaagctattgccgagcagcttgagggacagcctggctggaagaacatcggcgcgctcaaaggcgtcggccccatcctgatcagcacactggccagcgagttgcccgaactgggcagcttgggaagcaaagccatagcgtcgccggtggggctggccccgatgaaccgcgaaagtggcacctggcagggccaacggcggatcagtggtgggcgcgcggtggtacgcgaagccctttacatggcggccctgacggccatccggtacgagccaagactgcgcacgttttacgctggcctgaaggccaaaggcaaagcgagcaaggtggcgctcgtggcggtcatgcgcaaaatgctggtgatcctaaacgcccgtaagcgggacgccgaggtggccctcggctgcccctga

SEQ ID NO: 533196 - DNA, 210 bp, Stenotrophomonas maltophilia
atgcgtcgggagcaccagcaacgcctgcaccgcaaaggtggccacggcggcaagccatgccaccaggacgccgaggcagccatcgctgatgcagcggctaccaaaccacgaaccctaaccggcgaggccaatcattggaacgcacatcacgagggcggtggagcgggtgagctgggagacgtgcatgccgtagagcatactttttcgtag

SEQ ID NO: 533197 - DNA, 1131 bp, Stenotrophomonas maltophilia
atgcgtgtaaccgccaatggggcaaagagctggattttgcgcatcgtcatcaaaggcaagcgacgtgacatgggcttgggcggctatccttccgtaaccctagcggacgcgcggaaagcagcccgcaaagcccgtgaagcggtgtcagcaggtaccgatcccgtgacggacagagaagcacgaagaaatgcgcccaagcctacccccgccttccaatggtgtgcagagcgaaccattgcggccaagaggcccgaatggaagtcggcaaaacatgccgcacagtggactagtacgctttctgcggatgcctttcccatcatcgggagggttccggtagatcaaattgaactatcgcacgtgctcgacgtgctctcccccatctggacggtcaagaacgagtccgccacgcgtctgcgctctcggctggaagcggtactggcctgggccaccgcttccggctaccgcaaaggcgacaatcccgcgcgctggaaggggaacctagatgcggttctggcgaaacccagcagggtggcaaaggtaacccaccacaaggcgctgccaatcgatgagatgcacagctttgtaacttcgctccgcttgcagcaaggcatggcagcgcgggcactggagttcctgattctgaccgctgcgcgatccggagaggttcgcggggccaaatggcaagaagtggacatagcgtccgctgtgtggacagtgccagccgaccggatgaaggccagcaaagaacaccggacgcctctcagcgcgcgagcagtatcaattcttaaggaactgccccgcatggcaggcagcgaccttgtctttcccgcgcccagaggaggcatgttgtcagatatgaccatctccgccgttatgcgcaggatgcgagtcaacgccgttccgcatggattccgctctacttttagggattggtgcagcgagcgaacaaattacccgcgcgatgtggcggagatggccttggcgcacacaattgcgaacaaggttgaagctgcgtatcgacggggcgacttgttcaataagcggacactacttatgaatgactgggaagcgttcataaatcggaagcctgacattgcagaggtcatttcgctgaggtcccacaccgcatga

SEQ ID NO: 533198 - DNA, 561 bp, Stenotrophomonas maltophilia
atgagtgcacatgttcccgacgcccccgaaccggaagatgtcgagaggatggactgggaagccttcattcggctatggattcacatagatgtagacaaaattgaagacatatccaaacgtgccaaggccaacaagcttaacgccagtgaggtcaccaagctcgacgaatatctgagcaggtcactaagcgcctaccgcagcggaggtgaagatgaatcagcggcgctctgcgaagcggcatgggagagagcaaatatgctcaacctctatctaacgaaccgcctatccattggcacaggagagattgtaaggaggtcagcaaagaagggtgggcaggtgaaagctaacgccgcattagcgtcttcagcccagtaccaagccattgcggacgaaatatgggcagccaaccctagaattagcaaatcaggtgtagcggaacgtatagcggaaaagttcattcagagctatctagacgagcgcggtctgggcagggagtcaaaatcaaaggcaatgaagacacttcaggacaccatccggcgaaagataaaaaagccaagctag

SEQ ID NO: 533199 - DNA, 537 bp, Stenotrophomonas maltophilia
atgttggaacgactgaagaccatttcgtgtgccgcactggcgatgatcgcgctagggagcttggctccttgggctgcgcaggcgcaggaggtgcagaagaagtgggagagctacctgtcgatgggccagccgcgagccaccgaagcggcggtgcagaaggacatcaagtcgctcttttcccagtacgaaaaggacaaacccttcgattggcatgtcaaacgccaacgcgtccttggaaagaaggtcatctacgactaccgggtgagacccgagaagatcgttactaccgactgggtctacatccactcagggcaggagtactcctccgaagatcagattcgtagcgtgatcctcgctacccgcgtcagcgacccgcgggcggtggggcgtatcttggcgcagggacgtcagccaatgcttcgaagagctcagggccgctgccaaagaaatcttggggcgtctatcgatactctgaaatggcgggcggttgggggccatcgattggcggctccattcaaggttcagataatcttatga

SEQ ID NO: 533200 - DNA, 636 bp, Stenotrophomonas maltophilia
atgtcactcgtcgaatcccggaacatgctcaccttgcgcatcgaagaaatcgttgaggaggctacgaagcgctacttggcgatcttctccggtcaccttcgctcagctgaaggcaagccgctttatgccgcggatcttgtcatgtttggaattctcaataggaacctggggctgcttcgagcaatgccggcactagtcaatgagcgcaacattcatgcacttgctccacttcttcgcgttcaacttgacggacttctcaggctacatgcgtaccgaatcgtggagtcgatcgacgatctcgcacttcacgttgttggcggcaacagcctccgcaagttcaaagatcgaaacggaactgcactaaccgaccgtcacctagtagactcgcttaaagcggagattgattgggtagagcctgtttacgagacactctctggatgggtccatctgtcggagagccacattttctcagccgtcggtcctggtcaaaaagagggtgccattgttgtggctgttggaagccaggaggaaatcccggagcagttgttcgaagaagcagtcggtgccatcgaagcaatacattcttcaaccgccgagatgctagaaggatacttcggtcgcctagctggggcctaa

SEQ ID NO: 533201 - DNA, 726 bp, Stenotrophomonas maltophilia
atgcccgttcccatcaagaaaggggtgaaccaggccaaagatgtaaaacaggatggctatctcgcgcaatatcgttgcaacgtctgtgccaggactgaggctgaatactttacctgcctgaactgcaatccgatccaaattactcgctacaccttctggtgcaacaaactcctggaatgttccgtcatcatcgcgagtaacgccactacgacgattcgccagagttgtaccatttgtcccgcgataggtgcctgcgtactcggggcactgcagcggcgtcaacttggcatagagcctttcgtgaactgtcctaggatcagtgatgaactccagtcgttcttgggagctcgcttccaacagcccttgcagctccgccgcacatccagcttccaacacttcatcgtaattcgccatctcgtgcgggtcccacttcacgacttctatcattcgattatcaccaatctaaggcaggctatagcaatgaatcaaaacaatagcagctcatcttccccagtgtggggggcggattgtgatctcgagaacatagccccaagactgggcttcctaggttcgagccacttcctcgcgatcaaagatgcgcgttcgccagtccaccaatccactttgtccgcttcaggccagaagcagtccttcatcgcaggcccagcccgaactgccaccggtgcggttgatacatgcttcgcgcgggtggtagtaggcccgtaa

SEQ ID NO: 533202 - DNA, 459 bp, Stenotrophomonas maltophilia
atgaagcaacgccatatagcccagctatctgacgacctgaagcaactggataaagctattgccgagcagcttgagggacagcctggctggaagaatatcggcgcgctcaaaggcgtcggccccatcctgatcagcacactggcctgcgagttgcccgaactgggcagcttgggaagcaaagccatagcatcgctggtggggttggccccgatgaaccgcgaaagtggcacctggcagggccaacggcggatcagtggtgggcgcgcagtggtacgcgaagccctttacatggcggccctgacggccatccggtacgagccaagactgcgcgcgttttacgctggcctgaaggccaagggcaaagcgagcaaggtggcgctcgtggcggtcatgcgcaaaatgctggtgatcctaaacgcccgtaagcgggacgccgaggtggccctcggctgcccctga

SEQ ID NO: 533203 - DNA, 849 bp, Stenotrophomonas maltophilia
atgcagtttgttagcgatggccccgatatccccgacgccctgctgcgggctcatgaggaggggcgtgtggtgttcttctgtggtgccggggtttcctatcctgcgggtcttcctggcttcaagggccttgtagagaaggtctacaaaaacactggtgcagagttcagcgatattgagcgagatgcgttcaatagggggcaatacgacgcgactttggatttgcttgagcgtcgcttgcctggacagcgcgttacagttcgtcgcgctatggtgaaagcgctaaggccgaagttgaaggtcaaaggagccttggacacccacgctgcgcttctgcgtctatcacgtagccgtcaaggtgcacttcgacttgttaccacgaatttcgatcgggtctttcatgtcgccgcaaaacggacggggcaggtttttgatgcatattctgcgccaatgcttccgattccgaagaatagtcggtggaacggactcgtttaccttcatggcctgctttctggggcgtccgaagacacctccctgcatagactggtagtaactagcggggattttggattggcctatttgaccgaaaggtgggccgccaggtttgtcagtgagatgtttcgcaactacgtaatttgtttcgttggctatagtattaatgatcctgttcttcgctacatgatggatgctttggcggcagatagaatgcagggcgaagttacacagcaggcgtgggctttaggtgactgtgaagttggtcaggagcgccaaaagacagttgagtgggaggggagtaacgccgattctctattcggtgccgcccggtggcaccgaccattccgcacttcataa

SEQ ID NO: 533204 - DNA, 2592 bp, Stenotrophomonas maltophilia
atgcttcatttggcgaaatggctggtacgccatctggatgatcctaggttggttctttgggttgccgagagaggcgggaaactgcatgcaacttggcacaagctagttgaaaaggagcttcagcgattttcttcgctggcgattgcaggcagggtggatgagctggatgaaattcgggagaaggcgccacgtgccatccctcgcccgcagatgttgacgctatggcaaatactgcttgcggggagagtaaagagtaattggtatgcgctagatttctttagatggcgttccaagttgaagatgcatggtttgacgccgatcgcgcggttggaatttcgtgaactgctggcaccaaaaatttcaataagaaagccttttgctctggatgatgattattcgggaggcgcgacggttgtcactaaggtcaagcacttggtcgatttcgagttggagcttgctgccaatcacgttcgctcagcgttgcaagattctcaggacgacacgctaaaaaatatccttcccaagctgatcgatgatgtccagatgttgttgcgagatgcattggatctccttcgggctcttggagaggctgacgaattcagggatcgatcaaactgggacattccctctgtcgagccacactggcagaaccggggttttcacgactgggtagtacttatcgaactcttgagagacgcatggttggaagtccttgccgagagtggtgttcgagctgctcatatcgcacagcaatggtttgatgtcccgtatcccacgttcaagcgcctatccctgttcgctgcatccctgtgcgaaaatattcctccctctgtgtgggtggattggttgctctctgatgacagttggtggttgtggagcccggagataggccgcgaagtcttccggctaatagtgctgcggggcaaggcgttagatcaaaatgaatccagtagattggagtcagcaattctggctggtccgcagcgctcaatgtatccattggatatggaagctgaggcttggcagaagatggtctcgcgctcgacgtggttacggcttgcgaagttggaacagtcgggtgttgcgctaggcgcagctgcctccaaactcctcggggagctctcaatttcgaacagtcattgggtattggccgataacaatcgggaggagttttcacattggatgagtggcaccggagatccggacttcgaagatgagcggcatgtagacattgcgccacgcacaagagttgagcttgtgggctggctggagcagccagtccccgacagcgatccattctacgaggatacgtggagggatgtgtgtcgaacacggttctaccactcgttcgcggcactgtgtgatctgagtaggaatggggtatggcccgtcagtcgatggagagatgctctgaatgtatgggccgacgatgctttggtggcccgctcctggcgttactctgcgcatctagtcaaagaaatgccttcgcaattcgttgctgaactctctcattcgtttgcccgatggcttgaggcagcttccaaatccatagtaaatcatccagatgtgatgcttgagctggcatgtcatgttctagaggcgtctcatccacttggctcagaatctctgacgtccgatgacgaggttgaaatcaataggccggttagttcggcaattaatcacccatttggcatggttgcacaggcgttgttgaatttatggtttgcacaggcgcccagtgacaacgacggacttccatctgagcttaggcgaatgtttacggatctaagcgatggtcgaacgactggttttaaacatgcgcgagttattctggcgtcgcagttgatcgcatttttccgtgttgatcgggcctggacagagcaacatttgctgccactgttcgactggaacggttccgacgaggccaagagggtttggcagggcttcctttggtcgccgcgcatctatccaccgttgatgatttccttgaagtctcagttcctgaattgcgccaagtactatgacgagcttggcgaatttcagcagcagtattcagttctgctaacttatgccgcgctcggtccggctgaaggctacgaggttgctgagttccgacatgctttggctacgcttcctcggaagggactggaagaggctgctcaggcgctatctcaagctgttgaaggagctgcgtcgaagagcgaagattattggcgaaatcgagcccagcctttccttcagcaggtgtggccgaaatcacgcgagcttgcaagcatgcgtatatcggattcgttagcaaaaatgacaattgctgttggtggggattttccaaaggcactcgctacggtcgtaaactggctattgccgattgagtatcctggatcagttgtccgcagcctgagtaaatccggattgtgcgagcgctatccatcggaagcactggagcttcttgatgccgttatcgataagccattttgggtgccggatgaattggtcagttgcatgcaggacattgctgccgccgcacctcacctggttcaagatgctcgctttcagcggatagacgagttagtgagaagatccgcgggctga

SEQ ID NO: 533205 - DNA, 1422 bp, Stenotrophomonas maltophilia
atgtcttttgaatcgctgggcctggcgcccttcctgctgcgcgcgctcgccgagcagggctacgaaaacccgaccccgatccagcagcaggcgatcccgctggcgctggccggtcgcgacctgctggccggcgcacagaccggcaccggcaagaccgccgcgttcggcctgccgctgctgcagcacctgggcaccgcctcgcaggaggtacgtgccggcccgcgcaagccgcgcgcgctgatccttgccccgacccgcgagctggccacccaggtgcatgacagcctgcgtggctacagcaagtacctgcgcatccccagcgcctgcatctacggcggcgtcggcatgggcaaccagctggacatcctgcgccgtggcgtggacctgctggtggcctgcccgggccgcctgatcgaccaccttgagcgtcgcagcgtcgacctgtccggcattgaagtgctgatcctggacgaagccgaccgcatgctcgacatgggcttcctgccgtcgatcaagcgcatcctggccaagctgccgaagcagaaccggcagaccctgctgttctcggccaccttcgaggacaacatccgccagctggcgctggagttcatgcgcaacccggaacagatccaggtgacgccgaagaacaccgtggccgaaaccatcacccaccgcgtacacccggtcgatgccggtcgcaagcgcgacctgctgctgcacctgctggcgcaggacagccgcgagcagaccctggtgttcgcccgcaccaagcatggcagcgacaagctggccaccttcctggaaaagtcgggcatcaagaccgcggcgatccacggcaacaagagccagggccagcgcctgcgtgcgctgggtgacttcaaggccggccgcgtgaccgtgctggtggccaccgacatcgccgcgcgcggcatcgacatcaacgagctgccgaaggtgatcaacttcgacctgccgatggtggccgaggactacgtgcaccgcatcggccgcaccggccgcaacggcgcgaccggccaggcgatttcgctggtggcgcaggatgaagtgaagctgctgcgcgcgatcgtgcgcctgctgggccgcgacatggacatccgcgatgtgccgggcttcgagctgcagacgccgatccgctggggcaacagtgcgccgggcaaggcggagcacgataccggtgagcgcgcgccgcgcaagagccacgcacgccgtccgcacggcgatgcgccgcgccatgcgcatgccggcccgaagaaggccggtggtggccgccgcgagggcggtggcaatggccagcagcgtgccggtgcgggcgcgggtcagggccagcgtcgtggcggtggcggcaatggtggcggccgtggccgcggccacggtggcaatggcggcggtcgcgccggctga

SEQ ID NO: 533206 - DNA, 2595 bp, Stenotrophomonas maltophilia
gtgtccttgcatcgtcgtgccgttcttccgttgttgcttgccgccgccaccgcactgttccagccgcagccggtacaggcacagagcacctacttctttccgcaggctgccgatgcagcggcgttcgataccgccgtgcccacgccggagcagttcctcggctatccgatcggcagccgttacacccggcacgaccagctggtggcgtacttccaggaactggcccggcgctcggacaggatcagcgtgcgcgagatcggccgcagctatgagggccgcccgctgttgatcgccactgtcactgccgcaggcaaccacgcgcggttggaacagatccgccagcagcacgcgacgctggccgatccggcgcagccgcgcagtgcggcgggcgacagcccggtggtggtgtggctgggatacagcgtgcatggcaacgagacctccagtgccgaggcggcgatgctgacggcttactacctggtggccaaccgcagcgccgaaacccagcagtggctgcagcaggcggtggtgctgttcgacccggcgcagaatccggacggtcgcgatcgtgccgccaactggcacaacgcgtgggcctccgatccggcctcggccgacccggccgacaaggagcacgtcgaaccgttcccgcaagggcgcaccaaccactacttcaccgatctcaaccgcgactggctggccctgacccagcaggactcgcggccgaaggtggaggtgttccaccagtggtacccgaacgtgcagatcgacttccacgaaatgggcaaggacagcacctactacttcgagccctcgccgaagagcatgcacagtccgctgattcccgcggcgtcgtacgaattcaacaagaccctggccaggtaccacgcgcaggcgctggatgcgctgggctcgctgtactacaccggcgagaacttcgacaacttctcgccggtatacggctcgacctacccggacttccatggtgccgtcggcgtgaccgtcgaacaggccagctcgcgcggccgcgtgcaggaatcggtgaatggcctgctgacgttcccgttcaccatccgcaaccaggtcgccaccgggctgggcaccgtgcgcggcgcagtgaccgagcgcagcggcctgttcgacctgcagaagcagttcttccagagcgcgctgaagcaggccgcacagcagccggtgaagagcttcgtgttcggtgatgcgcatgatccggcactgacccgccgcctgctggaactgttgctgctgcatcgcatcgacgtgcgcgcgctggatcgtgccgtcactgtcgatggccagcgcttcgatgccggcagcgcctacgttgtgccggtccaacaggcgcagttccgcctggtgcattcgatctttgccgagacgccgccgatcaagggtgatgtgttctacggcagcaccagctatgcaatcgcaccggcctacggcgtggccttcgccggtagccgcagccgtatcgaaggcggtgcacgcgtgaccgcgctgccggcggcgcagggcgcggtgctgggcagccaggccggattcgcctacgcgatcgactggcgcgactacaacgccgggcgcgcgctggccgcactgcagggcaagggcgtgagcgcacgtgcagcgttccagccgttcaccaccgcgaccgcgcagggcgaggtcagcttcgccgccggcagcctggtgattccggtggccgggcaatcgctgcagggcgcagcgctgcttgaggcagtgacgtcggccgcgcgcgaggcgggtgtgcaggtgcacgcattgcccagcggccgcagccgcgaaggcatcgacctcggcagtgacggcgtcaaggcgctgcgcaaacccacggtcgcgctggtgatgggcgagggcgtggccgccaccgagatcggttcggcgtggttcctgctcgaccagcagctgcacctgcctgccagcaagctggacccgcagcagctgggcaaggtgccgctggaccgctacaccacgatcgtgctgtccggcggcacctacaccggcatcgatgccacggcggtggccgcactgaagcgctgggtgcaggccggaggttcactggtgacctacggcagcgcctcgaagtgggcgatcgaacagaagctggccgacggcgagaagctcggcaaggaagaagagactgccgacgagagccgccgtgcgttcggcgaccagcgcgacatcgctgcgatcgagcgggtcagcggcaacatcctcagtgccgacgtggataccagccatccgttggcgttcggcgtgccgcgccggcaactggcgatcaacaaggaaaacacggtgacgctgcagccgagtgcgaacccgttctcgacggtggtacgcatcgacgcgccgccgcgggtgaacggttacttgtccgagcgcaaccgcacgcgggtggcgggcagcgcgtggctgctggtgtcggcgcaggggcagggtaacgtggtgctgttcgccgatgatccggcgcatcgcaagtactggcatggcacggaccggctgctgatcaacgcgatcttcttcgggaatctggtaaatccggcgaaagcgcggggttga

SEQ ID NO: 533207 - DNA, 2640 bp, Stenotrophomonas maltophilia
atgcccaagcacaccctgctcgtggcggccctggccgtcgctctggccgcgcctttgtctgccgccgccgaaacctccgccgacgccagtggcgaagccagcaccctggccgccgtgcgtgtcaccggttccaacatcaagcgcaccgataccgaggcctccaacccggtgcaggtgatcggccgccagcagctggaacagaccggcaaggccaccgtggcagatgtgctgcgttcgatctcggccaacaccggcaacgccagcaacgaaaccaccaacaacggctgggcctccggctcggccggcatcggcctgcgcggcctgtcgcagaagaatacgctggtgctgctcaacggccgccgcctggccaactatggtttcccggccggtggcctgtctgacaccttcgtcgatctcaacgcgctgccgctggtcgcggtcgagcgcatcgaagtgctcaaggacggcgcctcggcggtgtacggttccgacgccgtggccggcgtggtcaacatcatcacccggcagaacttcgaaggcgccgagatcggcggcagcttcggcggtgccgaccagggcggcctgcacgagcagaacctgaagttcgtcggcggccttggtgatctcgacaccgatggctacaacatcctcttcagcctgcagggttacaaccgcgaacgtctggaccaggacgaacgcaacctgaccaggagcggcatctacaccgacaagcccggtggccgctggaacggctggtcggccaagggcgcgcgctacctggtcaacggcgtgtcggtgccgatgctcgacgccaacggcaactgcccggtcggtaccacccgcgtcgccagcgcgccgatcgacggcctggccggcgacacctgcggcttcaaccaggccccgttcaccacgctgatcccctcgaccaagcgctaccaggcctatgccaacggtaccttccgcctgaacgacaacgtcgaagccttcggcgaagtgctgtacagccagatcaagagtgccgcatggttcggcagcagcccgttcttcaccctggagagcggccgcttcgcattgaacgccaacagtggcctggccgaaccggtgtcgtcgctgctgccggccaacaatccgtacaacccgtacggccgtgcgatcccgatcgaatacaccttcttcgacctcggcggcacgatcaagaccaaccgttccaccgcctatcgcggcgtgttcggcctgcgtggcaccactgcgaactgggactgggaagtggctgcattcggcgcacgcagcagcgagcgtgagagcgtgtccggcggcttcgccaatcgctgggcgctggccgatgcgctggccaccggcagctacaacctgctgaatccggcggccacgccgcagtcggtacgtgattcgatcaacatcgccacgctgcgcccggccgagtccaagctgcagggcgtcgacgcgaagatttccggcagcctgggccacacctgggctggcgagatcggcttcgccgccggtgccgagtggcgccgcgagaagctcgattccaacaacccgtggcagatcgatgccggcctgcaggtgcgcccggccatcgccgaagtacatggccagcgccaggtcagtgccgcctacgccgaagtgaacgtgccgctggcctcgaccctggaactgtccgccgccgcgcgtgccgatcactacgatgatttcggcgatgcgttctcgccgaagatcggcctgcgctggcagccgctcgatttcctgctggtgcgtgcctcggcgtcgaagggcttccgtgcaccgtcgctgtcggagaactccaacagcaccagcatcgcctacggcagcgtggccgacccgcgtgatccggacgtgccgggctcgcgccagaatccgaccttcttcaccgttggcaacaacgcactgaagcccgagcgcaccaagagcgtgaacttcggcgtggtgctgtcgccatgggccaacaccaacctgagcgtggactactaccgcatccagctggacaacctggtcggcaccaacaacacccagaccctggtcaacgacaacgtggccggcgccgtgcagcgcgacgagcgcggcaagctgcaggccgtctacaaccgctaccagaacctgagcgagctgaagacatcaggcatcgacgtcgagctgcgccagcgcatcccgaccgctgcgctcggcgacttcaccgtgtcctccgcctacacccacgtgcgcgactaccgtcgcccgaccgtggtcggcggcccgctggtcgactacgccggcagcaacctcggcgcgaccctgcccaaggacaaggccaccaccaccctggactggaaatacggcgacttcaacgccgcggtgacctggtactacaccagcagctaccgccaggaggccagcaccgccgccaaggccgtgcagcagcgcgtcggcagctacagccagtacgacctgtacctggcctacaccggcatcgacaagctgacggtgtacgccaaggtgcagaacctggccgacaagacgccgccgtacgatgcctcgttcccgggcatccgcgcgccgtacgacttcagccagtacgacctgcgcggccgctacttcacgctgggcttcgactaccgcttctga

SEQ ID NO: 533208 - DNA, 363 bp, Stenotrophomonas maltophilia
atggaaatcttcaaagtcttcatgctcgaggcggcgcaccgcctccccaacgtgccgccggggcacaagtgcgcgcgcctgcatggccactcgttccgggtggaactgaaggtcgagggcgagccgggggcgcagaccggctggatcatggacttcggcgacgtgaaggcggccttccagccgatctacgaccgcctggaccatcactacctcaatgacatccccggcctggagaacccgaccagcgagaacctggcggtgtggatctggaacgagctcaagcccggcctgccggcgctgagcgagatcaccgtgcacgaaacctgcacgtcggggtgccgttaccgcggccccactgcctga

SEQ ID NO: 533209 - DNA, 384 bp, Stenotrophomonas maltophilia
atgctgcaacgcatcaagccactccctgacgcccccatggccgccgccttcagcgatcgcttcagtgatgccacccgccagctcgccgccgcggcaacgcgcgcgaaccggttggcgttggagaacgcggaaagcatgttcggcgtgcagctgaaggtgatggagcgcaacctgactgcgaccggcggctggctgggtgaactggcccgcggcgaggatgcggccgggacgctctccaagggcgcgcagctgtggcaggacaacctgcagcggctgggccaggcccagcaggacgtggtcggtctcggcctgcaggccagcaaggcctggtccgaactggtgcagggctacaacgaatcaacggcggacgcgaacaaccactga

SEQ ID NO: 533210 - DNA, 1902 bp, Stenotrophomonas maltophilia
atgagcggcgtggtcggggcctggctgccgcccgccgaggatgagcagctgctgcagcagctggcgccgatgctgcgcgcgctgcagcagcgtgggcgtggccgcatcggctactggaccgacgccgaggccggcctcgcgctgggccattgccgggcgccgaccgatatgccgttgcagccgctgagctcggactgcggtcgctacgtgctgtgcctggacggccgcctgtacaaccgcggcgacctgcaggcgcagctgcgcgatctgccccgcagttgcagcgatgcgcggctgctgctgcaggcgatcgtcgaatggggcgtgcagcgggcgctgttgcgcatcgaaggcgccttcggtttcagcgtctgggaccgggagtcgcgcgtgctgtggctggcccgtgatccggtgggcgagcggccgctgtattacggctggtaccagggccagttcctgttcgcctcggagttgaaggcgctgcaggccttcgccggcttcgcgccgagcatcgaccaggatgccctgagcctgctgctgcgccacgactatgtgccggcgccgcacaccatctaccgtggcatccacaaactggtggcgggcgcgatgctgcgtatcgatgtcagcgaccatgccgcgggttgctccagccaggccgcgcagggcggcgcgcgttactggtgcgcacgcgacgcgatgcagagtgcactgcaggagccgctgcagccggcgccgagcctggaacaggccaccgaccagcttgaagcggtactgcagaaggccatcgcctcacgcatgcactcgcccctggcgtgcggcgcgttcctgtccggcggtaccgactcctcgctggtgacggcgatgatgcaggcacaatcgaccctgccgatcgaagcgtggacggtcggcttcgacgatccggggcatgacgaaagcgactgggcgtcacaggtcgcgcgccatctgggcgtgcagcaccacctgcatcgcatggacgcgcgccagggcctggacctgctgcagcgcctgccgcaggtctggtgcgagcccttcgccgacgcctcgcagctgccgacgctgctggccagtgaactgctgggggcgcgcaagccggtggcactgaccggtgacggtggcgatgaactgttcttcgggcatcccagctatggccgcgcgctgcgcaatgcgcgcctgtgtggtggcctgccggactgggtacgcgacctggcgcggcgcagcggcaaccgcatgaacgtcgagcgcggccgcctcggtggttggcgcgccctggtggccgaggtggctgccaatgatgtggaaggtcactacctgcagcgcgtgacccgctggcggcagccggcgcaggtggtgctgggcgcgcgcgaaccggtgacgatcttccagcagcaggacacggcgctgccggctgaggcgcgcatccagctgctggatttccgcatggacctggccgagggcatcctggccaaggttgatcgcgcgggcatggcggcgggcgttgaaacccgtgcgccgctgctggacatggaggtggtgcgcctggcctggcggctgccgcagcacctgaagtaccacgatggcgagcacaagctgattctcaagcacctgctggcgcgctatctgccggaaccgctggtgtaccgccccaagcgcggcttcggcccgccgatggcccgctggctggctggtccgttgcgcgactgggcggaggcgctgctggatccgcagctgctgcgcaatcagggctgcttcgatgtggcgcgcgtgcgtggtgtctgggaggcgttcctgcggggcgagcgcaagtggcacacgcacctgtggaacgtgctgatgttccaggcgtggcaccagcattggcatggtggtcgcgggcgctga

SEQ ID NO: 533211 - DNA, 690 bp, Stenotrophomonas maltophilia
atgctggatatcgtactggtcgaagacgatgcccgcctgggaacgatggtcagcgactacctgcaacggcatggctaccaggtggcccacgagcgcagcggcgagcgcgccgtggctcggatcctggcggagaagccggccctggtgctgctcgatgtgggcctgcccgaccaggatggtttcgaagtgtgtcggcagatccggccccactatgacggcatcatctgcgtgctgaccgcccgtaccgacaacatcgaccaggtgctgggcctggaactgggggccgacgattacatcggcaaacccatcgaaccgcgggtgctgctggcccgcctgcgcgcccacctgcgccgccaccgccgggtcgaaccgcgtgacggcagcctgcgcttcggcgagctgagcatcgacccgtccacccgcaacgtgcacctgcagggcagcctgctggagctgaccaccgccgagttcgacctgctgttcctgctggccagcaatgccggccagatcctggaccgcgacgcgctgctgcgcggcctgcgtggcatcgccttcgatggcctggaccgctcaatcgatgcccgcatctcgcgcctgcgccgcaagctgggcgacaacccggagcagccggaacggatcaagaccgtccgtggccgcggctacctgttcagccgctcggcatggggatga

SEQ ID NO: 533212 - DNA, 1347 bp, Stenotrophomonas maltophilia
atgaaacgcacaccgtcggcgatgcgcggccacgccttccatttcctgcgctacggcatcggtttcctggtcgcccacctgttgttgatcgtgctgggcctgtgggcctgggacgccctgctggaagaccgcaccgaagccggcctgcaggccgagatgcgcggcacgcacgcgctgctgcagcatcgcttcgccgaaaccccgcgcgagcagtggccggcactggcgcgcgaactcgacgccgatttcgcctacgcgctgcgcatggtgccgctggccgaggcggtgaaggcgctgccggccagccagcgcccgccgttcaacaacggccgcgtacagatcgatctggagcacatgcgcagcctgcagcggatcggcgacagcgactacgccgtgatgctgggcccgttggacgaggcgctgccggacgaaggctggcaggacagcgaagtatccggtgtggcgatcctgctgctgatcctgatggtggcggtggcactgccgatgtacgtgatggtgtaccggctgtggcgcgacgtctcgcagttggcccaggcggcccgccgcatgcgcgacggccagctggacacgcgtgcgccgcgcgccggcaccgcgctggtgcggccgctggccaacgccttcaaccacatggccgagcagctgcagcagctgctggaaagccagcgcgtgctggcccaggcggtcgcgcacgaggtgcgcacgccgttggcacggatgcgtttcggcctggccgacctggaagacactgcgctcgacgatgtgcagcgcgatgcgctgggcgggctgcgcaccgacgtcgatcggctgcagcacctcaccgatgccggcgtcgaatacgccgcactgggccgctgccatcagctgacccgccagcgcctgcagctggcggcgctggtgcgcggcgtggtggcccagttcgcaccgttgccgatgccggtgcagcaggcgttgtcgccggtgggcctggtcaacgtcaaccggcacatgctggaactggcgctgcgcaacctgctcggcaatgcgctgcgttacgcgcgtcggcagatccgcatcgccagcacggtcaatgacggctggctgtgcctgcaggtggaggacgacggccccggcatcgcaccggaactgcgcggccaggtgctgcaaccctatgtgcggctggacccgggcagccccggcttcggcctcgggctggcgctggtgcaggtggtggccgacaagcatggcggccaggtcgaggtgaccgattcggcgctgggcggcgcctgcatccgcctgcacctgccgctggaaaccggcggtgtcgtggaggccgaggcagcctgctag

SEQ ID NO: 533213 - DNA, 1470 bp, Stenotrophomonas maltophilia
atgatcaagccgaacctgtggcagaagctggcggtggtgaccgccgcgctgatgctgatgtgctgcatggcgctgctggcactgcagatgcgtgccaacacccgccacgagcaggaagtcgtgcagcggctgtcgctgggcctggccgaacatatcgcccagcgcagcgagctgatggacaccagcggcatgcgcgatgccgcggtgcgcgcgctgttcggccagctgatggcggtcaaccccagcgtcgaggtctacctgctggacgaccagggccgcatcctcggtcacgatgcacccagtggacatctggtgcgcaaccgggtggatgtggcgccgttgcgtcgcctgctggccggtgcaccgttgccgatcctcggcgatgacccgcgcagcgccgatggccgcaaggtgttcagcgctgcaccattgatcgtgcagggccggccggccggctatgtgtacgtggtgctggtcggcgagcaccggcagatgctcgccgacgatcttgccgccggcagccagtggaacaccacgctgtggtcggtggtgctggtcggcagcctcggcctgttggccgggctggtcgcgttctactgggtgacgcgtccgttgcggcggctgacccggcggatccaggcctttgacatcgatgctccgacgccgctgccgccgccggagccgctgcgcgctggtgagcgcgacgaactggtgatcctggaacatgcgcacgcgcagatggcgcagcggctgggcgagcagtggcagcagctgcgccagcaggatctgcagcgccgtgaactggtcgccaacatctcgcacgacctgcgcacgccgttgtcgtcgctgcacggctacctggaaacgctggcgttgaaggacgccacgctgtcaccggatgagcgccgccgctatctcggcattgcgctggcacagagcgccaaggtcggccggctggcgcgcgcgctgttcgaactggcgcggctggagcacggcgaagtgcggctggagtgggaagtgtttgcgctgccggagctgctgcaggacgtgctgcagaagttcgaactggcggcacaggcgcgtggccagcagctgcacgcggcgtttccgcccggcctgccgctggtccgtgcggacctgggcttggtcgagcgggtgctgaccaacctgctcgacaacgcgctgcgccatgcacccgagggtggccagatcgaggtgcgcctgcgcgcgaccgccgacagcgtggaggtctgcgtcgccgatgatggccccggggtagccccggcgctgcgtacccagctgttccaggcaccggccgcgctcggcgcgcggcgtggcgacaacggcggattgggcctgttgatcgtgcagcgcatcgtgcagttgcatggccgccgcatcgaactgcgcgacagcgaacggggcgcgctgttcgtgtttgccttgccgcgcgcggaaacggcggtctag

SEQ ID NO: 533214 - DNA, 720 bp, Stenotrophomonas maltophilia
atgtcgaccaaacgcgtgctgatcgttgaagacgatgcccacatcgccgacctgctgcgcatgcacctgggtgatgagggctacgacgtcgcccatgccgccagcggcgatgccggcctgcgcctgctcgagcaggacggcccgtgggatgcgctggtgctggacgtgatgctgcccggcgtggacgggctgcaggtgtgccagcgcgcgcgcgcgatggcgcggtatgtcccgatcatcatcatcagcgcgcgcggcagtgaaacgcagcgcatcgtcggcctggaactgggcgcggacgattacctggcaaaacccttttcgatgccggaactggtggcacgggtacgtgcgctgctgcgccgcgccgaggcgatggcgcagagcgcgcgcatcgatgccggcgcgatcgagctgggtgggctgcagctcgatccggtcgcgcgcaccacttcggtggatggcaacacgctggaactgaccccgcgcgagttcgacctgctgctgttcttcgcccgtcatccggaccaggtgttcgcgcgcatggaactgctcaaccaggtctggggctaccagcacgatggctatgagcacacggtcaacacccacatcaaccgcctgcgcagcaagatcgaacccgacccggccaacccacggcggttgctgacggtgtggggccgcggctacaagctggtcgacccggccggggcggcggcatga

SEQ ID NO: 533215 - DNA, 573 bp, Stenotrophomonas maltophilia
atgtccctctcccgccgccatctgctgggcctgggcggtgtcgccaccgccgccggcctgttcggcctgggggcctgcagccgcgccgccccggccgccgccgaagcgcgcccatcgcgacagttcgaggtcatgcacagtgatgccgactggcgccagcgcctgaccccagcgcagtacgcggtgctgcgccagcaggccaccgaacggccctggagcagcccgctcaacaaggaacaccggcagggcaccttcgcctgcgccggctgtgcgctgccgctgttctcctcgtccaccaagttcgagagtggcaccggctggcccagcttctgggcccccctgcacaacgccatcggcgaagaccgcgacgtcaccttcgggatgctgcgggtggaggtgcattgccgccgctgcggcggccatctcggccatgtgttcaacgatgggccacgcccgaccgggctgcgctactgcatgaacggtgcggcgatggtgttcgttcccggcgccacggatggcactgccgacggctggcgggtgccggtcggttcttcccctgcttccggagcctga

SEQ ID NO: 533216 - DNA, 1770 bp, Stenotrophomonas maltophilia
atgctgctgttgctgcttgcctatctggggggcgcgctgaccctgctcagcccctgcatcctgccggtgctgccgttcgtgttcgcgcgtgccgatcgcccgttcctgcgcagcacgctgccgctgctgctgggcatggcgctcaccttcaccgtggtcgccagcctggccgcggtgggcagccaatgggtggcacaggccaaccaggtcggacgctgggtcgccctgctgctgatggcgttgttcgcggtcgccctgctctggccacgactggccgaccacctgctggcgccgttccagcgcgtgggtgcccacctgagtgcgcgcgccgatgcggcggatgccgcggggcacggcggcgcgtggacctcgctgctgatcggcatcgccactggcctgctgtgggcaccgtgtgccgggccgatcctcggtctggtgctgaccggcgccgccctgcatggcgccagcgtcggtaccactgcgctgctgctggcctacgcactgggtgcgatcaccgcattggcgctggcggtgtggatcggcggccgggtgttccgcgcgatgcaggcgcggctcggcctcggcgatgtacttcgcaaggtgctgggtgtggccgcgctgctggccgtcgtggcgatcggcctcggctgggataccggcctgctgacccgcttgtccacggtcagcaccgcgcgtatcgagcaacgcctgctggatgcagtgcccggcgcgcagccggcggcaccgccgatgatgatgatggccggcgccaatgccggtgccgatgcagcgctgccggtggaaggcacgctgcccgcgctggacggtgccactggctggctcaacagcccgcccctgagtgcacagcagctgcgcggcaaggtggttctggtcgatttctggacctattcctgcatcaactgcctgcgcgcgatgccgttcgtgcacgaatgggagcgacgctaccgcgaccacggcctggtggtggtcggcgtgcacacgccggaattcgccttcgagcgtgacccacgcaacgtgatgaaagcggtgcagcagctgaaggtcgagtacccggtggcgctcgacaaccagtacacgatctggcgcgccttcaacaaccgctactggccggcgcagtacttcgtcgacgcgcagggcaacatccgcggccaccagttcggcgagggcaactatgcgcgctcggaacagatgatccgtcgcctgctgaccgaagccgggcagaccaatctgccgccgccggccgatcccgctgccgccggcctgaagggcgtggccgtgcaggccgacatgggcaacctgcgttcgccggaaacctacctgggccacgcccgcgccgagcagttcgcctcgcccggcgggcagcgcagcgacgccgcgttcgactacacgctgccggccaccctggcgttgaaccagtgggggctgtccgggcgctggaccgtcaccgatgaggccgcacagctgcagcaggccggcggccgcatcgccttccagttccatgcgcgcgacctgcacctggtgctggcaccgagcgaggacggcaggccggtgcgcttccgcgtctggctggacggcaaagcgctgcccgccaccgatgccggcagtgatgttggtgccgatggcagtggcgtggtcgacgagcaccgcctgtaccagctggtgcgccagcgcggcgcagtcggtccgcatcgcttcgagatcgagttcctcgatgcgggcgtgcaggcctatgccttcaccttcggttga

SEQ ID NO: 533217 - DNA, 738 bp, Stenotrophomonas maltophilia
atgaaactctcctttgaacagggcatcgccgccggtgtggccggcctggtggccacggccttgattgccggtgtgctgctggttgaccacggcgcgattgcggcgccggtcgaggccagcgcgcagatccaggcactgccggcccccaccggcgatgcggcgttccgcgatgacgccccccacgccagcgtggtgttcgccggtggttgcttctggggtgtgcagggcgtgttccagcacgtcaagggcgtgagcaatgccgtgtccggctacatcggtggcagtgcggccaatgcgcgttatgagcgcgtcagcggtggccagaccgggcatgccgaagcagtgaagatcgactacgacccgcgccaggtcagctacgggcagctgatgcaggtgttcttctcggtggtgcacgacccgacccagctcaatcggcaggggccggaccacggcagccaataccgctcggcgatcttcagtgacgacgcacgccagcaggctgccagccgcgcctacatcgcccagctcggccaggccggcagctaccgcgcgccgatcgtcacccagctggtcagcggccagcgcttctacccggccgagagctaccaccagaactacatgaccaactacccgcaggcggcctacatccgctactacgacgcaccgaagctggccgcgctgggcaggcagttcccggcgctgtaccggcgcgaggcggtgctggtgccgatgcggtag

SEQ ID NO: 533218 - DNA, 1449 bp, Stenotrophomonas maltophilia
atggatacagatgaccagagcgcgatgatcccaccccgctaccaacggctgtccgacgagctggccgaggccatccacggcggacgccttccggttggcagccgcctgccttcgctgcggcagatggccctgcagcgcaggctcagcctgaacacggtgattgccgcctatcgccagctggaggacgccggcctagtcattccgcggcccaaagccggcttcgaggtggcgccgcgcttgtcggtgccagagcgttcgctgcgtgataccccgtccgcacccaccgcaccactgcagcaggtgctgatggcccgcgtgctggaagcacagcgccgccccggtgtgatcgacctggcctttgccggtccgcgcgggcgccagttctatccgggcgcgcagctggcccggcataccgcacaggtgctgcgccacggccagcagacggtggagacctacgcgcgccccaacggctcgccacggctgctggcgcagatcgtgcggcgtggcccgcgcatggggctgcacacccacagcgaacgcctgctgctgacccatggtgcgatggagggcctgcagctggcgctgcgcgcggtcacccagcccggtgatgcggtcggcatcgaggcaccgtcctacttcaacctgtatccgttgctggccaacctcggcctgcaggccatcgagctgcccacccatccgcagcacggactggatgtggatgcgctggacgcgctgctgcagcacacaccgctggccgcgctggtggtgatgccgaccgtgcacaacccgctcggctgcaccatgccgaccgccgccaagcagcgcctggccgagctggtcaacgcacggcagctgccgctgatcgaggacgcggtgtacgccgagctgcagttctgcgaaccgccggcgcccctgctgaaggcctttgatcgcgacggctgggtgatggtggtcggaggtttctccaagacactggcgccggattaccgcatcggctggctggatggcggccgcttcgccgagcgcatcgcgctgctgaaattccagtccaccggcggcgagccgcagctgctcggtgacgcggtcgcggcgtatctggaagcgggcagctacgagcaccacctgcatcgcatgcgccggctgtaccgcgaacaggtgggacggctgcgccagctggtggccgagcacttcccggccggcacccgcgccaccgaaccgcagggcggattcctgctgtggctggaactgccgggcgtggatacgcgcgagctgttcgagcgagcgctgcaggaggacatcgtgttcatgcccggccaggtctattcacgtggcgcgcgataccgccactgcctgcggctgtcgtgctgccagaccctggatgcgcgcttcattggcgcggtggaacgactgggcgcgatcgcgcgggagctggcggccgcagcacggtag

SEQ ID NO: 533219 - DNA, 684 bp, Stenotrophomonas maltophilia
atgccgttgcccgctacgctgccgcccgccctgttcattaccggcaccgatacggagatcggcaagaccgcggccagcaccgcgctgctgcaggcgctgcgccggcgcggcctgcgcgcggtgggcatgaaaccggtggccagcggcagcgaagacctggggcagggcctgcgcaacgaagacgcgctggcgctgcaggcggccagctggccggtgccggactatgccgatctgaacccgtatgcgctgcggcagccgctggcaccggagctggccgctgccgaggacggcgtgcgggtggaactggcgccgatcgtggctgcgttcgcgcgactgcgcgcacaggccgacatcgtggtggtggaaggcgtcggtgggtggctggcgccggtctcggccacgctggaccagctggacctggtgcgagcactgcagttgccggtgctgctggtggtgggcatgcggctgggctgcgtcaaccatgcgcggctgactgcgcagtcgctgcaggccagcggcgtgcagtgcctgggctggatcggcaaccacatcgacccggcgatgcagcgccaggatgagaacatcgccacgttgcagcagcgcctgccgatgccgtgctggggacggctgccgcatctgccgggtgcggatggcgaagcgctgagcgcgcacctgctcgagtga

SEQ ID NO: 533220 - DNA, 483 bp, Stenotrophomonas maltophilia
atgttcgccaatgcctcgcttaccggcagcaagccggaacaatatgcccagctgctggaacaggcccgtggcctggtctacgccgagtccgaccgcatcgccaacgcggccaacctctccgcactggtctaccacgccctgcccgacctgaactgggtgggtttctacctgtacgacggcacggagctggtggtcggcccgttccagggcctgccggcctgcgtgcgcatcccgctggacaagggcgtgtgcggtgccgccgccagccagcgcgtgacccagcgcgtggacgacgtcgatgccttccccggccatatcgcctgcgattcggcctcgcgttcggaactggtggtgccgctgctgcgcggcgatgaactgatcggcgtgttcgacatcgacagcccgaagatcggccgcttcgatgccgatgaccaggccggcctggaagccatcgcccgcgtgttcgtcgaggcgctgggatga

SEQ ID NO: 533221 - DNA, 363 bp, Stenotrophomonas maltophilia
atgagcgcaccgaagctgcgcaacatcggccccaagagtgcagcgtggctgcgccaggtcggcctgcgcagccgcgaggacctggttgcgaccggcgcagtcggcgccttcgtcaaggtcaagcgcgccggcttcaagcccagcctgaacctgctgtactcgctggaaggcgcgctgctggactgccactggcaggaactgagcgagccgcagcgtgaggcgctggtgcaggattacgaagcacgcatcgccgcgcatccgctgaaggcggccggcccggcgtcgggtccggtgcatgagcagcgcttcgatgccgacgatgacgcggaagacagcgtgaccgaggatgcggacgaggattga

SEQ ID NO: 533222 - DNA, 579 bp, Stenotrophomonas maltophilia
atgatcctcgacctggtccgccatgccggcaacggtcgcgatgagttcctcgatggccgcagcgatccaccgcagctggcccgcctgccgcaggaactggtcgacgcctacgctgcgcagccctgggaacgggtgatcagttcgccgcggctgcgctcgctgcacacggcgatggccctggccaccccgcgcgggctggacgtggaagcggaggaggaatgggaagagctggatttcggcgattgggacgggcagtcgctgttcgacctgccggaggatgcactggcggccttccatgccgatccgcatgcattcccaccgcccaacggtgaaagctggggccacttcgagcggcgtatcgcgcgcgcgctggatcgactgctcgatgatgacgacccggtgccaacgctggtggtcagccatggcggcccgctgcgcatggtgctgtcgcaggtctgcggcctgccgatgtcgctgtgctgggcactgcgcatcgaccacggcacgcgcctgcgggtacggctggaacgtggcgaagccgggctggcaggcgagctgctggaactgcagcagccgtaa

SEQ ID NO: 533223 - DNA, 1842 bp, Stenotrophomonas maltophilia
atgaagctgcagtcccgaatgctgtccctggccgtgctggccgccctgcccgcgctggcccaggccgccgatgacaccaccgcgctcgaccagatcctggtcaccgccacccgcaccccgatcgccctgcaggacagcatcgcaccagcccaggtgatcgaccgcgcgcagatcgaatccagtcaggccacctcgttgcaggaactgctgcgcggccgcgccggcatcaacctgaccaatgccggcgggctcggcaagcagagctcgctgttcctgcgcggcaccaactcgggccacaccgtggtgctggtcgatggcgtgcgcatcaacagtgccgacctcggcctggccatgtaccaggacctgccgctggcgcagatcgaacgcgtggaaatcgtgcgcggcccgcagtccagcctgtacggcgccgacgccatcggtggcgtgatccagatcttcacccgccgcaaccagggcgattttgctccgcacttccagctcggtggtggcagcaacggcctgcgcgaagccagcggcggcatcggaggtggcaccgaacgcggctggttcggcgccgacatcgcctaccagcattccgatggcgtcgatgcctgccgtggctcggcgacgctgttcaccggctgcttcgctgacgaacccgaccgcgacggctaccgcaacctgtccaagagcctgcgtggcggctacaccttcaacgaccagtggaatgtggaaggcagtgcgctgcgcgccgacggcaagaaccactacgacggctattacaactactcggaaacccgccagcaggtgctggccggcaaggtgcgctacaccccgtccgggcgcctggcgttcaccgccaacgtcggccgcagcgacaacgaatcggacaacttcggcgacttcggcgcacgcggcagcgcgcagacccaccgcgatagcgcctcgctgcagggtgacttcaccttgaccggaagccagctgctgagcaccggcgtggactggagcgaagacaacctggacggcagcagcgcgggctaccttgtcgacagccgccgcaacaccggcgtgttcgtgcagtaccagggccgcttcggccgccaccagctgcaggccagcgcgcgcaacgacgacaaccagcagttcggcaaccacgccaccggcagtctcggctgggcaatgcagctggaccacggcctgcgcgtcaatgccagctacggcaccgccttcaaggcaccgaccttcagcgacctgtacgacccgtggagcggcgtgccgacgttgaagccggagaagtccaagagcgccaacctcggtgtttcgcagcagggccagggctggcattggggcctggacgtgtacgagacccgcatcgatgacctgatcacctacgatgcgtccacgatgaaaatgcagcaggtggagaaggcgcgcatccgtggcgccgaactgaccggtggcgtgctgctggccggcttcgacctcaacgcgcagctgagctacaccgacccgcgcaaccgcacccatggcagcacccagttcgacaactggctgccgcgccgtgcacagcagaccgcgcgcctggacgtcgaccgccgcttcggcgatttccgcgccggcctgaccgtgcagggtgcgggcaagcgctatgacgatgccgccaacgcggtgaaggtcggtggctacggcacgctggacctgcgcgccgagtacgcgctgacgccggcgtggtcgctgctggcacgtgccgccaacgtgttcgaccgccgctacgagacggtggcgtggttcaaccagcccggccgcgagtaccagctgagcgtgcgttaccagccgaaatga

SEQ ID NO: 533224 - DNA, 657 bp, Stenotrophomonas maltophilia
ttgtcgtatccctatccgctggtcgtgttcgacctagatggcacgctggtcgacagcgcagctgatatcgccgaagcactgaaccgcacgctggaagacatcggcatggcacgcgtgccggaagccacggttctgggctggatcggcgacggtgtgcgccgcctggtcgagcaggccgtgcacgccgcgggtcgtgaggtcgacctggccgaggtgatgccggtgttcatggtgcactaccgtgagtgcctgctgcgcagcccgcgcctgttcgatggcgtggccgaagcgctgatgcagctgcgtgcacgcggtgttccgctggcgatctgcaccaacaagcccgaagcgctggtgccgccactgctgcaacacctgggcattggtgatgcgttcgcgctggtactgggcggcgattcgctgccgcagcgcaagcccagcggtgagccgctgcggcacatcgctgcgcacttcgggctggcggtggatgcctgcctgatggtgggtgattcgttgaccgactaccgcgccgccgaagaggcaggcatgccgatcgcactggtgcgttacggttatccgcgtggcctggacctggccaccgcacaggcggtggcggtgattgacgacctgcgtgagttgccggggttgcagggctga

SEQ ID NO: 533225 - DNA, 792 bp, Stenotrophomonas maltophilia
atgaaccatggacaggccttgatcgaccacaaccgtgctgcctgggaccgccaggccagcgaagtgcgcgaatggtcgcgcccggtggaaagttcaaccattgccgccgcgcgcgaaggccgctggcaggtgcatctgaccccacgcgcgctgccattggactggctgggcgatgtgcgtggccgccgcatcctgtgcctggcctcgggcgggggccagcaggcaccggtgctggccgctgcgggcgccgacgtcaccgtgttcgatctctccgacgggcagctggaacaggaccgcagcgtggcggcgcgcgatggcctgcagctgcgcacggtgcagggcgacatgcgcgacctgcacgtattcgccaacgacagcttcgacgtggtgttccatccgatctccaacctgtacgtacccgacgtgcgcccggtgtggaccgaatgccgccgcgtgctggcgcgcgacggcatgttgatggccagcttctacaacccggtgctgttcgtcggcgcgcgcgatccgcagctcgatgcgcagggcctgatccggccgcagtacgccattccctattcggacctggaagacctgcccgccgcagaacgtgaggcgaaactcggccgcggcgatgcgctgacctttggccacagcctgaccgaactgatcggcgggcagctggatgcggggttcgtcatcgatcgcttcatggaagactggcagccgcagccgcgcttcctgatcgaccgctacctgcccacgttcctggccacccgcgcacgccggatcggttga

SEQ ID NO: 533226 - DNA, 930 bp, Stenotrophomonas maltophilia
atggaccgattgaccgccatgaccgtgttcgtcgaggtggccgagcgcggcagcctgaccgcggcggcagaggtgctggacatgtcgcgggcgatggtcagccgctacttggctgaggtcgagggctggctgggcgcacgcctgctgcaccggaccacgcgccgggtcagtctgaccgggcccggcgaggcggcgctggcgcgcttccggcagatgctggcgatcggcgaggaactgcagggcgagctggccagcgatgatcccgagccgcatggcacgctgcgggtgactgccagcgtgtcgttcgggcagagccacctggcgcgggcggtggccggctttgttgcgcgccatccggcggcacgcatcgagctgctgctggtcgaccgcacggtgaacctggtggaggagcgggtggacctggccgtgcgcatcgcgcgccagatcgatcccagcctgatcgcgcggcggctggccacctgccgctcggtgctgtgcgcgacgccgtcctacctgcaggcacgcggcacgccgactgctcccgagcatctggccgcgcacaactgcctgacccaccactacgtcggcaagagcctgtggcagctgcaccgggacggccgttcgctgtcggtggcggtgggcggcaacatcagcgccaacgaggcctcgctgctgctggaggcggtgcgggccggtgccggtatcgccatgctgccgacctaccaggtggcgccgctgctgcgtaccggcgagctgatcgaactgctgcccgaattcagcctggacgaactcggcattcatgccgtgtacgcgtcacggcgacagcagcccgctatcatgcggcgattcctggactacctggccgagtgtttcgccagcccggccttccaggatctggattggcgcccaccgggcaaggagaacacatga

SEQ ID NO: 533227 - DNA, 639 bp, Stenotrophomonas maltophilia
atgaagatcgccctcgttggttccaccggcaacatcggccgccagatcgcccgccacgcgctggcccgcggccacgaactcaccgtcatcgtgcgcagcgcgcaggacctcccggccgagctggccagtgcccatccggtgatcgcctcgctggatgaccaggacgcgctggttgccgccatcgccggccacgacgtgctcgccagtgcctacggcccgcgcccgggcgatgacatcggccgcgtcggcgaggtcgccgcgcagctggcggctgccgcgcgcaaggccggcgtgccgcgcctggtggtggttggcggtgccggcagcctggaagtcgcacccggcgtgcagctggtcgacacccccaccttcccggaggcctacaagccgtacgcgctggcccaccgcgaggcgttcaaccgcctgcaggcagtggacgacctggactggaccttcttctcgccggccgccgaaatcggcccgggtgaagagcgcggccagtaccgcgtgcagcccaaggcgttcctggccgataccagcggccacagccgcatcagctacgccgactatggcgcggcgttcgtcgccgaactggaagcgcacgcgtatccgaagcagatcatcaccgcagcgtattga

SEQ ID NO: 533228 - DNA, 912 bp, Stenotrophomonas maltophilia
atgcgtaccgctgccctgctgcttccccttgccctggccgccagcttcaccagtgcgccgctgctggccgcaccggccaccacggcgccggcggcggcgacgaaatcccagctgcacctgcagaccttccatcccggcccgcaggcaatgttctcggtgtcctcggtgctgatcgaaggccgccacgacgcgatcctggtcaatgcgcagtttggtgccagcgatgcgcgcaagctggtcgagctgatccgcgccagcggcaagcagctgaccacgatctacatcagccacggcgatccggactactacttcggcctggccaccctgcaggacgccttcccgcaggcacgcatcgtcgccaccgcgcagaccgtcgcccacatccagcagacccaggccggcaagctggcctactggggaccgaagatgggtgccgacgtgcccgcgcgcatagtgctgccgcaggtgctggatggcgatgcactgcagctggaaggccagcgcctgccgctgatcggcctggatggcccgaccccggaccgcacggtgctgtgggtgccgtcgctgcgcgcgatcgtcggtggcattccggtggtagccggcgagcacgtgtggatggccgacacgcagacgcctaagtcgcacaccgactggctgcagaccctgcagcggttgcaggcactgaagccgaaggtggtggtgccggggcattacgcgccgggtgccgcactggatgccagtgcgctgcgcttcactgcggactacatccgcgcgttcgatgtcgagacggcaaaggccaaggacagtgcggcgctggtgaaagcaatgcagtcgcgctacccgaagctggacggcgtggcatcgctggagctgagtgcgaaggtggccaagggcgagatgcagtggccttaa

SEQ ID NO: 533229 - DNA, 1095 bp, Stenotrophomonas maltophilia
atgacccgactgcgcaagatcatccacgtcgacatggacgcgttctacgcgtcggtggagcagcgcgacgatccgtcactgcgcggcaagccggtggttgtggcatggcgcggcgcgcgctcggtggtgtgtgcggcgtcctacgaggcacgcgtgttcggcgtgagttcggcgatgccggcgctgcgcgccgaacgcctgtgtccggacgcgatcttcgtgccgccggactttgcacgttacaaggcggtgtcacgccaggtgcgcgagatcttcctgcgccacaccgacctggtcgagccgttgtcgctggacgaggcctacctggacgtgaccgagccgaagagcggcatcgaactggccaccgacatcgcccgcaccatccgtgcgcagatccgcgaggagacgaacctgaccgcttcagccgggatcgcgccgaacaagttcctggccaagatcgcttcggactggcgcaagcccgatggccagttcgtgattccaccgcagcgggtggacgccttcctgctgccgctgccggtgaaccgggtgccaggcgtcggcaaggtgatggaaggcaaacttgccgcgcgtggcatcgtcacctgcggcgacctgcggcagtggtccctggtcgacctggaagaggcgttcggcagtttcggccgcagcctgtacaaccgtgcacgcggcatcgacgagcggccggtggaaccggaccagcaggtgcagtcgatctcctcggaggacacctttgccgaggacctgctgctggaagacctgggcgaggcgatcgtgcagctggcggagaagacctggaatgccacgcgcaagaccgaacgcgtcggccacaccgtggtgctgaagctgaagaccgcgcagttccgcatcctcacccgcagcttcaccccggagcgcccgccggaatcgatggaagaactgcgcgacatcgcactggccctgcgcgcccgcgtcgacctgccggcggagacgcgttaccgcctggtcggcgtcgggctgggtgggttccgcgaaaaggaggccgtggtgcagggggaattgttcgagcacggaccgaacgattccacatccctctga

SEQ ID NO: 533230 - DNA, 516 bp, Stenotrophomonas maltophilia
atgacccgtctccacgcgttcaaccgcgaacagctgctggccagcgcacgcggtgaactgttcggcaccgccgccggccgtttgcccaacgatccgatgctgatgttcgaccgcatcaccgacatccacgaggacggcggaccgcacggcaagggcatggtacgcgccgagctggatatccgcccggacctgtggttcttcggctgccacttcatcggcgacccggtgatgcccggctgcctgggcctggacgccatgtggcagctgaccggcttcttcctgacctggctgggtgcccccggcaagggccgcgcactcggctgcggcgaggtgaagttcaccggccaggtactgccggacgccaagctcgtgcgctacgagatcgacatcagccgtgtcatcaaccgcaagctggtgatggcccagtcggacgcccgcatgtacgtggatgaccgcgaaatctacagcgcgcgcgacctgcgcgtcggcctgttcactgaaaccgggagcttctga

SEQ ID NO: 533231 - DNA, 1209 bp, Stenotrophomonas maltophilia
atgcgtcgcgtcgtcatcaccggcatgggcatcacgtcctgcctcggcaatgatctggataccgtttcggccgcgctgcgcgaagggcgctcgggcatcaccgccttggccgaccatgccgaagcgggcctgcgcagccaggtcggcggtcgcgtcgacctcgatctggaggcgctgatcgaccgcaagcagaagcgcttcatgagcgacgcggcggccttcgcttacctgtccatgcgcgatgccatcgccgatgccgggctcagccccgagcaggtcagcaacctgcgcaccggcctgatcgccggttccggcggcggctccagcgaatggcagatcggcgcggtcgacctgctgcgcgaacgtggcgtgcgcaaggtcggcccgtacatggtgccgcgcacgatgtgctcgacggtctcggcctgcctggccacggcctaccagatcaagggcgtcagctactcgctgtcggccgcctgcgcgacctcggcgcactgcatcggcgctgccgcggacatgatccgccacggtgcgcaggacatcatgttcgccggtggcggtgaagacctgcactggtcgatgagcttgatgttcgatgcgatgggcgcgctgtcgaccagcttcaacgagaccccggccagcgcctcgcgtccgtacgacaaggaccgcgacggcttcgtcatcgccggtggcggcggcatgctggtgctggaggactacgaccacgccgttgcgcgtggcgcgcgcatccatgccgagctaatcggctacggcgtgacctccgatggcgccgacatggtcgcgccgtccggcgagggcgcggtgcgctgcatgaagatggcactgcagggcgtcgatcgcccgctggactacctcaacacccacggcacctcgaccccgctgggcgatgtcaccgagctcaacgcgatccgtgaagtgttcggcgatgcggtaccaccgctgtcctcgaccaaggcgctgtccggccattcgctgggcgcggccagcgtgcacgaggcgatctactgcctgctgatgatgcgcgatggcttcgtcgccggttcggccaacatcggcgagctggacccgaaggtggagagcttcccgatcctgcgcgagagccgcgagcagaagctggacacggtgatgtccaacagcttcggcttcggtggcaccaacgctgcgctggtgttcgggcgggtgtga

SEQ ID NO: 533232 - DNA, 684 bp, Stenotrophomonas maltophilia
atgacccccttcgctgcgctgccgttcctgcccgacgccgtcatcttcgacatggacggcctgatgatcgacagcgagcgggtctcgctggcctgctggagcgaggccgccgacgaattcgggctgggcctggaggaagcggtattcctgcgcatggtcggcctcggcgaccacgatacgcatgcgttgctgcgcgcgcagggcatcgaggacagcgtgatcgacgcggtggcggcacgttgccatgaactgtacgaagcacgcacgcagaccgggctgccgctgcggccgggcatcctggagctgctggagctgctgaaggcgcacgcggtaccgcgtgcggtggcgaccaccacgcggcagccgcgcgccaaccgcaagttggcggccgcaggcctgctgccgtacttcgatgccgtgatcaccagtggtgatgtggcgcggccgaagccggcgccggatatctacctgctggccgcgcagcggctgggccaggcgcccgaacgttgcctggcgctggaagattcaccggccggcacgcgggccgcactggccgccggcatgaccgtgatccaggtgccggacctggtgcatccggatgaagagctgcgcgcactgggccaccgcatcgtcggctcgctggtggacgcgcacgccctgctgctgccgctgctgccgaagtag

SEQ ID NO: 533233 - DNA, 702 bp, Stenotrophomonas maltophilia
gtgaagctggtcaagctgatcgccaacctgggctatggcagccgcaagcaggtgcagtggatgttccgcgaaggccgcgtcaccgacgccgacggtgaggtgctgtacgccgatgaccaggtgccgcacgaggcgatccgcgtcgatggcgagccgctggacccgccggtggggctgtcgatcgcgctgcacaagcccgccggctacacctgttcgaccaaggacaccggccgcctgatctacgacctgctgccgccgcgcttccgcgaccgtgatccggtgctgtccacggtgggccgcctcgaccgcgagaccagtggcctgctgctgctgaccgacgatggcggcctgctgcaccggatcatctcgccgaagtcgaagctgccgaaggtctacgaagtcgagttgagcgaggacctgcgcggcgacgaagtggcgttgttcgccagcggtacgctgatgctggagtccgagaagacgcccctgctgccggctgaactcgaagtgctggaggcgcgtcgcgcacgcctggtgctgcatgaaggccgctaccatcaggtacgccgcatgttcgccgccaccggcaaccacgtgcaggccctgcaccgcagccgcgtcggcgggctggacctgcaggggctggacgaagggcaatggcggcagctcacttccaccgacctggatacgttgttcgctccatga

SEQ ID NO: 533234 - DNA, 1065 bp, Stenotrophomonas maltophilia
atggcctccagcgacgacgcccccctgcagaccctgctcctgccgttctcccaaggcgccctgcgctggccggagggcccggtggctttcctgcgtgcccgcgatggctggccgctgcgcgaagcggccggcaaccgcgagctgcactgcgaacagagctttgccccgttcgcgcagccgctgcagcgggccgccggctggaccgtcagcggccagctggacgatgtggccggcaagggccgttacccgctggtgctggtgctgccaccgcgccagcgtgaagaagcccgtgcgctgttcgcccgcgcgttggcgctggtcgccgagggcggccgcatcgttgcctgccaggccaacaacgaaggcgcgcgctccggtgaaggcgacctcaagcagctggccggtctcggcggctgcctgaccaagaaccactgccgcgtgtactggaccgccccgctgcagggccagcacgacgccgacctggccaagcgctggtcggcgctggatgcggtgcgcccgatcatgggcggacgcttcctcagccgcccgggcgtgttcgcctgggaccgcatcgatccggcatcggcgctgctggccgagcacctgccggccgacctggccggccgcgccgccgaccttggcgccggctacggctatctctcgcgcgagctgctggaacgctgcccgaagatcaccgcgctggacctgtacgaggccgagcagcgtgcgctggccctgggcgaactgaacctggcgccgccgccgcgcgcgctgccgctgcgcttcctgtggcgcgacgtcaccgccggcatcgagccgggctacgacgtcatcatcagcaacccgccgttccacacgccgtcgcgtgccgaccgcccggacatcggccagcgcttcatcgccgtggccgcgcaggcgctgcgcccgggcgggcgcctgtacgtggtggccaaccgccatctgccgtacgagcacaccctcaacgacagcttcggtgcggtgcgcgtggtcgccgagcgcgacggtttcaagctggttgaagcagtgaaggggaagggcaagtga

SEQ ID NO: 533235 - DNA, 264 bp, Stenotrophomonas maltophilia
atgcgagccttgttcgtcggtggcgtggtcgacaacagtgaaatggacctggaaggcagccatccgcccgtgcactaccccgaggacaccggcggcgggcactcgcgttaccggctgcaccaggtcggccatggcgccgatggcagcgtggcctacgccgtctacggggcaccggacctggccgatgaagaggtggcccgggtggcggaagaacgcgcctacgcgcgccgcttcgaagcgacgccgaccttgttcgagcattga

SEQ ID NO: 533236 - DNA, 294 bp, Stenotrophomonas maltophilia
atgtcccgcatagctccccgtatccataccgatccggcgcagatcgcgcgcctggaagccctgctgccgcagctggaaggcgaaacgcaggtggaactgattctgcacgatggccgccgcctgctcggcacggtggccgtgaggccaaccgtgcagcagtaccgcaacgtcactggtgatgaacgcagcaacggccagctgcgcctggatgactacgacacgccggtgcagcagcaccatgtgtggctggacgagattgccagcatcaaccgcctgccacccaaggcgccttga

SEQ ID NO: 533237 - DNA, 1989 bp, Stenotrophomonas maltophilia
atgatggtgcaggcgcccgaacccgacctgcatcatggcgtgcttgagcgcatcaacgctggtttctgcgtgatccaggtgctgttcgagggcgatcgtgcggtcgactatcgtttcctcgaggtcaacgatgccttcgagcgccacaccgggctgaaggatgcgcgtggacagcgcatgaccgagctggaacccaaccatgagcaggactggttccgcatctacggcgaggtcgcacgcagcggccgtcccgcccagttcgagatggaagcgcgtgcgctgggtcgttcgttcgcggtcgacgcggtgcgcgtgggccggccaggcgaggacaaggtcggcatcctgttcttcgacatcaccgcacgcaagcagatggaagtggagctgggcgagagcgaagcgcgcttcagcgcactggccgacggcctgccgatgccggtgtgggtgctcgatgagcgcggccatgcccgtttcgtcaacagcgccttcagcgagttcttcggtggcgacgagacgcgtgtgcccgaagatgtctggcgcggcctggtgcatccggacgatgcgtcggtattcgaatacgaactgcaggaagcgctgaaggcgcagcgttcgatgcacgcgctggtgcgtgcgcggcgcgccgatggccagtggcgttggctggagatgaacgcacgcccgcgtttctcgcggatgggccgcttcatcggcctggccggcagcagcccggacgtgaccgaacgccgcgagatcgaactggcccgcgaggaactgctgcagtccgagcgcgccgcgcgcagcgctgcggagaacatggcgcggctgaaggacgagttcctggccacgctgtcgcatgaactgcgtacgccgctgaccaccatcctcgggtggagtgagctgctgctgcagcgtgtggacaacaccagccctctgtacaagggcctgaacgtgatcgccaacagcgccggcgcgcagaagcggctgatctcggacatgctggacctcagcagcatgctgctgggcaaagtgcagctggaggtggaagtgctggacctgcgcacggtgctgggcgaggccatcggcgcgcaggaactggtggccgaaggcaaggcactggacgtgcacctgcagctgcccgaacagccgagcctggtgctgggcgatgccacgcgcctgcagcaggtgttctggaacctgctctcgaacgcgatcaagttcaccccggctgaaggccgcatcgacctgcagctgcgggccgacggcaaccactgggagatcaccgtgcgcgacaccggtgatggcatcgcacccgaattcctcaatcacctgttcagccgcttccgccaggccgatggcaccaccacccgacgccatggtggactgggactgggcctggcgatcgtgcagcagctggtcgagctgcatggcggcacggtcgccgcggccagcgaggggcacggccatggcgctacgttcaccgtgcgcctgccgcagcaccttcccgatgccgagcggcgcccgctgcgcgaagtgatcagcgggccgatcctggaaccggtgatcgttgagccgtatccgctgcgcggcatgcacgtgctggcggtggaagaccagccggaagtgctggagtacctgcggcgcatgctggaagagcagggcgccagcgtgtcggcggccagttcggccggtgaggcgctggcgttgctggccgacaccggccatctgcagtaccacgtgatgctgaccgacatcggcatgccgggcatggatggttatggcctggtgcgcacgctgcgcgaggacatgggcgtggatgccacgaccctgcccgcggtcgccgtcaccgcgctggcgcgtgccgatgaccgccgccgtgcgctggcgtcgggtttccaggaacacgtggccaagccgtactcggtggcgcagctggtggctgcggtgcgcaaggtgcaggtaccccgcgcggacagcgcgctgcactga

SEQ ID NO: 533238 - DNA, 567 bp, Stenotrophomonas maltophilia
atgaaccgctcgttggccactgccctgctgctggcaggcgccctcatggcgggcagcgcgaacgccgcgccgcgcgccgtcaccgatccggatgcgccccgcgcgctgcaggccaatggcccggtcagcgtgaagtgggacgatccagccggattcaccgaaatccgccagagcaccaaccgcttcgaggccgaacgcggcaactgggtgcagcagctggccagctacgtgcagaccacggcggccaaaccgctgcagcccgggcagaccctggacgtgaccctggtcgacatcaagcgcgccggcgactacgagccctggcacggcccgcgcggcagcgacatccggatcatgcgcgacatctatccgccgcggatcaccctgcagtacacgctgaaggacgccagtggtcgcatcgtcgatgagggcgaagccaagctcagcgacaccggctacctgcacaacctggggctgaagagcgacagcgatccgctgcgctacgagaagcgcctgatcgacgactgggtgaagcgtgagctgagcacgcgggctactgctgcacgatga

SEQ ID NO: 533239 - DNA, 1068 bp, Stenotrophomonas maltophilia
atgcgtcctgcccgcgcgctgatcgatctgggcgccctgcgcagcaattaccggcttgcccgtgaactgggcggtggcaaggccctggcgatcatcaaggccgatgcctatggccatggcgcggtgcgctgtgcacaggcgctggaaggcgaggctgatggtttcggcgtggccaccatcgaagaggcgctggaactgcgccaggccgggatccgtgcgccgatcctgctgctggaaggcatcttcgaacccagtgacatggcgctggtggccgagcacgatttctggttcgcggtgggctcgccgtggcagctggaagcgctggtcgcattcgacagcccgcgcccgctgaccgtgtggctgaagctggacagcggcatgcatcgcctcggcctggacgtggacagcttccgcgccgcgcatgcacgcctgtcggcgctgccgcaggtcgagcgcatcgtgctgatgacccacctggcgcgtgccgatgagctggacagcgaacgcacccatgaacaggcggcgaccttcgcgcgcgccatcgacggcctggacggcgagaccagcgtgtgcaattcgccggcactgctgggctggccggatgtacgcagcgactgggtgcgcccgggcctgatgctgtacggcgccaatccgctgccggacaacaccgcgctgaccgagcgcctgcgcccggtgatgacgatgcagtcgaaggtgattgccgagcgctggatcgaggccggtgagccggtgggctatggcgcacgcttcgtggccaaggcgcgcacccgcgtgggcgtggtcgcgcttggctatgccgacggttatccgcagttcgcccccaacggcacgccggtactgatcgatggccagcccggcgtactgatcgggcgcgtgtcgatggacatgctgacggtggacctgaccgcgcatgcgcaggccggcatcggcagtgtggtggaactgtggggttctgcgccgacgctgtcggaactggcgccgcgctgcggcgtgagtgcctaccagctgccgtgcgcggtcaagcgcgtggcgaaagtctacgtgtag

SEQ ID NO: 533240 - DNA, 1305 bp, Stenotrophomonas maltophilia
atgcgagtcctagttctcggcagcggcgtgatcggcaccaccagtgcctggtacctgcgacaggccgggtttgaagtcacggtcatcgaccgccaacccggcccggcgctggaaaccagcttcgccaatgccggccagctgtcgttcggctacacctcgccgtgggccgccccgggcgtgccgaagaaggccatcggctggctgttcgagaagcatgcgccgctggcgatcaagccgggcatggacctggcccagtaccgctggctgtggcagatgctgcgcaactgcacccacgagcgctacgcgatcaacaaggcgcgcatggtgcgcatgtccgagtacagccgcgactgcctgaacgagctgcgcgcgcagatcggcatcgagttcgaaggccgcgacctgggcaccacgcagctgttccgcacccagcagcagctggatgcctctgcgcaggacatcgagatcctggcccagtacggcgtgccgtacgaggtgctggaccgcgccggcatcatccaggccgaaccggccctggcccatgtcgacggcctggtcggcgcgctgcgcctgccgcgtgaccagaccggcgactgccagctgttcacccggcgcctggcgcagatgtgcgtggacgccggcgtcgagttccgcttcgaccaggacatcaccggcctcgagttcgagggcgaccgcatcaccggcgtgcgcatcgacggcaagcgggaaaccgccgaccgcttcgtggtcgcgctcggcagctattcgccggcgctggtcgcaccgctgggcatgcgcctgccggtgtacccgctgaagggctattcgctgaccctgccgatcaccgacccggcgatggcgccgacctcgaccatcctcgacgagagctacaaggtggcggtcacccgcttcgacgaccgcatccgcgtcggtggcatggccgaagtggccggtttcgacctgtcgctgtcgcagcgtcgtcgcgagaccctggagctggtggtcagcgacctctacccgaagggcggcgacctgtcgcgcgcacagttctggacaggcctgcgcccggccacgccggacggcacgccggtgatcggcgccacgccgttccgcaacctgtacctcaacaccggccacggcaccctgggctggaccatggcctgcggctcgggccgttacctggccgacctgatgagcgcgcgccagccgcagatcagcaccgaaggcctggatgttttccgctacggccagtacggtcacgccccgcaacatgagaaccgcacatgcgtcctgcccgcgcgctga

SEQ ID NO: 533241 - DNA, 480 bp, Stenotrophomonas maltophilia
atggccacccgtacccgcgaactggacaagatcgaccgcaagatcctgcgcatcctgcaggcggagggccgtatttccttcaccgaactgggtgagcgggtcggcctgtcgaccaccccgtgcaccgagcgcgtgcgccggctcgagcgcgaagcggtgatcaccggctaccacgcccacctggacccggcggcggtgaaggccagtctgctggtgttcgtggagatcagcctggcctacaagtccggtgacatcttcgaagagttccggcgcgccgccctgaagctgcccaatgtgctcgagtgccatctggtctcgggcgacttcgattacctgctgaaggcgcggatcagtgagatggcctcctaccgcaagctgctcggcagcaccttgctgacactgccgcatgtgcgtgaatccaaaagctacatcgtgatggaagaagtgaaggaaacgctgagcctgccgattccggattga

SEQ ID NO: 533242 - DNA, 153 bp, Stenotrophomonas maltophilia; identical to SEQ ID NO: 496117

SEQ ID NO: 533243 - DNA, 375 bp, Stenotrophomonas maltophilia
atgaaaccgacccttcccctgctgctgatggccctgttgcccacgttggcgctggcccaggtgcctgctgccgacccgacggtcacccgcagcgcgaccaccgtggctccggcgccggtggtaccgccgccgcaggccgcacgcccgcagccgcaggtgctgccgtcgccgcagccggcgcagccgatcaggtccacgggtcctgcccggattgcgcccaccccggcgccgaggccggccgacaaggtctatgaccgcaatggccgcatcgtgcctggcgtgcgcccggctggcccgaaccgggtgttcgattcgcgtaccggccgctattacgacagcgtgccggccggcgatgggcagcagatcaagcgctga

SEQ ID NO: 533244 - DNA, 468 bp, Stenotrophomonas maltophilia
atgactgccttcgacctgacgccccccactgccacccagaccgaggcgctgatcgccggcctcagcagcgaagagcgccgcgtgctgctgcagcacggtaccgaagcgccgttctgcggcgtgttcctggacaacaagcgcgagggcgtctactgctgccggctgtgcgcgctgccgctgttccgctccagcaccaagttcgattccggcaccggctggcccagcttcttcgccccgttcgacccggcgcacgtgcgcgagatccgcgataccagccatggcatggtgcgcaccgagatcacctgcgcgcgctgcggcagccacctcggccacgtgttcccggatggtccgccgcccacctacgagcgccactgcctgaactccgtctcactttcgttcaccggcaatggcgagccctggcccgacccgttgcagcgtggcggcgcggaaagcggtgtggcgggctga

SEQ ID NO: 533245 - DNA, 855 bp, Stenotrophomonas maltophilia
atgctcatcatcgttggattcctggtcgtcatcatcagcgtgatcgggggctacctcggtgcccacggccgcctgggtgccctctggcagccctacgagctggtcatcatcggcggtgccgcactgggtgcgttcctggtcggcaccccggccaagacggtcaagcagaccctgcaggccatggtcggcgtgttcaagggcccgcgctacaagcagcaggactacatcgatgtcctcagcctgctctatgaactgctcaacaaggcccgccgcgaaggcttcatggccctggaagaccatgtcgagcggccggccgagagcgccctgttcgccagctaccccaaggtgcaggccgaccaccacctgatcgacttcatcaccgactgcctgcgcctgatgatcggcagcaacatcgagccgcacgagctggagccgctgctggagctggaactggagaagcaccacgccgaggccatggcgccgtcgcaggtgctgaccaaggtcgccgacggactgcccggtttcggcatcgtcgcggcggtgctcggcatcgtcatcaccatgggctcgatcggcggtgacatcgtcgaggtcggtggccacgtggccggcgcgctggtcggtaccttcctgggcatcctgctgggctacggcttcgtcggcccgatggcggcagcaatggaggcacgcgccgagcaggacagccgcatctacgaatcggtcaagaccgccctgctggcctgcctgcgcggctacaacccgaagatcgcgctggaattcgcccgcaagacgctgccgtcgaacgtgcgcccggccttctccgatttcgagcagcacctgaagacggtcaagtaa

SEQ ID NO: 533246 - DNA, 951 bp, Stenotrophomonas maltophilia
atggccgagaccaagcccactgtcatcgtccgccgggtcaagaaggccggccacgccgcccatcatggcggttcgtggaaggtggcctatgctgacttcgtgaccgcgatgatggcgttcttcctggtgctgtggctgatggccaccaccaacaagaacgaccgtgcggccatttccgagtacttccgcaaccccagcccgctgagcgggcagaacgccacgccggcgcccggcatggccggcccgggcggcgccagcacctcgatgatcaagctgggtggtgccaccgacatctcgcgcggcagcagcaacgatcccttccagaaccagaaggaagcggtgccgcagccggtggaccagcagcagcgcgacaagcagcagctggaagcgttgatgaaggaactgcaggaagcgatcagcaggagccaggcactggagccgttcaaggaccagctgctgctggacctgaccccggaaggcctgcgcatccagatcgtggacaagcagaaccggccgatgttcgacctcggcagcgctacgctgaagccgtacacgcagcagatcctgcacgagctggccaactacctgaaccatgtgccgaaccggatcagcctgaccggccacaccgacatcaccgcctattcggccgcgcgcggctacagcaactgggagctgagcgccgatcgtgccaacgccgcacggcgtgcgctggtggacggtggcctggaggacagcaagatcacccgcgtggtcggcctgtcttcgtcggtgctgttcgacaaggccgacccgcagaacccgatcaaccgccgcatcagcatcgtggtgatgacccaggccgccgaagcggccgccctggccggtgccggcccgcaggtgggactgtcggcgccgaccgccgacccggacgtgcaggccgcgcaaggtgaggccgcgcccgtggcacgttga

SEQ ID NO: 533247 - DNA, 507 bp, Stenotrophomonas maltophilia
atgtcccagaactccaaggccaagcgcgacaagcgcaagaagcagcaggccaagcgcccgttcctccgcctgaatgcccagcagcaggtgcagaaccatgccgtgctgaccaacgaagatggccaggtggtagcggccatcggcctgcagggccgtgagtggctgctggccatcggcggccagaccatgggcaacgccgaaaacccggtgccgatgctggccatgctcaagcacctggccaacgtgcaggagaaggaaggccgcaaggtcaacctggagtactccgaactgctgcagaagctgctggacaccctggctaccgaatccgagcagaccgctgacgaatacctggacaagctggttgccgaattcgaaggcgtcgacgccgctgagggcgaagaaggcgaagaaggcgaagaaggcgaagccgtcgaaggcgacgcggccgaagaagccgctgccgaggccgccccggccgctgacagcgacagcaagccgcaggcctga

SEQ ID NO: 533248 - DNA, 276 bp, Stenotrophomonas maltophilia
gtgacggtctacgtcgatgacgcggtgcatccctggcgcggacagcgctgggcgcacctgatggccgacaccctggccgagctgcacgcgatggcggcgcagctcggcattcccccgcgggccttccagaacaaggccagcggtgctcactacgacgtcactgccgagctgcgcgcacaggcaatagcgctcggtgcgcgggcgatttcccggcacaccgaccgtgacctggtcaaagcggtgattgccaacgccagggcgcagtaccggccgtag

SEQ ID NO: 533249 - DNA, 543 bp, Stenotrophomonas maltophilia
atgcccgacaacagcgactatttcgacttcgaggaagacatccacgacttcgacgaagatggcttcgaggcacgggtctggaacctgctggtgctgatcaacccgggcgacgaggaactggccctgcagcagttcaaccgctggcgcgaacacctggccgaggacgggcagccgctggaagcggacagcgactggctgccggcgctgttcaccgccatcgcctggcagtccggtttcgatgtggagcgcgatgacctggaatcgctgcagtcggcggtgaacgagctgtcggcgcgcttcaacctgcagctggactggggcggcgacctggacgacgaggacttcgccgagggcctggacggcgtgcagctgatgtccaccgccttcgaccgcctgcgcgagcacaactacacgctgtggagcgtggatgccggcagcgacggcttcaccggcgtgatggcgctgacccgcgacgacgacgcgatgctggcgctgtgctcgctgctgaacgtggaaatccggctgggcagcgacccgttctga

SEQ ID NO: 533250 - DNA, 294 bp, Stenotrophomonas maltophilia
gtgccgctgaagccggccttggtggccgtcactgtgaatgaagcgatgagcgatacccctcccgaccacctggcgatcaatccggccagccccttccatgatgcgcaggcgctggagcgcggcgtcggcgtgcgtttcaacgacgtcgagcgcgacaacgtcgaggaatactcggtcagcgaaggctggatccgcgtgcaggccggcaaggcccgcgaccgccgcggcaatccgatgaccatcaaggtcaagggcaaggtcgaggtgtatttcctggaccagaagccggaataa

SEQ ID NO: 533251 - DNA, 1650 bp, Stenotrophomonas maltophilia
atgcataccattgaagtcgtcctggcgatgctggtggccgttgtcgccagcggctacctggttcgcgtcctcccgttctcgctgccgttgccgctggtgcagatcggcctgggcgcggtgatcgccggcgtgttcaaccgcggccatgcgctggagccggaagtgttcttcctgctgttcctgccgccgctgctgttcctggacggctggcgcattcccaagcagggcctgttccgcgacaagggcgcgatcctcgaactggcgttcggcctggtggtgttcaccgtgatcggcgccggcctgctgatccactggatgattccggtgatgccgctggcagtgtgcttcgcgctggcggccatcgtctcgccgaccgacccggtggcggtcggggcgatcgcctccaaggcaccgatcccgaagcgcctgatgcacatcctggaaggcgagtcgctgctcaacgatgcgtccggcctggtctgcttccgtttcgcggtggccgcggtgatgaccggctccttctcgctcgccacggcctcgctgaccttcctgtgggtggcggtggccggccttgccgtgggcgtggcggtcaccctcggcgtgtccaccttccagcgctggttgtggcgccgcttcggcgaagagccgggtgcggcgatgctggtcaacctgctgattccgttcgcggcctacctgctcgccgaagaaatccatgcctcgggcatcctcgctgcggtcgccgccggtatcgcgatgagctacgtcgagctgaccggccgtgtctccggcagcatgcgcgtgcagcgcgcgggcgtctggaacatgctgcagttcagcttcaacggcatcatgttcgtgttgctgggcgagcagctgccgggcatcgtcgagcgcgccaccaccaccatgaacgagtccggccaccagagtgcatggtggctgctggtatacgtggtggtgatcaacctggcgctgatcctgctgcgcctgctgtgggtatggctgtcgctgcgctggaacctgctgcgcgcgcgccgccgtggcctggagcggggcgaggcgccgaactggcgcatcgtggtggcgacctcggtggctggtgtgcgcggcgcgatcaccctggccggtgtgttgaccctgccgctgttcctgcccgatggcagtgcgttcccggcgcgcgacctggtgatcttcctggccgcggcggtgatcctgttctcgctggtcggcgccagcgtggcgctgccgcagctgctgaagggcctgcagctgccagccgattcgggcgagcgcaaggaagaggacctggcacgcaagctgtcctccaaggccgcgctggccggggtcgaacgcatgcgccagcagctggtgatgaaccagaacaccgagaatgtgcagctgtacaacgatgctgcctcgcgggtgagcctgctgtaccagcggcacctggagaaagacaacgacggccccgacgtggacccggagaaggtgcggcgcatggagctgggttaccgccagctgcgcagcgcgggcctgaatgccgagcgcgaggaactgttccggttgacccggcgcggggtgatctccgatgagatctcgcggcgcctgatccgcaacctggacctgctggagtcgcgcaagcgcgaatga

SEQ ID NO: 533252 - DNA, 789 bp, Stenotrophomonas maltophilia
atgtcccgcctgccttcgctgtacatctcccatggttcgccgatgaccgccctgcatccgggccaggtcggtgtgcgcctggccgagctggcgcgcgacctgccgccgccgcgcgccatcgtgatggcctcggcgcactggctgggccggcagccgctggtcggcgcacatccgcagccgccgaccatccacgacttcggcggcttcccgcgcgcgctgttcgaactgcaatacccggcgccgggtgatccggcactggccgaagaagtggccggccgcatcgccgccgcaggcctgccagtggccatcgacccgcagcgtggcctcgaccacggcgcgtgggtaccgctgcggctgttgcgcccgcaggccgacatccccgtggtgccggtgtcgatccagccgctgctcggccccgagcatcagttcgcgctgggccgtgcgctggcgccgctgcgcgaacagggcgtgctgctggtcggctcgggcagcatcacccacaacctgcacgactggggcgactaccaagacggcaaggaagcgccatacgtgcggcccttcatcgagtgggtggagcagcgactggccgctgatgaccgccaggcgctgttcgattaccgccggcaggccccgttcgccgagcgtgcgcacccgaccgacgagcacctgctgccgctgttcttcgcgatgggagcggccggtgagggcggtttcggcgcacgccgcatcgacgccggcatcgatgccggcttcctggccatggatctgtaccggttcgacggggcatga

SEQ ID NO: 533253 - DNA, 411 bp, Stenotrophomonas maltophilia
atgcacgccacgaccgctcctgtttcgccgctggccccgtatggcgccaccctgctgcgcctggccctgggcgtgctgttcctggtccatgcgctgaccaagctgctggtattcaccccggccggcacggcagcattcttcgagtcgctgggcctgcccggcgtgctcggctacctcaccctcggcgtcgagctggtgatcactgtcgcgctcctgctgggcatctatgcgcgctgggtgggcctggtcggcgtgccgctgctgctgggcaccatcgtcaccgtgcacggcgccaacggcttcggtttcgccaatgccggcggcggctgggaatacccggcgttctgggcgctggcgctggtggtgctgttcctggtcggcgatggcaagtggaccctgcgttcgcgctga

SEQ ID NO: 533254 - DNA, 882 bp, Stenotrophomonas maltophilia
atggacacccttgaggcgatgcgcgtgttcgtggcggtggtcgagcgcaacggcttcagcgccgccgcccaggccctggacatgtccaccgccggcgttacccgccaggtcgccgcactggaaaagcgcctgtccacccgcctgctccatcgcaccacgcggcgggtcagccccaccagcaccggcgccgcctactacgcccaatgcgtgcgcctgctggccgagttcgacgcgctggaggccagcatcggcgcgcaggcgctggagccctccggcatgctgcgcatcaatgcaccggtcagttggggcatcgcccgcctcggcccactgctggccagttaccgcgaacgctttccgcaggtggaactggacctggccctgtccgaccgcctggtggacatggtcgaggaaggctacgacgtggccatccgcatcacccgcgagccgggccccaccctgatcgcccgccgcctgggcgaatcgcgggtgagcctgtgcgccgcgccggcctacctggccgcacgcggcgcccctcagaccccgcaggacctgcaggcgcacgcgtgcctgggctacagctactgggccgccggtgaccactggccgctgcaggggccgggcggcgaagtgaaagtagcggtgaacagcctgctgcacgccaacaacggcgacgtgctgcgtgaagcggcgatcgccggcatgggcgtcatcctgcagcccgacttcctgctggaagacgcgctggccgatggccgcctggtgcgcgtgctgccggaatgggaggcctcgccgatcggcatcttcgcggtctataccagccgcagccacctggcaccgaaggtgcgcagtttcatcgaccatctggtggacaccggggtgtag

SEQ ID NO: 533255 - DNA, 3063 bp, Stenotrophomonas maltophilia
atgcaggatggggtcaggcgtcaagaatggcgtccgccggccgttgaggtcggggacgtggaggattcgttcgcgcatgaagccagccgactgcacaaggaacatcaaccgatgcccgcgctgaaacgggcgttggcccggccgctgcgcgccatcacctggggcggtgtgctgctgggcgtactgctggtgaccggtctggccctcatgctggtcaacgaccaccaccgccgcctggaagcggcgcagcggcagagccgcgcgctggcggtgggcagcgagcgcctgctggcgctggagctgcgcaacctggagcgggccatgaccggcatcgccgccgacgccgcggaactgttccgcagcgtgccggcacaggcgccggccttgctggatgcctccatcggcggcgtgctgcgccggcacgccgaactgcacagcatcgtggtgctcgacagctatggccgcgcattgacggccggcaagggcgacctgcagttgccgttgtggaccgatccgcaacggcgcggctcgggcagcgcgctgtacatcggcccgccgcagcgtgccagcgacgggggctgggtagtcccgctggcgctgccgatggccgatgggcgctggctgctggcacggctgcgctgtggcgaactgcagcgcatcgtcggcggcctggatgtcggtcccaacggattggtctcgatcagtgatgcccagggctacatgctggcccgcgtacccgatccgcatggcacggtgggccgccgctatgacctgccgcgccgggacctgctcggcacgcaggcagtggtcgagctgggcagcatgcccggcgttgtcgacggcgtgccgcgcatcctcaccatcagcacgctcgaacgcagcccgctggcggtgcaggtcggcctggccgacgaagatgtactcgcaccgtggtggccgtacctgaaggcgtcggtggcgatcgtactggcctacatcgcggtgttgctggtactgctgtacgccgtgcgccgcagcacccgcagccagcaggcgatggccgaggaactgaagacgggccacgccgagctgcgcctggcgcaccaggtcgggcgtgtctgcacctggtacgtggatgaggacgccgcgctgctgcgctggtcgccgctggcccgcgagatctttggggtacagaccgacgccttgccggtcgcggatttcttcgcgcgcgtgcatcgcgatgatgccgcgcgcctgcagcaggcctttgaccaggccttcgccggcagcgctgtgctcgaccaggtgttccgcctggtgcttcccgggggcgaggtgcgctgggtcggcgcgcgcgggcagcgggtggaagtggccgacagcgagcggcgcatgatcggtgcgctgaccgacctgagcgaacgctatcaggcgcgcgagcagatgagcgaagtggaacgccgcttccgcctgctgttcgaccgcaatccggcaccgttctgggtgttcgacccggatacgctgcgcttcatcgaggtcaacgacgctgcagtgcgccagtacggctacagccgcgacgagttcctggcgatgagcatcctcgacatccgcccgcgcgaaggctgggacgaagtgcgtggtgccatccagcgggcgcaggtgggcgatccccccgacgcgaccgtgcgcctgcaccggcgcaaggacggcagtgtgttcgaggtgcgcgcacacctgtccaagctcgacttcgacggacagcccgcgtgcctggtgctggccgaggatgtcagcgagcggctggcctacgagcgcgacctggcctatcaggcacggcacaacccggccaccggcctgctcaatgtgcgcgccctgaccgaacagctggacgagcaggaggagggctacaccatcgccttcgtgcagctgcgcgggctgcagctggtggccgatacgctgggccgcgagatcggcgatgcggtgctgcagtcgatggcgacccggctcgggggcctgggcgcacgctgtggcacgctggcgttccagccggccgaggatttcgtcttcgccatcggtgccgagcacgatacccagcgcgtgctggacgacctgctgcagatcgtatcggcgccgatgcgcggcaaggactcgctgcaccagttcgagccgcgcatcggcgtggccgtgcacatcgctggtgacgggcacacggccgagcaggtgatcggcatggccgcgcaggccgcgcatgcggcgcgcgccgagggcaacgtggtggtctggttcgatgcggccgtgaccacgcgcctggccgaccgcctgcgcctggccgggcgcatccatgccgccatcgacaacgaattccagctgtatttccagccgatccggcatgccggcgatggcagcccggcagcgctggaggcactgctgcgctggccgcaggccaatggcagcttcatcccgcccaacgagttcatccagctgtgcgaggacaccgggttgatcctggcactgggccgctgggtgatccgcgcggcggcgaaggcgcagcgccgtctggtcgaggccgggtggggtgagttgccgatcgcggtcaacgtgtcggcggttcagttcttcaacagcgacctggtggccgaattcacccgtgcccagcaggatttcggcctggcccgtggcgcgctgcacgtggagctgaccgagagcagcctgatgcgcaagccggcacaggcgatgcagaccatgcagcgcctgcacgagcagggcatccgcgtgtcgctggatgatttcggcaccggctattccagcatgtcctacctgcagcacctgccgctggacatcctgaagatcgaccgcagcttcgtcgccgacgtggaaaccaatccacgcaatgcctcgatctgccgcgcgctgctgtcgctgggccacagcatgggcctgaccatcatcgctgaaggcgtggagacgccggggcagctggactggctggctgcgcatggctgtgaccaggtgcagggctacctgttggggcggccggcgccgctggaacagatcatcgacgcgctggatgaggtccccgcctga

SEQ ID NO: 533256 - DNA, 2112 bp, Stenotrophomonas maltophilia
atgtccaagctgcgccgtcccaccctggcgctggccattgttgccagcctgtccctggccgcctgtgaccgcccggccgacccggccgtcggtgccaccgcgccggccgatgccgcccccgctgcggccaagccgatgctgggcagtttcggcttcgatgccagcggcatggaccgcagcatcgccgccggcgacgacttcttcggcttcgccaacggcacctgggtgaagaacaccgagattccggccgaccgctcgcgcttcggcagcttcaatgtcattgccgagaagaccctggccgacacccgcgccatcctggaaggggccgccggcaacacccaggccagcggcgacgacaagctgatcggcgactactacgccgcctacatggacgaagccggcatcgagcagcacggtctggcgccggtgcagccgcagctgaaggccatcgatgcgatcgccgacaaggccgggctggcccgcgcactcggcggcgacctgcgcgccgacgtcgacctgctcaacgccaccaacttctacaccgaccgcctgttcggcctgtgggtgtcggtggacatgctgcagccggatcgcaccgcgccgtacctggtgcagggcggcctgggcatgcccgaccgcgatttctacctgggcgatggccgcatggccgaactgcgcaagcagtaccaggcctacatcgcacagatgctgcagctggccggcgtcgccgacccggccggcaaggcgcagcgcatcctcgcgctggaaacgaagatcgcgcaggcgcatgccacccaggaagaaaccaacgacgtgaccaagggcgccaacccctggacccaggccgacttcaatgcaaaggcgccgggcctggactggaacgccttcctcgatgcggccgcgctgggcaaccagcaggacttcatcgtgtggcagcccaaggccgtggccggcctgtccaggctggtcgccaccgagccgctggacgcctggaaggactacctggcgttccacgcgctggaccgtgccgccgcctacctgccgaagaagttcgccgatgcccgcttcgccttccatggcaccgcgctgagcggcacgccgcagcagagcgaccgctggaagcgcgcggtggacgatgccaaccatgccgtcggcgaagcgatcggcaagcgctacgtcgaaaagcacttcgacgccaggaccaaggagcgtgcggacgagatggcgaagaacatcatcgccgcttttgccaagcgcatcgacgcgctgtcgtggatgtcgccgcagaccaaggcgcatgccaaggccaaggtcacgggcctgaccgtgggcatgggctatccggagaagtggcgcgactacaccggcctggagatccgccgtgatgacccgctgggcaatgcacagcgcgccgagctgttcgagtaccagcgcaacatcgccaagctgggcaagccggtcgaccacagcgagtgggcgatgctgccgcagaccatcaatgcgatgaacgtgccgctggagaaccgcctggtgttcccggccgcgatcctgcagccgccgttcttcgacggcgctgccgatgacgcggtgaactacggtgcgatcggtgcggtgatcggccacgagatcagccacggcttcgacaacgccggcgcgctgttcgacgagaccggcaagctgcacaactggtggaccgccgaggacctgaagcagttcaacgccgccggtgatgcgctggccgcgcagttcagcagctacgagccgttccccggcgtgcacgtgaacggcaagctgaccctgggcgagaacatcgccgacgtggctggcctgggtaccgcctacgatgcctaccagctgtcgctgcagggcaagccgggccagaccctggaaggcttcagcccggaccagcgcttcttcctcggcttcgcccaggcgtggcgcagcaagagccgcgagcaggcgctgcgcaattcgctgctgaccgatgtgcatgccccgggccagttccgcgcattgaccgtgcgcaacatcgacgcctggtacccggcgttcgaagtgaaggaaggccagaagctgtacctggccccggacaagcgggtcaaggtgtggtga

SEQ ID NO: 533257 - DNA, 1173 bp, Stenotrophomonas maltophilia
gtgagcgcttcatcgcctgcgcatgccgcgtctgtgccccgccatccgtggtgggcggtctccgccgtcggcctcgccacgttctcggtggtgaccaccgaaatgctgccggtcggcctgctgactcccatcgccgaagatctcggcgcgtccaccggcaccgccggcctgatgatttcactgcccgccctgctggcggcagtgttcgccccgcttgcggtgatcgcagccggtggcatcgatcgtcgccgcatcctgtgtgcgctgttgggcctgctgctggtcgccaaccttgcgtcggcgctggcacctggcatcggttggctgttggccgcgcgtgtgctggtggggttctgcatgggcggcatctggaccattgccggtgggctggcagcgcgcctggtacctgcgcagcgcatcggtctggccacctcgatcatcttcggaggcgtggccgcagcttcggtgctcggcgttccgttgggcgcgctgatcggggatgcattgggctggcgcagcgcgttcgtggcgatgacgttgttcagtgcggcggtgatgctgctgcatctgcgggtggttcccgcgttgccggtcagcacatcggtgcggccgcgtcagttcgtgcagcaacttggccagcgcaacctgcggcgtggcctgtggctgaccgggctgctggtgtccgggcacttcatcgccttcacgtacgtgcggccgctgctgacgtccgtatcgggcgtggatgcgtcgtggataggtgcactgctgtttgggtacggcctggctggcatcgccggcaacttcatcgccgggccgctggctgcgcgccatccacggggcatgctgctggcgatagcctcgggcctgctgctgacgcctctgctgttcctgtgggtgggaaatacgccctccgcaggtattgcggtgctgctgctgtggggtctggcctatggcggtgtatcggtgggcctgatgagctggatgatgaaggcggtgccgcaggccgtggagatcgccaccgcgttgtatgtggcggtattcaacatcggcatcgcaatgggtgcgtgggttggtggccgcctgctggatggcgtgggcctgcatgcgaatctgtgggctgcggcggtgttggccgggagtgccctgctgatggctgccatcacccgcaggtag

SEQ ID NO: 533258 - DNA, 588 bp, Stenotrophomonas maltophilia
atggttcgccgcacccgcgccgagatggaagaaacccgcgccaccctcctggccaccgcccgccgggtgttcagcgagcatggctatgccgccacctcgatggacgacctgaccgcccaggccgggctgacccgcggcgcgctgtaccaccacttcggcgacaagaagggtctgctggcggctgtcgtcgcccagctcgatgccgagaccgaccagcgcctgcaggcgatcagtgatgccgccgacgatgcctgggagggcttcgtgcagcgttgccgcgcgtacctggagatggcgctggaaccggagatccagcgcatcgtgctgcgcgacgcgcgcgcggtgctcggtggcgcctcaccggaatcgcagcgccactgcgtgcattcgatgcagcacctgatcgaacatctggttgcccagggcgtggtggcgccggtgaatgcgcaggcgctggcggcgctgatctatggcagcctggccgaggccgcgttctggatcgccgagggcgaggatggcgacgtgcgcctgcggcaggcgacggcggcgctggagatgctgttgcgcgggttgaagtcggcggggtaa

SEQ ID NO: 533259 - DNA, 756 bp, Stenotrophomonas maltophilia
atgctggccggtggcctgtgcgcgctgatgctgcagaccctgcatccgcgcgcgctggccggggtctacgatcactccaatttccgccaggacctggtgggtcgcctgcgtcgcaccaccgcgttcgttgccggtaccagctatgcgcccaccggcgaggtggaggcgctggtggccagagtgcgccgcatccatgcacggatccgcggccagaccgcacagggcgaaccctacgccgccgatgatccgcagctgctgacctgggtgcatgtgaccgaggcgttcgggttccttcagggcttccgccggtacggacgggaggtgccggcacacatcgccgaccgttactacgatgagtaccgctgcgtggccgaggcactgggtgcggtggacgtgccgcgcagcgaagcggaagtggcggcgtacttctgtgcgcggcagccggagctgcgcgtcgacgagcgctcgcgcgaggtgctggaggtgctgtccggcgtgcgcctgccggtaccggtgccggggctgtcgcgcgaagtgttcctgggtgcaggcgcggcactgctgccggactgggccgaaagcatgcttgaacgcagtggccgtcagcgcgcgcaggccgccgcgtcggcgacactggtgcagggcatggcgccgctgttccgccgtgcgttgcccgatggcctggccagccgcgcctgtgcgcgcatgggcgtgccggtgtcggtgctgcgcgagtggcccaccgttccccggtag

SEQ ID NO: 533260 - DNA, 201 bp, Stenotrophomonas maltophilia
atggctgcacacaagggtggttcgaagaaggagtttgtctctggcgaccttgtgcaattgctttcgggcggtccagtaatgacggttcatgaattcaatgaatacaatgaaacctatacctgtcagtggtttgcaggcaagaagctagataacggacgctttaagttctcgcagctgaagcgcgctgaggccaatgactga

SEQ ID NO: 533261 - DNA, 333 bp, Stenotrophomonas maltophilia
atgcgccagcgccgacgccagcaggtgatgggggcgatcccggtgggggcgacggtggcggtaccgatccggggggcggcgatggtggtggcgacaacggcggcggtgatggggatggcggtggaaacaaccccggcggcggtgatggcggtagcggcgggggagacggagatggagacggagatggagacggagatggcgacggggatggcgacggggatggtgatggcggtggacccggcccggggccaggtcccggcgaaggcgacggagatggacccggcgaggtcggtagcgatggcggccccctgtacgagcgggacaagaatctga

SEQ ID NO: 533262 - DNA, 993 bp, Stenotrophomonas maltophilia
atgaaaaaattgacaagccctaacgctattgatctgtttgccggagcgggcgggctcagccttggactacgccaggctggctggaacgtcgtcgccgcttgcgagttcaatccgagtgcggcggccacgtatcagcggaatttcggaacggatgtcatttatggcgatgcgcgcgcagtgaactggtctcagtacagaggaaaggttcagctagtggcaggaggacctccgtgccagccattttctgtcgcaggtcatcagatgtcgagcgcggatgagcgggatatgctcccggaatttgttagagcagtgagagaaatcgagccttctgtgtttcttatggagaatgttgtcggtctggtaacaggtaagaatctgccgtacttgaaagagaaggtcgcggagcttgaggcgcttgactactccgtgaaggtacaggttttgaatgcggcagactatggcgtccctcaacaaaggcggcgcgtaattgtgcttggctctcgaagaggggttccacggcatccagtgccaacacatgatggagtattacaagatcgggtatccgcccgtgccgcgctggaaggcgcaccttgtgatcttccaaataacgcgattactacatatgcgaagactcctattattcggccaagtccctgggctggaatgctggtaaatgggggcggaaggccgataaatttagatgaaccttcccaaacaatccctgcatctgctgggggaaataggacccatatcgttgatagggatggagtccttttggagtatcattcaatcttgcttaatggtggaaaggttaggtcggggattgtcaaaggggttcgccgacttaccctgcgtgagtcggctcgtcttcaatcattccctgatgattttctctttctgggtgagcgtagcgctcagtaccgccaggtgggaaatgcggtgcctcctcttatggcaaaggcaatcggcgagtcgcttctcgaagtcgtctag

SEQ ID NO: 533263 - DNA, 1650 bp, Stenotrophomonas maltophilia
atggacgcagacgagagaagtgcattccgcacgctacaactaccatgtaggcacacttccgaagaccagtgtgttgcgaaactatcggagctggtaaagcaggaggcaggtccgaatacttcttcaagtgcttgggtggaagttgagcttgcagcttgggatgccaccggcgcagctagcgcctccctaaagagggcctgttatgaacttttcaaggttgctgaaaagttcgaacccgaaagctgcaggcaatactacaaggcattcgctggcaaatacttcgatgcgcatgctgcgcttttgaatagcagtgggcagactttcacagaagcaagggctacgttagagcaggcatcactgatcatcgagcttgcgatagaaggccaattgtctgcggcccggattgcacggatgatgtctcaaaatgagtctaaagcacttattagtagacaagtgattgcggaggtgctgcgcttctccagtgcacagcctcgaattagtcttgctcaaatccaatcaatatttgacttggattcgaaggaagaggtcgcagcctttaaggatgcaagctttgaagtagcagtcgaagaactctcaagcatttctgcaaggtacttggatggtagtagcctgttccaggcacttagagtcctctcccccagatttggtgatggtgggaaattggtttcagatttcacgccctatcttcagatgctgcattatcaatgctctatctgcgagttctacgatcattatgttaatgatctgtatgagttttcccctagaggacaggctgccaactggctatttgataaatatccaatgtctatagctagtgcaagcaatccattcctaaataacgcgaagtctgttgaagttatagacgaaagttgggttcgttcaaagaagaatgctgaaactcccggcgctcgcgcgctccttgctgttctcggggctctagatagggtaaatttcctggctagaagggagttggcgaggtggatacgaatgtggattcaccgcattctgaaatctgctcagtacaagtgcgtcgcttttccggaggcaataacatttcgtcaatttgtattgcttgctgaatatgtggctatgggaaacacgaaaacctacgggatcgttgagcaaagatttgtggatgcgttggctgcgataagcaatgcttcccttcgtccaagagggcttggtgacgctgtaaacgctagcaatgtgagccggaagaagtttggtgattgcgaattcgtcgacaacacaaaatattcaataatggcgtatgaagctcatgggggtgggttgagtgatatttacgtaaagcagcacattctctcgctagtcaaaaccgttccgcatcgtgtagatgagcttgagatggttgctgatatggagcaatggaatgcgaaagttacttttattgcgcacgatttgggtaatgtgggggcgatgctcgccactgtggaaggtctaaaatttgagattgaaatgacgacatttgttgatttctcaaagaaaatatttgactattctccggaggaggtggaggtggcatttaataatcacttcattagggccattaattcgcggtggactccagagtcggtccgaggtagtgtcgctcgaattatatgtgcgtga

SEQ ID NO: 533264 - DNA, 1506 bp, Stenotrophomonas maltophilia
atggcaaggcaacaactgtcaggtgcagctgcgcaagtcgaagccaagcggctcattgcattctcacgcgaaggtatcgaatcgacgctagcgccgttcgaaccaaagagcactttcaaggtttggttctcgacctaccgcggaatcgaagagctcatcaatctgcccatagagctggctggcgagccgctgttgtacaagatcctggactttgacctgcgtgacatgaagggtttcgtacaggatcttgcgtccatcaaggtgggtttggagtcccgcctctcgcgcctggtagcgcgacgtttgcttagtacgttcctacaattgaaggccatctccacatcgtttgcgatgcatggacagcctgctgccagcgagttagtgaccgtcggctcggccatcggctacctgcagtcccgtcgacgacatcttctggccctacttcacacgattcctcgtgcttgccggggctcaaggcgactgcaggagctagatggactcaatcaattcctctacttgattgaggctgcttgtctgggaacgacggcgatgcatcgcaacctgatgctggccttggtctatccggacttcagtttggaagtcgacggcgagggggcgtccgcaagccatagtttcaatgcgctggattcgctcttcttagagcccgagcgaacggccatcaccgagatggtcggtgtggatcttactgatctcaagaaggtgcccgtgaatcgccggctgattttctcagcagcggaattggagaacaacttggcgcacatcgccgctgcgtatgcggaattcaacctcgaccagacttcatatggccagctgactgcattcattcgcagtttgctacctatggttgttgacgagtacttggtccagctgacagtcaggcgctttgacgaattgtgctccgagcataagttgccggacggtctcaagagcgcgttggtcgttgatagtggcgactatgtcgataacaccagtacctacgcgccattcacccgcgtcggtggtgacctgttcacttcggtcacactgctcagccgattcgccaaccactggaagaactcctgcctcaaccgcgttcgccggtaccagattcgctcagggttcatctttgagggctcggtcaagaaggctttgcggcaccaggggttcactgttacaaacatcaagagggttggacatgcagaatttgacgttgttgcgactctcaacggcgtgatctataacgtgcagtgcaagaacaacctggtggacctgaataggatcgaggcagaccatcataaattcgtccgttacaaccgcagcctggatcgcgcctatcggcgagcgctcgagaaggagcgcgcacgtgaacaaatgctcttgggcgaattgggactgagcgacatcaagcactacgtggtgagccgttttcctgttgcgactcagaacccatccgtactctcgttcggcgagatctcgcgcttcaaagccattgcgatcggccgttga

SEQ ID NO: 533265 - DNA, 2340 bp, Stenotrophomonas maltophilia
atgctggcccctgattccctcgtttggaaactggcaggtcgcgcccaggccgcggcggcaggtgaggctcctcatgcggatcacacttttgtggtcgcagaactggcatcgctgttcgaccagattcttgttcagctgcaggacttccctgcaccaccggagcactaccgtccacaggagaacgagcctcagattgaatcgagctcgcgggtccgaatcatctctggcttctcgggtgctggcaagaccgcctgggcatcccaaacagctgcctacagtagccaaagttgcacgtactatgactgttcggagacgccaggggaggccttggctctgtcgcttgtccgtgagctagctgccaagctcgccggtgcaggttcagatgtgacgcgcaaagtgttgttgccgggtgccactggcgtcgagtcactgcgccagcttgacatctatctcaagcaacagggcctctcgccaatcgttgtcttggacaatgtgcatcgcgttccggccgaggctctgaagcgcatcgctgacgtcacatcggcccttcaattgacgctcctcgcgcagccagtgggaactttgtccgagattgaagctcttctggacctggagcgagaaccgctgaatggatgggggattgacgatgttgcagccgcgaccgccgagtggggctgccgcggtgatgcggccaccatggggcgcctgaaggcgctaacggcaggaatgcctctgttcgtcagaagtgcggccacgattgctcgcgaggagtacggcgggagcctcgcacagatgtgcgaggctgtagaagcgttgacgaacctgacccaaaccgcgcaagaggtcatcttggcgaaggtgtttagtgcgttctccccggcagcgcaggaggtggttgccgtactaagcctgtctgacatcggcttgctaccggccgagatccacaagctactgcacgaggctctcgctataagtgaggcagctgttgccggcattgtccggacgttgcgagctgccggggtggtggaaatctatggcagcaaggaaattcggcttcacgacgccattcgtgtagtcgcgagccagcacctgtccgtcatgcctggagaggtgtcttctggcgcccggatcgagctcaagaagctgctggtcgaaggattcgagcggaatcgcaacacggctcggttttcgctctacacacggctgctattagacaccggggacgtcaagacgctcgtggacctcatcggcgaagagatgttccatgagatgggtgttgctgtagagatctggcagggcctagaggcgctggtcgccaaggagggcacggacctggagcagcgctattgggctcttgatggccttgtcttctcagacatgaaactcgggaacgctgatcgtatcgagccaaggctggaggaaatggaaaaattgatcgacagcggtgtgctcggcgagggcgaagttcaatcattcttgatgaagcgcatgctttatcaatcgaatcagggtgacacgaaagccgtcatgcgctcaattggagagctgaacagccgattgcctgatagctcagtgcaccgccgcatcttcctatacaacgcggccgcggcgctctttcaccttgggcattactcaagcgcgatggccgtggtcgaacaggtcatcgacaagacgtactcggctctcggcattcgtgctgaccaagtcgctggtgcgacgaatgccgcaatctggactctcataaacaagccggggcttgatcacgcagacatcaagcggatcgcggatgcgctcgaacttaaagccatgcttgccggtaaactcagtattcccaagcctttcgcgcgaatccatgccatgaagttctacaacatggccggcgcgattgattcgctcattcgcgtcgggcaggaccttgccgacgagtttattgatcggcgcgacttcccgggcgcgcgcatggttcttgagcagtacgtcatgccggtggttgtggacaaccagctactgaatcgacacttggatgtccgtgcgcagtacgccgttgttctcgcttactgcggattgcacttagaggccgagacggagatgaacaggatccaggcctacgaggctggtttgtcgcccgagatccgcgcaacgctcgctggtcagcgccaactgattgcgcacatcaaggccaacccgataccgcagcgtcaccttggcgcacgttctccgtcagttcgaaggaatggacctatttctgctgcggtcaaggtcggacgaaatgaaccctgcccctgtggctctagcaagaagttcaagaagtgcggctgtggcctcgcggagcagatgtag

SEQ ID NO: 533266 - DNA, 651 bp, Stenotrophomonas maltophilia
atggccgataatgagcaagccattgccgacatcttcaatgactacatgcgcgagcgctgtcaggaacaaggtcaaccctttcaggcgtttggtttgggcggacaggaccgggacgctgccgactacctgatcgctggtgcgcacggtttcgcccttatcgaattcaagcattcggagtcagcgatcacgagcgaaggcaagaagccacgccgcaagaacctttgccttttgctgcagcaagatgattcgatgcggacgctccatgacctatgccacttcatcgcctgggaagacagggggacaggtgatattcgctgtgctccttaccggacccaggtgtgcaatcagcatgtgttcgcagagtgcgcagggctccggtggaagcgaccgctcaaggacaagcagctcgacgccacgcagtactgcaacgagtttttgctccctccgccgcatcgttacgcgacaaaaaaggagttcgagcggtatttgcggtggctaatgaaggatgcgagcggctctgagaacgagaccgtgcaacttatggcccgggcgccagtggggtgcgcgaccgttcgctttgagtcggtggatgcggcgtatcgatggatgcaggatcgcttgggctttagcagcgggatgcggccggcgtga

SEQ ID NO: 533267 - DNA, 450 bp, Stenotrophomonas maltophilia
atggaaatcacagagacgcccacgcatgaacaaatccaggtccttcaaggcaggctaagccgcgaccgcggagcgcccatcgcggacgtatatggtgctctggtcgcagtgcaactcgtggccgtcgaggctggcgtgcccgtcggaatcgcttcgatcagccagtacggcaccgaggctgagctctacaagctgtacgtcgtgcctgagtaccgacgccgccgcgtcggcgaagcactgttccaaggagctttgcattggatgcagcaacatggcctgttggtgctaaacatcgaaatgattggtgaaagctatcgcttctggaagacggtgacccaaggcctgcaggtcacaccgctcggccaagaaaagttttttattaccctgcaagaaggaagccagaatccggtgccgtcatcctcaatgagtgccgatccccatggccgataa

SEQ ID NO: 533268 - DNA, 1278 bp, Stenotrophomonas maltophilia
atgtcaagcccgcgcattgatctttcgtcttgggtcatgcatttcgtccacgaccggaatccggagaacgacgcggcgtacaacctcaaccagggggagtccagccctgcatttccttatcacgaagataaggaaatgaacagccgcttcgagctttgggaaatggtcgacgaggaagccggtctagccccggacgacgacgccttttgcgtgctgctgaagatccttgaggatggccacatccggagcggatggtcgtttcggggcgcaaagccgaccatctacggtccgcgagcggccacctgcttcaccgagatgccgctttacggtctgatcgagtacgccaagcagcggacacaggaaaacgtgggcgcatatgcgatagggttgctacgcaccgagttcttcgcggccggcgggcgacctgtaatttacggacttagcggtgcacaccgggaaagaccggcgcgttcaggcgagcccttccgtggctggccacggtatttggacccatcttgcggaatcgccgcggatgagcaataccgctacgtggcgaccgcgttagggggcatgaagcgaatagattggacgcatgagcgcgaatggcgttgggccgaccagcaagatcagcacgactgcccaggtctgccagtctggctcaaggaatcaccccccttctctaagataatgatcgttgttccgaccaccagtgatgccgagcacgtcctagagaagctcaaagaactgcatgacgctcgctcgcataactttggccatgaatacgaaatagagcaccttcgcaacacccacgtagttgccttagaagagctatccatctcgctgagtgccgatgagatgctcacgctgcgattggaggatattcccagcgccagaatcaggctcattaaccatccggttgcgtctcctgacctgatcaagatggtcgagcgcgagctcaaggcagcgcatgcgctcgcattgactgccgcgcaagcttatgcaaagacggccaaacgcaacaagaatggccacatcatggacagctgcggtttttcggacgtcatgatcaacgatgcccagtccgacatcgctagcgctcttctggcgcttggccaggcgagggtattaggcggtgttggatatatcgtttcgaatttcggttacggcgtaggcgagcaatcgatctcaatggcagaagcagcaacgcaagctgcttctgactacctcaaccaagtgtttccacacgtgaccttctacacgaggagccggtttgactag

SEQ ID NO: 533269 - DNA, 639 bp, Stenotrophomonas maltophilia
atgcaggccctgcagacccaggccgacaagcagccccagcgtggccgaacccagtgcggcaatggcaatgcggcgcagcgcttcgtgccgggcgctggcgcgcacgcgcgcttcgatgtcgccgggcaggtagggctgcagcaacggccacaggcgcggcccgtccagcacttcaaccgcctgcttctcggcggcgccacggccgtcgcgctcgatacggccttcggtcagcaatacgccacccttggcgccggccaggcgcgcggccgcacccagttcgttcactgcggcggtgccgatgcggtaggccaggccgtgcttgcacgacaccagccattgattggggccatcgctgagcaggaagtcgctgctcggctcgcgggcatcttcggccggatcgaccagctcgcgcaggccacgctgctcgcgcagcacgcgcttgacgagtaccgaaaattcgcgccagtgcatgcctgccagggcctgcaggccgagttgcatctccttctgccgccgcttgatccaccacagatagacaacggccagggaacaggtaagcagggccgacagcagggccaggatccaggggagcatgcaggagtagggcggaaggggcgaaagcggagagcgacagtgtaa

SEQ ID NO: 533270 - DNA, 192 bp, Stenotrophomonas maltophilia
atgacacggccaaaatatacatatgaagtggaaagagatttctcgaactgggatgaaacgattttcgagcgctgtctgcaggatgggttcaatgtatttggctctggaccaacccctattctcttgcggcccgaaaaggagaccgaacctgcccctgacacccgttcgctaggcaacgacagccatgattaa

SEQ ID NO: 533271 - DNA, 276 bp, Stenotrophomonas maltophilia
atgaccagcgacgtgcaggtgctggttcgtcgtggtccggacattgccgaatggttcgatgccgtggcaggcctgcgggcgagcgtcttccgcagctttccttacctgtacgagggcgacaccgaatacgagaagcactacctcgctatgtacgcccgttcggcagacagcctgctggtactcgcgctcgctgatgacgtggtcgtgggtgcgtccacgggattgccgctcggcgatgcggagccggccttccacgtgccgttcgccgatcgatga

SEQ ID NO: 533272 - DNA, 534 bp, Stenotrophomonas maltophilia
atgctcagccggctggtgaggttgctgctggctcttacggcaatcgcgcccataagcgtctcagtagcttactcgtatgcgacgcgcgctcataacatccaacttgcggtgattgcagcgcttacctgcgttctgctgggcgcgcttagccttgcgattattcgcaggtgccagcgcgatcttgagcgcgtgcccgtcaagattgaaaaggcgaagaatgcagacaaggaagtgattggctttttcgtcgcgtacgcactcccattagtgtttcgtggacaggcttctgccgagctcggagagtggatcttggccgccggaatgcttctatttgtgctatggagcaccaactcgctacaggtgaaccctgtactcgggctcttcggctaccatttctacgaggttgagacgcaggacaagatcaccttcttgctgatcactagaacgaagatcacaaaggttggcgccatcaaggagatcgttcaacttagcgagtatggaattctcgaagcatcacccaaaaaaggaatttag

SEQ ID NO: 533273 - DNA, 861 bp, Stenotrophomonas maltophilia
atgctgaacttgtttgcacttacatcaaacccgaacgcacgggtgcttcgcctgcctttgagtgcaccgcttcaacagacgatcaccgatgtattcacgcagcagtacaacaactttagtgcgggcgtcacggcccacgtccagtttgatgggagataccggcccgacaacgatgagctcctcgtcatcgacaactacgtcgatatagacaatttgatcggagccacagtcaacccgatggctgtgccgaccttcgatgaaaatgtgcactctcttgacgacgtgaaagcacttttcaccggctcgccagacgggacgcctcgggccctcgtccagctattcgagcgcagaaggttgatcgcgaaaggcctttctctattctttacaggcaacacattccagaaagtagaagctggcggactcacgctggacactaggctgctagcggtcctggaaggcacgaggctcacgtttcagagctttcacttcctgcgcagagtgttcgccgtcagcgaatgttacaaggaggcaactgcccaagaggtcgtcgagttcgccaatcaccccgttctttactcgcccgacccgcaggcatttgaacgatcagcgaactcgataatcaggtcaaagatcggcttgatacttcagtcagatgtccttagcaagcacactccccaggagcttgcagccgctgcgttggtttttaagctggacatacctctgactcaggacggccgcatcgaactgccggaagcgcctgctgaccttcgccgtctcttgaggttcttagatgaggactattacgagtctcctctctcgcgcacccatttcatctccaactcgaaacgggtagcagactag

SEQ ID NO: 533274 - DNA, 345 bp, Stenotrophomonas maltophilia
atgcctttgccgcccgacttctactggaccactcgctctatcagcctgcccaacgacccgctgacggtgatcgcctgcgacacggtgtgggtcgtcagccttctccagcgcgtcgatgacgaaagctggatcgtgtcgttggaccgccatcggcatggaccagatggcccgagccggccatgcaccagctttgagcaggggcgcattggcgcggaactgtgggtgaccaggcatcaggcacggctgcgagaggacgtggcagccatcaaccgttggcgggaagccgtgcgtgcgaacaggttggctaaattgcaaatcccgccgccgttcggctgggttaattag

SEQ ID NO: 533275 - DNA, 414 bp, Stenotrophomonas maltophilia
atgtatcagcaaactgagtcacccccagccgctgcatgttcgcagggggccgacaccggacccgcgacgcaggctaccacgcatgctgcgatgcgccctgtaacggccaccgagaacagggccgtgctgcagttcaccgtcagccccgatgaaattctcgtcacggcgattctggtcatgggccagactcgctgcatcgagcagcgctggaagcgccgcacacgtagcagctggctcttggcggcaggcccggtgctgtgggaatgcgagcggaacacgattggtcacgacctggccgaattcctcgaccgtgctggcgtgccccttgccatcgccaacatgttgccccggccagcgagcgacgccgcagccgcggccatcgcggctgcagcgcaggaggttgccgatgtttga

SEQ ID NO: 533276 - DNA, 387 bp, Stenotrophomonas maltophilia
atgtttgaccgtgagccatgcccatgcccgaactgtcacgggacgccggtggacgcgcggcagctggtgaagcgcctcgcctcgcaagccgagaacgcggccgacctgccgccgtatgagcgcgtggtaggtgtccagcatgccaaccaagccctcgccgccgcgctgaccatgcgcgcccccggcgggcggcctagcgagccgttgaccagccgcgaggtgatgatggtggccgtgattgatgcggtgaagcgccaccgcgccctagtcaacgcaccgcacagcgtctatgccactgaactgatggccgccagccaccagatcgacgctgcgctggccgcgttggcagcgcacgactttgatgctgggccgggagtaagggcatga

SEQ ID NO: 533277 - DNA, 279 bp, Stenotrophomonas maltophilia
atgaagtactacacgacccagcggcagatcccggcgccctggcccatgcccggctgtaggtccgggcatacagcccgactgatggaagactgccgcagtgccgaagccggcggcggtcatttcatcgagtgccaatgcggacgcacccacaagcatcccagcgcacacctcgccctgcaggagtggacgcgattgcacggacgcgcggtgcctgtggcaccaacggccagcaacgtgatccagcttgggctgggcctgggggatagaaacgccgggtaa

SEQ ID NO: 533278 - DNA, 393 bp, Stenotrophomonas maltophilia
atgaagaccagccacgggcggttacgccaagaccccttcgacgcccgccctcgccacgacgggctgttccagggcgaaggcacaggcgaagagattcacgaagagcgtgacccgttgcttcaagcgctttacaccgaatcgctccatgcccgcggggacgtggacgctgttgatcgcctgctggatgcccaccgggaggcgtttggggagcccgagcaagtcgcctatgcccgtcagcaagacgaacgccatgatcggacgttgcccttgccgagcgttggcttgccgttgaagccgtccatggagcgctacctggacgaacatcgggggtggaacccggccagccaagcggagcgcaccctgtccttgcagaccctggggatgagcgaatga

SEQ ID NO: 533279 - DNA, 780 bp, Stenotrophomonas maltophilia
atgacgattgagcttcagcgcaccgaagaacaatacctggcactgcaggccactgcggtaggccgggagttggagcgagccgcggctggcctgccgcctcccacagtgagcaccaaggccgctgccaagttcctgggggtccacttcgacaccttgggcgaatggcggcggcgctcgcctccccttggccccccttttcagaaaggggcggggcaggttggggcagggttgaaccagcatgtccgttacctctacagcgacttggttgagtggcagaacgcccggttgggcaagtcgccgaaagaacgccgcctgcagaacgacctggatctggcccagcagcgcgtgcgtgagttggaactggagcttgcacttcgccaagcgaaaaacgagctggcgaagcttcaaaaaaaattgggccgcatcgcgaacctgaccactttgcatgacgtggcggtggtgtcgcacgactgggccatgctccacggacgcatcgctggccacgtcctcaccgtggaagatgccacccttgaacgggccttggctgatggccacgtgtgggagggcaccgtcgaagacgcattggcccagccttggacaagcacggaggcacgtgaggtttaccaggacgccttcgtggccgtgctcaccagcacacagcacctgatcaatgcggcacggtcgcggcagcttgccagtgatctggaagaacggtgggacagtgccacccacgaggcaaagccagtgcggccgttcgataaaggaagtggaaggctgtga

SEQ ID NO: 533280 - DNA, 1911 bp, Stenotrophomonas maltophilia
atggcaaaaaatgttgcgacggaaacgggcgcccgacgagcagccttcaagtttagtctgacccatgctcagctgctgcagctttcaaccgacgtcattcccgagcgcgtcggcgatcgcatcaagctggtcccccgctcgcaggccgacattgggaagccctatcggatcgtggatgcgggccaaggcgcccctgtcggatttgggttctacgtggggaagacgaaggtcacctacgaggtggtgaggcgaggccctaagggggtgcgccgattcgccttgggcaacgcgacggatatgggcttggctgaggcctatgagaaggcacgggcccatctggctatcctgatggacaccggagagaaccccaaggcccaccaggccaaggtccggagggtcgaagagagcatcgagcggctggcaagcatcaccgtgcgccagtgcatggcctcttacctggcggacatggaagaccgcttggcaaggggtttggtcaaagccaacagcgtgtctgcctacaaagacagcatggctcgcttggcccgacctgaagtggctttggcggacaggacggtgaaggagctgcgcgaagcggacatccgaaaggcctacgaggccatgcgccgcagcgccatggcccgctccaatcggatccccacggcgatgcgcaacgcgttgatgggacacgacgactgggccgagctcgacaccgctaccttggaatccttgggcatcacggggaaatacatccagcgggtgaaggcctctggagttgcagcagctgagcacaccttcaccgatgcctaccggggcgtgaagcacgtggtgctcaaagaagtggtggaagccagcatctcggggcgccagccgctgctgtcgttcaatccgttctccatcatcttcagcaagaagttggtgcgcagtgcccgcgaattgcgcaagcattacgaacgggcggcggtcagaaacccgctggatgacgacacgctgcctcgggtgatgaaagccatcttggcccgacgggacgagcaaggcggccacaacgccggagcggctgactaccttatgttgaccttgctatggggcacccggcgaaacgaggcagtggagttgcgctggtttgatcgatgcaccaaaggcgagctctcccagcgtgaggtttcttgggtctggctcggtgaaccggacgcggtgaacccttacactggccggaccgggccgcaggtcttcatgagcgacaccaagtccggcgagagccgtttcttgcctgtttgctacttcgcccagcggatcctgcgacggcgcttggacacccgaatggacgaggaggggcccaagaaggagcttgctgcagctcgccaactgatggaggcagcacgcaagagcggcgcttcaaaagccgtggtggcagggcttcaagaagcaatggagaaggcagagcacgaagtgttgcgctcaaagtatgtttttcctgcccgttccagccgcagcaagacggggcactactctgacagcaagtccatcctggccaatgtgcgccgagacgcgggcctgaccgacgtccggaacgacgtagatcaggggctgacaccccacgatctccgccggacgttggggcgctacgcgagcctccacctgggcgtcagcagggtggtctcacagatgctccaccaccacgtgtcccagcctggggatcgcagcatggctgaggtgagcaagctctacaccgatcaagaatggaaacggttgcgggaggcctttacggaggtggaggagctgatgattgcccgaagcccccgggtgtggaaccggctcaagggcgccgacaagccgcggctcgatgaatcgaaggacgaaccggttactatttttgctcctataaaccagatcaccgccttggatgacgattga

SEQ ID NO: 533281 - DNA, 654 bp, Stenotrophomonas maltophilia
gtgcctgccggtccgggggtaaccgttcgtcgggtttttgtccgtaaaaccaatgggttgccgtattcattgaaagtggcgcttgaaagctgtcgcggcattgctaaactcgccgcgtcacttcctttcctggatgcccttcatgctgcgctctgcatcggccgccgttctggcgctggccctggttcccgccgcccacgctgcggtcgattgctcggtcaacaccagcgcctcgccgctgccgttgccggccacgaccatcgcgccggtggccgacgagctctacatccgtggcaaccagctgggcatgccggccggcgtgctgagcagcaactacgatccgtcgcagtcgctggaccaggtgctgcagcgcctgcgcatcgatggctgccagaacatcgccaaggccattccgagcgcaccggcggtgaagccgaacgatccggcggcctacaagccgcagaccgaattcgacaacacgccctggcgcttcgacatgagccagaacggcaagcgcatgaccgccgaagagttcgacgcctggatgaaggcgcgtggcgtgcgtgtggtcaaggcgcgtccggctccggccgccactccggccccggccgaagcaccggccgagaccaagccctgtctcttatacacatctga

SEQ ID NO: 533282 - DNA, 474 bp, Stenotrophomonas maltophilia
atgacgcacgccgccgctccatccacccttcaagccccggcctacggcctgctgttcggtcacaccgagtgccatttctgccacgcgccgacgcccaccgccgcgatctgggtgccctcgttcgaggagcacgacgacgagggcctggtggatcagggggagggtggcgtgctgcgctacatcgagcgtttggacaagaaaactgccgctttcgtggcgggccacgcgccctggcttcgcttcgccgccaccctgacgtcagggcaaacctacctggcccatcactgcaccacctgtggggcccttcaaggggaccacttcgtgttctcgccggatggtcctcactggccccagagcgacgtcgagcttgcacggctgacgtttgtccagggccttggcccgctcaccgcccaagcatcggcagggcagagcacctggatggaccgggtccctctggtctgcgcccaggcctga

SEQ ID NO: 533283 - DNA, 2193 bp, Stenotrophomonas maltophilia
atgtccctgatccgccctacccgcctgccccgccgcgcgctgctgccggctgccctgctttcgtcgctgaccctgctggccgcgcccagcgcattcgctgccgccgacggcgctgccgacgccaagaccctggaccgggtcagcgtgcgtgccgatcagtcggcgccgcctgccagcaccacccgtctgccgatcaccctgcaggaaaccccgcagtcggccaccgcgatcagcctgaagcgcctgcaggacgaatcgctgttcagcatcaacgatgtgatgcgcaacgtgaccggcgtcagcgtgtccttctatgacacccagcgcccgctgtactacgcacgcggcttcgccatcaccgacttccaggtcgatggcattcccacctacagcggttccaccaaccaggaatacgacaccgctttctacgaccgcatcgaagtgatccgcggtgccaacggcctgctcagcggcgccggcgtgccgtcggccaccgtcaacctgctgcgcaagcgcccgggcaaggagttcgatgcgtcgttctcggtcagtgccggcagctgggattaccgccgcatggaggccgacgtgaccgcaccgctgaccgccgatggtcgcttccgcagccgcgtggtcgccgcctataccgatcgcgggctgtattacgaccgctacgacgagaacaagatggccggcatggcggtactggagggcgatgtcaccgacagcaccacgatcaccctgggttaccagagccaggacaacaaccccaccggctcgacctggggcaccgtgccgttcttcgacaaccagggcaatttcgcgcatctgccgcgctcgaccaacctgtcgccgaagtggagctactggaagcgcgagagcaataccgccttcgccaacctggaacagcgcttcggcgacaactggctgttgaagatcaacaccgcctacacccgcggcaacgtgcagaacgtgcgcctgtacggcaccggcaacccggacccggtgaccggctcgggcatcttcctgcgtgctgccgccggtgattcgaaggacacccgccgcaacgtcgatgcctacctgaccggcagcttcgatctgttcggccgtgaccacgacgtgaccctcggcgcacagtggtcggacctggaaggcaccaccaacaccctggcgctgaacttcccgaacgattgggcacgctgcggcggcgagcgctgctactacatccccaacgtgtacaactggaacggcgacatctccgaggtgacctaccgccgcaccggcgcgcgccgcgtggccaagaccacgcagagtggtgtctacctggccacccgcctgcgcctggccgatccgctgtcgctgattgccggcgcgcgcctgagccgctgggaaaccctcagccgctcctacaacgccgcaggcgcctataccggcaccagcggtgcgtacaaggtgagtgatgaagtcaccccgtacgtaggcctggtctacgacatcaccccgaacgtctcggcgtatgccagctacaccgagatcttcaatccgcagaacttcaaggaccgcaacgagaacctgctggcaccggtacagggctcgaacctggaagcgggcatcaagacccaatggctcgatggccgcctgaccgcaaatgccgccgtgttcgaggccaagcaggacaactacgcggtgcgtgacatgggcgtgccggagggttcgctgagcgatggcacctccgcctacatcggcgtcaacggcaccaaggcgcgcggctgggaaatggacgtcaacggcgagatcctgccgggctggacggtcaatgccggctacacccacgtcaaggtgacccgcgccgccaccgatctgctgtacgccaacccgccgaaggatctgttgcagctcaacacccagctgcagctgcgcggcgcgctggaacgcctgagcattggcggtggcgtgcagtggcagagcaaggtgcagggctacaacatcgcctacccgctgggcggcacggtgacggtgaaccagccggcgtacacgctggtgcagttcaacgccaactaccgcatcagcgacaactggacggcaaccctgagcgtgcgcaacgcgctggacaagacctactgggccaacctggactacaacaactacggcgaaccacgcttcgtgtcggccagcctgcgctggaagttctga

SEQ ID NO: 533284 - DNA, 237 bp, Stenotrophomonas maltophilia
atggctgatttcaacacctctgggtcgcagtacctgcgcagcttcgctttctacttgatgcgcgatgccgagctgcccgaccggcaggtgacggtgatgcaccgagacctcttccgccgcgccggcatcgagtggcgcgatggccaggacctggtggaactgttggcctccctggacctgcagcagctacgtggactgatcggtcagctgcgcgacgccaatggcgaggaggactga

SEQ ID NO: 533285 - DNA, 141 bp, Stenotrophomonas maltophilia
atgttcaatgaggtcattgacacgttttgggcgctttccgacgcgaaccgcgcggtagctttagagctgctgggagggctgttgctaaaagacatccacgctgaaacgtctcgaagtgttcgtaagcggacgaaggcttaa

SEQ ID NO: 533286 - DNA, 687 bp, Stenotrophomonas maltophilia
atgaatagagttctatccgccattgctgctggttttgtcgttctctgcgcggggtgtgatcgacctgccgttgatcgtggtctgccgcatgcgaccgccacttcggccaagcgtccggctgctgatcttgatgtcgtggacattgccggcatcgcacttggcagcaaagtccagatcccagagtgcaagaaagaacgacagcatggggtggttctttacgcaacggagaatcaggcgtacccctgctttgaagactttcgcggcgcaagggggacgatgaatcgccaaattgacttgccccagggacgggattacgacggggtaaccagcattgaattgggcactgccgctgtcccagctggtgtttcgcctaaagccagcattctgatgttgagtggtgtacctgagcaggtttcgcttacgactggtggcgtcgaggtccaggacacgctgtatgcacttttagtcgcgaagtacgggtctcctagcgacaccaaagaggtgcagatgcaaaatgcgtttggggctcagtatcgaagcattgaggcgagctgggttctggggcgaatgaatgtttacttctttggggtgcttggaagcgcgtccgaagggagcatcattgcgagaacggataaggcgcgagagttcttgctttcccggcgcagtgaggcagcaagctctttctga

SEQ ID NO: 533287 - DNA, 492 bp, Stenotrophomonas maltophilia
gtggccaagccccgcactacgccgcccagcgcacccaagaccgtccaggacggcccgccggccgacgtgccggccatcacggaagagaagactgccgacgcgccgccggcgacggacggctcggtaccggagcaaggcctcagcgagctggagtccaccgcgtcggctgcgtccgcagcagatggtgctgccgtcgaccagtcgcaggccgaccatccggcagcagaccaggacgccggcatcgacgcgattgcgtcttcgcgtgatgcagcgtctatcgatgccgccgctgccgctccggcttccatctccacagctggggacgatgatgtgccgaacacctggtgcttcgaggtactcagcccgttcaagcacaacggcgaggtcgtcaagccgccggcgtggatccagatgacctgggacgaggccgaggactaccaggatgccggcctcctcggcgacgaaccggccacccaggaagagctggagtaa

SEQ ID NO: 533288 - DNA, 1965 bp, Stenotrophomonas maltophilia
atggtcgacgtaaagatcgctggtctccccaatgccgcagctctcactggcaacgagcagattcctggcgtgcaaggtggcggcaccgtgaagctcctggtcagcgcgattcgggcaggaatggcgtcggacagcagcgtggttcataccacgggtgatgagtccatcggcggcgtaaagaccttcacggccaacagcaactggaacctttccgccaacggccggatcgtgtacggcgaacccggtggcgactcggcgggtatttcgctgttccgtggtgattggaatgctggggctgcgcgccgttcggacattcgcgcacgatccggtgacctattgctcggctgcggctccgcatcggacaacgcagcgcctgtgaactgggtcagcatcggcccggcccatgtgcggccgactatcccggggacattgaacctcggcactgtcggtaacgcctggctcaacacgttcactgctgagctgactctgacgggcgacgatgcggccaaggcacgcagccgtgccagcatccaggcggtgggcctgatcggcaacgaaaccatcgcgggcaccaagaccttcagtcagaccggcgtgtttgccctgggcatgcgcatgcctggcgacaccgcacgcctggtgatgggcgacgggtcgatcgagaacggctctatccgcgcaacgacgaccaacgctttggtggtggcggcgggccctggcacggcgggcagcacggggcagatcatcttccgtcccaacggcaacacggtgaccacggggcaggtgacgatcatcgggacgggtgcgattacttttggtggtgatgcggcctccaagctggccaccatgtccagccttggagcggtcaacgactccggttcgcaaacgattgctggcaacaaaacattctccggcgcatcgctcttcacgggatcgatcacccagcgaaccggcactgtgggtggcgtagagatccagtcgcccaccggactcccaggcattgtcggccgcaacggcgacccggcagacgttaacaaccaatatcgtcacgacatccacttcggggctgggttcgtgcgcatgctggccagcaccgccgtagggtcgactgcgccggccggtggctggcgcatggatgcgcacttctacccggtgcagaacaacaccatgtcgtgcggaacgccgtccaatctctggacgcaggtgtgctcgaccaacggcacgatcaacacctctgacgcgcgcctgaaaacgccgctcgaccacatgacggacgccgaggaagcggcattcctggaaatcagttccctgccaatgaagtggaagtggaaagtccgtgtggcagaggagggcgacgatgctcgctggcacgcaggcccgtcggtgcaggctgctatcgctgtcatggagaagcatggccttgtaccgttctcctacagcgcgttctgctacgactcgtggcccgcacaggacgaggtgtggcgggagtggccagctgagccggaggaggtcgtcgaatggcccgccgtgccggagcagtggcacgacgttcctgcagtgccggagcagtggcgagaaattccggaggtgccagagcagtgggtcgatattccggcggaactggacagcgatggcaatacgctgtcccctgcacaccgtgtactggtccaggaggccgtccccgccagccgcgagcttgtccaggaagcggtgccagcctatcgcatgttcgtgcatccagccatcgaggcagggcgcgctgtgctgaaggaggctatcgaggcagggcgcgagctggtccagcctgcgattgctgccggtgaccgctacagcttccgcatctccgagttgcacgcgtggattctggccgcgacggcccgacgtgaccgtcgcgagcgggaggcagtcgagctgcgtctagccagcatcgagcagcgcctggctgtccttgagtccggaaagtag

SEQ ID NO: 533289 - DNA, 312 bp, Stenotrophomonas maltophilia
gtggccaatatcaagtccgccaagaagcgcgccaagcagaccgtcgtgcgcaacgcgcgcaacgtggctcagcgctcgatgctgcgcaccgctgtcaagaaagtgatcaaggcgctggacgccaacgatgccgccggcgccgaagccgccttcgccgttgcccagccgatcctggatcgcttcagcgcgcgtggcctgatccacaagaacaaggctgctcgtcacaagagccgcctgaacgaccgcatcaaggccctcaaggccggcacccccgaggaatgccggccagcggccggcactaccggaaaatga

SEQ ID NO: 533290 - DNA, 1044 bp, Stenotrophomonas maltophilia
atgcgcaggttcgggggagttgcaggcggtgtgtcgacccgcttcagaggatttgaagatcgaattcgcaagttgggggcattgggcgcctggctgtgctgcgtgctgctcattggccttggcctgtcgccagccgcaatggcacagacgacagtcacgtacatccacacggacgccttgggctcggtcgtagctgagagcgatgccaatggcaacgtgatcaagcgctatgactacgagccttacggtgctgtggtcggtggtcaggtcacggatggcccggggtacaccgggcatgtgagtgactcggcgaccgggctaagttacatgcagcagcggtacatggatccgcagttgggtgtgttcctgtcggtggatccggtgactgcgtatgagcagcctgtaggacagttcaatcgctatcgctacgggaatggcaatccttacggatatgcggaccctgatggtgccgacgccatatattttacggatgtgaatgttgttgtcattcctgtctacttcaagggggcggaagcaaccaaggagaacatccagcagatcaaggcgagagtggactccatatcctccgagttctcagggatgaagataaggcttcaagtgttgtcttcgcccagtggcgcagggacgaacgtcatggagttgggcgcggggaaaaactacaaggacttcccccttgccggcgagggggttgattcccggggtggacgcagggggtacattgatatgtctgccgacaatggtatcggtgctgccgcgcatgacattattcattttgccggagcgcgagacgggtacgcgagcaacgggagtcgagagggcaggacgggtagttatcttccggggtactcacagcagcacatcatggcagatcggcgaggtaccagtctgcgcgcgatggacgaggatgcgatcagggggaatgactcgacttcgagggtccaattgggatcatttcaaggtgttttcagggttgacggaaggctcgattcgatgcgccttgagaagaatctgaaggggaaatga

SEQ ID NO: 533291 - DNA, 288 bp, Stenotrophomonas maltophilia
atgcgcaggttcgggggagttgcaggcggtgtatttacccgcttgaggggatttgaagatcgaattcggaagctgggggcatcaggcgcctggctgtgctgcgtgctgctgatcggctttggcttgtcgccaaccgcaatcgcccagaccacggtgacgtacatccacactgacgccctgggctcggtcgtggctgagagcgatgccaacggcaatgtgatcaagcgctacgactacgagcccgatggggctctggtgggtgatcaggtcacggacgggccggggtaa

SEQ ID NO: 533292 - DNA, 429 bp, Stenotrophomonas maltophilia
atgcctgtccagatcgccgttgtgattccgtcctacaaggtcaccaaccacatccttggcgtcattgatggaatggggaatgacatccatcggatctacgtggtggacgattgttgcccgatgaacagtggcgacttcgttgaagcgaactgcaccgatccgcgtgttgtcgttctgcgccatggcgagaaccagggcgtaggtggtgcggtcatgacagggtatcgcgcggcgatcgaagacggcatcgacatcattgtcaaggtggacggtgacggccagatggacccggcgctgatcccaagcttcgtcagcccgatcatcgccggtgaagccgactacaccaagggcaaccgcttcttcgatctcgagcgcattgcgcagatgcgaagctgcggttgttcggcaatgcagggctgtccttcctga

SEQ ID NO: 533293 - DNA, 234 bp, Stenotrophomonas maltophilia
atggctgacgaaccactcgtttttattcggatgccggaggtgcggcgccgcaccggactgagcaagaccaccatctacaagaggatcaatgagcgcacgttcccggcttcggttcctctcggggagggtatggtcgcgtggatcgaagcggaggtagacgcttggcaggcccaacggctggcagagcgaccccaaccggaccccggggaaccgaaccagctaaaggccgcgtag

SEQ ID NO: 533294 - DNA, 549 bp, Stenotrophomonas maltophilia
ttgaacgccatcaccatccgcaccaaaggcgaagctgagatttccatctccgctgcgaccctccttcccggccagctgattgaacttgagcgtggccaggtcatcgaccaccacgccaccggccataccaagctgttcgccgacggcaccagcgctgccggcaccgacccgcgcaccgaccacgtcgccgtgatcgaccatgccactggcctgatgtgggcggtcaagtccatcggcgacagcgacggcgacccgatgagccagggccactgcgagaaggcctgcagcgaactgcgcctgctcggccacgacgactggcgcctgcccacccgtgccgagctgtcggccctggtggatgacacccgccacgagccggccatcgatagcgcgctgttccccggcgtgctgccgcgctggcactggaccagcactgcggccgcctggtcctcggcgtccgcgtggtacgtcaatttctactacggcagcgtcagcaacctcctccgcaacagctacgggttcgcgttggccgtgcgtcgtgccggtcagtaa

SEQ ID NO: 533295 - DNA, 231 bp, Stenotrophomonas maltophilia
atgcgcaaccaactcgacattttcgacgacgacccggctcggctcgcaaaggccaaccgcgacgccgccgatcaagcccggaaagacatgcagttccctccgaagatccgccaggaacgagcggaccactacaccgccgaggccgagcgtctggaagccctggcagatctctgcagtccaacccgcgccgccgccagcggcaaccacagcaacgcgaggaacgcacgttga

SEQ ID NO: 533296 - DNA, 405 bp, Stenotrophomonas maltophilia
atggataagcccacctatagctggtccttcgatgaagagacctaccacggcgaattcggctcgatcgatgaagccatgaaggcagcgtttgacagggaagtgcgcactgccgacgccggcgagctgcggccgggcgtccacatcggcgagcaggagcctttccttccaaccagcatcatccattccgaggccctgatcgagtgggcccgtgaacggatgttggaagagattggcgaggccgccgagatgttcctggaatcgccaacacctgcacagcgcatcagactggatgcgttcttgaacgactggattcgcctcgtagacggcaacaccagctattggacgatcaccaacagcgctttccaccgcttcgccgactacggcctgcggcaggaggccgagtga

SEQ ID NO: 533297 - DNA, 177 bp, Stenotrophomonas maltophilia
atgaccgaccaagacttcttcgccgccatggccgtcggcatcccgcccatcaccgcgccaacccgtatcggcctcgacctggccaccggcagcgacacaagcgtcgtggccgaggtcgcagccgacggaacgatcacccgcatggcaaccatcccgaaggaacagagcaatggataa

SEQ ID NO: 533298 - DNA, 882 bp, Stenotrophomonas maltophilia
atggctctgattgcatgcgttgaatgtgggaaacaggttagcgataaagccgaggtctgtccgaactgtggtcacccagtcaagagccgccaagcttctgggcagattcccccgttcaatccccagccaaccgtgaagcgcaatacaggctgcgcgctcatcatccttctcgtggtgatccttgccgtggttgcgacgtgcttgccaaagacggacaaggcaagtggcacgtctgatgcggtcgccacgccgaagccagccgagacggcagagcagcagcggacaaggttgatggcggaggcgaaggatacccgtcggcccgacgaggtgaggcttaccgctgcccgcgatgtcatcaccttctatccgaccagtgaagatgggaaggccgccgcagccctggcggctgaacttgaagagagcatcagacaagccagcatcgggaaacagtggcgctattggtcaaacgaggacgccatgaccggcaaggcatcggtcggtgcggatgtcttgagtagcaacacgcacaatttcgatttcccctacgcaggtccgcagcatgcaaccctgacattgaggcggcatccgcaacatggaagtgatgtccttgtccgcatcgagaaaggccagcttcagtgcagcagctaccgaggctgcaatgtactcgtgaggtttggagatgctccgcctaggacctatcgcgccgtcggaccgtcagacaattctagcgagactctcttcatcgagggtttcgcagacttccagaagcggatggaagccgtgaatgtcgtgcgcattcaagcggatgtgttcaggcaaggatcgcccacttgggagtttgacgtaagcggatttgatgcgaaccgcctgaagaggccctga

SEQ ID NO: 533299 - DNA, 663 bp, Stenotrophomonas maltophilia
atgcttgacaactcagccatggcggccgccattcgtacggccattgaagagtcggatctgactcaaaaaggcatcgctgatgcctttggcgtcacagagcaggccgtgtccggctggctccgcacgggcaaggtagacaagcggaagctcccaagactggcccaactgaccggcaagcccctttcgcacttcgggatgggtgaggcgggcgaagttgtctccaatcttgcgaccacaggtcgctatgttcgcgtccaacagctggacggagatgccgacatgggggatgggcgtatcaatgaagactttccggatgttgtccgcgcgatggacttcgcgcccacctacatccgttcactggtcggattcctaccgcctcctgggcggctagttcttgtgaccggtagaggcgattcaatgatcccggtcatcaatccaggggagtcgctgatggtagataccggcgtaacaacctatgacggcgacggaatctatctgctgaatacaggcaacggccagcaggtgaaggcgttgcaggatagaggtgatgcggtctatgtggtgagtgcaaatactgcgctctatccggctttcccaatgcctagaaacactgtgatcggcggcaaggtctacttacgaaatcggatagacaggctcaactga

SEQ ID NO: 533300 - DNA, 165 bp, Stenotrophomonas maltophilia
atgcgcgcgctgtccgacaagtggaacccgcggctgtggctgcgggaatggctcaacgctccctctcgaaacgagagggagcaggccgaacgaatcaaggccggaatgcgaaaggtgatgcaggactggcacgcggagcggcgtgcagagatcagccctgaatga

SEQ ID NO: 533301 - DNA, 195 bp, Stenotrophomonas maltophilia
atgaactcgctgaaggaagtgatcacggaagtcagcgcaatgcaggcagtaatcgctgtgctggtgaacgagcggtacaacgaccaacggttccgcacggacgtgattcgaaccatcaaccacctcgccagtacgatgagcgcagaggacggcgagaagctgcaggaagcggcgaagcgactcattcagggctga

SEQ ID NO: 533302 - DNA, 135 bp, Stenotrophomonas maltophilia
atgagcaagcacgacacggtgcggctgctccacgccgagcgctgcagcgttgcagagatagccctggcggtgaactggcggccatgcaacgtgcgttggttcatccggaactggatcgacaccgatggtgaatga

SEQ ID NO: 533303 - DNA, 225 bp, Stenotrophomonas maltophilia
atggacttttctcactacagcacgcgcagcaagttcgccaaggagatcaacgccggttactcggcgcggctcaacggcctgcggctgagcgacaacccgcacctggtctggcacgaacagccaccgggtagccagttgaagcaggtcgggcacctgaccgagaaggcggaagcgtggcagtacggctggcgccgggcagaccatggggacaggggcgcgcgctga

SEQ ID NO: 533304 - DNA, 462 bp, Stenotrophomonas maltophilia
atgtacgagctgacgagcaaccccgacatcctgaagtgcacccaaaccggcgcgttcattccccgcgacagctatctgtggccggcggagtggctggaggccaacaccccagcgccaatgccgccgccctacgtcttgcacagcccggagcactaccaggcgatccgcgcggctgcttgggactggatgacggcatgggtgaaggagcggcgttacgacacgatcgagacgtgctgcagctacttcaacagcagcgtgccgcgctaccgcgatgaggcacgggcgatggtcgcctggcgcgacgcggtgaatcaggagctggaggctctggtggtggccgcgccttctggcatcgagacttgggtgcaggtccgggcgctgctgccgcagccggaggccttcaactggcccggcgaggtttccttgccgctgggcaccggtgaatcggcggtgctggaatga

SEQ ID NO: 533305 - DNA, 174 bp, Stenotrophomonas maltophilia
atggtcacgaagctcgaaattcacaacgaagacattgcagacgagttcctggcaagtctggttgccaacggtgagcggctggaagcggccgagttccacgcctcggacaagattcatgaccctgatgtccgcaaatatttcctggagcgggctcggcagttgctgcaggcctag

SEQ ID NO: 533306 - DNA, 1332 bp, Stenotrophomonas maltophilia
  misc_feature (1257)..(1266): n is a, c, g, or t
atggcaacgtttgagaaggtcgacggaaacccttttggcgcgccgtcggcacccggccaggcgccatccacgacaagcatggtagctcgccgtccatcgttgactccggtgaagggagatcccttccagaaggttgctaagcgccccgagcgcagctggggcgacgccatcaaggacaccgggctcggcatcgccaccggtgccgcgaacatcatcggcggcgccattgaacagcgaaactctctggagccgacgaacctggtgcgacaagggctgcgagggctggatcgcttgggcgtcagaggtgcctcggagaccgcagccttggtgcctggcacgccgtcggagatcctgggtggtcgtcgtgctggatccgacagcgcaggcctttccaaggcgacgcagatggccaccgactaccttggcgaaagccagtctgatgcgctgaagcaggaaaagcaggaactgcaggacaccaaggggttcttcgccagtgccggcaaggtgctgtcctcgccgcgactgatcggcaatttcctggccgagcaggtgccaaacgtcgccgcgatgggcgccggcacgcgccttgcagccgcgcaggcgggcgagcgagccttggcgggtgcgttggccaagggcctcggtaccgaggccgctgaaacggcagccactgccgctggtcatcgtgcggcaaccgccgctgccaccggcatgacgacggtcatggagaccggatcggcaggccagcagacttaccagcaggctatggcgcagccgcaggcggtctgggatgccaatccggaatacaagcgcatggtcgccgccggcggtgacccccagaccgtcaaggaaaccatcgcgcgcggcgcatcgatggaagcacaggcgatcaccgcaccgatcgctgcgatcgccggccgcattgcggcgccattcgaggccgacgtcttcacccggggcttggcgcgaaagccaaaagcgatgctggccggcgctgcgcgcgagactgtggaagaaggcatccaggagggcggttcgcagctggcgggcaaccttggccagcgtcaggtcgaccccacccaggcagcatgggagggcgtccccgaggcggccggtaccggtgcggcgatcggcggcttgctcggcggcggcatggccgccggcggcgcgatcgccagccgcggcgacaatcaggccgcggtggcggccgatgcggagcgggaacgcctggcgcgccggccgaccccgacgcccccnnnnnnnnnncgcccccttcgctgccaccgccgccgattccccagatgctggcgcttccgccgccggaagttatga

SEQ ID NO: 533307 - DNA, 777 bp, Stenotrophomonas maltophilia
atgaagacgaaccagacgtgggctgccgctggactggccgccgcgctgtcgctgacgacatatggagttggtgcgcagacccaccccgagcaggaggagattcccagcaaacctgggttcttccgccagttgggcagcagcctgaaggacgctgggcgacagatggtgggtgtgaagtcggctgcgggcggcgcaaggaccacggggagcaatggcgatatctacaccccggtcagcggggctggaaagattcaaggactcttcaagggtgacaaccaccagcttgcgcaacaaggccgactggactggcccagggtggcgttgacgttccaggaatggggggcgtccctgccttgctggaccgtggaagctaagatctggaccagcgccacctcgtctacgacggaggtcttccggacctgcgccaatgcggccctgacggagaccgacgaccttggcgatagggcggagctcaatacgtctgctctttggaagggccgggacactctgatgggcgtccgcgtgccggcaggaaagccaaacactggggctagccggtctacgggccctaccccgcccgcgcagccgttcatcgtgaatgtgagccgccctggtgtttcggacaaggcagttgatgtggccctgagggcggcttggatctctggattccttcagaccgccgacctgcaccctggggcttccgggatcctgactccgttcaaagacggccgcatgtggctcgccggcttcaaggccgacgggaaccgcgaccggtaa

SEQ ID NO: 533308 - DNA, 123 bp, Stenotrophomonas maltophilia
atgacagacaaaaaacataaagaagaaacgaagagctactatgtattcctaggcgcggcaatattaggaatcattttcttcgtagcgataggtgctgcggggctgatcgacctaattaaatag

SEQ ID NO: 533309 - DNA, 171 bp, Stenotrophomonas maltophilia
atgacgtccctatctgaactcgaccgcctcttccccgccatcccgaagcccgatccgttgggcgacgaggtatgcgatgtgtgccacccagatggactttacgacacggatgggaatggcccctacaactgctacgaatgcgggaagaaggcacatgagtacaaggtctga

SEQ ID NO: 533310 - DNA, 231 bp, Stenotrophomonas maltophilia
atgaacggaaatgaatttgtctatcaggcaaagacctcatgggccaccgatggcgaagcgacgagcgtagttcgtgagggtcttaccaagcgcgagctgttcgctgcaatggcgctgcaggggttcatggcgaacaaggaacacgctcgctacttcgaccccgatgaagacgcaatgtatgcggtccgaatcgcggactgtcttttgagggcattggagaaaaatccatga

SEQ ID NO: 533311 - DNA, 207 bp, Stenotrophomonas maltophilia
atggctactcagttcccgcaggaccgcgatgcactacgccgcctcagcaacatccgctggctcgccagcacgtaccacttgaacgaacgcgagttggtccgcgagttcaaggagtcgggctacagctacgagaagcagggcgagctgtacgaacgggcacgccgccagcgcatgaaccagggccacgggccgaaggagcgcgcgtga

SEQ ID NO: 533312 - DNA, 210 bp, Stenotrophomonas maltophilia
atggacaagacctttgaagttgaagtggtgcggctcaacgggagcatcgcgaatcacttccatgttcgcgttggccgtggcagcgagttggtcgttctggctgtcgaatcggactgcggctcattccgccacttcctggacctcctcccctccgaagccgtgaccatcggtgagcagctgatcgctgctggtaaggcgggtgaggtatga

SEQ ID NO: 533313 - DNA, 204 bp, Stenotrophomonas maltophilia
atgaacgccgacctcgcagcaatccgattcgaagccatcattcgcaatgagggaatcgtagccgagggacgagattgcttcggcctgcacctgacccgtgaacaggccgctcagcgcgtcatagaggcccgctggccgaacctgactgagcgagccgcccatgaggccgccatcgcccactacgaagttgcggtggaggtctaa

SEQ ID NO: 533314 - DNA, 732 bp, Stenotrophomonas maltophilia
atggtaaagccaagtcaataccgtttggtaaattacccttcggtcaccgaaactcgcggtatgaagactgacccgccagtggtagccacccgtaggaagcgcctgcggcagtggattgatgaccaccatcaaggcaaccaggccgccttcgtggcgcgcaccggcatcaaccaaggggagctgtccctattactgagggacaagtcctttggcgagaagaaggccgccaagattgaagaggcttcggggatgcctccgggctacctttccggcgagtcaatctcacaagtctcagagattgagagtgatggagactatgttcgcgtccgtcaacttgatgcggaggctggcatgggcagcgagatcgagaactcggacaatccggagatcatccgggctatagactttgaatcgagctacatcaggagcatcgtgggatatctcccgccgcccggaaggctattcctaattgctggtcgcggagactcgatgatgcccctcatccagccaggtgacactgtggtcgtagatgccggcgtgactagctttgacggagatggcgtgtacctgatcaacatggggaacggacatcagatcaagcgtctgcttgaccgaggtgttatccatgtcgccagcgagaacccaagctatggcgcaccattccccatgcccgatgggacgttgatcggcgggaaggtctacttgcgcaatcggattgacagattcaactag

SEQ ID NO: 533315 - DNA, 240 bp, Stenotrophomonas maltophilia
atggacaccctgcgcacctacctcgcgactatgcccccggccaagcaggcggaatacgccaagcgtgccgggacctccatcggatacctgcggaaggcgctgagcaaaggtcagcgtttcgacggcgctttggctcgtcggctcgatgaagagagcaggggattcgtctcccgccacgacctccgcccggacgtcttcggcccggcccccaagaagaagggggcccgacgtgctgcctga

SEQ ID NO: 533316 - DNA, 909 bp, Stenotrophomonas maltophilia
atgaattactacgaacaccaccttggcgactacgcacaagctacggcccacctcagctttgttgaggattcggcctatagccgcctactgaggaagtactacgccgacgagaagccattgccggtcgagctgagggcagttcagcgccttgttggcgctcgcagcgaggaagagcgtgaggcggtccaggtggtgctggaagagttcttcacgttggaggaggacggttggcacaacaagcgtgctgatgccgagattgcccgcttcaacctgaagaaagagaaggcgcggaagagtgccgaagcacgctggaatgcgaacgcatcggaatcggatgcgaacgcatcgaataagacatgcgaacgcattgcgagcgcacggcacaagcataacgaacgcaatgctctccagtcaccagacaccagtctccaagaagaacagcaagagcaacaacatgtgcagccgctggccgcacgctgccgcttcgctgacttctgggctgcttacccgaacaagaagggcaagcaggaggcggagaagacctggaagcgccggaagctggacggccgctgcgacgaactgatcggccatgtgcggctgatggaagcccatgacgacggctggcgtcgcggttacgtgccgatggggtcgacctacctcaaccaagcccggtgggaggacgttccgcaggagtcggcaagggcagggcctcaaacggggcagccgatgacacagatgggcaaaaccgcgcaagcactcatggctttggaggcattcggaaatggtggactggatcagtcgggaagttgcggagggcctcaagaggctcatgtgcttgggcctggagcggactccggcagcggaggttatccagctgaccgccgccgtctggctggaggccatcactga

SEQ ID NO: 533317 - DNA, 333 bp, Stenotrophomonas maltophilia
atgaacctcgaacagatcgacaccagcactacggcggggaaggccgaggtcatgcgtgctgagagtttcagggttaggtggcgcgtcaagggcgattctgagtggttgcattctcccgtggaatggaattgggatgaacatcagtacgcaatcgttaacgaagaagtttcggcgggtggtccagaagaagtatgggtcattcttgactcggaaggggatgtgctttcggcgtgcaagcacgaatgggaggtgcgggtgaagatgcacattgactgcggagcgtctgctctccgctacatccgcgctgacctcgcaggggagaagggcgaatga

SEQ ID NO: 533318 - DNA, 1413 bp, Stenotrophomonas maltophilia
atggcagatttcttcaacaactacagccgtggctttgcgctggggcagcagcagaagcaggatcggcagaaccgaaacatgctggccgagctgcagcagatcgggccgcaggtcattgcgggtgaccttgccgcgaccgaccgcgcctatgcgcttgacccggatcgcgccaaggcgttccaggctgagggcaatcgccagcagcagcagcttttcggcctcgccaagtccctgaagcagtcggcggcgaacccgcagatgcaggctggtatctaccgctcggcggtcccgttcctcaagcgcagcttcggcgccgagatccctgacgaattcgacgctgcctcggtcatgccgattgtcgatcaggtgctagcggtggccgagaacgcaccgagcatgggcgtcggtggcaatgtgcagtcaacctacgtcgatggcaatggaaaccgcgtagcgatcatgcgtgatgggtcgcaacggacccttggcccgaacaacgcatcgatcagggtcatggagcaggagggcgcattgccctatggcgtggtcacttctggcggtcgtccgggtgctgtcgtggacattggcggtggccaaaccccgatgcagggcgctaccggccagtacaccatcgacccgaatctcccgcccgaagtgcagcagcagatccgtgccactgaggctgcgggccagcaggtcccgtccaacatggtcctgccgccgcgaaccggcccggttcgcgttccaacctcagctgagaaggctgcagcgagcgaggcaggtcgtttgtctgtccagcaacaatatctcccgcaggagctgcaggcccggacacaagcggccatcgagcaggcatccggtattgggcaggcaaagagccagcaggaaaaggcatctggtcgggtggctgcagaggctagtttgcgagacgccgaaagcaacttggatcggctggctagccaagcacgctctctcatgaccaacccgggcctgccccgggtgacgggcgccattggtgcaattccggatttcccgggctcacaggcagcgaacgcgcgggcggaagtggaaacgctcaaatctcaggttgggtttggcgtcctgcaggcgatgcgcgaggcgtccaagactggtggcgccctgggcgccgtgtcggataccgagaatcggctgctgcagagcaaccttgctgccctggatagttcccagtctccggaggcctttaaggcaaacctgcagaagatcgtggactacgtggacggcgctaagggccgtatgaggcaggccttccaagcgcagtaccaggggcaaacgagccagaacagcccgcagcgcactatcgtccgtcgtggcacatctaacgggcgtcaggtagtccagtacagcgacgggaccatcgaatatggcaattga

SEQ ID NO: 533319 - DNA, 2424 bp, Stenotrophomonas maltophilia
atgccgcaggctcaggctggaggaattgacccggcaaccgtggtgtgggatgacacgccaattaccgatctccctcaggtgaacgcgctgcctccggacttctcggaggtgtcttccaccgtagatagcactgcagctggacgccaggctgatggttggatgccaggtgctgcccgtgacctagcctatggcgccaggtcggtgctgcagggggcaggcggcttgcttggttcggtcggtggtgatgccttcaacaactacgtggtcaatcctattgcgcgcgctgtgggcgcacaggaggcgcgcccgtaccgtgaggaggcctcggctctggctgaccggcttggcttgccgcaggcgcagacctcaggtgaccgcgtgctgggcgacgtgggcgaggcccttaccggaaccggcctgacgctcggaatcggcggcggcatcaactcgctggccaaccttgggcgcaacgcggcggcacgaactcccgcgtatgtggcgccagtagagaacaggttggccgacttcctcactgcacaacctgccatgcagacagtatccgccgcgactggagcgggcgcatcctcgattgcgcgcgagtctggggcgtctcaggggaatcagctgctagccggactcgcaggcagtcttgggcctggcttgggtatggcgggaggcgcggctaccctgcgaggcgctgtgcgcggacgctcgggcgaggcaatgcggaatcgcttggccgactttgaggcacttggcgccacaccgtctgttggccaggcatcaggaaatcgggcgctccaaggcgccgagaacctactggctcaggcgccaaccagcaccggcgtaatggctcgcgcagctgagcgacagtcaagcgagatcagccgggggctccgcgatatggccgacgacctctcgcgcaatgcaagtggtgaacgcgcaggtcgggcgatcaagcgcggcatctatgacgagggcggcttcagtgatcaattcaagaacactcaggcgcagctctacgggaaggtggacgagttgattccgcccgaccgtggcgtggcgatgagcaatacgcgcgctgcgctggactccctaagcaacccgattaagtcgccaggtgcccctaataccgctcggctgttccgcaatggccggatcaccggcattggcaatgcggttgaagccgacctcgcgttgcccaccccacagcagttgtcgctggatgaagcagtcgccaaggttgaccggctctatgcctcgcgtgatgctgccactcaggacgctggccgctttgccgggttcgccaacgatcaggccaatgccgcgcagcgctactacccagtgcagggccaaccgcgattcccagggcgatacaccccggctcaggcaaacgtcggcccggctcaggatgcggcagcagaagccactgacattgcgcgtgggcgggtttcgcaagccgcagaaatcgaatcaacgctggccgaccttactgcagcagcggagcagtccggtggccgccttccgtatgaggcagtaaagaagctgcgctccctggtgggcgaggagctgcaagatgctggactcatgtcaaatttcccgcgctccaagttcaaggctctttactcagcgctgtcgcaggacctcgggattgctgcgcgggaggctggacccgaggccgtgcaagcatattctcgtgccaacacctacacgcgcgccgggatgcggcggcttgaggacattgagagcatcatcgaccgcaatggcggccccgcagcagtcttcaatgctgccatgtcagggactaaggatggaggtgccgtactgcggtctgtcctgcagtctcttcccgtggagagccaaaaggcagtgacggcatcggtcatcaagcgcatggggatggcgaaagctggcgcacaggacttggcgggcgaggagttcagcgcccgcaccttcttgaccaactggaacaatgtcagtcccgaggcacgccgcgcattgttcgaccgctatggcgagggattcagcaagcagatcgaccagcttgcccgcgttgccgacaacatcgacaagggggccggagtgttcaagaacccgcctggcactgcaaagagcgcagcagctctcacctatggcgcttccctggttggcagccttttcaccggaggcactggctacctacttgctgcagggttgacggctaatgcactcgctcggttgatgaccaaccctgccatcgtgcgaaaactagctcataccacggctatgcctgtcggtggggtgttggctactgcacgaaaccttcaggagatggcgaatagggatggagacccggatgttgctgcacttgccgcatatctagcgcagcagccagagcgccagtttgagcagcccgtaaagcgtgaagattccgctaaccagtag

SEQ ID NO: 533320 - DNA, 189 bp, Stenotrophomonas maltophilia
atgagtaaggaaaagttcgacctctccaacgtcggcggacagccgaaggattggatgcagaaggaacatgagaagcgacttgagcccgggctcgggatcaaagagtggggtttgatcgccaccctactggttagcggaatcttcacgctttacgggctgctcaaactggcgctctggctgctgcgctag

SEQ ID NO: 533321 - DNA, 186 bp, Stenotrophomonas maltophilia
atggcgcatgacagaaggctgaaagagcgtctgctgcattcggacgcaaagcttgcccgagcctatcggcttgccgcgcaggccgcactggataacccatacgagcactccaggcagttgcgccgggagcgggcaagagaatacctgcgcctggcgcggggctatgaaagggcaatgcgtaaatga

SEQ ID NO: 533322 - DNA, 795 bp, Stenotrophomonas maltophilia
atggacgccgtcaaccagctgctcgaccaagcccgtgtcggaacaaatctcccttcagacaatgctttagctcagcgcatgggggtaacccgcgccgtcgtctcgaattggcgacaggcccggaatcccattcctgatgagcgaattgcgcagctttgcgccatggcaaagctcgatggaccggcatggacggcacgcatccatgcggagcgcgcggcatccccggccgagcgcgcaatgtggaaatcgatgttggacaggttgagcgcggtcgccgcagtgttggcgctggtagtgttcgcagcaccaggcgccgcccgcgctaaagccattgattcacaaggcttttccggctcagatcagccgcattctgtatattatgttcaaggtcatccggggctggctggcacgcatcttgccgctgccccggaacctactctggcatggagcctgatcgtgcgtgatcgaaaactgaccggcccttgggccggtttttcgtttaaggctggccgactggtcacccccgaaggccgcgagctcgagccgcaggatctggcctggctgtcgctcaccgctgcacaggcacaggaatggcgccgaatgatggagagcggccgcgcgatcggcaagccccggaaacccttgaccttcaacgctgccagcgtggtgaacctatccgatgcattggccgagcgtcgcaaaaagcgtttcccggcggtgatggctgggcccgacgccgaaccgcccaccgcagtccagccgttaccggggccgagaccgcgtcagcgcgtgtga

SEQ ID NO: 533323 - DNA, 474 bp, Stenotrophomonas maltophilia
atgtggcaagcccgcttccatcaagcgttgccggagttgttggctaccgtgccggatgcgcagtttttgttccttaccgtgacagtgcggaactgcgcgatttcggatctgcgcgaaacgctaaaaacgatgggcaaggcatggaaccgcttcacccaacgacgagagttctcagcgattgaaggctggataagaaccgttgaagtcacacgcggaaaagacggttcggcgcatccgcatttccatgcgttgttgttagtcaaaccgagctacttcaaaaagcattacgtggctcaatcgcagtggcttcaggcgtggcgcgaagcggctcgcctcgactacatccctcaagtccacatcacgaaagtgaggactaaaaaagccgaccgcttggccttgggaagcgccaatgcgtcatctcccaaggccaagcggtcggcttttttagtcctcactttcgtgatgtggacttga

SEQ ID NO: 533324 - DNA, 894 bp, Stenotrophomonas maltophilia
atgcgcaaactgctttttagcttactcatgctccttgcaccaacaactgcccttgctgctcaagaaccttattggtcaaaactcacttcatcgaatttcctggtgagcccgagcactgcccatgttcaaatttttgatcagggttcaagtggcatgattttcggatcctcgtcaccactgttctatggagaaatcgtatccgatagcaactcgatccaacccgaaacactaagaccaaagaagaaacaacgcggacggatctatcgctttttccatccagctcaagaacgggtttggaaaggcgtccatcctgatctcaaagaaaagatcgaagcaattcaggaggtgatggaagcggaagggtttgatctgagacctatagagggatatcgaagcccggaacgacaagccgccctgcttgcgtcagcatcaggtgtcaccagtgttggggcctggtcaagctgccacaactatggcttagccctggatgccgctgtatacgtgggtggaaagccgagctgggatctgagcgaccctcatgtcatagagggatatcagcggttcggcgagctggctgaaattcttggcttgaattggggcggccggtggacttcacccaaagactacccccatgttgaaatgaaaactgagtgtggtcagtctaagtgggcgagacgacatgggcagactccacccaaattggtggcgagcgctggcgaaccatcatctttgattcttgaacgagcattggtatcaacctggtgcccaatgggcttggaagccacctgcatcgctatgggtagggatcggtttctttcctggggctggactgttcagagccaaaacagagcgtgcacagcacgatccaacctctacatctacgctctttcctaa

SEQ ID NO: 533325 - DNA, 138 bp, Stenotrophomonas maltophilia
atgcagctgttggcacttacacagcagaacgtcaaatcacgatctcttactaagatcgccgcgcataaaataaagccgccttcgggcggtttttttgtgatcaacgtcttgcgctttagattttttctgttttgttga

SEQ ID NO: 533326 - DNA, 420 bp, Stenotrophomonas maltophilia
atggccttcggtcccacgtccgctggcaccaggatccaacaggagtctggcaacctcgcccagctagcgaatgccgttgctgctgacttcgccgtcgcagaagggcgctatcaaagcgtcagcacagcaagcgccgttgagcgtgtgttggccccgtctgcctgggtagtcggccaggaactgaactcccgtagcttaggcagcatcgagctctcacccctcaatgcagggcagggcttccgaatcaccgcgattgcagtccaggcgaacctgtgcctagggctggtgcagagctctgccagggcgttctcagaagtccacgtcaatggcgtgctggtctactctcgccgttctctcaatcacggtgcgttgtccgagagctgcgccgagggtggcgaggtcgcctttgatcgtcgttga

SEQ ID NO: 533327 - DNA, 198 bp, Stenotrophomonas maltophilia
atgaaaaacatcccacatccacttttgctcgcagccgttgtggcgagcttcgtcaccatgctcgtgctttggccgagctatggagcttcgcccttccaactctctacatacatggcatcagctgttcttgcactgaccctatgcctcatgcgcttgaagaagatattggtggcagagcgggcaaagaccaagcgatga

SEQ ID NO: 533328 - DNA, 486 bp, Stenotrophomonas maltophilia
atgagccttcttaccaagttctccaacatcttgaaccagcaaaacaaggaagctgtggaccaggggctcgatagcatccatggtgaccaagtcgctcaccaggctgaccgggcccgggactatcggggacaggctcgcaccgctcagttccagaacgtgcagctcgcaaaccaggtccacgatgcagctgcggagcttgccgtggtcaaggcacagcttgcaaaagagcgagagaagacaaagctcttcgaagactgcttgatcggggaccatgcggtcatttcgacgctcgaaagcgtgatccgtgtgcttcgaccgtcagatctgagcgatgaagcgctgcgtgagcttgtcaacgagaaggtgagcaaggcgcgtgtcagttcggaagttgttcaggggggtaaaaatcgactcaccatctttcaagagggtgatgagttctctgatcaccccgatggcgggttcttctacgagttctactga

SEQ ID NO: 533329 - DNA, 819 bp, Stenotrophomonas maltophilia
atgagtatcagtgattacgaacgaagaaaactattggaaaaagctgcaaagcttaaagctgaaaaagagggtggatcatcttttccaagccctctagatgagcagcaagttcaagatcggaagatggatcagcgcttgaaacagacccaggtcgcggccaatgcaactgcacaagccacgagcgaatttgccaaagagcttgcggccaagactgccaagcttgcccaggaacaagcgcagcgcgccaaagcaaaggcagatgcatggaagcaggcacaagatgcgaagcgaacagagcacgaagaggttaagcggatccaggatgctgagcttgatcgggaaaagcaaagcacggtcattgaaagctcacctgatgccacccctaaatcgccatcgaagccaactttcaaaaccctggctttcatagcagtcttcatcgctctttcaggagcaggtgcatggttctggactcaacaggggagcgagaagaaccctgagctgcaccaggccgaggttccttccgcactgccggttgcgccagcacctcaggtccaggaagcgcccaaagcctccgagcccgtccaggtcgtagagcccgtccaggaagtggctttgatgcccattgtcgaggaacggcgaaggtcggctgaaccgatgcctcagaaggtagaccgatcacctgcacccaaatcggttgctcgcgcacctaaagagcgatcagcgatgcgacaacaagttgaacaacccaaggcaaagcggagtgattgggtagacaaagctaacaatgatctcgatcacttcgcggagcaattaaagtag

SEQ ID NO: 533330 - DNA, 1071 bp, Stenotrophomonas maltophilia
atggagacagcagacaaaattgggatcgagcaagtgaacgaagcgaagcaaagttcgcttgatgatccgctgacgaatttcagcaaaaccatttcacaattatcagcacgccaatcattgaatctgccagcaaagcttcgccagcagttgagatcgatgcagacctcctgccccatctgcgcgtctgacttctcccagcaatcatcaatcgtcgtcgctcagatcgttcccgttgagcttggcggaccagacgacttatccaactgcttcctttgctgtgagcgctgcaatcgctggcgcggcacttcagatctgctcagccttggcgaaccgttctgcagcccaaccgcgtccccacccgttccttcgcacggccgcgccctgggcttttctccaaccgacctggtgcagcggcgtctggagttgctagctcgctctgccaaccactggacgcctcacacccgcaattcgatgaagtgcactgtgctgaggcacctggctaagcggtgggctgagccacgctttcgtgtcttcgcccatcactcgtctgacctggccctcattggctttgcgcggcgctcaggtgacgctcagagcttgggtgtcgccaaggtgctgaccaagtttctgggtgccagcgtggcgctgatggacgatgatgtgagcgtttaccaggtagatccagggcgcttcctacccttgatctgggcactcatcgagctcaacgcactcatcgtgtccgtgcgactcccaggcaaagacgcacatgcgctcggtagcgagtggcaagacttctggccggaccatgtgcggtctgtcgctgctctcagatcgcgcctacggcctggtcatgccaccagggcacagcaaattcgccgctgccctgacgcaagacgggcgctatctgacaagcctgacgcactgcggaagcgtcggaaaagtgccgcgagggttgagcgaaaccgcagccagcggctcgctctctatcaccaaaagcgtattgaggaggcttcccaggacagcgcttacgcagtcctggaagctcgccttttatctctccaactcagctaa

SEQ ID NO: 533331 - DNA, 288 bp, Stenotrophomonas maltophilia
atgagttttattgatttgactgagttgcagtccgaagattttagcgtcctgatgcactacgatttggcaggcctcattcagcgtttccttccgctggatattgaaatcgaagatgtttattgtgaaatcctgcgtcatgctaagtgggcgatttgtgtgggggtgttgcgcactcgacaaattgtaaatgccatcatcgggtttaatttttttgggcactcaattcgtgttgaagtctgcctctccgcttgtgggatcatcttggatgtcgcggaggatggtcaatga

SEQ ID NO: 533332 - DNA, 804 bp, Stenotrophomonas maltophilia
gtgtcaggggaaggttgtgcagcaaatgagcctgctggctgtctgggtagatgtggcgtcgtcagacggacgggccgagatgcggccaccggcctccggccatggagcaagttctgtcgtccaggaaaaggggttgagctcttgaagccgagctatcaagaccaaatcaggatcgctgcacagcagagggatgtggagtgcttgttgcactttacgccgctgcccaatttggcctcaatcgtagaacatggcctcctctcgcgagaggcgcagttcgccaaagaggcgttcggctacacgagtagcgcccagcgccttgacgaaaaccattccgccacgtcgatttccgtgtccgcgatcaaccatgacatgttcgcttccaaacggaaggattcgggacggagtgactgggtggtgttgttcctgtcgcccgagatcctttggactcattcctgtcggttctatgcgagaaatgccgcgcggcgagagatgcgagatcaccggggattcctgggtgggccatgggctttccaggagatgttcagtgaaagcactacacgtgtaggctctagggaggagcatggcttgccttccgtcctgaccacccatccggacgcggaagttcaggtgttaggggcgatatcgccttcgcacattcttggggcgtgggtcagccagccatcccaacagaaggatgtggagtctcagctcgcttgtctgactcttgaggatggacgggcaagagaagttgtcgttcgtgacttttcaccacgattcatagtgggagcagatgcatggggatga

SEQ ID NO: 533333 - DNA, 417 bp, Stenotrophomonas maltophilia
atgaaaatcattgaaaaattcgaagctaaggatcatgtttacgcgatcaccgagtctgcctcttctggcggtggctggaaagacccatcttacgtccggttgataaaagtggaccgagatgttttcgaggctggccttgaaggcaagcgcctcccaaatactcggggcgtagagatcctcgccgagtcgttcgaagacagacgctacacaggcccaaattcgagctacgggagaactgtggaagagtttagaggccagttggcaaaggacgccaaggcgcaggcagcgatcacagggtttgaacttcaatcatccaccattaaaattcctccgagttttaaggagtgcgtgagtgctgctaaggccgaaacgcctggtgctgaggtggctcaccagcgtcagtcacggaggatttga

SEQ ID NO: 533334 - DNA, 234 bp, Stenotrophomonas maltophilia
atgaaagctcaggctattagaagaataatcggtgaggcgcgtcaaacgggggtaatttcgatcaaggaaggggtctttctttcaactggagcaagcatcaaggagaaattgcttgtctgggatgaggcagcgtctacaaatgtcgtagacgaagagatttggatctacacagaaaaagggctgtttatgccattgggtcaaaagccagagcgagagctcaactgctatgtataa

SEQ ID NO: 533335 - DNA, 1125 bp, Stenotrophomonas maltophilia
atgagcctgccaatgacgaatgagcgcctcctgattgaagccgtggcagaagggcgagttgacgaggttcaaaggctcgtgctggtagcagacgctagaacaggaaattccgcagcacttcgttgcgcagtggccacccaaagaactgaaatcatccagttgcttcttccttattcggatgccaaagcagataactcatacgtgctgcgacatgccgtaaaaatgggccgcaaagatttggtggagatgcttcttccatacactgatctcaaggttctggattcggaagctctgcgctatgcagctcaacatggagacgtcgacatggtcgagctgctattgccagtgtcggacccgtttgcagatcactgctgtgcattgcaagcggcagcggagcacggtcataacaaggtcgtcgagatgttgatacctatatcagagcctcagcctgctcggtcatccgcgctttgcttagctgcaaagaatgggcatagagacattgttgaaatgctcatttctgtatcagatccaaaagccggtgattcttacgcgctatttcaggctgcaaaaaatgggcatagagagatcgttgaattacttatccccgtatcagatccaaaagccgactactcaagggcattgagatatgcggtcgagtgcgggcatacgagtgtcgttgaaattcttattgcagtgtcagagcccaatgtcaggggggcatttgtattgcaagtcgcggctgagaatggatggatggatatcattgatctccttattccggtttgtgaaccaaaggcaaagaactcaatggcgctgagatgcgcggtttacgcggggaatttaaaagttgtagagagattacttcccttttcggatgccaaagccgaggggtcatacgcattagggcttgctttagagtgcggtcaactcgagattgcggagatccttcttggtcatacagatagagatgtcgtatatgaaaagctcacagtaaacggcgctcgtgcgttgagtgctctagaggcctctatccttaaacgggagcttgccgatacgacggcagaagcgggtgtcgctgataaagacctgtcagcgcctgcacaacctgctgttcgacgactctga

SEQ ID NO: 533336 - DNA, 1293 bp, Stenotrophomonas maltophilia
atgaataatgaagagcaactaattcaagctgcaacgtatggggaaattgaagtcgttcaagccgtaattccagtatcaaatcctaaggcaaatgatacgcgggcattgctggatgcggcgagcaatggtcacaaagagatcgttgaaatgctgattcccgtcacagatccaaaggtttatgactcgctggccctgatatttgcggcggggaatggacacaaagagatcgttgaaatgctgattcccgtttcagatccgaaggcaaataaatcgcaggcattgcgggatgcggcgggagatggacacaaagagattgttgaaatgctggttcctttctcagatccaaaggcaaatgactcagaagcattaagggatgccgcacgcgggggctatgaggaaattgttgaaatgctgattcccgtttcagatccgaaggcaaataaatcgcaggcattgcgggatgcggcgggagatggacacaaagagattgttgaaatgctggttcctttctcagatccaaaggcaaatgactcagaagcattaagggatgccgcacgcgggggctatgaggaaattgttgaaatgctgattcccgtttcagatccgaaggcaaataaatcgcaggcattgcagtatgctgcggaaagggggtataaagaaattgttgaattacttattcctgtatcagaccccaaagccggcgactcaatggcatttagatgggctgcttgcaacgggcataaagacattgttgaaatgctgtttcctttctcagatccaagggcaaatgactcagaagcattaagggatgccgcacgtgggggctatgagaactggcagctcgcagacgaatggcgcggtggaagggatgccgcacgggggggctatgaggaaattgtggaaatgcttctgcctgtctcagatccaaaagcaaatgactcagaagcattgagatatgccgcatttaacggatataaagaaattgttaaaatgcttctgccggtctcagatccaaaggcaaatgactcagaagcattaagggatgccgcatgtaaaggatacggagacattgttgaaatgttaattcccgtgtctgatgtggaagctgcctgcgaacagcttgatgaatcaggaaaatcaattctaaaagctatggaggcggatttcaggatgaaagagcttcaagcctcaactgtccaaatcccacagagctttaaaggatgcgttgatcaagctaggtctgacagcttgggcactgctgcaactccgagagtccaggccaggaggctctga

SEQ ID NO: 533337 - DNA, 759 bp, Stenotrophomonas maltophilia
atgaaacgtatgagcgttgatgcgaaaaagaaccttgtttccagagtcttgagtggcgaagagaaccgggcgtctgtcgctcgtgagttcggcattacgaggcagcgtgtccaccaaatcgcatcggcggtgggcgcgactccaagagctgctgcaattgaacagaagcgccttgaggtagcagggctccttatcgaaaatccagaccagtgccttgctcagctgtgcaaagagcagcagatcccgtcctcgattgtgtccagtgcaagaaaaatcgttgggcacgagtcgaagaaggcgcgcgtcgccagaaggcgcagccgtatcgagcttgctttgacgcagggtgctcgacaacggggtgaacgaagggctgtggttgaggcttttccaggttcgcaaaagatgataacagcggtcgctaaagagctggacatctatcctgggcgagacgggcttcttattacccgatcacaaaaagaagagcgtgatatgaaaatacgtgagcgcgaaaggagtctaagaaaaagacgcgctgctgttcgtctcgcgaaaagattaagagttaggcaagagttggcgaggagggccgcgctaaaagccacggcgcggctcgagcttagaaatcgtcagcgacagggggtcatcaaggacatgcagctttatcccaaaatatcggtggcagaattgatgcggcaccatgatgtgtcccgggaatttgtgcggaagataaaacatgaaatgtcaaaggccacttag

SEQ ID NO: 533338 - DNA, 267 bp, Stenotrophomonas maltophilia
atgccgaagatatcgctgcaaaagtccagtgtgctggacttgtttgaagctcgctctgacaactggaagtgtcctgagtttcacagggcgcttgaagtctccatgggctctcgctgggacaatgtcaaagacgcccattcaacgatcttgctcgcagatcgcattgggcgatggccacgagtggtcgagcaatatgttcggagtcacgccgaaggcggctcagtcaacgccgacctgatctcaattgcacagcgacttagcctgtga

SEQ ID NO: 533339 - DNA, 1371 bp, Stenotrophomonas maltophilia
atgaatgaggataatcgagtttgcgatggctgtgtcggagatgcttttctggcacagatcatcggtgctagcgaaaaaattgaaaattgcgactactgtgcaaaagaaggccccacaatcagtctggatgagctagctgacaagtgtgctgcggcctttgaaacgttctacgaaggaactgctgacgcatatgcggtcgtctatcatgatcgcgagccggcaggcgacgatatccattcctgtttagaggaactggcaggtgtggaagaagagctcaataatgatcttgccgacgttttgctcggtcgcttgagcacaggtgatctagacgaagcggatccgttctacatcaggagcagtcagctaggagctgtaataggtgatcagtgggagcgagtctcccagagcctcaagcatgaggcaaggctcatcaatcctgatgttgtggacgtctttgacgtggtgttcggccaggtctcagaggacgttaccgccgagggctttgacgtctttgtatctgcggggccggggaagagcgtgagtcaactcttccgggcacgcgtgttccaaagtgacagcaagcttgaagcggctttgaagcatcccgagcgagagcttggaccgttgcctataggtgagggaagagcgggaaggatgaactcatccggtgtttccgtattttacggagcaactgacgcaactgtggctcttgccgaggtgcgcccaccggtcggaagcagggtgctggtcggatccttcgaaatcatgcgcgaactgaggctcttgaaccttgatgagttgggtcgcttggttccatccccatcaagaagtctctttgatcctctggccaaggccgaacatgctaggtgtgattttctgcgatcacttacgcaacgcctcactatgcccgtgatgcctgaaaacgaagcgcaggattacttgatcacccaagcgattgctgactatttggcgacgcatcggagcgtctcaattgatggaatctacttcagatctgcgcaagccttaaagagaagggagcacgagactggtcgcaacgtggtgcttttccataaggcatctcgggtagatcgagcggagatccaatacaaattcggaagaagttcgcagctgatggataatgacgaggatcacttcttcatgcagcctgaaatcatgtggaacggcaaggagccgcatgaccatagggatggttgggaagactccgacaaccgcgagaaaacgctctctcttgatcttagttcgatggaagtcagatctgtaaccgaagttcaatactcgttcagcacggatgaagtcggctatcacaagtatgatgagtcgaagtttctgaagttcaagcgtcgcggttga

SEQ ID NO: 533340 - DNA, 183 bp, Stenotrophomonas maltophilia; identical to SEQ ID NO: 512036

SEQ ID NO: 533341 - DNA, 1968 bp, Stenotrophomonas maltophilia
atgcaactgctaaatgcacgtatcaagaatttccggtctctgcgcgacatctccatcagctttgaggcgcacacggctctgatcggtggcaatggcgccggaaaatccagcatcctgaaagcccttgagaagttctactcgaccagcaaagcgctggatccggatgactacttcggccgtgacactaccttgtcagtagagatcgagctgactttcggggaactgagcaacgccgaacaggagactttcgagagtagagttcgggaaggcacgctgactgtatccaggatcttcgatggaacgtcatcctcagggcgatactatggttcaacgctccaaaatccggacttctctcccatccgcgccatcagtgctgcgactgagaagcgggccgcttacagggctctcaaggaggagaacgctacttatgctgaccttcccagcgcgaccaatgccgcacagattgaagggtatctcctccaatgggagcaagaacatcccgatgccttgaccctgttgagggacgatggtcagttcttcgggttccagaacgcggggcgaggcgcgcttcagcgtcataccagcttcgtatttgttccggcagttcgagaagcctcgcttgacgccgctgacggcaaagcgagcgccattggcaggctgctagagatcgttgttcgcagtgcaatccttcagcgccaggatgtgcgagctttccaggaagaggtgacgacgcgctatcgcgctctagttgaacctgcaaacatgcctgaacttggagaactcgcaacgcgcttaactggtgaccttaaaagcctgtatcgggacgctgcggtggggctaacttggcgcgaagtcgctgacatcgctgtgcccttgcctgccgcagatgtctcattgagtgatgaaggcttcggcggacccgtggatcgccaaggtcacggtcttcagcgcgcatttgtcttcacgcttttacagcacttggccaagactagccatcaaactcctactgccgaagggaaatcggaggaggaagctccctcgactacaccgccagcggccccgagcctcatcctggcaatcgaggaaccggagctataccagcatccgactaagcagcgccacctagcaagcgtcttgaggggtttgagcaccgggagcctacctggcgcgaccgggcccactcagatcatctttggctctcactcaccgatgttcgttgcaatggaacgagccaatgaagtgaggcttacgcggcgagtaaagtcgactgacagcaagtttaagcatgcgcagctcacatcattgagcctcgccaatgtcgctgcgcgcctagagaagtcaaaaaaccagcccgctggttcttggacagcggcaactctgaccccgagattgcacatccttgggactgagctttcagagggcttctttgcgaacggcgtcgtcctggttgaaggaagaagcgaccgttctgcacttcaagcatgcgcgcggctgctcggccttgacttccatgctgcgggcatcgcaattctgcctgttgaggggaagttgaaccttgatcggccctatgctgtattcaccgagctggaaatcccgacgttcatcctatgggactgcgatctgaacaagaaggaagctggcgctaacccagcgctgcttcatctagcggacgctaacgctagttatgatgagccgctctcaactcggatagccaagaactatgcctattttgacgacacgcttgaaacagtgctgatctcagaactcggcacagagctgcatcagcagtgtttggcagaggcatgtgaaccgtttgggctcacccccagcaaggacacacataagattccggaagtgatgcatcaggtgttggcatgtgcgaaaggcaaaggagttagctcccccacgctggaaacccttgtcaaagcgatttggtcgcacctcgcccctgaggacactgaggcttga

SEQ ID NO: 533342 - DNA, 297 bp, Stenotrophomonas maltophilia
atgtctaaggacgccgcactgctggcaatcgagcaagggctttgtcttgagcttcggtatgacggattctcgcgattggtggaagtccatgcggtaggcacgagcaagaccggtcaactctgcatgcgtgtctaccaagtgagcggcggctcggtaagcggcgaaagagcaggctggaagctgatgctcatcgacaagagcttctcggcacatgtctcaacaatccggtcagacgcccccagaactggctacaagagaggggatcgggacatgctgacgatctacagcgagctttag

SEQ ID NO: 533343 - DNA, 300 bp, Stenotrophomonas maltophilia
atggacgacatcgtcatttcttcgttggacatcggcctgctggataagatcaaggccgagttaggcgagaaagcagaaaaagcgggaatttccctaaatcaagagaagacggagggaccttcaacgcttgttaccgtcttcaatgtcgagctttctcacaattcgcttgtcatctcagaggagcgaatggctgaatttcgcgaggcgctcatggttgccagctgcgatgcggtagccatgggaatccttggctacgtcgcttccgtcaacgatgcgcaattgagcaaactctacccctga

SEQ ID NO: 533344 - DNA, 291 bp, Stenotrophomonas maltophilia
atgggtggcgcaaagagaatgcttgaagagcatgatagaaagctgggaatagcgagtcggattgcagtcgaggcgggcgtcctgaagacatgcgaacttcacgatgacacgtatatggaaggggaccgggacgtccaggaagcatacaagctaggaaacaccaagttcaccaggggcgaaatcgcaggtgaatttgaaagtcgcactgaaatgaccgactacatcaagcaggctgttgaagagctcgccaatgatgagtgcggaagttgcgccaggtggcgcgacgactga

SEQ ID NO: 533345 - DNA, 204 bp, Stenotrophomonas maltophilia
atggatgacgcaatggaggaacggcggcgggtctgcgaggcccgccactggatcaggcagggatacaacagcggcaggtgggtggacgaactgatagcccgcatcgcggggaaacgtggtcccgctgccgccgaagtcctgcgggaagaaatgcgccggcaatgggtctgccggcgcgagtggatggaggcatccgggctttga

SEQ ID NO: 533346 - DNA, 279 bp, Stenotrophomonas maltophilia
atgagacacgccacgacacagcggcagatatccgccccgtggcccctccccccgtgcaaggcggggcacagcgcacgattgatggaagaccgccgcagggcagctgccggcggcggccacttcatcgagtgccagtgcggccgcacgaagaagcactccgcccctcaccaggccttgcaggagtggatccggctctacggccgtgctgtgcagattccggccgacgccacgaatgtgatccagctcgggctgggcctgggcgatagaggtaccgggtga

SEQ ID NO: 533347 - DNA, 396 bp, Stenotrophomonas maltophilia
atgtttgaacggaatccatgcccaagctgcgaggcgatgccagcgagcggtcgccagctggtgcggcgcctgagcgagcaggcggaatacgcggccgaactgccgccatacgagcgcgtagtcggcctccaccacgcccagcaggcgctggcggccgcgctgatcgcgcgcgcggctggcatgagttcagacgagccgctgaccggtcggacggcgctgatgcaggccgtggtcgacgcagtgacgcagcaccgcgcactgctcaactcgccgcgtagcgtctacacaacgcagctggtcgcggcaacgcgccaggtcgatgccgcgctggccgaactcgccgcacatgacttcgattcagggcgggcggcgagccacacagaggccagcgcatga

SEQ ID NO: 533348 - DNA, 417 bp, Stenotrophomonas maltophilia
atgaaacagcagactgagttgcacccagccaccgccgcatgttcgcagggggccgacaccggacccggcgcgcaggctatcacgcaccagggtttcgaccttgcacagcaccctgacagcaccgccgaagtgtggatcaaggtcagccacgaccagatcgtcgtcaccgccattctcaccatgggcaccgtccgcaaggtcgagcaacgctggcagcgccgcagccgcaatagctgggtgctggccggtggcccgcccgtcttcgaatacgaaaaggacggtatcagccccgacttcgccgacttccttgaccgtgccggcgtcccactggccgtcgccaacatgctgccccggccggcgagcgacgcatcagccgcggctatcgctgcagcagcccaggaggtggcccatgtttga

SEQ ID NO: 533349 - DNA, 273 bp, Stenotrophomonas maltophilia
atgagcgcgtacatccgcgacgcggcccgtacgccggccgaggtgcagaacagcatccactactgcgtgcatgaactcgatatcgaccggctgtggcaggcccagcgcgcagcagatctgcttgcgttgctggacaccgatcagccctccccaatcacccttgaccacgtcgccgccgtagccgcgtacatcgcggacgaaatgcgaaaggtgctgggcaatgcccaccgccccgaccaagcgccgggcgtagacctggccgacaccctgtaa

SEQ ID NO: 533350 - DNA, 288 bp, Stenotrophomonas maltophilia
atggaaacgaagcgcaccccccagttcaccgcatggatcgacggcctgaaggacatcacgggacgcgctcgcattctggcccgcatccgccgcttggccgacggcaaccccggcgaccaccggaacctgaccggcggcgtctcggaactgcgcgtcgatgcgggtccgggttaccgggtgtactacacccagcgcggaaacgagctggtcatcttgctggtcggtggtgataaatccagtcagcagcgtgacatcgagaaagcaacggaaatggcccgtaacctctga

SEQ ID NO: 533351 - DNA, 192 bp, Stenotrophomonas maltophilia
atgggccaggcggaaccgggcaaggtcgccctgcatgcgtgggacgctacggaccacctgcgaaccgaggacgatgttctgttgttcttggaggccagcgcagaggaagcgggggacgacccgcagttcatggcgctggcacaggccatcgttgacctggcacgcaagcgctgggggttgaccgatcagtag

SEQ ID NO: 533352 - DNA, 321 bp, Stenotrophomonas maltophilia
atggctgttcttgaactggcgatgctatcgccaacggcgaagctttgccttcaaaccaccatccgctacggcggtttggtggttggtgagcgcggatacacgggccgctcgaccaggcatggcgtggcgttcaccgccgcccccgtgtggcatctgatggagctccacttggtgcgctgcgcgcccaacgatagccgcctgctggaagccactgacctgggcatagagttgaacgactacggcgtggtcgaggtcaagaacccgcccaagggcttgggcctgatcgacaccgatgccgatccgggcgaggacaccccatga

SEQ ID NO: 533353 - DNA, 327 bp, Stenotrophomonas maltophilia
atgtccgcatacggcccacgtcggaagaccgtcttcaggtgcgacttctgcaagtcgccattggtgaagcgcaccagccacctgagccacgaccatctgcgccacgactcgttcaactgcaccaacccggtctgctcggccgcctttaccgggcacaccgagttgaccggcgttgccagcccaagcggcctgccccacgcgaggccgaccgacctcccccccagcacggcgtacgcacgcgagatcgcacagcgcgcacaccggctgcagcacagcagcaaccagcccgacctgctcgacgcgttgccgctccccgccgaccactga

SEQ ID NO: 533354 - DNA, 216 bp, Stenotrophomonas maltophilia
atgtccaaacctgtcctaaaaaccgcaccccaagtgcgcaaggaactggacgagaagggcatctccatcgcggagttcgcccgcactcacgatctcgatacgcgagctacttggctggtgctgtccggccgcaacaagggtcgccgcggcgaagcgcataaggccgccgtggtgctgggcatcaaggccggcaccgttgacccctcggccagctga

SEQ ID NO: 533355 - DNA, 468 bp, Stenotrophomonas maltophilia
atgtcacttactgaggatccgaagcacggcgtgggcgcacggctgcgcgtcgagcgggaacgactgggcatgagccaggacgaaatgggcacccgagcgggcaagaacaaaaacacccagatgcgctacgagacaggggtgaactcgcccacggcggcgtacctgcacgacttggccgacttgggtgtggacatcggatatgtcctgaccggcttccccaccgaactgcacgacgaagatgccgaaatgctcgcgcgcttccgcgtggcgtcgccagaaatgcggttcgccttgcgcatgatgctgaccgctccaaaggaggccgtggaatcgcaggcgcagccacaggccagcgcgccgccgctggtaggtggcaacaactccggccaggtcaatgcgggagcggtcacgcagggcgatgtcagcttccaaatcggttcgcgcaacaagggcagtcgcaaacgctag

SEQ ID NO: 533356 - DNA, 3135 bp, Stenotrophomonas maltophilia
atgagcggtggcaaccttcgcctgcaggtggtgctggaagcgctcgaccgcgccagcgccccgttcaaaaagatcatggcgggaagcaaggggctttccaccgcgctgcaggaacagcagggcaacctgcgccgcctcaatgccgcccagcgcgacgtaagcgcctaccgccagcagcaacaggctctgcgtgccaccgagaaggggcagcttgccgcgcagcagcgcgtcgcggagctcgcccgccagatggccgccgctgccagcccgtcgcgccgtctcacccgcgagttcagtcaggctcgcaccgccgccgggcagctgaagaaccaacaccagcaacagtccgtcgagctgcagcgcctgcgcagcggcctggaccgcgccggcatcagcacgcggcagctgggcgcacacgagcgcaagctgcgaactgacatcgccgccgcctctcagcggatggaggcacagcgcacgcgcctggccgcgctcgatgcggcgcaggcccgtagccggaagatccacagcgccggcatgaacgctgccgcccacggtacgggcgtggcactggctgccttcggcgcgcttcgcgcgcagacgttgcccatcgcgcaggccatgagcttcgagtcggccatggcagacgtgaagaaggtggtggatttcgacacgcccgacggcttcgagaagatgggccgcgacattgaggaactgtcgcgtcgcctgccgatggtgcccaccgatatcgccaagatcgtcgcggcggctggccaggccggcatcgccagcaacgagctgacccgcttcgccgaggaagcggccaagatgggcgtggcattcgacaccacggccgaggacgcgggccagacaatggccacgtggcggacagcgttccgcatgggccaggacgacgtggtcgtgctcgccgacaagatcaactacctgggcaacactggcccggccagcgtccagaagatcagcgaggtggtgaaccgcatcggtgcgctgggtgaggtggccggcctcggcagcgggccgctggcggcgctgggtgccaccgtcgcgggcatgggcatcgagtcggaggtgtcggccaccggcatcaagaacatgctgctcacgctttcgtcgggcgaggcagcaacatcgcgacaggtggcatcgttcgagaagctgggagtgaaggccagcgagatggccaaagccatgcaggacgatgcaggcggcgccatcctgcacgtcctggagaagttgaagcagctgcccaaggccgagcaggccgcaacgatgacgcagctgttcggccgcgaatccatcggcgcgatcgctccgctgctcaccaacctcgatctgctgaaggagaacatcggcaaggtcaccgacgcgcagaagtacggtggttcgatgaacgccgagtacgccgcccgtgtgggcacggccgagaacggggtggtgctgctgaagaacagcgccaccgtgctttcgcagcggctcggcaagacgctgttgcccacggtcaaggaactggccgcgcgcgtggccaaggtcgccgaccggatgtccgagtgggtgaccaagaacccgcagctggtggccaccatcgccaagctggccatcggcggcaccgcgctcgctgctgccctaggcggcctgctggtcgccggcggcgtgggtgccatggcgttgacgcagatccacaaggccgtgctgctgctcagtggcggcggtggtatcaaacaactggtcggccaggtgctgtcgctaggaggccgcgcgttcccgatgctgctcaacgtcggccgtatgctgctgccgttgctcggcggcatcagcctgccggtgctggccatcggcgcggccgtggccgtggtcgctgcactggtgtggaagtattgggagccgatcaaggcgttcatgatcggcgtatggcagggcgtgttcgacgtggtgaacccgatcatggccgaactgatgactgcgcttgagccgctcggaccggtctggacgcagctatccgatgcgatgggcaaagcctgggcgtgggtgcagaagctactcaccccgttcaaggccaccagcgagcagctgcagggcgcgaccaccgccgggcggggcttcggccaggtgctgggccaagtgctgaccgtcaacctgcgcatggccgtggtcgccgttggctggctggtcaaggcgttcaccacgctgctgccgatcatccagaacgccgtgggcggcgcctggacgtacctgcagggcgcatggcagttgatcgtcggcctgttcaccatgaacggcgacaagatccgctcgggcctgaccgccatgtggcagggcgccaaccagatcctgatggggtggccggccaagatgatgcaggccggcatcgacatggtgcaggggctggtcaacggtatcgtgtccaagggcagcgccgcgatggatgcggtggccggcatcgcgtcgggtgtcatggaccgcttcaagggcctgctgggcatccacagcccatcgcgcgtcttcgcccagttcggcgacttcaccatgcagggcttggccggcggcatcgaccgcagccagagcgagccgctgcagcaggtgaccaacgtcggtgatcgcatcacgcacgctggcgccggcatgggcgaacggatgcagcgggcaggagtgagcgagagcgctgcgtcggctcaccgcgaccctctgcgtgcagttgccgccggcggtgagcgcgtgacacggatcggcaccgatatgacccagcgcctgcaggtgcccagcagcggcagcgcgacgccggccagcccgttggatgaactgcgcgagcggcggatcgctcgcgtagccagcactgcggagtcggcacgcgccgctgccggccgcgacaagctgcgtcaggcatccaccggtttcgcgctgggtgccgctgtactgcccgtcatggctgctgcagcgccggtggttgcaccggctgcggcgacggccgtagcgggcggcacaggcgctcccagctacaacatcaacatccacccgccggccggcgcggactcgcgggagatcgcggatctggttcggcaggctatcgagcagatcgagcgcgaaaaggtcacccgtcgcggtgcccggctcagcgactga

SEQ ID NO: 533357 - DNA, 321 bp, Stenotrophomonas maltophilia
atgaaccacaacaccgaaaccaccgccgacaccatcgacccgaacgtgatcgtgctggaaaccccgatcaagcggggcgaggaagtcatccgctcgatccgcctgcgcaagccttcggccggcgatctgcgcggcatcaagctgcatgacctggcccagatggacgtaaccgcgctgacgaccgtcctgccgcgcatcagccagccactgctgaccctgaacgatgcggccaagctggaaccggcggacctggtcgaggtcgcccgtgtgatgagtgattttttcgtgccgaatgcggagaaggcgtccccgacggcgtag

SEQ ID NO: 533358 - DNA, 582 bp, Stenotrophomonas maltophilia
atgtccaacgaaccccgctttgcacacgcctttgatccggccacccgcgcgcacatgggcacggtgcgcctgcagccgtcgcccgatggtgcctggcatctccccgacggcaccacggacgtagctcccaagcaggccgctggcgcgtgccaggcgctgcgcctttccgacgacggcaagcgctgggaggtggttgccgactatcgaaaccgcatgctgtgggcaacgagcacagcgatgccgatccccaaccgactcgccctcggcgagccgttgcccgatggcgtcactctggccgagccgttcaggctcgacggaaccacaccgcagtgcaatgcatgggacgccgaccgacgcgagtggatcctgctgcccgactacagcggccgaccgatctggaacaaggccgacggcagtttcgcggcgccacttcagcgcgggcaagccttgcccgcaaccttgaccggtcatgcaccgccccctgaccgcatcgcgccgatcacctatgacgacggtaccggcgagtggatcactgtggtgatggccgaacagaacaacgaaccgccggcagagtcggcttga

SEQ ID NO: 533359 - DNA, 3207 bp, Stenotrophomonas maltophilia
atgcgcatgaagatcaccaccgcaggccgcgccaagctggtcaacgaccccaataccggcaccaacacggtgctgatttcccacatcggcctcactgccacgggcttcacgccgactgcggcgatgacgcagctgccgggcgagttcaagcgaatgaccagcttcggcggcaagtcggtcgccgccgatacgatccacgtcacgttgcaggacagcggcgcggagaagtacacgctgcgcggcttcggcctgtacctgtccgatggaacgctgttcgccgtctacggccaggccgccgcgatcatggagaaggccagcatctccacgctgctgctgtcggccgatgtcgtgttcgccgatatcgacaccgcgcagatcaagttcggcagcacggagttcctgaaccccccggccaccaccgaggtcgccggtgtgttggagcttgccaccgacgccgaaaccgcaacgggcaacgacactacccgaggcgttacgccgcgcggtttgaaggccacgctcgacggccgcttcggcgccggtgcccctaccccgtttgtcaaaacgctgctcgccttggcgaccgccgcggccatccgtaccagcctggagttgaagggcgcggccttgaaggacatgggccatggcaagggcttggacgcggacacgctcgatggcctgcacgcgtccgacttcccacaggtcggtgaggtccagacctcgtacccgattgccacgaacaactcgcagaagcgctggatcaagctgggcacgctcatgtggtccggcagcggcgcgagcatcctgatgcttgaggtcacctgcggcggcattggcggacgccgcttcgtgaccgacttcgtatcagcgtcggcgcgcggatacgacacctggctcactgcgctcacgccggcccatgcagacgcgatggtctaccaagcacggctgggggccactgacgcccttagcgacggcgcgcgttttgggctggtcctgatgcggaacagcgccggggattcgaccggcgtcgaactgtggatgatgcagggcgtctacaaccacggtcatcgcgtgcgtccggtgaatgtgtccaacaccacctaccacggcgtaaaggaattcctgaccgccgagccggcagggattgtctacgcctcggtcgagccggttgcctctgcatcggatctgcgtcgtctcgtggaatcgacggagagccgctgggggcgccgccagacctttgcgctggggctgaccctgcccagcgagcagaccatcgagctgggcgcgtccggcggcaccctgcgcggtactgacacgggcagtgtggtcatggctgcaggtgccggtgaaacgggaggtttcgtctacctgcgtccgaacggcaccagcagtgccgccggccagcttgtcgtctacaagaacggttccgtcgagatggtatcggcgcgcatcggcgcgggcggcggcaccgcagacggtagcgtgctgctggaattcaactcccagcgcccgtggcagttccggcagctgggcaaggatggcgacaccgcgctggagctgttcgatacgtcgggcggcaaacagttccggttgaccaacaccagcaacagccgcgcgatcatcttcaattcgtcggccggcctggtcgaggcgcccgagttccgagggatgctcaacggcaacgcgaacacggccaccaagctgagtgctgcgcgaacgatcaatgggatcgcgttcgacggcaccgccaacgtcgtgacgccacaatggggtgcggtacgcaaggtgaccatcggcgccacggccaaggatatgaatggcggggcgaatatgacctggacgctcgctgagatcggtgcaggctctgctgcagacgtcgccgcgcgcgttgcctacatgccgccgaccaccaatgacgatgcgtggattgatgcgtggaatgtgctgcgcatcaacaggcagggaaatcccaatccaacgaccatgcccgcgcagtacaccatcgcgtggtcgctgccggcctatgacaattctcgtgggttggctcttgcctgtgactacggcggcggcaatcgattctggatgcgttcccgccgcgatacggcaccggccgatcagcgatggaaggcgtggtgtgagctgtggaccgaggccaacttcaatcccgcgaccaaagccgatctttccggagcggatttcagtggggcagtgacagcgccagcgttcaaggctgtcaccaacgcatacatcggcggcccgaagtacgccgtgctcacgcctgacgcagcagacggcgaggtgttgctgcggccgaacgggggcggatcggttgtcggccagctgagcgtgacaaaggctggagtgcgttgggacggcaagggcatgtggcattccggcaactttgagcctgccgtcaaagccgaccgaattcccggtcagatcatcatgttcgcgggcaagagcgcacccagcggcacgctgatctgcaacggcgcagcggtgtcgcgtacgacctattccgcactgttcgatgcgattggcacgctgtacggcgctggcgatgggaagaccacattcaaccttccggcgatggccgaaggcaccgttgtgactcacacgcagaccgccgcttcggtgggtagcgtcacggccggtgaggtcatccggcacgcgcacacggcgagttcggccagcgccggcagccacacccatacgctcaccgtcgccggcggtggcgcccactcacacagcgccagcgcggcagcggccggtgagcatgcccacggtgcatggacggaccagcaaggccaccacgggcataccggcggcacgtctgcggcaggcgatcaccagcacttgaccgcctatgcggagtccggcgcgcagtatccgtggggcgccgactacgggcagcacatgggttcgcgcggcaacatcgactacgacaatccctggccctacaccagccctgcaggaggccacgcgcatagtttcaccactgacggcgctggcgcgcatggccacaacatcggcatgaacaacgctggcaaccacacgcacaccgtctcggtcgcgcaggtgggtgaccacggccacagcgcatcggccgccgatgctggcgcacacacgcacgggatcaccgtggccaacaccggcggtgatcgcaacctgccggctggcctgcgaatgatctattgcatcactttctga

SEQ ID NO: 533360 - DNA, 462 bp, Stenotrophomonas maltophilia
atgaccgaggatctacagcgccttgagacgtgggtggcgccactgctgcagcgcctcaagctcgccgaacgcagccgcctggcacgcaaggtcggcacggccgttcgccgctcgcagcagaagcgcgtcgcacggcagcagaatcccgatggctcccgcttcgctgcaaggcgcaatgccgcacctcgccgcgccaaggccggccgcatcaaacgcggggtcatgttcggcaagatccgacaggcaaaacacctgcgtgtgcgtgcgagcgccagccaggcatcggtagggttcgctgggcgcgtctcacgcatcgcccgaatccatcaggaaggacgcaccgacacagtgagcaaggaaggcccccgcgtcacctacgcccggcgcgtgctgcttggcttcaccgattccgacgaacagctgatgcgcgagttgatcctcgatcacctgcacagcctctaa

SEQ ID NO: 533361 - DNA, 522 bp, Stenotrophomonas maltophilia
atgctctaccgcgccctcgccctggccgccctggtagcggcgaccgccggcctcttcagctgccagcaggcgcgcgtgagccatgccacggcggcgctggacagcgccacccgcgacctggccagtgccaacgcggagaagaaggatctggccagcaagctggaactggcacaaagcaccacccgtgtcgtgactgagtacgtggaccgcgtgcaggtagtccatgagcgcgccgccaccatcaccaaagaggttcccgtctatgtcaccccgaacgctgatgccgcttgctctgtgcctgttggtttcgtgcagctccacgacgccgctgcggcaggcatcccccccgccggatctgccggcgatcctgatgcgcccgctaccggcgttacgctctctgccgtcgccgaaaccaccgccggcaactacagccagtaccacgcagccgccgagcaggtgactgcgctgcagcagctagccatccagctgcacaccgcgctggccgagtgcgcccgtcgatga

SEQ ID NO: 533362 - DNA, 276 bp, Stenotrophomonas maltophilia
atggctgagttcatgacaaccgccaccctgctgttcagtctggccatctgcgtccggctgctcacctaccggccctcaccgggcgccagccatcgcccgggcattgcctggtgcgcgtggctgctgatcgccgccacgggcggccaggcgctgcagatcgtgctgcagggctcccgcgccaacgtcagcgtctggcatctggcgctgctgctggtgctggtggtggccacctatcgttcgcgcggcaacgtcgcgcatctgttcgggagcaactga

SEQ ID NO: 533363 - DNA, 708 bp, Stenotrophomonas maltophilia
atggccgatagtcctgccaagcgccacctgcagcgcgtcgaggccgaggaagcggccaagcgcgcggccggcagcagcctcatggcgggaactcccgtctacgagcagaccctgatgcatctcgccaccgatcgcgctcggctgaaacagatccagtccagccaagccaagggccagctgaaggccgcgctcttgccgacctacgacgcgtacatcgaaggcgttcttgctgccgatgccggtggccaggatgacgtggtgtccacgctgatgctgtggaacatcgacgccggcctgtacgacagcgctctggacgtcgccgcgtatgtgctggctcatggtttggcgatgcccgaccagttcgagcgcaccgccggctgcgttgtggccgaggaaatcggtgtggcggcactcaacgccttgaagaccggcgaagcattcgacctgaaggtgctcgacagggctgtcgcggtgaccgacggccaggacatgcccgatcaggtccgcgcccggctgctgctggcccgcgctcgcggcctgctggctacggacaccgaagaagcaccgctggacgcggaagcagtcggtaaggccgttggtgatctgcgacaggccatccagctgcatgacagctgtggcggaaaggaagacctcaagcgcgccgagcgcctgatgaagaagttcgaggccagccagtccaacgactga

SEQ ID NO: 533364 - DNA, 699 bp, Stenotrophomonas maltophilia
atgaagaacgaactgatccacggcgatgcgctgagcgtcctgccgaccctgccggccaacagcttcgacgccctcatcactgacccgccgtatgccagcggcggtacacacgcgtccgcgcgcaaggcttcgcccgcgtcgaagtatggttgccacgcccacgaggacttcgccggcgacgaacgggaccagcggtcccatctggcatggatgcgcctatggctggccgaatgctcccgcgtgctgaaggatggcgcaccggtgctgctgttcaccgactggcgtcagctaccgctcaccaccgacgcactgcagtgcgccggcttcacgtggcgcggtatcgccgtctgggacaagaccgagagcgtgcggccgcagcttgggcgtttccgtaaccaggccgagtacgtggtttggggcagcaagggaaacatgccggtgaggcggcgagcgcccgtgctgcctggcgtggtgcgcgagagcgtgcgcaaggccgacaagcatcatctgaccggtaagccgaccgacctgatgcggcagctggttcggatctgcgaggagggtggccgtatcctcgacccgttcgccggatccggtaccaccctagtcgccgccgagcgcgagggctacggctggaccggcatcgagctgaccggccattacttcgacgtggcccggtcgcgattgccacagccctga

SEQ ID NO: 533365 - DNA, 699 bp, Stenotrophomonas maltophilia
atggaggcggtagcctatggtcagcttgcggtctacagcgaggagatccgctcgctgctatcgaaagaatggaacccgagcaaaatcatcaagaccctagtccttttcgatgaacgcagtgatcaaacatcggaattctccatctcggttaacccaccagcagatctggaggaacgtatccagagcggctccaacgaatggactgagggacttgatttcctgctgatcggcaactcgtatcgcatcccttggaagaagttcggaagcgcctacagcacgctagggtccttcctccatcttggaaagagcggagctaacctctatccaaaacaggctaagctggatcagataatcgcgatgctggaagaggtagcgaactcaactgtaatcgctgcactgaacgatatacgcgtcgggacctgcctgtgcggtggcgtgttggtggtcggacaaagccatcagcttggcaacgaacccatacgctgcggaaatggaagatgcaacgccatctacatggcaaaaccagacatgccgggcactatgtttctcgtcgaccaagtgacccttctgtgcccgtgcggggccaatgttccgttcgccagagaacgcatgctcgcaatcgagacgtgcccagagtgccgaacgcctgttcgggcgaggatcaacaagtacgcagccgccgctaccacaaccacttga

SEQ ID NO: 533366 - DNA, 1095 bp, Stenotrophomonas maltophilia
atggcatttgcaacacctggattcacgaaagggcaggtcgatcgtgctggcaatgcactccgccaagacccgctggacccggccgccgttgcggcagcgatgccgatcatcacaaactggcgatctgcgcatgcctatcccctcaacacgtttcaagcaacgttgcggaagaagctgaaggctttggggttggacgccaagagcgcacccgtgggtcagcggctcaagcgacttccctctatcgctgggaagttgcgtcgattcgattccatggcactctcacgaatgcaagacattgcaggtctgcgtgctgtagtgcccaccccagctgcgttaaggagcattcgccgggcctacgttgataacaccaactttccccaccagctgcgcagccagcacgactacgtgcaggatccgaaggatgatggctatcgaagcatccatctcatttatcggtaccagaacacgaaggctccggcatacgatggactccacgttgaattgcagctacggacccatcttcagcatgcttgggccaccgcagttgaaacagtggatacgtttgcgaatcaagcaatcaaggctggtcgacccacaccccagtgggctgagttctttctgttggccagtgcggcattcgcggccattgaaggaacgcctatgcctctggcattgaggggtgtgccattcgcagagattgtcgaccgtcttcgtgaagtcgaggctgcactaaaggtgatccttaagctgcgggggtttagcgttgcggcgggcaaaattcaacggattggtagaagcctttccacttatcacctagtagtcctagacactgagcgctttgaccttcacatcgagtcatttgctgcaagtgagctcgccaacgctaccgctgcatacgcagacgtagaagtcaggacggcgagtggagagcctctggacgcggttcttgttgcaggtggcagcgttgaacagttaaggcgtacgtatccgaattacttcctggacgcgagcgttttcgttaaacgcatagctgcgctttgcaacggggacataggagctggctcccgaaagaagcggggccttgctcgcgcctaa

SEQ ID NO: 533367 - DNA, 1479 bp, Stenotrophomonas maltophilia
atgtctatctttcccccgctgcgtcagcagtggttcggcaatgtgcgcggtgatgtactggctggcattgtcgtagctctcgccttaattcccgaagccatcgcgttctcgatcatagccggggttgatcccaaagtcgggctctacgcttccttctgtattgccgtaattacatcaattgctggtggacgaccagcaatgatctcggcggccactggcgccatggcacttcttatggtcggcctcgtcaaagatcatggtgtgcagtacttgttcgcagctacgattctgacgggcttgatccagatcgtcgcaggcgctcttcggctgggatcgctgatgcgattcgtctcgcgatctgtagtcacgggcttcgtgaacgcgctagcgatcctgattttcctcgctcagctacccgagctcattggaatgccgtggaccgtatatgcgatctgcgctgtgggcctcggcatcatctatctcctgccattgatcaccaaggcggtgccgtcccctctggtggctatcgttattcttacagctgcctcgatgtacttcggctttgatgtccgaaaggtcggagacatgggcgcaatgcctgacagcttgcctagcttcctgatcccagatgttccgctcacttgggagaccttcacaattctgctcccagtgtcagcaaccttggccctggtaggccttctggaatcgttgatgaccgctcagatcgttgaagatatgacggacacgcccagccagaagaaccgtgagtgtgccggccaaggcatcgcaaacactgttaccggcttctttggcggcatggctggctgcgcaatgattggccagtccgtcatcaacgtcacgtcaggaggtcgcggccgactgtcgtgcttcgttgcaggtgtcgtgctcctgctactggtcgtttacggatctgaccttgtaagccagattcccatggccgcattggtcgcagtgatgatcatggtcagcattggcacgttcagttggagatcgatcaaagaactgatgatccacccaaagagctcatcggtggtgatgatcggaaccgtgatcgtcacagtcgcgactcatgacctcgccaagggtgtactcacgggcgtcattctctccgcagtgtttttcacacgaaaggtcggcaaaatgctgactattcaggaacgcgtgatcgatgaggggaccactacctatcttgtgtctggtcaagtgttctttgcgtcggcagggcagttcgcgagtagcttcaactatcagaatgtccccgaggtcgtgatcattgatctgaagggtgctcacttctgggatctgacggctgtcgatgcactcgaccgagtggtgatgaagttgcgcgatcatggcgcccacgtggatgtctatggtctcaacgatgcaagcgaaacactggttgatcggctcgggaagcaccgaaagccaggagcgactgcttcgctcggacactaa

SEQ ID NO: 533368 - DNA, 447 bp, Stenotrophomonas maltophilia; identical to SEQ ID NO: 512131

SEQ ID NO: 533369 - DNA, 717 bp, Stenotrophomonas maltophilia
  misc_feature (524)..(539): n is a, c, g, or t
atgttgccggccagcggccggcactaccagacggtcaggtctgcttgcgccggatcggaatcgccgacaccgctcggaattggcaggtgccaaccttggttggcaccatctgtcagatcgcgatgtcgccggcactgtgccgaccaaggtcggcacccaccagagcgattcgcgtatggcgtcgcatttggtagtgctggccgctggccggcagatgcccatcatggaatcgtgaggttgccggccagcggccggcactaccagacgatcaggtctgcttgcggcggattggaatggccgacaccgctcggaattggcaggtgccaaccttggttggcaccatctgtcagatcgcgatgctgccggcactgtgccgaccaaggtcggcacccaccagagcgattcgcgtatggcgtggcatttggtagtgccggccgctggccggcagatgcccatcatggaatcgtgaggttgccggccagcggccggcactaccagacgatcaggtctgcttgcggcggatnnnnnnnnnnnnnnnngccggcactaccagacgatcaggtctgcttgcggcggatcggaatcgccgacaccgcccgaattttgtgggtgccgaccttggtcgatacaacctgtcagatcgcgatgctgccggcactgtgccgaccaaggtcggcacccaccagagcgattcgcgtatggcgtggcatttggtag

SEQ ID NO: 533370 - DNA, 156 bp, Stenotrophomonas maltophilia
atgtcggatagtgaatttgatgcctggttcgaatctgacgaatggccgcatttcgttgaccaggacacgccctacgagttgaagagcgcggatgctggctttcttccggacggacgtagagtgatggtggactacggggttgaaggctaccgttag

SEQ ID NO: 533371 - DNA, 687 bp, Stenotrophomonas maltophilia
atgttgggaattggccagggcatcctcggcatcggcgccttcaagcagcgcctgccacgcccggaagaggcgctgccggggcgtgaccagccgctgccgctgcacagcaaccagcacttcgtgaacagccatccgctgaaggaccgttttgccggcctgcagcagatccgtttcgcgctgggctgcttctggggcgccgagcgcaagttctggaccgaaccgggcgtgtacagcacctcggtgggctatgccgggggcatcaccccgaacccgacctatgaagaggtctgttcgggcctgaccggccacaccgaagtggtgcaggtggtgttcgacccggcggtggtgagcctggagcgcctgctgcagctgttctgggagagccacgacccgacccagggcatgcgccagggcaacgacaccggcacccagtaccgctcggcgatccacgccaccgacgaagcccagtacaaggccgcgctggccagccgcgaggcctaccaggcgcagctggatgcggctggctacggcccgatcaccaccgagatcgtgtacccggcaccggcgtactactacgccgaggactatcaccagcagtacctggcgaagaatccgaacggctactgcggcatcggcggcaccggcgtgagctgcccgatcgggttggatgtggaggcgccgcgctga

SEQ ID NO: 533372 - DNA, 891 bp, Stenotrophomonas maltophilia
atgacaaacggatttgcaaaagacgggctttcccccgaagaccttgcctggcgcgtgcaggcgcgcactgcgctgcaggaacggcgctatgccgaactggatgcgttgcttgctccacatgagctggcctggctgcagggagagaatgcgctgcccggcatccgctggcggctgcgcaacctgcacgacgccacgctgacgttggaagcccgcctgcaactggcccagcagtgggcttcggccgcccccggcagctactacgcctggctttgcctgggcgcctgctggcaggacgctgccggcgaactgcgcagcgccgacgttgccgcactggtcgaagacagccagtggctggcggcacagctggcccgcgatcatgccgtgcacgcctacctgcaggcgataccgctgtcgccacgacctgcgttggcgctggatggcatcaagcgcatcaccagctacctgcgcgaaccgaactggctgcgtgcgctgcaggccgggcagcccgccgcatccgatgacgccgcgctggccgagcactaccctcaagcctggccaaaggcattgcagctgctgtcgcgcttcggtacgccgttgcagacgctgccggatacgctgcccccattgctgcgcgagcgcagccaggacgatttcgacgcaccactggcgtactggatgcgcctggtgctggagcagcgcccggacgatctggccacgctggaagacaccctgtacttcctgtacccgcgctggggcggcagccatgaggcgatggagaacttcatcgagggtagctggtgccgtggcctggaactggcgcagagcaacgcgctgcggtggcacaaggagcaggactggatgggcgatctgccccaccgtgaggatgcctag

SEQ ID NO: 533373 - DNA, 1017 bp, Stenotrophomonas maltophilia
atgcgcgaaacagaacacctgcatcaccagcatggccagcaaccccagcggccatgcccaccacagcccggccagaccgtgccgggactgcagccacatcgccaacggcagctccagcagcaacacggcagccatgcccagcaatgccggcaacagcaccgtgccgctgccgcgcatcactccgaccagcaccgcactgcctcccatcgccagcacgccccacaccaccgtgcgcaactgctgcgtggccagttcgcgcggctctgcggccgccaggatcaaaccagtcagccacggcgccagcgccatcaccagcagcaccacgactgtcagcatcgcaagacccagcatcaccccggtgcgggcgatggcgggcagccgtgccgtacgccccgcgcccatcgcatgcgccgcgaggatggtggcagtgatgcccagcgacatcgccggcagctgcacccagctcatcaactggttgaccgcaccgtaggcggccgtggccgtgtagccatagcggttgatccagcccagcaatacgatttcggcaatggccaggctgagcatctgcagcgaagacggtacgccgatgcgcagcatcgcgcggatgagcgcgccgtcgaaccgaatggcatgcagcagctcgcgccccggtgccaggggatgacctacccgatgccagcgccacagcaaccaacccagggccaacagcgaggcaaacgccgccgatacagccgcactggccgaccccagctgcggcaggccagcccagcccaggatcagcagcggcgtgcacagcaggccgaccaccgtggccagcagcagcgcatgcagcggcgttttggcatcgcccaccgcacggctcaccgcagtggccagccacagcaggaagaacgccggtgccgccagcagcagaacacgggcatagacgatggattcgccgaggatcggcgctggcgtgcccagtgccgccagcagctgtggcgcgaaaccgccgcccaccgccatcaccagcactga

SEQ ID NO: 533374 - DNA, 678 bp, Stenotrophomonas maltophilia
atgatcggcgacctagcggaaccgcttgagaatcgatgtacgcccgatcgcggtcgagcaacccttggtcgcatgatccagcacggcaagtccgtcgcccaaattgcgattcatcgcgacgcagaacttgatccatacctcgtcttccacgctactcctgtcatattgaagcagcccggccaatttcgatatgtagttgacgaagtacaaagaccgagaaacatccgcggcaagaagagtacctacgtcaggatatttgctcagatcgacttcaagagcgcgggcggaagcaaggttttccacaagcgcctctgcggccttggcaagcccggcatcactccggagagccatgcgttcatcagccgactccgtcgagggcgcggcgaacgagtacgcagaactgaagttcctaattgctgcttgtgcagattcaagctgcgtgacgtgagcggcagcaaaaatcgcactcacacgtcgactcgcaaagaagcgtttaacagcgggaacagagagcgctgtcacaacacccgccacagtgccgatgctggcccatgcgtcccaatttactacgcaggtttttccaagccaccagcactcacttatcccgtcagaaaagctcatttcagatatccccctgattgccgggatgaagtttgccacgagtctgtaggccaatga

SEQ ID NO: 533375 - DNA, 321 bp, Stenotrophomonas maltophilia
atgagcaccgtggaaaccccgctggcgatcctccaacgcattgcagccatatacggtgagttcggcgccgttgccgcagccacgcccgacttcatgattcgagtgggcgagtcgatgctgaagaagcaatcaatcgatctgcacgctgcccacaccgcgttctctgacctggtcgaccagggcgaccgcctgactgcggcgttccgcgcgcttggtcaatccaatggcatgcaggctcagatcagcgcgcaccgcgaatgcgaagcgtcgatgctggcattcgccgctgccctcgcccgcaccaaaggtggcatcgcatga

SEQ ID NO: 533376 - DNA, 861 bp, Stenotrophomonas maltophilia
atgttgccggccggccaaccaggctcgggatcaggatcgggtggaactggaggccgaacgatccaaggaagcttggctgcactcccccagcgaagtcgccaagacctgggcaaacgatcgccgcacctccagctcccctgccattggcttcgcgctgaactgcttgaaagccaacgcgcctctgtcgatgcgctcacctgcccctgcgaagcccagagcagagttcttcccctgccgaggatgcctggcgtgccccatcgggatcgcagcgacacgctctcggagtccatggaccgccacggctgggcatttgaccttcgaagaacgccctgcgaagtccgccaccggacggtgccttcacggctcagcagtggggtaagaccccatcccgtgggagtggcgctcccctccaggcgctgcgcgccacgccaaccggaagaggccacaatcgacgcagtgcccgcgcctccccaaccaaccagaatcatggctgtgcgcgggcgagccaccgaccatgagagcgacgaactagcccgaaggtacgcgcgctcgggttccggcggctcctccgtccaccagtcgacgccaagattcaggccgaccagggcaccgcccgcctcaacgggcgggcccaggttcagcactaccctgttgccaagctgctccattcgctactcgcgctcagccggcgcaatccagtcctggattgctgcattctgccgacctaggtcatcgaagccgacgaccgtgaaacggaatgccggattgagacgatcgactctccacgttccgtcgacgcggctcatcgtggacgctacgcagaccccactgccgcgctcaaagaccataatccggccctga

SEQ ID NO: 533377 - DNA, 681 bp, Stenotrophomonas maltophilia
atgcgcgaaatgggaggaaccgcgctgtcggcggaccacgagatatcacagggggctgttatgacgggatcaaagcacggaatagcgagggagatagtggtagcggcagccagcacgctcgtcgctgcggcagtaacctccgcagctgggtggctaagtccccgcgcccaagctgccctgcagggcccattggaactccgcatctgggaggcaactgccttgcttgccatcacgctctttctaggagccgcgacaggcctctggatcggctaccggaagggctcggccagctcggcaccagtggttcgaaacagcgcctcaccgccgggcagcgaggggagaaccgccctctcccccgccttctatcccaggccattgcacgatcactgcattcgcgcgcttcgcttcaaagacaatgagtaccaatcggtgaacggcatcgccgaacacttggcaagcattggggtccccaccccaaaatcagacatcgagcaagtgcttgcagaacttgttgagcatgagtgggtgagcaatcagatcaacgtgcagacgggatgggagtacaaactcattggaggaggagtggcctacgcccgagactgcggcttcccggtgaaaggacatctcagaggcacacgatccactaatcgccccagcagcgttcatcgccgtctagagtaa

SEQ ID NO: 533378 - DNA, 228 bp, Stenotrophomonas maltophilia
atgcagatgcaggataagggaacgacccgcattgggttcaccaatcgcaaccagcaacagaacatcggtgcgacaggactgtccggaacggattatggccagtcgatctacgtcctgcgatgcggcctgtgccacgcgacctatggggcgaatggcagcgacatccatctgcgcaagtgcccgacgtgccaaggcggtaggcccggattgccgttcgacgcggtgtag

SEQ ID NO: 533379 - DNA, 444 bp, Stenotrophomonas maltophilia
atggactccggctgggtgctgtggtggaacggccgtcagatcgcccacatcaccccggtcaaggaacgtggcgtgcgcgtgcatctggatgcccggaagttgtgggagaccaaggacgtatgggcggccagcatcaaccaggccaagcgctatgccgagcgctggtgcgcggccaggctataccgcgatctgccgctgcgtcaggccgtcgcccggctgaccgacagctccccaatccagccgtcaccgccactgccagggctgccgcccacccgggagcagcaacaacaagcccggcgtctggccgaggctggagccaaggaggtggagcggatcaaggcagcgctggagccgcgcaaagcaccagtcaggaccaagcgtagggctaaggatccccatagtgcgtgggtgaaggggccgcgtacacaaactcgtgtgtattga

SEQ ID NO: 533380 - DNA, 279 bp, Stenotrophomonas maltophilia
atgaccactgatagatggaagacggcagaacggaaccttgccgacgatgagcgcgagcttgcacataagaacttggacgaagcaggcatgctcaagaaggaagcagcaggcgtcctaaagaaggtgataggccaagggttgcaatccctgacccccaagcagcttggggtttacgaaaggcacattcgcccttctttggtcgaaaagtgcggcggccgctgcgacactctcgttccagcaggcgtctcgctctgcgagcactgcaagatcgagtactga

SEQ ID NO: 533381 - DNA, 174 bp, Stenotrophomonas maltophilia
atgacacgttccgagtggaaacaggcgtggcgttttgcgcgcaactaccgccgccacggcgctggtttcgccgtgtacgcgagctggaatttgttcgcgctgaactgcctgcaatcccgcgaggcgcgaagcgccgagctgggcttgtctctctctccgacaagtgacaagtaa

SEQ ID NO: 533382 - DNA, 408 bp, Stenotrophomonas maltophilia
atgcagacgctaaataaagttcttgacatggctcgcggcatgtgcagcagagacagcgacagggcgctggcccaagcgctgaaggtgacgcccaccaccatccttggatggcgaaacggcagcaggcggatcaccgacgaacacctgatggcggtgatcgagaaggcgaaggccgacccggcactagcagtgctgatccgacaggagacggcagaaacgaaggccgaaaagaagggctgggcgacgttgtgggacaggctcagcgcggcggcggcagtactggtgctggtagtggtcgcaacgccaggcgtcgcacgcgcaaatcccctgccggttcaagggtttagcagcggccacggcgacagtatgtatattatgttcaaagcatcccgaaggacggcggcgtag

SEQ ID NO: 533383 - DNA, 162 bp, Stenotrophomonas maltophilia
atggccacgcgggccatgtcctcggtcgtcagcgcgcaattgtatgcgaactgcccgctggccatggcccatcgacggggaatcggcctgccccctcccaaatcaacgctgctggccgggcgcccctggctcaccggccgtttgcagaccctcccgctataa

SEQ ID NO: 533384 - DNA, 192 bp, Stenotrophomonas maltophilia
atgaccagtaacgatcagagtcagacgtcgactgaaaattcgactgcccttcaggcgggaagggatatcaattttcagcagggaatgacatatcaagacgttaggcaggtggcgcacgacctttttgaggctaacttctacgactctcagctgtcgcccgggaggaggctacccgtcgggcagaatacataa

SEQ ID NO: 533385 - DNA, 204 bp, Stenotrophomonas maltophilia
atgaaagacaccctcatcctgaccatctccaaccagaaatttagcctcagcccggcagaggccaagttcctggctgagcatctgcgcacggctgtggcacagccgaatctcggcttgaacttctcacagcagcgaactgggcagggcggccgcatctcgctctcgcgctgtgtcgccgctagccgtaccaccaccgattgctga

SEQ ID NO: 533386 - DNA, 420 bp, Stenotrophomonas maltophilia
ttgagcggctcggcatcggtgggcgaacgcgacctgctgctgttcggtgcgctgggcgggcgcggcctcagccgctataccgccgacctgaccggctcgggactggatgcggtggtcggcgccgacggccggctcgacgcgctcgacctgcacggtggcttcgtcggctacacccattactggtccgagctgtggcgctccaacctgatctttggccagctgaccctggagcgcaacgccgcactcgccgctgatgcattccggcagagccgctacggcgtgttcaacctgatctggagcccggcgccgtcctggacgatgggcatggagctgctgtacggccggctggaacagcagggcggcgcacgcggcgacacggtccgggtgcagggcagcctgcaatacaacttcatcaaatag

SEQ ID NO: 533387 - DNA, 276 bp, Stenotrophomonas maltophilia
atggcgcgcgtgcgctactacggcgcctggaccgattccagcggcaatgcagtgggcgacatctaccagcgcttcggcgcgatgagcttcctcgacctggccgtcggctatcgcatcaacgaacatcacagcctgcgcgtaggtgccgacaatgtgctggacaggtatccggacgaggcgactttccaggccagccgcggcctggtctactcgcgcaacgccccctatgacaccgacggtgccaatctgtacgcgcagtatcggctgagcttctga

SEQ ID NO: 533388 - DNA, 324 bp, Stenotrophomonas maltophilia; identical to SEQ ID NO: 513370

SEQ ID NO: 533389 - DNA, 522 bp, Stenotrophomonas maltophilia; identical to SEQ ID NO: 519325

SEQ ID NO: 533390 - DNA, 771 bp, Stenotrophomonas maltophilia
atgcggactgatccggccgttgccggtgccgcattcgcgccactggtggtgattcccgtctatgaccacgagcacgccatcgcggcggtggtcgatggcgtgcaggccgcggggctgccctgcctgctggtcgacgatggttcgcatgatggctgcgcggcggtgctgcgcgcgctggcacagcgccagggcgtcgacctgctgcgcctggacatcaaccagggcaagggcggggcgatgctggccggttttgccgaggccggcgcgcgtggctacagccacgtgctgcagatcgatgccgacggccagcacgataccgctgacctgccacgcttcatcgaagccgcgcgcgcccatcccgaggcggtgatctgcggcattccggcttacgacgccagtgttcccaaggcgcgcctgtatggccgctacgccacccacatctgggtctggatcaacacgctgtcgctgcacctgcgcgacaccatgtgcggtttccgcgtgtatccgctgccgccggtgctgcgcctgatcggtgaagagaccatcggccggcgcatggatttcgataccgaaataatggtgcgcctgtactggcgccggctgccggtcgagcacttggccacgcgggtgacctatccgtccgatggcgtgtcgcacttcgatgtgtggcgcgacaacgtgcgcatcagccgcatgcatacccgcctgttcttcggcatgctctggcgtgcgccgcgcctgctgtggcgccgcctgcgggggcagcgctga

SEQ ID NO: 533391 - DNA, 237 bp, Stenotrophomonas maltophilia
atggttgttccaggaaactgcctgcttgcagccctgttcgccaaagcctgtgcaccacggcgtgttcgtgtggtgaccgtgcggaatcgtgcaggtcgggtgcacttcatgtgggagagggacggggatctgtttgagttctatacgcctggcgcgtccaggtgttcctacctgcgcaatgcactccgcttgggcgaggttcgtcgcgttcgttctgctcgtacggaggtggcctga

SEQ ID NO: 533392 - DNA, 390 bp, Stenotrophomonas maltophilia
ttgctctgcgagtgcatctccaaccgcttccgtgagattcgtgcgcgtgtagagggcaagacctccttgctttctacgaacaagaaagttgaccggaataggagccagcgatccgccaacaaaggcaaggatctcaacaacctcaacatccgcgctgaggctaaaaaacctcgattccgcgatctcaaagaatgtttctttatttatttccacctgtctccggacgcgcggcaggtctgtgatcacactaaagcgccgcgcaacagcgcgcgcagttgctttgggcccctcaagcacttccgtctcaccgtgtataggaatagccaccgccaaggagcgagcggaaccagcctttaccacaagggaaaacacaaacgcatcgagctttga

SEQ ID NO: 533393 - DNA, 1398 bp, Stenotrophomonas maltophilia
gtggccaccggagcagcccagaccaagcacactatcccggacatcgtgaacgtcctgcttgaagagctggtgcaccatcgctacgaactgcccggtttccgcactctggagctggccgccatcggcgcccgtgagcgggtcaatctgggctactaccgcagcatcagccacgcactgacgcctgccacgcgcacgctcatcgacgaactgctgcgcgcaccggaagggtccaggttcaccggctggcaatcactcaagcgcgagcccggccggcccaccaacaaggaagttcggttctatctgcagcacatccgcatgctgcagcagttggccgaccagctgcctcccattgatgtgccggtgcccaagctcaagcagttccgtgcgatggctcgggcctatgacgccagcgagctggccgaactggctccggacaagcgctatgcgctggccaccatcttcattcgcgcccagcatgccaagacactggatgatgcagccgagttgttcatcaagcaggtgcgcgggctggagaacacggcccagcagaaattgctggcctaccagctcgaacatgccaaacgggccgacttcctcatcggccagctcaaggaaatcctacaggcctatcagctcgacggcagcgatagtcagcgcgtggatgccatcgacaacagcctggaagcggaagtgtcgaccttgctggccgaatgcgaagaacatatggcctacgccgggaagaactacctgccattcatgctgcagccctatggcgcggtcaggccgctgctgttcaatgggctggagctgatgaaacttcgggcgaccagccacgacgccggcatggagccgctgatcgcagcggtgctctcgctgcgcaaccagcgccgtgagctgatcgaggtcgcctccctcggtttggacccggaaaaggactttgactggatgtccaagctctggcgtcagcacgtgttcggcaagcgggccagtgcagccggcgccggctggatgcaccgtaagtacttcgagctggccgtgctggtgcaggtcaaggacgaactgaagtccggagatctcttcattcccagcagcgaacggtttgatgactaccgtgagcagctggtcgatgaagccaccttggcccaggaactggaagcctacggccaggtgtcaggcctgcccaccgacgccgagtctttcgtggcgggattacgtgcacaactgacctccctggccgatgaggtcgacgcgcgtttcccggagaacgtacatgcggacatcctggatgggcgcctggtgctgcggaggggcaacgcgccgaagtctccagcgcgattaccaccgtggatcgcctcatcgccgaacggcttccagaatccagcatcgtcgatgtcctga

SEQ ID NO: 533394 - DNA, 684 bp, Stenotrophomonas maltophilia
atgagagaagatagcgagcacctgttagtgatggcgctgatcaagaccgaggcggcgggtagtgactaccaaacgctcacgaattgctgcgaacgtctactgcagcaatcgcaccatatccgcaactgcgcgatgcatcttttcttgggttcgcttcaacaacgcgtatgtagagacccacgcctcaccctcgtaggtcactgggtcatcaaaccagtggtcgggcgcgatgtactcgcccaaatcttcgctgagctccctgaaatggtaatacgcgctctgcgcggcgcgacccgccgcccccaacagccctatcgaaggcaggaccttctcaagatcggcgaacctcgcgcgaagatacccgataccaaagtcctctcccgactcgtcggtgcctatgaagcttggcttgcgcccgctatcaagctgtgcgagcgcccaagtaagagtcctctcggccttcttgaactcaggaagaactaccaaggcagcatttcttgccgtggccgctgctgccgcccgcgcatcgcgctgggagcgaaagaacagccaaacactcaccgctacgccaaccatcgaacccgcaccactcacccaatcagcaacgctgcccggttccatgtccgcccccttcaacgcctgccacaaagatacccaaattttcgggggttggttcatgcctga

SEQ ID NO: 533395 - DNA, 243 bp, Stenotrophomonas maltophilia
atgcgccacctggccgtacccctctactgcgccgtcatcgtcgcactgctgctggcgctgctcgcgcgcgccgtctacaccggcgccgcgtcgttcctcctgccctgcggcgccggtatcgcctacttcacctggtgcggcgtgcgcgacctggtgcggaactggccgtcgttccgcgaggaaatgcggcagcgagcggaagaacgacagcgcgcgccgatgcccgcagacgacacccactga

SEQ ID NO: 533396 - DNA, 267 bp, Stenotrophomonas maltophilia
atgtacgtcgaggtgtaccgtcgttccgggctgtgggcccgattgactggaactgtcgggtggcgttggcgcttgcgcacgttggatggcgtgactttgatcgacgcgcgggaaacgttccaagatcgacgctgctgcctgtcgcttgtgtcgctgctcattgcagggctcgacgcccgcatcgtagatacgcaggtgaatcgtgtcctgcgccgagtgggcaacaactgggccgagggtgaagagttcgaacctatcgctggttga

SEQ ID NO: 533397 - DNA, 192 bp, Stenotrophomonas maltophilia
atggccactctggccctcaacaccgaaaccgcccccggcaccgccaaggctgacacggtcagcgggaaggtcgtccaaaacttcggcgccgcccggatctactacaccgccgacgaggcgaccgctgcagcgcgcgcgctgaccgccgctgcccagcagctgcgcgccgaaacccagggcgccgccgaatga

SEQ ID NO: 533398 - DNA, 399 bp, Stenotrophomonas maltophilia
atgccggaggacgtaaaggctgactacctggaggccgcctcaattctggcaacctcgccacggggcgccgcggcgcttcttcgccttgtagttcagaagctgatgattcatctcggaatgaaaggcgagaacataaactccgatatcaaagctctggtcgctgctggcctccctgccatggttcagcaggcgcttgactactgcagggtcgtaggaaacaacgcggttcatcccggtgagatcaagttggacgacaccccagagatggcatggacaatgttcgagatgatcaatgtcattgttcaactgcggatcgccgcgcccaagcaactcgagcagatctatggagaactgccccaggcggctcgtgatgcaatctcaaagcgagatactgcgtaa

SEQ ID NO: 533399 - DNA, 270 bp, Stenotrophomonas maltophilia
atgaatgacaaatggaatccgcggctgtggctgcggagttggctgatcaagccctcccaggctgagcgttctgagcagcggaccggtcaaccggccgccactcagatgacccttgaagcatcagccaagcaggccggccggaccgtaggcgccggtttcgttctgttggctgatcgacacgagatgacgctgggaaaggaatccgagccgacattccgtctggaactatccccatcttgtcgggttgaagggatcaggattcggcgttag

SEQ ID NO: 533400 - DNA, 288 bp, Stenotrophomonas maltophilia
atggaaaatggagaaattcagctactgaaggcggaagttgagaagctcaaggaggagctgagggagaacatgggcagaatgttcgcgtacgaaacaaccttctccgccatcctcagcatgtggggcaagcctgctagcgaggtggaagcggaactgcgccgcgcccttcaggtcgtttctgatgacgtgacccggcaaaatgcccaccgcaccaccatgatcggattcaatgcctcagccgatccattcttgaaattcatcggcggagccgctaacgccgaatcctga

SEQ ID NO: 533401 - DNA, 426 bp, Stenotrophomonas maltophilia
gtggacaagaaatggattgcgatttccttactgctgctgtctgcctgctcgcagcgtgagcagcgcggcgagcccctttcagaaccttcgacagagcggaatgcagtttcaggggatgtggccgcggtcgttgagccacaggattccaaggagccgcgagcgcttcctgtggccgatatcaccacagttgtgacctgcacaggtgcaaccctgaagatgggcgatatgaagctatggaagaagtgggtaggtgagtctcaacggagattcgcagagatttacccggctaagaccacgggggagatcgaggcgtacacgctggagcgcgcgctggataagcgaagagagcttgaacgtgtgggaattgggacgccgcgagcgttcacggattacttcaacaagaactgcctgggcgtgatcgagtag

SEQ ID NO: 533402 - DNA, 273 bp, Stenotrophomonas maltophilia
atgagcgccgagatcaatgaaatcctagaccgcctacaagcctgcgaggccggcctcgaaatgcaccgcggctacctcaaggcgatggagtatgcgctgcggatgtgcgtactcacccacccagcgcctgaaaccctttcagacgcgtggcgtcaaattctgcccgccattgcggcgacacacagggcagactccagcgatctattcgctggagcgttccagcaatctctaacagttctgaccgagcaaatcggcgaagtccaagcaagctag

SEQ ID NO: 533403 - DNA, 735 bp, Stenotrophomonas maltophilia
atgtctcattgtcggcggcggcctgctgttgagcagccggaaaccgtccgccggtcagtaggcgcggaggagctgcgcacgtcccgccctcacccaattcttcatcggatccctcgccctgggcttggtctccttcggcggtcggcgcggttccaacgcttccttgattcgcgccagttctgcggccccggcctcggccaagcgcctagcctgttgctgctgctggcgggttggcggcaggccaggcagcggcggctccggctgagacggggtgctgtcggtcagcctggcaactgcttggcgcaggggcatatcggggtacagcctggccgcacaccagcgctcggcgtagcgcttcgcctgtcggacattggcggcgcgcacttccttcacctgccacatcttctggccttccatccacaggcgcactccaggaccgccatcggcggtaacgctggcagtctcgcggccgttgtaccaaagcgcccagcgctctccggtctggacccagccagagggtgtcggtgctgcgcgggagccttggtagccgtgcgagggaagcatggtcggaaggatacggccggccgtcgcacatcctgcgaacgcggcggcgacctccctgaaccgttccacattggtagatccaccatgcatccagattcactgccacgacgtatgtcggatgtctgcacaccgcaggcaacctatcaaggaacgcacagtgaaaactcttaa

SEQ ID NO: 533404 - DNA, 852 bp, Stenotrophomonas maltophilia
atgtactcgaacaagctatacacaccgctaaggtatccggggggcaaagcgagatttgcccctctggtgactgagatcattcagaagaatggcctcaacggcggacattatttggagccctatgcgggaggggcggggctggccttaatcctacttgtggataaggtcgtagagcacatccacattaacgacctcgatccggcggtcgcgtcattttggcgtgcggctacagacggcaccgatcgcttgatcaatctcgtctcgaccgctgaagtaacaatggatgcctggcaccattggcgatctgtgatgcagggtaaaacgcctgcttcagcgctggagcgcgggttcgccacgctttttatgaacaggacgaatcgatcaggcattctcaagggtggcgtaatcggggggaaacttcaggcaggggcttacaagctcgatgctcgctttatgcgcgacaaaatttgcagtcggcttcagctgattagggacaacagcaagttcattcacgtctatgaagaggatgcgatcagtcttcttaggcgatgcaatactcttgtcccggctaaatcccttgtttatttggatccgccatactacgtaaagggcgcaggcctttatcggaactcctacaagcacgaagatcacacggaaatcgcagactttctccagtcgggagaactcggcctaccgtggattacatcttatgacaatgcagcggaaattcgggaaatgtacgctgctgagaacagcgtcacttatggactgaactacaccgcccagcgccgatatgtcggcgacgaggtcatgttctttagcagcgaactttcgcacgtgccgtctggctaa

SEQ ID NO: 533405 - DNA, 1575 bp, Stenotrophomonas maltophilia
atgaagatcgagttcgcagatcgggtaactctgattgctggccacaacggcataggcaagtcgacaattctcgggctactaacaaatacatttggcctaaccggctcagagcataagacctacttcggcgagagctacttcaagaacattgaaaaaatagttttcattgcaaaggaggaagctgtagattccaaggctagcccgaagtccaatccgattgtctccgcaacgctcggcgatattactatccgcaaacgctgcagtgttattgagcgcaagcaatggaaccgtgctcgagtggtgccacgcacagtggaccctgatccgaacgacccggttggccactcggccaagataccgttgcccacgatttatctcggcatgcgtcgccttgcatcgataggcgagtccggtgacattgatttggctagctcgctgctgagcatggaggattcggaccggaaggtcattgtggagtttgtgaagtctgtcattctgggaatatccgtaaacgaccaggtcactcaaacgcccgtgaaagcgaatggtgtggtttctgttcaacccggatttgacgcccacggggcaatggcgatctcggtcggacaggatagcctgggtagcatcgctactgcgttcgcctccttcagcaagctgcaacgcgagcttggtgaagcctaccctggcgggctgctcgtaatcgatgaaattgacgtcggcttccacccgcatgcgcttgagcgcttggccaaagcgattaaaaaatatgcgcgaaagtttgatgttcaggttattgccacaactcattccccagcgctgatcgaatgtatacacccgtcgggaggcggggatccaaaatctccggattcggtagtttacttgctcgatacgaacactcctcgcatcgccgaggatcagtcacttaaatcgattcttcaggacatgtcattgaggcaggacattcccgtcccgacggtgaagcccaagctgggcgtctattttgaagatgaagaaggtcggcagcttttcgacgagctgttcggaaaaggaaagaagatctcgatctccaagcgcacaggcgtttccatccagccaattgctttaggtgttggaggttcgaacttacttcagctccctgatcacgatcccatcttccgagatcgcatcctagtcgtcgatgctgacactactgttccgaagaagtccaaggatcgaggcaacactgcaaagttgccttgcccccccggcgcgcaaggcacggaccgctctccagagaacatgatcatcaatttcgtaagacagctgatggacgccaagactggcccatattataatctgatgttgcgcatcaacgtctccaatccgtcaagtgataaaatcagagcgaagttcttttcggaggaagtcaagctgagcgacagagtttcaaccaaaaaatggtggaacaagcactggtcgacactcaagtcttggaagatcatcgacctctggatggagcaccattccgctcaagtttccgccttcgtgagcgagtttgaatcggcggttatccgcacggcgactcgccttcaatag

SEQ ID NO: 533406 - DNA, 351 bp, Stenotrophomonas maltophilia
atggcgcaacccaaccgttacacgctcgcatggtcgctgctggccatgttgcttgcggccgggcaacccgccaccgcgtcagacgatgccatcgagcgcgagcagcttgcggctctggttcgccagatcgacctgattgatcgccaggccgagcacgccgccctcaccgctccgcaggagcgcgcccgctaccacttcgaccatgcccgcttgcgcaaggacctccagcgcgttcgggccggcatccaggactacctgacgccgccgcgcgcccagccgcgcgatccggtcgagctgtccggcgactaccgccagtccagcccgccctccgaccaggaggcaccccaatga

SEQ ID NO: 533407 - DNA, 201 bp, Stenotrophomonas maltophilia
atgactgacgccgaaagcgaaatcctgacgcttgaagaggtcgcggcatacctaaaagccggtaagcggacggtctatcgcctggctcaaaggggagagatcccggcgttcaagttgggagggacgtggcgtttccggcgatccgagctggatcgctggattgctagcagcattagcaagatgaaaccggagacggactga

SEQ ID NO: 533408 - DNA, 3087 bp, Stenotrophomonas maltophilia
atgatgacaaaaagagagatttctcggggtgcaatttggaggcagtgggacctgcatgtccatacgcccgcatcattccattggtcgggagagaggttcgaaaacgacctctcctctgcggcaagcaagaagctggtcgatgaaatgatcgaggccatgaacaaggcagaacctgctgtgttcgcgatcatggactactggacattcgatggctggttcgcgctgaagcaacgactctctgacgcggacgcgccaaagctcacaaagaaggtctttcccgggattgagttgcggctgtcagcgcccactgaaaagcggctgaacgcgcacgtcatattctcagacgagatcgccgatcaacatctgaaggattttcttgccaatctcaagatcgagcgccttgatcgctccgtatccaaggacgcacttgtagatctcgctcgcgcgactgccgccgatatgctggcaaagaaggggcacaagaaggaaattgtcgaaagcgactacgcggatgcgctgttggctgggtacaagttggctgaagtaaaaacggagagctacaagaacgcgattgcacgtgttccgaatgagttcgcgattgggttcatgccatacgacaccagcgacgggcttacagaggttaaatgggaacagcactactcctacttcctcgggctctttgaatcgtcacctatcttcgagtccaggaatttggacctgagaacagctttcctgtgtgagaagacatcgaccaaccacgcctggatcgataatttcaagcacgggttgaagggtatccccaggctcgtggtggcaggcagtgacgctcattgctttgttggcgccgccgggaatgatgacaagcggggctacggtgacttcccttcagggaaaagaacgtggatcaaggccgacccaacgttccacggccttaagcaagctattcttgaaccggcaaaacgctccttcattggcgacacgccgcccaaggttcaagaagtcgactccaacaagaccttctacattgaatctatcgagattagcaaaacagtggacaaggctggcgtcgggcggtggctgcacggctgtgacatcccgctgaatcccgatcttgtcgccgtcattgggaacaagggaagcggcaagagcgctttggcggatgtcatcgcgacactcggcaactccaagcaatccaagcacttcagctttttgaagaaggatcgcttttggggcaagaccggcgagcccgcacggcacttcaccggaacgctgacctggcgagacgaaagcaccgagtcccggccgttgaatgaatcgccatcagaggaaaaggcggagcttgttcgctacatcccgcagggctacttcgaagagctttgcaatgagcacgtatcgggcaagtcgaacgcatttgagaaagagctgagggcagtgatcttctcccatgcgagcgaagaaatgcggcttggcgcactcgactttgatcagttgaccgaacagcaggagcaatcgctcaggaatcgattgggtgagtaccgtaaggagctggcatcgaccaacgcagacatcgttcgcatcgaggagcagcttcaacccattgagttgaagaaactcaccgatctgcttttgctgaagggaaagcagatcgaggaacacgacaagctgaagcctgcggaggtcgctgcgccgaccgaagcaatgagccccgcgcagaagcaagcggctgaaggcttggctgcagcaactcaacaggccgaagccgccagaaagcgcagccaagagattactggcgagaccacggaactggccaaacgccaaaaggccatagggaatattcgcgagcagttgaggttgcttcagcgatctttcgatcaagccgaaaaggccgtctccgacgatgtcaaacttctcggtttcgcctggaccgatctcgctgccatcgaaatcaagaccgccgttctggaccaaaaatcgaccgagttggcaacgaagcaaagcgagataaaaaacgaggccgaaaagctggcggaagccctcaatgccgtcaccgcaactcagcaaggtctcactgcaaagttgaacgctccgcaacagcagtatgaagcctatcagcgccagcttgcggaatggaacgcaaagcgtgacgaactcatcggctcaatcaccgagcctgagaccaaggtcggattggaaaccaggattgagcagatcaaggaacttccgcagcagctcaaggctttggaagcgaggcgtttgcagctgtccggggaaatcttcgacactcttgatgcacagcggcgtgcgcgcgcggaattgttcaagccggtgcaggacctgattcagaagaacgtcctgatacgcgaggactacaggctgcagtttcaggcaacgctggcggcatccgctgatgctatcgccgaccaattgtttgctctgatcaagcaaacctcgggtgactttcgcgggcaggacgaagccctggcgaccatcagaagattgttcgatggccatgacctgaacactaaggatggggcgctagccttcattgcttccttgcaggaaaaggtgttggcagctgcaaaggcctccggttcagatgccggaatattcagcttgctgaagaaggggcagcctgccacggctgtctatgacctcatctttggcttgaacttccttgagccccggtactcgctgctcttccaggacacgcagatcgagcaactgtctcctggccaacgtggcgcgcttctgctgatcttctacttgctggtggacaagggaaagacccccatcattctcgatcagccggaagagaatcttgacaacgagacggtgttccgtctgctcgttcccgttctctccgaagccaaaaagcagaggcagatcatcatggttacgcacaaccccaacctggcggttgtttgcgatgcagagcagatcatccatgcgaggttcgaccgagcgttggactccaccatcagctatgaatcgggagccatcgagaacacagggttgaacgaagtcgtcgtgaccatactggaaggtacgaagcccgcattcgagaaccgatacgggaaataccattga

SEQ ID NO: 533409 - DNA, 1803 bp, Stenotrophomonas maltophilia
atgagcaagcaaaaactagaactcacctggatcggtaaggagaagcggcccaaactggagccgcgcatcctgcttgaagatcctgaaaagtcctatcacgccaaacatcgtgtttccgacaacgacatcttcgacagccggctgatcttcggtgacaacctgctggcgctcaaggcgctggagcaggagttctccggcaaggtgaagtgcatctacatcgacccgccctttaatacgcaacaggcgtttgagcactacgatgatggatacgagcactccatttggcttgggctcattcgtgatcgcgctgagtcgcttcggcgattactgtccgatgacggaacgctgttcgtgcacatcgacgacaacgagcttggctacctgatcgcattgcttgacgaagttttcggtcggcgtaatcgcatcggggtagtgaccttcaagcagagttcggcctcagggccgaaagccgtcaatccagggcttgtcacgacaaataactacattctgtactacgcaaagaataaggatgtctggtctccgaacagagtctatgttcccgggcctcgcgatgacaggtactccaagttcatcgagaactatgaggacgatttccaagactggtgccttatcgggcttcgtgaggcattccttcgaagcaacaaacttcaatcgtgggatgacgccaaggcgaaattcgcagataagctagaagccaagttgtccgattttgtcgtgaccaacgcccatcgagttgttcgtaccgcacgggttgctcccaaggatgtcaatgagtcggcgagagatgcccttgctcgttcaaccgctgaccgcaccaaggtgtaccgatctgtgcgagaggacaaggatgactactacttcctcgggggcgagcagctagtcttctacaaagctaagactcgcgtcattgacggtaaatcaacgaccgcctcacctctaacgaatctttgggatgacttgctatcgaacaacttgcataacgagggtggtgtttcgttcccgaatggaaagaaacccgaggcgctaatcaagagatgtcttgaactctccacgaccattggggacattgttcttgactcatttgccggctccggaactaccggagctgttgcacacaagatgggtcgccgctggatcatggttgagcttggggagcattgccacactcatatcattcctcgactcaaagctgtcattgatggtgaagatcagtcgggaatatcaaaggcagttggttggcaaggcggcggcggcttccgctactaccgcctcgcgcccagtctgatcgtcaacgatcgctggggcaacctggtgatcaatcccgaatacaacgctgcgcagttggccgaagcgttggccaagctggaaggcttcacctacgcgccctcggagacgcgctggtggcagcacggccattccagcgagcgcgatttcatttatgtcactacgcagaacctgtctgcggagcagttgcaggcgctgtctgatgaagtcggcgcggagcaaagcctgctggtgtgctgcgccgctttccacggcgtcacggcggccagtgcggcggagcgctggccgaacctgacgctgaagaagatcccgaagatggtgctggcccgctgccattggggccgcgatgactacagcctgaatgtgagtaacttgccgatggcggagatggagaaagccgagtctgtggcccctggtaataccgccaagaacaccaagagcagaaaagccgccctcgccaacgcgggacaaggcggcctatttggggagaacgaataa

SEQ ID NO: 533410 - DNA, 1764 bp, Stenotrophomonas maltophilia
atgagtcgtgctcatctgcgcttccaggtagattcccgcctcgccacattgttgagtcaggaatatccctcgtccgagcgagcgttgaaggaactcgtggacaacgcatgggatgccgacgcagagcaggtaacgatcctcctcccgaaacctctgagtggagaccctctcgtcatccaggatgacggcactggcatgaccgaggaagagctgcgccgccactatctgtcgatcgcatctgatcggcgctcccgacgcggggagcgtacggccggaaagaaccgtttggtcaaggggcgtaagggcatcggcaagttcgccgggctcatggccgcagcggtgatgacgcttgaaacccgggcccgtggtcggttgtgccgtatcaccttgcggctggatgatctatcccaagtcgaagacattgaacagttgaatattggcctgcagagcgatccttgtgggccggaactgcatggcacgaccattacgctgagcgatctgcatcagggcctggcttatccggatgccaatcggctgcgccagatccttttgcaggactacgggcgacaggatgactttgccatcacgatcgacggcaagcggctcgacgtcgatgatgtatccggtagctactcggagcaggaagaggaactcccaggtgccggcaaggtaaagctgcgtttctctatcagcgacggcaagtccgggttgcgtcagccaggtatcactttgcgtgtggatggcaaggccgttggacggcctgggttcttcggcctggatcaacgagatgactttccatccaagctgctgcgaaagctctacggcgagatcgaagcagatggactgcgcgaccacatcacggcgggctgggatgcggcggtcgagaacagcgagcttctgaaagaagttgaaggctacgtccagcctatcttgcgagaagcctatgagcagcagtaccggcgcgaaattcagttggcgcaggctcgcctgcagagagcgatcctcacgcgcttgtcggctctgccagagcacaaacgtgcatttgccgatcgtgcgatcaagaagattctcgacaagtattacggtgagccggagagcaaagtcgaaccggtggtaaacgtgctgttggaagcgatggagcgttccgactaccgtattcttctggagcatatcgcggaggcaacgccgggcgatgtcgcaggggtagctgagcgcctggatgaatttggcttggcggagatggcattcctcgtacagcaagcgacggctcgtcaggttttccttgatcaactggacggccttgcccgtgatgccgccacgacggaagccgtcttgcacaaggcactggagcgaaacttgtgggtatttggcgccgaatactcgctattcagctcaaacagtacgttgcggcgacaagtggaagatgtcctcggcaagacctacacaggtgacaaggccgacaaacgccccgacctgcttctcaacgagaacctcggtggacagtacctgctgatcgagtttaagcggccgagccacgcgctgaagcacgaagattatgtgcaggcgattggttaccggcacgagctggcgaagtatctgggttctccgattcaggttctgctcgtcggcggcagtcgctcttcggattttccgacggacaatcgtgagccaaatgtcgaggctcggatttttagtcaggtcatctccaccgctcggcggcaggttgagtggctgctacgtacagcggagacatgttcaaactga

SEQ ID NO: 533411 - DNA, 597 bp, Stenotrophomonas maltophilia
atgccgaattcctccgctcccccgaccagcccgaaaggcgagcgcgccgaagcgctcccgagcaatcttcggcgcctgcgcctggaggcgcagctcaccctcgatcggctcggggcgttgtcgggcgtgagccgcgcgatgatctccaagatcgaacgtggcgcctcggttcccactgccacggtgctgggcaagcttgccgccgcactgcaggtcagcctgtctcaactcctggggggattccatgcgcgccagcccaggctgcatggcagggagcgccaggcggtctatcacgaccccgcttccggctttgaacgccgttctctttcgccgctgttcgaggatggcgcggtcgatctggccttcaacgtgttgcctccgggcaagtccgtcgagttccccccgcaccatgcgggcgtggaggagtttctcgtcgtgcatgagggggcgcttaccgtggtcatcgacggaaggcgcttcgacgtcgctgccggagatacgttgttctttccttcggattgcgtgcatgagttccgcaatgaaggcggcgagccggctgtcttctatatcgtgatcaacgatcggacgcggcgttag

SEQ ID NO: 533412 - DNA, 927 bp, Stenotrophomonas maltophilia
atgcgtcttctggtgctgggtgcaggtgggatcgggggctatttcggcgggcgtctggccgcggccggcgtggacgtgcgttttctggttcggccgagacgcgccgcacagctcgccgagaccgggctcgtcatcaagagccctttgggcgacctaacccttcccgtcaaaacagtcgtcgaggcgccgccttccgtcgatgccgtgctgctggcctgcaaggcctacgatcttgagggcgcgatggccgccatcgcgcccgctatcggtccctcgacatgcatcgttccgctgctcaatggggtgcggcatctggatcacctggatgcgcgcttcggcgccgagcgcgttctgggcggcctgtgccatatcggtgttgcgctcggcccggccggagaaatccagcatctcaatacgctgcagcgcctcgccctcggcgcacgcacccacagccagcaggacgcggcgcaggcgctgcatggattgatggagcgcggcggcttcgcaccggtgttgagccaggacatcctgcaggagatgtgggggaagttcgtattcctcacgacctatgccggcatgaccacgctgatgcgcgcgcccgttggcgcaatcgtgcaggcacaagatggcgaagcgctggtgcgccagatgcttggcgaatgcgtggcgaccgccgccgcctcagggtacatcccatcgcaggacgcctatgcccgcatgttcacgacgttgtccgagcgcgcgtccaccggcaccgcatcgatgctgcgcgatctgcaacgtggtggccccaccgagcatgagcacatcattggggacatgctgcgtcgtgcgcatgaagctcgactggatgcgccgctgctgagggtgagccttgcacacatgcaggcctacgaggcgacccgcatggcccatggcggtggatga

SEQ ID NO: 533413 - DNA, 594 bp, Stenotrophomonas maltophilia
atgcgcagtggcatcctcgcgcaggtgggtggctcttggcgtcacgacgctgagcgggaagaagacctcaagcaacacatgggcgacgacgatgtgatcgtgcttgtacgatctgcattcgacgacgtcgatgaatcggctctggtgctgtggcaagagcctgatggctacaaggtttccaatatcgtgccgcgaaacgtcggtgagcttggtattgacaagtacaacgcgattcttcgcgacttcgtcgcccaagtcgcggaaccggcgtcccgggccggcggtttcggcgtcgaactgacctctcccaaccagactcttgaggattggctggatgccgaaccggcagcagccctgcggcgcttttcgcggctcgccaataagtccacaggtgcggcccatcccatggacaaagagcgctggtacgcgttcctgattgccgcgcaccgtgcatcgaaacgactggatagtgaccaattggcacggtggcttgtcgaggtggaggcctggtccgcagggcgggcgcaggacttggccatcgactatgaattcgcactcggactgcttgaacagtatgaccagtcgcatacatga

SEQ ID NO: 533414 - DNA, 252 bp, Stenotrophomonas maltophilia
atggatacgttgagcttgtgcccggaacgttgccaaagcgtttcgagcctctacctcgacgccagcgacatgagcagcaagctcgatggtcacctgttctgccatcagaacaatcagatcggagccggcctcggctgccgcaagcaaggcaagcccggcgttggcatcgtgtgctaccgctgtttcgcgcgtgatgtcacggatgacgtcaaggacggtgcatgtatccacgcacaacactggcgcgtttaa

SEQ ID NO: 533415 - DNA, 219 bp, Stenotrophomonas maltophilia
atgaaggattgcgtgatcgtcgaagcctatatcgaggcggctggccagcttcgctccgcagggctggtggcgccgatcgtgttcgcctcgtcgaatacgaaggagtatttcgcgccgaacacccgacgtcttcaagatgaaatcgctgccgatctagaggacgttggtgtggagtacgccccaaacttcggcgcagcgaagcacagcctcggcctatag

SEQ ID NO: 533416 - DNA, 252 bp, Stenotrophomonas maltophilia
atgctgtcgctgcggccggtgagcggcttcggctcgcactgctcgatcagcgctccacactcatccctgccgacgacctgcaggttgttacgtcgcccgcatctggggcacatgaagtgcaacccgaagctgtcgatgtcgggctcgacctcgctgaaacctgcgaacgccgagcagcagcggatgcaggtgaagagtggagtgctggtgagcattggatcggtgtacgccccgagcatgacggcaaggtga

SEQ ID NO: 533417 - DNA, 549 bp, Stenotrophomonas maltophilia
ttgaacgccatcaccatccgcaccaagggtgaagcggagatcttcatctccagcgaaaccctccgccctggtcacctgatcgagctcgatgacgatcagtccatccaccagtacgccaccggccatacaaagctgttcgccgatggcaccagcgcggcgggcaatgacccgcgcaccgaccacgtcgctgtcattgaccacgccacaggcctgatgtgggccgtgaagtccatcggcgacagcgacggcgatccgatgagccaggccgactgcgacaaggcctgcagcgagctgcggctgctcggccacgacgactggcgcctgcctacccgcgccgagctttccgccctggtcgatgagacccgccacgagccggccatcgatacctcgctcttccccggagttctgccgggctggcactggaccagcacagcggccgcctggtcctcggcgtccgcgtggtacgtctctttcggcagcggctacgtcaacgactaccaccgcaactacctcgggttcgcgttggccgtgcgtcgtgccggtcagtaa

SEQ ID NO: 533418 - DNA, 741 bp, Stenotrophomonas maltophilia
atgaccgcaaacctcacgattcccccaacaaactgccccgttctgcgcgacgcgttcgaaacgatcagtgcgatcgcggtggaggctgtttggctgcccaaccaagcgaaggccatcactctcgcgcaggcccagaccgcgctgcgggacctgcaccaccgcctgcctcgcctgcaggatctgagcgtgttcgaggcgccgaccgccgcgtggctttccatgttgcgcagcagcctgcaggacggcgacacgccgctctgcgagaccaccaaggctcggctggcgcaggcggcggagctactgcagctagcacgcaaccagaaccacatcgcccgtgatcccgctgatccgtggcgcggcctctacgccccggcgcgactgccggcgcgggacagctacggcgaaatcatgtgccaccccgacgtgccggcgtgggctgatggccgcgaatcgtcgctgcttccgctgttttacgcccaaggctttgacctggtcgtagtcgaggccgaactggaggcggaatcggcgggtaccaccccgcgcgccaacgcacagccggtgatcgactggaaccctgaaggccccggtgacaactggcgcctggtgtggctaggcgagaccgaggacggcctcgccgcatggttcgtgcaaccgctggcgattgcagcaatgaagcggcacagcgagcagaagaactccaggcacaagcccgcacaccacccgaatcatcacgcggtctga

SEQ ID NO: 533419 - DNA, 4107 bp, Stenotrophomonas maltophilia
atggctgatcggctggaagaagcaattcgggttgtcattgaaacccagggccgcgagggtgtggatgaattgcgcgcggcattcggcgacctggggaatacttcagttgaggcggctgcaaagacagcggacctgctcgattcactgactggcctgaacgccgcggctggaaagctggacagttatcagcggatgtcggaggaactggcccagcttgaatcgagctttgatgccaatcaacgggccgcataccagctttcgctccaaattatgtcggcggaatcccctacaaaggagatgctgagagcgcagcgtgatctgaagcttgaagcagacaggctaagccagtctctatccagccaggaggctgcgatggaggacgttgctgcgtcgctcgcgcagagtggactcgccgcgtcagaagttggaaagagccaggctcagctgggttcaaagcttgcagctgtaaacaatgaactggctgaacacgccaaggcgctgaaagaggatgcagcgcgcactgctaggtaccgaaaagacctggaggaactgtcagacggcttggcggatatcagtcgcgaattcgagggcttttccagtgcagtttcagaggtcggtggtgagttgtcggccattgataggcccaatgcgcgcctgctcgcgcagcagcggacgctggcggaagaggttgagaatcttgaacgtctattcaaggaacaagctgcagcaatttctgatgccagcggcgacacggatgcgttggcggaaaaatcggttcgattggcgaaacttcaggagcagatcgctgacgcgtaccatcgaactgtagatgctatcgaggagcagagtcgtgccgtaaggaaggaggccgacgaagcccggcgcaggaacatggtgattgaggacgcagatgagcgtttccgtcgccaggctcggtcgagccaatccgccgcgaaagcgctagctgactatcggcagcgcgctgctgatgctgcagccggcagcggcgatctggcctccgctaccgagagcacggtcagctggttcggcaggctcaaggctgtggctgctggcgcgatcgcgttcgtcggcctgaaccgtgtggtcgatggcatcaaggccatcgtgaaggaaggcagtgacgctgagcaggagctgtcgcaactggaggccgctctgcaggcgaccggccgaagcggtgagttcaccgcgcaaagcctggccgcaatgcgcaagcagctccagagcgggctcttcgacgatggacagatcagcgcggcccaggtacgcctgctgtcatacaccaatatcgtcggagagcagttcccggcagcaatgcagatcaccatcgatcaggctcagcggctgggcatgtcgctggaggggtctgccgaggtcgttggcaaggcactgcagacgccgtcgaaagcgatggaaagcctgagcaagcagggcttcacactggatgacagccagaaggcgctgatcaagagcctggaagccaccggccaggtggcaaaggcgcaggccatcatcctcgatctgttggcggaatcctatggcggcgcggccgccgccgcgaaggttggcaccatcgccggcctgtggaagacagccaccgatcgcttcaaggattggaaacaggaggtcgcagaccagggggtgctgacctacttcaaggagcagctgaacacccttctggcgacgctggatcgactggccgccgatggcagcctgtcccgctgggccaagcagaccgcccaggccatcatcaccatggccgaggcggttaaaggcacgacgcagtgggttgtggaccatgcccgcgtgatcggcctgatggctgccgcatatgcgcagttcaagatcgtgggggccctgctccagctgaacgcatggcgcgcagcactgatcgcgaccacgaatgcgcagcttgccaacaatgcagcggtcgcaagcggctgccggggtatcggtcggttcggcgcgttgctgcgcgggttgccgaaggcagtccccatcacggtggccgtgctgggattggaagcggcgatgggcggtctggatgtcctcaagaccgtggcgcaggacatctggaagcagcacgacccggcgctgaagcgtgccggtgaagcgcagcgggcctacatcagccaggtacgctattcggcgctgcagctgcgtgaacaggcagtgtccttcgttgcgtaccgtgacgtagtcatcaagtcggccgaggaagtcgccaagctgggcgaggcggagcggcaggcatacgagaagcgtctgtccggcttggagcagtacctcacggcgcaggaaggcttcctgctgatgcagcagaaggccggcgtcgcgacggcggagcagctgcagcagctgggcctggtcacgcagaagttgctggaggtgtcgacgggctttgcgtcgctccggggtggcgtccagacggctgcggacgcgctcacgaatgggatcggcccggctgcccagctggtggtgcagcaattggcggggatcgacgggaacgccaagctcgcgaaggaatcgatcggcaaggtgttcgaggggctcaactttgcggacacggcgagcctggaggcggtcggcgcggcattgggctacatcgcctcccagggcgccgccgcagagcggaatgtgcgtgatgggttgctggagacgctgaagaagctgtccggtgaagagctgcttcgcttccaggcttcggcccagtcggcgtttgaggctatgccgcaaggcgccaccaatgccgcagccgtgctgcagaccacgcttgttgctgcaatggagcggcttggtgtttccgcatcgcgcatgggcgtcggcttcagcgctggtggcaaagacgcgatcgcggcgtttggtgctgtggccgagagcgccatcgccaccggcgtccagatcgagtcggcatttaaggccgcgcttggcaaggtcgcgacgctggacgaagcgcgcacgctgggcgcgctgctggaatcggcagggcggcagggtaaggtcggcttcgatgcggccgcgcggtcggcggcagcgctcaacgctcgcatccgcgaaattcaggttgccatcgatccgctggccgacgagttcgccaggcttggcatccagtcccaggcgtcgctcaatgcgacgcgggacgctgccaagagcgccttcgaagcgatccgtgacggcgcggctcgcggcaaggcctctgtcgaagacgttcgtcgcgctttccgggcatatgccgatgcaacccgtgctgcggccgcagacagtgatcagtggcgccgggacaacgtcgatagccagcttgcagtacaggagtcgatctacgacaccgaacgcagcatgcagcggctgggcgatgtgagcgacgtggcaatgcgccagctgcaggacggtgccagccgcagccgcgagcggctggaggaggtacgccagagcgcgggaggtgcggcggaccaggttgaccgggtagggagtagctccgaacgaatgggcaagcaaatggggcaggccggggccgcagcgcaaggaatggcgttcagcattggggaggtctccgaatcggcgttgcaggcgatgcgcaagctcagcggccccaacccgcttgtgcagtttgccaatgcgctgaaccgggtcactgaccagcgcaagcagctagctgagtacaaggcagagctccaggcgacagccgaggcggaggacgaactctccaaagcagcgaaggaacggctggcagggcagttcgactacgtgggcaagggcgaaatcgcagaggttgcgcagctggaggcccaggtcatgcggcagcggcagcagcgagaccaggaggccgctgccgcgctcgccgagcgccgcaagcaggctgaagctgaggcagaggcgcaggcgaaggcggacgccgctcgcatcggcagcaacggcaccaacgagcaggtcattgtcattgactggaagctgccttcgaaggaagtggtggccggcgccactgcagccgaagtgcaacaagcgcagcgcctcgcgggcctcgtcgctccgttggtcctgcggcaggttcagcaaagcagggccgtttccgttcgggggcgcagttga

SEQ ID NO: 533420 - DNA, 996 bp, Stenotrophomonas maltophilia
atgagtcttgtaccaaccgtttacgaaagcaccgatccgggcgcgccgcagctgacaggccagcctgggagccttaccgctttgcttgacgcggtacttgtcgatgggtacggggtgggagccgcacgcaaggccggggctggctggacccgcgagttcagcggtacgaacgtcagggcttatcgcggcaacattggatctggcagcggatactacttgcagatagatgattccgcttcagtcggcaacgctcgacatgcctgggcacgtgggtttgaggcgatgagcgctataggagtgggcgagaacgctgtgcccacttccacccagcgagctaggggcgcgcttctcccgaaatcaacctcagcggattccacctcccgtcgttggcgggtcgtcgctaacgagcgattcctttacctgttcgtcgacacttctacgagaggttttttgtatccatggttcgctggtgacatcatcagctataagcctggcgacgcgcatggctttgtagtgtctgctaacaacgcgcaaagctggactggaagttttgattggtcgacgaggctgttcacgaactctgtgtatacggcggaacctgaaaacatttcctgcagtatgtacatagcgcggaaccacattggggtggttggagctaaatcctgcgatcacttcggtgtcatcaatggcaactgctttggcggaacgggtagtggggggttccctagcggaattaatcaaggtctcctctacgagccggcgcggtttgtcaatggtgccttcttccctcgtggcgagcttccagggctgcttgcgccaatgcagattctgactggtgcctcgcagtttgcggatggtgccgttctagaaggggttgaggagggtggcggggataagctaatggcaattcgcttctctcgcgcattcgattcagatccaagcccgtcattcactggcgtcgtgctagtccggatcaattcggagtggagccaatga

SEQ ID NO: 533421 - DNA, 318 bp, Stenotrophomonas maltophilia
atgaactcgcggcgatttagcttcggtgtttcgagaccgatcgattattgtggtcgcggttatctggggggattcccgcctgtagaagacggtcctgacggacgcctccgcaagctcaaccaaccttttcgggggcgggttctggtgctcgagcggagcaccttaatctgttgtgcttcggtcttgagtaatggggatggtgagtggattgtccgggggttgtccccgaactaccgctacatggtgattgggactgatgcggctggtacggtgaactctgcaattcaggattgggtccagccgtacgtggaagcctaa

SEQ ID NO: 533422 - DNA, 258 bp, Stenotrophomonas maltophilia
atggctaagcccttctctgtcagcgagtctgacggccgactgctggaaggcctcatcgaccgactgccggtggaacgcagtcaccagtgctacctgctggaccgagtgctcgatgacgccctagaccgcatcccgtcgctcagccagggcgagcgcgcggagctggagacactggcccggtcggtactgcctggcttgacccttgagcttgaggtactagaccggctgctcgacacgttgctggagtacgaagcatga

SEQ ID NO: 533423 - DNA, 420 bp, Stenotrophomonas maltophilia
atgcaacagatgacaggccaagccatgaccaccctcgcaaagtcgctggattccagcaccggacccggaacggaggctagcacgggtgcgcggaactgtggaaatgccccgcaggccaccgagagcagcgcgaccctcaccgttcacgtcactcacaacaaggtgatcgccaccgtgcagctgtccatgggcacgccgagaaccgcgcagtgcgtgttcgagcgccggcgtggcagcgaaaccgggtgggtccacaccaagggcgccgagttcagcgacataacggattggatttcgccggagctggcaaggctggccaacgcaatccccttcccgcatgaggtcgcaaacatgctgccagggcgccgcgcgagtgcaaaggccgtgattcaggcagcgctggaggtgggcaatggctga

SEQ ID NO: 533424 - DNA, 1014 bp, Stenotrophomonas maltophilia
atgcgtaccgaaacccgtacacagttcaaccagttcacccgccgcgtggccgaactgaacaacatcgaatctgccgccctgtccttctcggtcgagccaagcgttcaacagaccatggaacagcggattcaggaaagcagcgctttcctgtctgccatcaacatgcccggcgtgatcgacctcaagggcgaaaagatcggcgtgggcgtcaacggcaccatcgccggccgcaccgataccagtggcgacgccgagcgtgtgccggcagacgtgaccgctctggacagcttcggctatgagtgtgtccagaccaactacgacaccgccattccctatccccgtctcgatgcttgggcacgccagccgaacttccagatcatcctgcgtgactcgatcatccagcgtcaggggctggatcgcatcatggtcggcttcaacggcaccagcattgccaagaccacgaaccgtgcggccaacccgctgctggaggacgtgaacaagggctggctgcagaagtaccgcgaacacgcatcgaagcgcgtcctgagcaagggcaagaccgacggcgtggtcaaggtcggcgggtccaacaaggactatgcgaacctcgattccctggtgatggacgtggtgtcgtcgctgatcgaaccgtggcatcagcaggacccgaacctggttgtcgtgctcggccgtgacctggtccacgacaagtatttcccgctcatcgacaaggacaacgcgccgaccgagcagctggccgcagacttggtgctcggtgccaagcgcatcggtggcctgcgtccggtgatcgtcccgttcatgccgccgacctccctcatggtcacctcgctggacaacctgtccatctattggcaaatcggcggtcgccgtcgctacatcgttgagcagccgagcaagaaccgcatttccaacttcgagtcgtccaacgatgactacgtggtcgaggactacggccgtggtgctgtagtcgagaacatcaaggtcggggactga

SEQ ID NO: 533425 - DNA, 1500 bp, Stenotrophomonas maltophilia
atgttcagaagtcagattcgcgaaagcgaagttgaagcgctactggaaaaggtgcgcaagcagaactatggccagtacctggtgaaagtatccttgaaaaaagtgagaggtttcgtaggcgaaccgatcactttcgacttccccgttacggccgtaatcggccccaatggcggaggtaaaacaacggtcttgggtgcagcttgttgcgcctacaagtccgtgcaaccccgtaggttcttcgcgaaaagcggaaagttcgatgcgacgatgcaggactgggcattcgagtacgatctaatcgatagaaaaaaagagccccgcgataccatcaagcgtacagcgagatttgcaaaccgacgctggaatcgtgaggcactagaccgcaccgtgatggtgtttggcgtttcgagaacagtccccgcaattgagcgaaccgagctcgtgggctacgccaacaataaatttgacgttgcgcccagtaaaattttcgaactggagcagtcggttgccgttgcggtaagcaagattcttgacaaggatgtttccgcctttaagcggatggaagtgggcgcgaatgggaaggtgatgctgtttacaggcgccacccgcggaggtgcgggctactcagagttccactttggtgcgggagaatccagtgtcatccgaatggtgaacgaactagagtccatccgtgacgaacagcctctcatcgtcattgaggaaattgagaacggactccatcctgtagccactattcgaatggttgagtacttgatcgacctcgcccagcgaaaaggcgtgcaggtcatcttttcgactcactcgaacgacgcgctcaagccgctgccgcatcaagcgatttggaccgctacggaggatcgtctcttccaaggcaagctggacatacgttcgctcagggcaatcaccggccaagtcgataagcagatcgcagtattcgttgaagaccgtttcgcgaagcagtggctcgaggcaatcttgcggcaatccggtcgattcagcgtcgaccatgtcggcatctatccaatgcagggcgatgggaccgcagttgccaccaacgcgtaccacaataaaaacccagctgtggacgtgaagtcggtatgcgtgatcgatggagattccaagcaagtggaatctacttcagatgccgtttttcgccttccaggcgccgcgcctgaagctcacgtgttcgaacaggtgatggatgcatgggatagaatcggcgcaagggttacagttggactacagatgcaaccacaagaagaggcggccgttctcgaggcttgtcgtgcggtgtaccgactgtgtcatgacaaacatcttctgttcgcccagctcggcgagaaactgggcatgctcccagagtccgccgtatcccttgtttttgtaaatcagtgggcacaagcctatccaaccgctgtcactgagttcctagacaagctcgccccgttcctccctgaagcaacaatgcaagcagcctag

SEQ ID NO: 533426 - DNA, 879 bp, Stenotrophomonas maltophilia
gtgctgcagggagtgcagaaaaagcaccctatgaagtgcgcaggcgtggcggggagacgagtgcgcgcgccgggctctaaagggctaattgacacgggccgattgaacgcctccaatgcagcggagcgaacaggggggagcttcatggatttcgtcgtgcatcaagcgctaaccgttctaccaggggtgtctgcagcaagcggttccctgtcttggctagcgcaagcgatacccgaagcagccaagattgtggtcgcgttgataactgttggcggcgccttgggcggcgtcctgctgggctcgcggcttaccgggggcagggagcggctcgctcgagaggagaagcgacgggaagacctgctgtttctcgccgtgactgtctctgccgtgcttgaggctttcgtctcggactgtgcctccgttgccgccgacgatggaacttcgcacggacagctaaacagaacggaggacggcgaagagtaccgatctcctcaagtcaagaccccggacctagacttttcaactttgaatgtggtctggacctcgcttcgacccgacatgctcgaccgactccatgcactgcccgccaaacttcgaaacatcgagtccgctttgtctgcaatttcggagcacgattggtccccctttgatgagtacttcgagcacaggcaactcaagtacgccagacttggggtagccgcaggcaagctatctcgagacatccgcacagatgccgggctcagaccaagccttgatgaagatcaaaccgtcttcgaatggctttcggaacgcgaagcacgcctgcaagaagaagctgagcaacgcgaccgacgcctcatggcagcaaacactgaaatgatggccacgctcgctcaatag

SEQ ID NO: 533427 - DNA, 1005 bp, Stenotrophomonas maltophilia
atgggaaggaaacccaagaagccgggggctatcccccggttccgcccccggaagcagaaatccggcgtggtgcactactactacgaccacggtggcaagccgcgcaaggaaactgcgctgggcagcgattatggcctggccatccagaagtgggccgagcttgagcgtgcggcgacgatccccgccgatgcaaagctgacgttccggcaggccgccgagcgctaccgcgtcgaggtgattccgacgaagtctgagggaacgcggcggaacaacaaccgcgagctcgattcgctgatccagttcttcgacgacccaccgggtccgctcgacgcgatccgtccgacgcatgttttcaactgcctgcagtggcgccgcagcgcgcctgtggctgcgaaccgtgaaaagtcgctgctctcccacctatggaaccggtgccggcagaagggctacacggacctaccaaacccatgcgccggcgtgaaccgattccgagaggacggccgcgacgtgtacgtggaggacgacattctgcagcgcgtgtacgacgccgccgaccaggtgctgaaagatgcgatggaccttgcctacctcaccggtcagcggccgaccgacatgcgcgagctggaccgccgcaacatcaaggacgggacgctggtgctgcgacagggcaagaccaagacgccggtgcgcatcgcgatcaccggcgagctgaaggtgctgatcgatcgcctgctgtcgctgaagcgcccggatgacgcaccgatcagcacgcgcctgctgctgggcgaggactggcttccgatcgggaaacatgccctgcgctatcgattcgacaaagcacgctattccagttccgcgacctgcgcgcgaaggcaggcacggacaaggccgattcggccggcgacattcgccaagctgcagcagcagctgggccacaagtcagtgaccacgacagagatctatgtgcggagccgccgcggtgcgctgaccagcccgacgaagtga

SEQ ID NO: 533428 - DNA, 882 bp, Stenotrophomonas maltophilia
atgcgcttggctttggattgcccaacatcggagagggtcagcaagtggcggctgaggttgccgactgccaaagtatcctcatccaagagcgccatccgggtcacccccattcggagcaagttttcggcaaccgccgcaccaagggtgcccacccccaaaacgaggatggattttgagcgaacggtctcctctgcctggccacgcttacgcagctggtctggtgcccagtttgcggtgcgccgccacttcaggggcctatcggcacctgctgcttctcgatcccatcgtcctcgggcagtcaacgtcgcccggaaaccatttctgacctcgtgcctaccgcacaactgcatgtttcgtactgccaaccagtgtagacgctgcagcggcccaccaacgagttcggataacgggaagcctagcaatagagtgactggcatagggcgcttggggcgttgcgtacgcctcagtaccgcgccggcctcggcgaggatggaaggaagatcaagcccagcgtgcgcgcacagctgggtgagctggtcccatgttgtgggagcttgccaaggctctatcaggatcaaggaaggcaacgcgatccagaccgcgtccgggaccaggtctcgacggaggatcgcctcggaccaagaaatctcccgcagggaccgcaagcgctggtccatgaagcggctgacaacggcggtatcgaacgctcccggaaccggcgcgaccgtggcaaagccccatggatgcgacaagctctcaagccacgccatttcgtgggccgattccgaaaaccccagcatcgtactgggtggcgtcacgaactgcgtgggcaactccagcgcgtccccttcgatcagcaatgtgccttgtccggctgcttga

SEQ ID NO: 533429 - DNA, 1134 bp, Stenotrophomonas maltophilia
atggaacttcgtccccagtttgctgaatttctgcaggacatccgccccagcgagagaaaccgcgaggaatggaagcgtggctcgaatacgcttcgcacccgcctaatggctgacgccgagttgtcgccgatgattgcggccaccttcctgcagggtagcgtacgccggtctacggccgtacgaccgaccggcggcaagcgctcggatgtggatgtggtgatcgtcacgaccattgactacaaccaggaaactccccgggtggcgatgaagcgatttgaacccttcttggagcggcactaccaagggaagtgggcccagcaggatcgttcgttcgggatcgaaatgtcctacgtcgacctggacctagtggtgactgcgctgccggcagagccggccactcgcgccgcactggaatcgttgtatcgcagccaggcagtacagttggatgagtccctggaagagcgcagcgactgggtgctaaacaaggggtgggatccgcagcgtgcgaacggaggcttgttcagcctcactgaagaagcctctacctggcgcgatgagccgctgatgctgcctgaccgtccggtgcagaaatggggacctacccatccgctggcgcagatccagtgggcggcagctaagaaccgcaactgcaatggtcatttcatcaacgtggtgcggtccatcaagtggtggcggcatgagcatgccgacacgctgcccaagtaccccaaaggctatccgctcgagcacatgatcggtgcggtcttgcccgatcacatccagagtgtggcggaaggagtcaccttggcgctggaggggattcgtgacacttgggccgcctatgctgcggcgggcgtcgttccattccttgccgatcacggcgtgccctcccataacgtcttgcaacgtctgggggcggaagatttccgcgccttcatggccaaggcgggtgaagcggccgatcttgcccgtcgcgcactgagcgagaccgacaaggatgttagcggcgcactgtggcgagagctgctgggcaatagcttccccctgcctggccccggtggaggtgatcgtgggcgtgggttcgccgcaccggccgcccctgccgtgccgcggcagtctgggcggtttgcctga

SEQ ID NO: 533430 - DNA, 1506 bp, Stenotrophomonas maltophilia
atggtcagtgccgtagagccgcgttggcatggcgatagctaccagtcccgttttttctggacccacgccgcgttgttgctggacccccggcaaccccacgtagttgaggttactttcgaggccaatggtcccaaggcctttgatgatgtcgtggtccggtacaaccctggtcgctcaaggcgctccggaccgggctacgtcaccgccgactatcatcagattaagtggcatgccaacaaagccggccggttcgggtttgccgacctgatcgaccccaagtttatcaatgccaccaagagctcgattttggagcggctacgcgatgcccaaaaggtggctggcgaaggtgcagcttttcacttggtgaccaccgatcgtattgccgatggagatcccttgggcaaattggtgggcggtcacgacagtgcgttgcgactgcaggtgctcaaggaaggaaagaccgacaacagcgaaatgggaagagtgcgcaaatgttggcgcgagcatctaggcttgggcagcaatgaggagctctatgccatcttggaccggttccacatccaagatagtcagcctgacttggaaaaaatgcgtcgcgaggtcagtatccagttccgtctagtgggcttggccggtcacgagaacgaaacggtctttctctacgacgatgccgccaaacagctggtaagcaagaagatcaattgcttcgaccgagctggctttcaccagtggtgtaccgacgagaagtggtatctgggttccaagccgaagccgcgccgaagtgtggccatcgcaacctatgacccgcggccgaccccgctgcacatggccgacgccgagccggacaacacactaaacttggctggccggtttaccggtcgatggctacacaatggacacagctgggaggaggtgcaggagcaggtgcgcgccttcctcaaagccaaactggcgcagtccccttccatgcgcctgttcatggaggcgcattcatccatcgcctatctcgccggagcggcgctacgtttcaaggagggcgccgatgttgaggttgttcagcgcggcgacaaaaaccccgggatcgtgtgggatgcccaagacggcaccgcagggccggagccgctgattgaggtgcagacgctgggggatgggggcgacatggcggtcgctgtaggtctgagccagaacgtgggccagaaggtggggcacttcgtcgccgatcatctacctcaggtcggcatactgatcggcgtatcgctggttgacggtgctggccccatgaccattgccggcgggcagcatgctgcagcaattgctcagcgcattgccgagttagtgaaagatacccgcaagccgggcaacacgacgcaccttttcttggccacccccaacgcttttgccttcctgctgggccaacacaccgacgcgatcggccgctgcattccgtatgagtacgacatggctggccagatcgacggaagctaccaccccacctttaccatttaa

SEQ ID NO: 533431 - DNA, 2955 bp, Stenotrophomonas maltophilia
atggacgatgttcaccgcctgtatgaagacgaagctgttcctatagccggaggaacagttgcgtgcatgaaggcgccaagcgacgagcaggtcatcttcgttcccacagatgaggtcggaacgccaggacaactaagtgaccatgtaatgggcttgcttggttcgcagagacgtctccgtcccaaggctacgttcctgttgaagggctatgccattctacgtcacgaacaacggatcatctgtttcgtcgtaaccatcaaaggagggcataagcctgcagatctgctttcgaagaaccttgagaaggcactgtctagtgcggagattcgctccgcatcttctgtttggcttcctctgctgggcactggagatgcagggctttccctcatcgagagctttgatatctcgatggttgccctcaaggaagctggacgtctactcgacggtggcttgaccagcatcatcgccctgcctaggccaggtcaggccgatgatgacgatctcagggcgttgctggcccatgtgagggctggaagaacaggtcgcgcagaccgttggggggcgggtgccaccgcgtccgaggtgctttcgctatcgttcttcctcggtaggaagattggtcaggtggaactgacaacggagttgatcctgtttggcttgatgcacgcagggtcttcccctggggctatgcgaacgagtgatcgtttcgcatgcgcattcaataccgccattctgggtttgagtggttcgcgccacatggatggatggaattctctttttggtgatactggcgtggtcggggtttttgccgatgggcgtcagtttgaatcggctactaggcgcgcctcactgattcttgcagcagctctggagcgagcgaagggttacggccgagacttgttctcggttgaggatcttgtcttctccttgcttgagggagaggggcagtatcgaatttacctgaaacggatgcaggtggggttgaatgatctgtcggatgctttcagtgaaatagtgtccggtcacgtgaagatgcgcctatgcaacgattcggcgtccagtgaggatctgctcggctactctgtttacgcgtccgcgatagcaggctttgttttgcatgcggagactccagttcccctcagtgtgagcatccaggcgccctggggtgcggggaaatcttccctgatgaagatgatccgtgaccagcttgatccggaagataagcgaaaagcggcgggttatgcggcttcgattggcctaactttgcgcgatgtcctgaaaattctcaagaagagaatggatggcgcgaagggtagtgtggatgattcgaagcctgtttatctgacctcgtttggcctcgctttgagcgatgtcatgaaaattctcaagaagagaatggggggcatgaaagagagtgtggatgattcgaattctggtgaggcaaaaggaatctccactgtttggttcaatgcatggaagtatgaatcaagcgagcagctttgggcagggatggttgacgcgatcattagtcagttggcggctcgaatgccattggccgagcgggaggcattctatctgaggctccatatttccagaatggatgctggcgtcatcaggagaaaggtgtacaaccgcctgttggagtcggcattgtcagtgatggtctggctgattcccctggcgatcattgcatcgattcttctgatgattggtcagagtgtccttgcttcgatgctcttgaatatgctgggcggggcagggcttgtaaccggcgcagttgctgcttgcaggtggttctggaagaggaaggaatctgccaaattttctctggctccctatctcagtattcctgactattcgcgctcactcggatctattcatctaatggatgaagaccttgagcgggtaatgagatctgcacaagccgctcaagggcaaagtggaaaagtcgtcgtttttattgatgatcttgacaggtgctcgccatcaaaggtgtcctcggttgttgaggggatcagcatgttgctggcgagtgactcctatcgctgtgtctttgttgtaggcatggatccgcaagtggttgctgcatcccttgattgtgcgcataaggaaatacgtgactgtctaccaagctatgagcgtcgcgttccgcttggatggaggttcatggacaaattcgtgcagctaccatttacgattcctccgcaagcaaacacagataggtatatttcgtcgctctcgggtgtggttgttcttcctgacgaggatgagcaatccgatgctggtgcggggaaaactcgtcccgctgcagagtcgttggaatcgagggctggcgaggcgaaggttgatggttccatttccttgaagggagtttccgttcaggcctcggagcccccggctatagcagcgtccgttcccactctggatagcaaggatgtggggaggataatgaggggtgtcgtggagttcggcgtggtcaatccacgggagattaagcggatggcaaatatggccagattgtatctcgcgcttagaaatgagaggcgcaagcttgatcacttctgggtcgcaccttctttggagagctatgcaatctggatcgtgatggcaattcgctggccagactttgtgcggtggctgcagtggggcgggagccatgacgcgagcgtggcggggaacgcggaggagtcgtcgattgtgtcgaatagaattgcagacatcgagaagatttccagagagtctgacgatttcgccaactggcatggcactgtcgctgctctactggatcccgctgtttctgtgaaagcctctgaggacgtcgtgggctccgcaaggatagatgtcggagggatggactggagatctgatcctgccttcttccacttcatgaaaaggtgcattcggccgcagcgattggattccatgtccaagtccttgaagaatggcttctggtga

SEQ ID NO: 533432 - DNA, 558 bp, Stenotrophomonas maltophilia; identical to SEQ ID NO: 530409

SEQ ID NO: 533433 - DNA, 153 bp, Stenotrophomonas maltophilia
atgacccaacgcattctttccgtcttgaccaaccatggtcgcaagggaccggccggcgccgcggatgccgcaggccagaaccgagcctcggccaagggcgtcgcaaaagcgatgctgccgttgcttgtggcagcgtccgtggatcgggcctaa

SEQ ID NO: 533434 - DNA, 1242 bp, Stenotrophomonas maltophilia
atgaacgagcgtatgcctttcgtcatctacgtcttcgcgctttgcgcgttcgccttgggcttcaccgagttcgtgaccatcggtctggtgtccaccatttccgctcacctgcatgtgagcgttgcccaggtcgggacggcggtcacggcctatgcgctgggcgcggtaatcggtgcgccaggcctgaccgcgcttgccacgcgctggccgcgcaagcggctgctgctggttgcgatggggctgttcacgctggggaatgcagtggtcagcctgtctgatgcactgacgcccatgctggtcgcgcgttttgcttccggcctggggcatggcgtattcctggccgtggcatccagcgtggcgacccaactggcagggcggcatcgagccggtgcagcggtggccgtggtattcggcggcctgacgctggccttagcgctgggtgtgccgctcggcacctacttgggcagcgtgctgagttggcaggtcatcttcatggccgtggccgcaagtggcgccatcggcttcctggggctgttgatcctgatgccgacggatcgagacgatccctcggcgcaggccaatgcgatggatggcctgaaagccatgtttaatctgcgcctgctggccggggccggcatcactgtgcttgcctacgccggatcgttcgcgctttacacctacatttcgccgattttgctgcaagtgacgaagatcagtgagagcacggccagcctgctaatgctgggctacggcgtgatggctggtatcggcaatgtatggggcgggcgactaaccgaccggaagggcgcggacttcgccgtgatgacggtgctggttggcctggccgtggtgctgcttgcgatctgggcagcggcggcatcactaccgttgatggtgctgctgacgggcctgctgggcgcactgacctatgcggcggtcccggtcttgcaggcgcgggtaatcgggctgtcgaatgtgcacgcgccgcaggcgccggcggtggccgccggcttgaacatcgccggtttcaatggcggcattgcattgggttcggtgctgggcggggccagcttggcggcgacagggcttacgagcacggcatggatcggtgcgatttccgtgggattggggattgtctggatgctctcgcagatgcgaggaagccgcgccgaacatgccgaactaccacgactgtctgtccagcgcgcacatgagccacccaggcacgaccggatgccttag

SEQ ID NO: 533435 - DNA, 1443 bp, Stenotrophomonas maltophilia
atgactcgtatgaaggttgatgtggcgatcatcggcgctggcagcgccggcatgaccgcctaccgtgcggccaaggcacacaccgatagcgtggttgtcattgaaggcggtgcttacggcaccacctgcgctcgggtgggctgcatgccgagcaagctactgataagcgctgccaatgcggcccacgccttgaagatggccccgagcttcggcgtcaatccgggcgcgatccaagtcgatggccggaaggtgatggatcgggtccgtagcgaacgggaccgcttcgtgggtttcgtcgtggaaacggtcgaagggtggccggaagcgcaccgccttcggggcacagcgaaatttctctcgtcccatgagctgcttgtcggatcgtcgactatcgtccaagccgatcgcatcgtcatcgctaccggctccagcccctgtgttccggacggctggcgcgaaaccctgggcgacaggctgctcatcaacgacgacgtcttcgagtggagtgatctgcctagctcggtggcagtcgtcggaaccggcgttatcggacttgagctggcgcaggcactgcaccggctcggcgtgaaggtgcgtctatacggccgtagtcgcaacatcggcccgttaacggatccaaccgtggcggcagaggccacgcggatcttttccgaaggaatacctgtcagcctgggagtcacgatttcgccctcgctgacgccggacgggcgtgtctcggtcatttcaggcgatgagcatggcgttcgctccgcagaggagttcgattacctgattgtcgcgacggggcgccgtccaaatacgtccgggcttgatctagaggttgccggtattgggctggacgcttccggtcagcctgttgtcgatcgcaccaccgggcagagcacccgctcgcacatctttattgccggcgacgccaacggcatgaccgagattcttcacgaggccgccgacgatggtcgtatcgcgggcgacaacgcgggccgttatccaatcgtgaggcctcgtcctcgcaggtcgccgctgggcatcgtgttctctgacccccagatcgccatggctggggccaccttccagcagctgaaggcgagcggcgcggcatttgagattggagaggcctcgttcgccgaccagggacgaagccgggtaatgctggagaaccgcggcatgatccgcgtctacgccgacacggccaccggggtcttcctcggcgcggaaatggtgggaccggctgccgagcacatgggccacctgctgtcatggagcgtccagcggcgagataccgtccagcagatgatcgacagccccttctatcacccagtcgtcgaggaaggtgtccgcaccgcgttgaggcacctacagcgaaagctggttctcccaccccaagcccccgagagctgcctggactgcgtacctggcgcttga

SEQ ID NO: 533436 - DNA, 366 bp, Stenotrophomonas maltophilia
atgaacatgtccgtgcctgcttgggtcgggaaagtgggagagctggacgccaccgagttcaatcgcctggcccgctccaccacagatccgctcctgctttacatcggtgctccctggtgccctccatgcaaaaccatggggccggcctttgatgctgcagctgcagcgatgggcgaccaggttcgatttctcaaggtgaatgcagcgaccgacccacagctgctggattcactgaaagtcgcaggtgtgccgatgctcctgctctacgacgaacacggccaggaactgggtaggttcttgggagcattaaccgcatcgggcatctcgcgttgggttcagacacggctcgttgaatcacgccagtag

SEQ ID NO: 533437 - DNA, 678 bp, Stenotrophomonas maltophilia
atgaaaaaggtccatgtcgaaatttggtccgactacgtatgcccgtggtgctggatcgctaagcggcgctttgaaaaggctgtgacgtcgttggcgggccaggtcgaagtcgtcgtcaccaacaaggcctaccgcttggccaggggaatggcgccgatggactaccagaccgccctgtatcagaagctgggcggcaggcttggagccgatcggatgatggcggctgttcgtgggcaaggacttgccgagggcttggtctacaacttcgacaccatgcgtttcggtgacaccaccgccgcccacgcactggtcaagagcatcggctcgccagttgtcgcacagctgatgagcgagcgcctttacagggccgcaacgaccgatgggctggacattttcgatcaggacgtcctcgcctcgcttgccaagcaggtcggggtgaccgacgcgctttttgactttgacccagaaagggcggcgtccgagatcgcgcgcgatgaggcagaggcaaaccgcatcgccaacggcgtgccgctgttcctcctcaacggcaagactttcctgtccggagcgcgtgaggccgtcgtgttcgaaacggcgcttcatgacgcagcagtcgatgttccggtggctctggacgaaaccgagggcgagagctgcggcatcgacggctgccactga

SEQ ID NO: 533438 - DNA, 564 bp, Stenotrophomonas maltophilia
atggccctcggaacacgtgatgctttggtgcggaccgccgagacgctgatgcgcacgaagggctatgccgccttcagctacgcagacctcgctgagacggtgggtatccgcaagccaagcatccaccaccatttcccgaccaaggaagacctagggactgccatcgtcgaggaatacatcgaacgggtgcgcgatgactttgcccagatcgaaggccagcacgaaagtgccgtcgctcggttggaggcatttttcaggcttttccgcgccagttcggacggcgggatgttgccgctgtgcggcgcgctggcggccgaaatgtcggcacttccgctgggcctgcagcagctcacgcagcggttcttcgacatgcagttgaagtggcttgaagctgtcatggagcggggaatggagcgcggtgaattcccgcgcggatcaggcgctaggcagaaagccttcgtcctgttgagcctgctggaagggtccagcttcatcaactgggccaccaaggcgggcgatccgactgatgatcgtatcgttcggctcatagttcaggactcgtaa

SEQ ID NO: 533439 - DNA, 795 bp, Stenotrophomonas maltophilia
atggataccaagcaatttgaaggccgcaagctcctggttgtcggcggcacgagcgggatcggtcttgaggtcgcccgtatggttgccgagcaaggtggtgctgtcgtggtaatcggcaatcgtcccgagaaggccgaaacggcccgtcaggaactagccgcgatcgccggtgagcagaaggcggcagcctacgcgtcggacctgtctgatgcagcgagcgtgaagtcgctgctggccaagctcgccgctgagcagggcgacatcgatttgctggtcaacaccgccggcatctactacccgaaggcattcctggagcactccaccgaggactacaacaacttcctcgacctcaaccgctccctgttcttcattacccagcaggtggctggctcgttggtcgcccggaagaagccaggctcggtcgtcaacgtaacggccgtggccgcccgccaggcgatcgaaacggtccctgcatccgcctattcgatggcgaaaatcggtctggacgccatgaccaggcacgtggcggcagaactcgccgagcacggtatccgcgtcaacgcggtcagcccggcgatggtggaaaccaagatcttcgagcgcttcatcccgggcgatcagctgggtagtgcgctggatggattcaatgccttccatccgctgggccgtaacggcacgccgcgggatgtagccgaaaccgtcattttcctcctgtcggacaaggcctcgtgggtcaccggcgcggtttgggacgtcgatggcggcgtcatggcagctcgcaagctcggcaaataa

SEQ ID NO: 533440 - DNA, 918 bp, Stenotrophomonas maltophilia
atgcgccgcaaaattcccagcaattccgccctcatggcgttcgaagcctccgcccgccatgggagcttcgctcgcgctgctgatgagctggccctgaccgaaggtgcgatcagccgccagattggtcggttggaggcgttcttgggtgtcgcgctgttcgagcgagctggcaatcgtgttcggctgttgccgaatggtgcccgttatgccgctcaggtccgtgagacgctcgaccggcttgagcgcgacagtcaatatctgatggggcaggcgagcgataacgcaagcctggacattgccaccattccgacctttgccgtgcgctggctcatccctcgcttagctcggtttcgtgagatgcacccacgcatcaccgtgcatctagcagaacggatggagccttttgtgctggccggaagcggtttcgatgccgcgatccatttcgagcatcccgcttggacgggcatgagaacgcaccggctcttgcacgagacgttggttccggtttgccacccggcgcttctcggtggaggcgaaggggctacatctctggatgaactgccgcgccttcatcgacgtcagaacccggatgcctggcagcggtatgcgcaggagaccgggatcgtgctgaccaatcctgcggtcggtccccgctatgatcttcactccatgcaaatcggagccgcgttggctggcctcggcgttgctctggtgccgcgtttctatgtcgaaaccgagttggcagaaggtcgcctcgtcgcgccctggccttatggagaatcgatctccaagaccttctgcctcatcctgccggagccgatccggttgagcgatggcccactgcagctttttgcgaattggctcctcgaagaagcccgggacagcgggtcccacgatcgcgcggggaatgtcgaatag

SEQ ID NO: 533441 - DNA, 546 bp, Stenotrophomonas maltophilia
atgatctatacagtggaatgcagcttttccgatccggctagcgaagcggagtggaacgacttttacagcctggacaagctgccagccttgatttcggtgagtggcttccatacctcgcagcgcttcaaggcattgaaccgtggctgcccgatctacctcgcccttcattcgattgatggcctcgatattctgacgggcgaggaataccgcctgaagggcggcggcaacttcgcaagctggcaacagcacatcaccgactggcaccggaacctttacagcggcatcgagcgagtgccagccgttggtgagggtgaatatctggcgttgagcgctacaggccccgagcctctggttgggcttggtctcgcgccccacgcgatacacgcggtcgccatggagatgcaccctgaacaccgttggcttgctaagatcggcgccggcgagatgcctgatattgagcacctacctgaaggcgtccatgtctatgcgccgatgacggcgcagttgacgaatggcgatgacgctgcctccgcaaaagcacggtag

SEQ ID NO: 533442 - DNA, 327 bp, Stenotrophomonas maltophilia
atgccgaatgtcacgatctacattccggcagacaggatgccgccggacgaagcactcgcagacctcacggagcaatgcaccgaactttgcactggccttcttcgggccgcattggcgaacgtgcatatcgtctatgtcgctgtccagcacggccggggacacccggtttttgcggaaatccaatatcgccttgagtcctttcggccgccggcaatcatggaacagttcatcgacggactggacggcaccctcaagagcactatcggactcaccgcgcgcattcgttgctttggctacgaagcgtcgagcatctacgcacgaaattaa

SEQ ID NO: 533443 - DNA, 858 bp, Stenotrophomonas maltophilia
atgtctcgacccgcatttcccagccaacaggtcggtgacttaacggtcaccgccgtcagtgatggctatctccacgccaatttcgatttcctcgcgaacatcgacccggccgatgcatcccgtatgcaagaaaacgcggggatcaaggatcctacctcgatccatatcaactgctacctggtacgaggaggcggtcgcactgttctgatcgacgcaggggcaggcggttttaagcaatggggcggccaattgaagaccaatctgctgcttgccggcattcggccttcccagatcgacgcgatcgtgctgacgcatgcttatcccgatcatgtcgggggcctgatggacccttcaggagcagccatgttcccaaatgctgagcttgtcgtccaccgtcgggaagtcgcgttctggcaggatgacggcaatctgagccgcgcgcccgagcgggcccgtggcaatttccttgtggcgcgtcaggcgttcgacggctaccgcgacaggctgcgcacctttgagggcggcgaggtgtttccgggcatgactgcagttccgctcccgggacatacagccggacacaccggctatcggctcgattcaggtgacaagagcctgctggtctggggcgacatcgttcatttcccccagatccaggttcctcgccccgatgtgtcgattgcattcgatcaggatgcgcatctagccgcggaaacacgagtgaggttgctggacgtcgtaagttcgcagcgacttctgatcgcaggcatgcatcttggcgaactcggtttcgcgcagatcgagcgagcgggtaaaaactacagagttgcgtacacgggactctccggcggacttacttga

SEQ ID NO: 533444 - DNA, 510 bp, Stenotrophomonas maltophilia
atggatatcgaagcgacgctcgcgggcatccgtgctctgcagggtgagattcggggaaagaaccctcctcccgaggaggggggcatcagtgctcaggacaacatcatcaacttcgcgctcctgcgtggaacacgtccctaccttgaacgcatagcccatcagatcaacggctcgtacgagaacggttggtatgacgccgctgcagtgatgatcaggcgattggtggagacgctgatcattgaggtgtacgaaacgaacgggatggcgtctgagattaaggacgtcgccggcgatttcctgttcctgcgggacctggtggcgaagatccttgctgagccgaagttcagcttgggccgagctgcgaagcgctccctcatggagttaaaagaggccggtgacaaatccgcccacagtcgcttttacacggcccatcgccgtgacattgaaggcctcgccgttcatctacgtaacatcgtgcaagatctgattgcgctcgcaaagctcaagtaa

SEQ ID NO: 533445 - DNA, 720 bp, Stenotrophomonas maltophilia
atggcagaagaaaggatgaagggttacccgaagatcccgcgagcgaactggtttgccattagggagcgctttaagagcaaaccaccgggcgaggtcacggcgtcttatctcgcgtccgtgttgaatataaatcttccttcagcgaagaatcttatcccccctctcaaagcgctcgggttgatcggcgaggacaacaaacccactgatctcgccttcgactggcggcacgacgatacttactcagaagcctgccacaagatgcttgatgccacttatccggaggagctgcgggacctctttacgcagcctgattcttcccctcaagcggtgtctacctggttcagccgacacactcgttctggtgaggctgcttcaagccagaatgcggcaatgtatctgctgttgttggaggctgacctaagcaagaaggatgcccccagggtccggagtgccgccgccgcagagccccgcgctgcgggacgtaaatccgccgtgtccaaagctactcgggaaaagcgactggtgccggcgccggcagtcgaagtccatgcggtcccagccgataaagcgggcttcacggacacggcgccaccaggaaagtccggtttcagtcccaagctccacgtggatatccagattcacatttctcctgacagttcacctgagcaaatcgacaagatcttcgagagcatggccaagcacttgccgcttaagggctga

SEQ ID NO: 533446 - DNA, 807 bp, Stenotrophomonas maltophilia
atgcgaaagaccttgggtgatcttctccgagagatggccaaccagcccgccgaacggcggactccgtggcgtgcattgcgcggaaatctatggcttgatcacgcggtatggctaagcggccttgaatgggcccagttcgaacgcatttgcatccagcgaaaccgctccgcatccaagctcggggctaagtggcgcgccggcaccacgttgcctactcgatcctcagccttggcgatggaacgagtgcttcctggtacggcctgggtgttcgatctgccactgtttcagttgctatccgatgctcccctgccgcgctcacgccttgtggcacttacctcaaaattcagggagccaggggcgctggtagacatggattgggtgttaccgcacgcggccggtgttgcgcgctattctgattcgaaaacacttctccaccgtggcgacttgtgggggcttttcggtttagtggggacgatgcgctgggccgagcttgaaggtgacgatcaccagcacttggaatccagccaagatgctttcagggcccttccagcgatgctccgaactccttgggctgttgcttcggtccccaagctctatgagttgctggagcgcctacggcgacgggtcccttacacacgggatgcctatcgggttaattgggagcggatagaagcactcgcgtcccgccaccacttttccgcagatccaggcggacgacccagagacccccatggatatgcagaaccctatcccgatccgatcgttgtgatgaagcgggtgccagagcgccgggtccgggagtggtga

SEQ ID NO: 533447 - DNA, 291 bp, Stenotrophomonas maltophilia
atgctcatggaaacgtccagcgcaacgaccctccgcgaactgcagctcacggcgcagtttggcgcactcctcagtacgtctgatatcgcgcaggttctgcgctatcgcacgacgcaggctgttcgaaaggctcgcatcaggggagtgctgaacatccccatgcgacagctgccagggcgccgggggctatatgccaccgcccgggcggtcgctgcctacctagaaggcctcgattccaccaccacttcggctccccaggaggtctctatcggcgtacccgtcaatccgtaa

SEQ ID NO: 533448 - DNA, 786 bp, Stenotrophomonas maltophilia
atgagcgaaaccttggtatctctattcactgcggcggtctccggagggatagtcgcaaagctcatagattatccagttgattggattaagtatcacttcggtgaaaggaaatctgcaaaagcacttgtggatgcccatctggatccgcttttgaaggctgccgatgcgattgttggaaagacagcctcccttgctgatcgggatttttctatgccatccgagggcaatcgagaggcgttggctgcagggctagacccagatctaatcgggttggcgtatctctatgcgagattctgggggcgaataaatattctggcagaggaaagcgtgggtgtatcactcgcatctgataagaggggcgcgaggctccagaagttcatcacttgcttggggtccccgcaagttcgcctggtcaataggacgcaccaaaacgcaattggcgaattaactacggatcagtcatttgacaagcgcttgcggactatcggtctagttgagtttggtaaaaagattaatgaagaatcatttgcagcgatatggtgcaagccactcttcgagctcctggggcgaaccaacataaaggctacccgccagaatcttctcgtgtacggagtcgtggcacaggctcttgtggatactctcgatcccgatcaccactcaacccacccccgcccaccttatcccaataagctctcaaaggccgcgaaacagaagatagagcatcttgtgttcggtgagtacttaaaggaaaccgaggcaattaatcgctacacgaaagtgcaataa

SEQ ID NO: 533449 - DNA, 837 bp, Stenotrophomonas maltophilia
gtggataaaaaggaagctatcgagcagctgggcaagttcaaggatcgcttgcttacggatgttgcgggggcctattcgcagcgagggagcgacttcggcaaggagcgattcgaagcttggcggcgccagataaataaattccttgacgagaacatttcgggagcaaggaagatgctcgataaaaagctaactcagactgtgttctttcgccgccagtatgaaagtgattttgatgtcttcatgcgagagcggggaaacccctccgtggcttttttggattcgctctcgctagatatagccaacgatgaatatgagttctcacgctcctcaagtggaaatgcgtcggaactaggtcgtgcgtcggaagccccagagtcaactgctggcaggtcagatcgggtctttattgtccatggccacaatgaggccatgaaatccaaggctgcacgctttgttgaaaaactcgggttaaagtccataattctccatgagcaggcaaatcagggtcatacgatcattgagaagattgaggcacatacagatgtcggatttgccatagttctttatacgcctgatgacgtcggcggaacttcactggaggcaaaggaaggggttttgcattccagggcgaggcagaatgtagttttcgaacacggctatttgatcgccaagctgtcacgagcaagggtcgttcctttggtttctggaaaggtggagctgcctagcgatattagtggtgtggtttatgttgacgatgccaactggcaagttgatatcgcgaaggagatgagggctgccggatatagcatcgacttcaataaattgctcgatagttag

SEQ ID NO: 533450 - DNA, 252 bp, Stenotrophomonas maltophilia
atgcaataccggcttgacctggtgctgcacccggccgaaggcgcgctgctgcgcgtgatcggcatggccgagcgtcgcggcttcgcgccgcgtgcgatcagcggtgcgccggtggccgccgacgatggccgctggcacctgcagctggtggtggatggccagcgcccggcggaaacgctgtgccggcagatcgagaagatctacgactgcgtgtccgtacaggtcaccgccgtggaaggagtatcgccatga

SEQ ID NO: 533451 - DNA, 1737 bp, Stenotrophomonas maltophilia
atgaactctcccacacaccgcagcgcgccgcccaacggcgcgcgctggctgacccaggcgctggaggccgagggcgtccgcacgctgttcggctatcccggcggcaccatcatgccgttctacgacgcgctggtggattcgtcgctgaagcacatcctggtgcgccacgagcagggtgcagcgctggcggccaatggcttcgcccgcgccagcggccaggtcggcgtctgcgtggccacctccggccccggcgcctcgaatctggtcaccggcattgccgacgcgatgctggattcggtgccgatggtctgcatcaccggccaggtcggcacgccgctgctgggcaccgacgccttccaggaactggatgtgttcggcctgacgatgccgatcgtcaagcacagctggctggtgcgcagcgtcgatgatctgccgcgcgtggtggccgatgccttccgcatcgcccgcgagggccgtcccggcccggtgctgatcgacctgcccaaggatgtgcagctggccgatgccagccatctgccggtgcatgtgcccagcagcgtcgaaccgccgccggcgccggccgaggccgccatcgccgaggcgatcgccgcactggcggcggccgagaagccggtggtctacgccggtggcggcatcgcgctgggtgatgcggtgcaggacctgcgcgacttcgtcgaggccagcgccatccccacggtgatgaccctgcgtggcctgggtgcgctgccggccagccatccgcagtcgctgggcatgctgggcatgcatggcacccgcgcggccaacatggccgtgcaggaaagcgacctgctgctggtgctgggggcgcgcttcgatgaccgcgccaccggcaagctggccgagttcgcgccattcgcccgcgtcgtccacatcgatgcggacgcttacgagatctccaagctgcgcagcgccgacgtcgccgtgcctggcaatgtcggccatgccatccgtgccctgcgtgcggccttcccctcccccagggcccaccaggatgcatggcgcaagcgttgcgcgcagcaccgcgatcgcttcgctgcccgctacgatgcacccggccagcacatctacgcgccggcgttgctgaagcgcctgagcgagctggccccggccgatgcggtgatcgcctgcgatgtcggccagcaccagatgtgggtggcccagcactgccgcttcaaccacccgcgcaaccacctgaccagcggcgcgctgggcaccatgggcttcggcctgccggcggcgatgggcgcgcagttcgcctgccccgaccgcaccgtggtgctggtgtccggcgatggcagcttcatgatgaacgtgcaggagctggcgaccatcgcccgctgccgcctgccggtgaagatcgtgctgctggacaacagttcgctgggcatggtgcggcagtggcaggagctgttcttcgccgagcgttacagcgagatcgacctgtccgacaacccggacttcgtggcattggcgcaggtgttcggcatcgccgccacccgcgtcgacaaccgcgacgacgtggaaggcggcctggccgcgctgctggccgaaccgggcccggcactgctgcacgtggccatcgatgcacgcgccaacgtgtggccgctggtgccgccgaacaccgccaacagcacgatgctggaaagcaaccccgcccatgcccgccaggagacccccaatgcaataccggcttga

SEQ ID NO: 533452 - DNA, 975 bp, Stenotrophomonas maltophilia
atgagcaccaacgacctgccccagaccaagatcgccgtcatcggctacggcagccagggccgcgcccacgcactgaacctgcgcgaatccggcttcgacgtggtggtaggcctgcgtccgggcggcccgaccgaggtcaaggcacaggccgatggcttcaccgtcaaggccccggccgatgcagtgaaggatgccgacctggttgccgtgctgaccccggacatggtgcagaagaagctgtacgacgacgtgctggcgccgaacatgaagcagggtgcggtgctgttgttcgcgcacggcctgaacgttcatttcgacatgatcaagccgcgtgacgatctcgacgttgtactggtcgcaccgaagggcccgggcgcgctggtccgccgcgagtatgaaatcggccgcggcgtgccgtgcatctgggcggtctaccaggacaagagcggcaaggcggctgagtacgccctggcctatgcagccggcctcggcggcgcccgcgccaacctgatccagaccaccttcaaggaagaaaccgagaccgatctgttcggtgagcaggccgtgctgtgcggcggtgcctcggcgctggtgcaggccggtttcgagaccttggtggaagccggctaccagccggagatcgcctattacgaagtactgcacgaactgaagctgatcgtggacctgttctacgaaggtggcatctcgcgcatgctggaattcatctccgaaaccgcgcagtacggcgactacgtcagcggcccgcgcgtgatcgatgccggcaccaaggcacgcatgaaggaagtgctgaaggacatccaggacggtaccttcaccaagaactgggtggccgagtacgaagcgggcctgccgaactacaacaagttcaagcaggccgacctggaacacccgatcgagaaggtaggcaaggaactgcgcgccaagatggtctggttgcaaggtcaagccgcgtaa

SEQ ID NO: 533453 - DNA, 1719 bp, Stenotrophomonas maltophilia
gtgtcccgacgccttgcccgttccctgctcgccaccgccgtgctcgccgccatgcctgcactgtccttcgccgccgaccgcattaccggccagaccttcgccacccgttcggaggtgatcgccccgcacgcgatggccgccacgtcgcagccgctggccacccagatcgcgctggacgtgatgaagggcggcggttcggcagtggacgctgcgattgccgccaacgccgcgctcggcctgatggagcccaccggcaacggcatcggcggcgacctgttcgccatcgtctgggacccgaagacgcagaagctctatggctacaacggctcgggccgctcgccgaaatcgctcaccctggccgagttccagcgccgtggcctgaaggacattccggccaccggcccgctgccggtgtcggtgcccggcgcggtcgatggctggttcgcgctgcacgaacgcttcggccgcaagccgatggccgacaacctcgcgccggccatccgctatgcccgcgaagggcacccggtggccgaagtgatcgcgtactactgggaccgctcggtgccgaagttgtcgcagtacccgggcttcaaggagcagttcacgatcaacggccatgccccgcgcaagggcgagatgtggaagaacccgaacctggccagcaccctgcagaagatcgccgacggcggccgcgacgccttctacaaaggtgacatcgcccgcacgatcggtgattatttcaaggccaacggtggctacctgagttaccaggatatggccgaccaccatggtgaatgggtcgagccggtcagcagcaactaccgtggctacgacgtgtgggagctgccgccgaacagccagggcatcgctgcgctgcagatactcaacgtgctggaaggctacgacttctcgaagattccgttcggttcaccggagcatgtgcacctgttcgttgaagcgaagaagctggccttcgccgaccgtgcacgcttctacgccgacatggcattccagccggcaccggtgcagaagctgatctccaaggagtacgccgcgcagcgccgcgcgctgatctcgatggacaaggcgttgaaggaagtgcagccgggcacgccgaagcagctggaggagggcgacacgatctacatgaccgtggccgatgccgacggcatgatggtgtcgctgatccagtccaactaccgcggcatgggcagtggcatggcgccgccggggctgggcttcatcctgcaggaccgtggcgagatgttcgtgttgcagaagaatcatcccaacggttatgcgccgggcaagcgcccgttccagaccatcattccggccttcatcaccaagggtggcaagccgtacgccagcttcggcgtgatgggcggcgcgatgcagccgcagggccacgcgcagatcgtgatgaacctggtggacttcgggatgaacctgcaggaagccggtgacgcaccgcgcatccagcacgacggttccactgagccgaccggtcaggcgacggcgatgaccgacggcggtgaagtgaatctggaaaccggcttcccgtatgaaacggtgcgcgcgctgatgcgcaagggacatcgcatcgtgttcgccgacggcccgtatggcggttaccaggcgatcatgcgtgatcccgagaccggggtgtattacggcgcgtcggagagccgcaaggatgggcaggcggcggggtattga

SEQ ID NO: 533454 - DNA, 939 bp, Stenotrophomonas maltophilia
atggccgatcttctggtcggccagccaacccaggcgcgcaccgattgcctggtcgaaaccatcgtcgccgagcaccggcttcggtgtcggttcgccattgaagatggcattgcccgtggccagcgcggccttcagatcctgcacagccgcgttgcccggtgcatgcagcagcggcgccgtggcgcggtcgccgatgagggttgcgtcgctgccttcaccgcgctcgccgcgcttaccgggcagcaccagctcaggcaacggcagagtggtcgcctggtcggccccattgggggcgtcgccttcggcggtggccgtagcggtcgccgctgctgtggagggcagggctgctgcgaccggcagtgcagcgggcgagggcagtgcgttgccgtctgcatcggtggccgtcgccactgctggcagagcggcggcaggatcggcaggcgtcggtaccgccagtaccagtcctgccaggccgagcggcggccatggggcttcctcggtcgtcgccgaggcgtccttttcggcagcgggcctggcttgcaccgggggcaccgtcgccgcagtctcttcgggtacggcagcgctgtccggcctgcgctcggcgctggactggccattgctgtcggatgccggcccctgtgcaggcgacgtgggcatgttcgagggcctggaggatccatcggcgcccggcgcacccccctgcagcagctggctgaaatccttgctgccgtcaccgcgtggcgcgcgcgttgcgctgctgccggaattctgcggctgcgcgttggcgctgccggccaatggcgcgggcatcacgagcggcctccctgctcggcgccgtcctggtcttcgatctgtgccaggcgggcgcggcgggcaccgatgtcatccatctcgcgctggtcgcggcgatccgtcaccaccttctcctgtgcgcggtag

SEQ ID NO: 533455 - DNA, 357 bp, Stenotrophomonas maltophilia
atgcgaggggagatcgacagcttacccgagccgttgatcggctaccgcctgcacggcaacaaccaggtggggcttggcgaccaggatggcgtctcgcgcgaggtgaggcgggaacgccaattggagatcgaacgactgcagtgcgagcagctgctggcccgcgcacgcgcgctgggcctgcccgtatcgcgcctggagtggattgaacggaagcagcggcacttgacggtacgcacggggatgggccctgcacgcattcgccgcattcccgcggtgatggcagaggtgttctccggcaactacggctacttcgggcgtggcctgttgaccgccgccatcgatctggtccggcgctag

SEQ ID NO: 533456 - DNA, 816 bp, Stenotrophomonas maltophilia
atgatggacgccgctatcaaaaagttgtgccgcattaccgtcgctggtgcgcggcaactggcggcacctgtcggaaagcccaagccaggcagcgaacagaaggcaagagctcaccaccggtcagtgactttgcatcacatccttcattcgctcgtgcgcggctgtaaaggcaatagaagcgccgtcgatagcgttcacaagggcatcgaatgcgcgcctttgctgctcactatccattgcctccagaaagctctcggcgttaagagcacagaggtcaatcatactaattccgctagcgatctgttgcgccaactctttgggaagaagattgagcctttgactgctctcttttgtacgctgcagagacggtcctctggacatctgggcgaccaattgcattgtgcgctcgctctcaactgcccagtcgaaactcccatccgcaacgagctcctccagcagatctgcgtagtgcagctgcgcgctcattatttcgccgtaaatcagggtggtgagcacagtcctatcagccgtccgagtctcctcgtcgcgctccctcagttgcttagcaagctcgagggatgcatgagccgttctgtttgccgctcgggtaacgagccacaccgcaacagcacctgcagctgccacgaccaccgcagcccagtcggccacgttcccccattcaactgcgatcgggcatatcgccatcgatcttcctccctgtccaatttggactggattctgccacgcaacacgcaccatgagtgcgacacccgaatgattgaggtccctatagagggccgggaggtggccaaatga

SEQ ID NO: 533457 - DNA, 237 bp, Stenotrophomonas maltophilia
atgatcaggcccatggttgaccagctgctcactgggcatcccgttcgcacagtggtgaccgcgaaatttgttgcaagcccaggcgtgtccgtacttaagggtcgctttcagtgcggcctggattgcggccacatcgttatccgcccaggggagcacgtgcatggcaccaggttctccatccgggcgccccacagcgcccactgcaaccaatgcaagaaggagcccgaccatggctga

SEQ ID NO: 533458 - DNA, 678 bp, Stenotrophomonas maltophilia; identical to SEQ ID NO: 528788

SEQ ID NO: 533459 - DNA, 1026 bp, Stenotrophomonas maltophilia
gtgacgctgaaccagccgctgggtcgtcgcggcggcgcgctctacctgaccggttcggtgcgcgacttctacgatcgccccggcacctccaagcagtaccaggtcggctacaacaacgcctggcgctcagtgaactatggcttctctgcgctgcgtaccgaagagggcgttctgggccgttccgatacccagtacctgctgtcgatgagcgtgccgctgggccgtggtacccacccggtatcgttcagcgccgacctcggcgtgcgcgatcgcggtggctacgacaacagccgcgtcggcatcaccggttcggccggcgtcgacaacaacttcagctatggcgccgccctgtccgactcgcgcgaaggcggcaccaccgcagtcggcaacgtcgaataccgcagccgctattcggcattgaacgccacctacagccactcgcgtgatttccgccaggcctcggtcggtgccaacggcagcgtggtcgtgcatccaggcggcttcaccttcaccccgcagcgtggcgacaccatggtgctggtggaagcgccgggcgcacgcgatgccatcgtcagcaacgccccgggcctgcgtgtcgatggccgcggctacgcggtggtcccgtacgtgtcgccgtaccgcctcaacaccgtcaccctcgacccgcagggcatggcccacgacgtcgaactggagagcaccagccaggcgatcgcaccgttcgccggtgccatcagctacctgcgctttgatacccgcaagggcaacgcgctgctgatccaggtacgcaaccccgatggccgcagcatgccgttcggtgcacaggtcaaggacgagcagggccagccggtgggcatggtcagccagggcggccgcctgtacgtgcgcagtgaaaagaaccagggccgcctgctggtggagtggggcgcgggcgccgatcagcgctgcaccgtcgattaccaggttccggcggacgccgatgcgtccaagaccggcttcatcccgctggaggcagcatgccgatga

SEQ ID NO: 533460 - DNA, 1446 bp, Stenotrophomonas maltophilia
atgcgccgccgttccctcgcccttgccctgtccctgctgctgccggccagcgccttcgcccaggcccagccgcaggccgcaccggttacgacgcccgctgccgcgcgcagcagcgcgaccgtggtgctgaccgccgcgccggctgactggcgcgcgctggacggccagcgtgtgcgcatcgccgcgccgctcaccctggccggcaccgatggcctggagcgcttcggccagctcactgtcgccttcgatggccgcctctggcagcccaccgaagtggccgcgccgggtactgccggctacgagcaggtgatggccgacaacctgcgccgccgcctggtgctggacgatggcagtgatgcccgcgacccggccagcgtgccgtacctgccgggcaacccggtgctgcgcgccggcatgcagctgcgcaacgtggaaggtgtcgtgcacgtggacgcgcaggggcacccgcgcttgcaggtcgaaggtgtgctgaagctgccggagctgaagcgcccggcggtgccgacggtgccgggcagcctgcacgtggcggccttcaacctggagaacttcttcaacggcgacggccagggcggtggcttcccgaccctgcgcggtgcgcgcacactggatgaacacaaggcgcaggtggccaagctggtcaccacggtcaacgcgctgggtgccgacgtcgccgcgctgatggaactggaaaacgatggctacggcccgcagtcggccatcgccgaactggtcgatgcgctcaaccgggaccgcggcgcgcagggtgactggcgcttcgtcgatgccggcaacggccccggcgacaatccgatccgggtcggcatcatctaccgcagcaaccgcctgcagccgcagggaaagccggccacgctgaccggtggcccgttcgtcgagcacagccgcgtgccgctggcgcaggccttccagggcaagcagggcgcgccgttcgtggtggtggccaaccacttcaagtcgaagggctgtcgcgaggccgccggtgcagacgccgaccacaatgacaaccagggctgctggaatgcgacccgcgtgacctccgcgcagcagctgcacgcctggctgcagacggatccaaccggcaccggcgccaaggacgccgtgctgctgggtgatttcaacgcctatgcgatggaagacccgatccgcaccctgcatgacctgggctggcaggacgcgttcaaggtggccaaggtcgagcatccctacagctacgtctacaacggctacaccggccgcctcgaccatgcactgctgagcccgggcatggccaagcgcctgcgcggcgccgccgaatggcacagcaacgccgacgagcaggacgccagcggctaccagggccgcaatgtgcaggggccgtggcgcagctccgaccacgacccgctgctgctgggtttcgataaataa

SEQ ID NO: 533461 - DNA, 303 bp, Stenotrophomonas maltophilia
gtgcacccgctggccgggcagggcgtgaatctgggcctgcgcgatgtagccgctctgcagcagtggctggcgccgtcggcagaacgccgcggccagccgcgcctgtcgccgcagcgcctgcagcgctgggcccgcgaacggcgcagcgacagccacatcgccgcctacggcttcgatgcgatcaatcgcctgttctccaacgatgagatgcacctgaccctggcccgtggccgcgcgctgggttgcgtcggcaaatggccgccgctggtgcaggcgttctggaagcgcgccgccggggtttga

SEQ ID NO: 533462 - DNA, 1401 bp, Stenotrophomonas maltophilia
atggtcgaggcggccggtgtagccgttgtagacgtagctgtagggatgctcgaccttggccaccttgaacgcgtcctgccagcccaggtcatgcagggtgcggatcgggtcttccatcgcataggcgttgaaatcacccagcagcacggcgtccttggcgccggtgccggttggatccgtctgcagccaggcgtgcagctgctgcgcggaggtcacgcgggtcgcattccagcagccctggttgtcattgtggtcggcgtctgcaccggcggcctcgcgacagcccttcgacttgaagtggttggccaccaccacgaacggcgcgccctgcttgccctggaaggcctgcgccagcggcacgcggctgtgctcgacgaacgggccaccggtcagcgtggccggctttccctgcggctgcaggcggttgctgcggtagatgatgccgacccggatcggattgtcgccggggccgttgccggcatcgacgaagcgccagtcaccctgcgcgccgcggtcccggttgagcgcatcgaccagttcggcgatggccgactgcgggccgtagccatcgttttccagttccatcagcgcggcgacgtcggcacccagcgcgttgaccgtggtgaccagcttggccacctgcgccttgtgttcatccagtgtgcgcgcaccgcgcagggtcgggaagccaccgccctggccgtcgccgttgaagaagttctccaggttgaaggccgccacgtgcaggctgcccggcaccgtcggcaccgccgggcgcttcagctccggcagcttcagcacaccttcgacctgcaagcgcgggtgcccctgcgcgtccacgtgcacgacaccttccacgttgcgcagctgcatgccggcgcgcagcaccgggttgcccggcaggtacggcacgctggccgggtcgcgggcatcactgccatcgtccagcaccaggcggcggcgcaggttgtcggccatcacctgctcgtagccggcagtacccggcgcggccacttcggtgggctgccagaggcggccatcgaaggcgacagtgagctggccgaagcgctccaggccatcggtgccggccagggtgagcggcgcggcgatgcgcacacgctggccgtccagcgcgcgccagtcagccggcgcggcggtcagcaccacggtcgcgctgctgcgcgcggcagcgggcgtcgtaaccggtgcggcctgcggctgggcctgggcgaaggcgctggccggcagcagcagggacagggcaagggcgagggaacggcggcgcatcgacgggcgattccagggaagagggcgcacagactaaccctgaaatgcgaaaccccgcttgcgggcgggggaatatgggcgatcaggcctcggtgggcaaagccggtgcggtga

SEQ ID NO: 533463 - DNA, 678 bp, Stenotrophomonas maltophilia; identical to SEQ ID NO: 528788

SEQ ID NO: 533464 - DNA, 1215 bp, Stenotrophomonas maltophilia
atgctgctgcccgccggagccgcgcccgatgcacgtctgctgctgatcggccgggcactgcgagccttcaccgacggctttgtcgccattctgctaccggtttacctgctcacgctcgggctcggcaagtgggaagtcggcttgatcagcaccgccaccctgctcggatcggcgctggcgaccgtggcggtcgggcagtggggacatcgcttcccgcagcgccggctactcctcgccgccgcctggctgatggccgccaccggtcttctgctggccggcctgggcggcatcggcgccttctggccgctgctgatcgtcgccttcgtcggtacgatgaaccccagctccggcgacgtcagcgtattcctgccgctggagcatgcgcggctggccgaatcggcgcacggcgaggcgcgcactttcctgttcgcgcgctacaccttcgtcggcgccttgtgtgccgcgaccggttcgctggcgacggccatcccgcaagtgctgacggatgccggcctggcccagctcgacgcgttgcgcctgatgttcgtcgcctacgggctgaccggcgtcttgatcttcgtcctgtatcgcgccttgccggaccaccgtatgcacgagcaggcagcgtcgcccgaaccgctggggccttcgcgcggcatcgtgatcaaactggcggcgctgttctcggtcgatgccttcgctggcgggttgatcgtcaataccttgctcgcgctctggctgttcgagcgtttcgacctctcgctcgccgctgccggccagttctttttctgggccgggctgctgtcggccggctcccagctcgccgccccctgggtagcgcgccatattggcctgatcaacacgatggtgttcacccacatcccgtcgagcgtctgtctggtcctcgccgccttcgccgacagcctgccggtggcgctcgcgctgctgttcctgcgcagcgccctgtcgcagatggacgtgccgacgcgatcggccttcgtcatggcggtggtgacgccggccgagcgcgccgcggcggcgagcttcaccgccgttcccaggagcctcgccgccgcagcgagccccgccatcggcggcgccctattcgccgctggctggctggcgctgccgctagtggcctgcggcctgctcaagatcgcgtatgacgttgcactttggcgcgcgtttcggaagtacgaggaaccctcctcttga

SEQ ID NO: 533465 - DNA, 456 bp, Stenotrophomonas maltophilia
atgcaatggatcacccgtgaacgcccgaaaatcgaccgcatcgcctgcccctggttgatcgcccgcttcatcgacgagaacccggagttcctctacgtgccttcgggcgaggtcctgaaggtcgccgccgacaccggcgcgattccctatgacgtgccgaatgtcgagctcggccaccatggcgaccgctgcagcttcgatgccttcatcgcgcagtacaaactcgacgacccggccttgaacacgctggcgctgatcgtacgcgccgccgactgcgcccagccgcaactggcgaaggaagcggccggcctgctcgccatctcgaaagggctgtcgctcaacttcgccgacgaccacgagatgctccggcacggcatggtgatgtacgacgcgctctacgcctggtgcgccgacacgccactgaagaaggttgcccgcctgcttggcttgaagtga

SEQ ID NO: 533466 - DNA, 903 bp, Stenotrophomonas maltophilia; identical to SEQ ID NO: 355227

SEQ ID NO: 533467 - DNA, 594 bp, Stenotrophomonas maltophilia
atgccttacgaactgaagcccctttcgtgcgatccagccaagctcaccggcctgtccgagaagctcatcgtcagccactgggagaacaactacggcggcgcggtcaagcgtctcaacgccatcgagcaacagctggcgcaattgaactggggcgcggcgccggtgttcgagatcaacggcctcaagcgcgaggagatgatcgccagcggttccatgatcctgcatgaggtgtacttcgattccctcggcggcacggggggcgaccccgacggcgcgctgaaggcggccatcgagcgggacttcggctccgcggatgcctggcgcaccgaattcacggccatgggcaaggcccagggcggcggctccggctggaccctgctggtttggagcccgcgccgcgagcgtctcgtgaacacctgggccgccgaccacgcccacaacctggctggggccatgccgctcgtcgccctcgacatgtacgagcacagctaccacatggacttcggcgccaagtccgcagcctatgtggacgccttcatgcagaacctgtcctggaccgtcgccgaggcggctttcacccggcttggcgcctga

SEQ ID NO: 533468 - DNA, 1233 bp, Stenotrophomonas maltophilia
gtgaacgccccgaccagtcctcagaccgctgccacgactgaagcggtccctccagcgatgagctacctgcagctcttcgcgcgcttcctcaagttcggcttgctcgcatggggcgggcctgtggctcagatcggcatgttgcgccgcgagctcgtggacgaggaacgctggatctccagcagacgcttcaacaagctgcttgcggtgatgcaggtgctgcccggacccgaagcgcacgaaatatgcgttcatttgggcatccgggcgaaggggcggctggggggcgtactggcgggactcgggttcatgcttcccgggttcttgctgatgttcgcgctgtcctggctgtacttccagatcgaattcgttggcacctcgctgggcgcggcgttccttggcatccaggcggccgtgatcgccctgattgtgcgcgccgtgcaccgtatcggcgagcacatcctgctcgatcgctggttgtgggccattgccatcgtttgcgcgctggccgccatggctcgtgtcgacttctggatcaccctgccggcgagcggcctggtgtacgcgctgctcgtgctgaagcatcgggccttggcgctcttggtgacactgggcgcggtggcgctggctgcggccgtggcttggtgggatgcgccggcggcgaagctggtggaaacggtcgttcagggccaagcctcggtgctgctcatcttcgcctcgggcctgaaggccggcttgctcaccttcggtggtgcctacacggcgatcccgttcgttcgcaatgacgccgtcgggcgcggatggatgacggatgggcagttcctggacggcctggcgctgtccggtgtgctgccggcacccctcatcatcttcgccacgttcgtcggctatgtggcaggggggccgatcggggcggtggccatgacggtgggtgtctttcttccggcctttgcgttctcgttgattttctacgaccggctggaggctgtcgtggagaacaaacggctgcacgcgttcccggacggcgtcgcggccggcgtagtcggcctgatcggcgcaactaccctcgacttggcgcaggtcacggctgaacgtgtcccatcgctggcgatgggcatgtcgatcttcgccgcaggcttggcgttcctttatgcctggaagaacaagctcaacgtcgtcgtcgtgatcctcgcggcgggattggcgggctggctggtgtttccgaaccaaggctga

SEQ ID NO: 533469 - DNA, 945 bp, Stenotrophomonas maltophilia
ttgagctttattgccctattcgtcagcctgcccaccaaggcatcgaccggccgcatgcgcgtctggcgctccgtcaaggcgctgggctgcgcgacgctgcgcgatggggtctacctgctgcccgactcggccgatagcgctacggcgctggacgaagtggcggcgcaggcggtggaagtcgggggcagcggcgaggtctatcgactctcggggtgtgaggaagcccaggagggcgcgctgcgcgccctgttcgaccggggcgaggagtacgccggcatcgccgaggagatcaaggaactcgggcggagcttggcatccctggatggcgctgccgccgcgcgcaagctccagccgctcgtgcgccgcttcgagcaggtggtgcgcatcgatttctttcccggtgaggcgcagcggcagaccctgagcctactggacgacctgcgcgacgcgatcacccgccgcatgtctcccgacgagccgaccgcccggcaagcggatgttccgcggctggaccgcgccgactatcagggccggacctgggccacgcgggcgcgaccatgggtggaccgactcgcttcggcctggctgatccggcggttcatcgacccaagcgctcgcatcgtctggctggcgagtcccgccgactgccgcaatggctggctcggcttcgatttcgacggcgcggccttcagccacgtaggcaccaaggtcaccttcgagacgctgctggcaagtttcggacttgattccgcccctgcactggtacgtctgggcgaactcgtgcattgcctggatgttgggggactcccggtcgcggaagcgctgggcatcgaatcgctgctcgccggcctgcgggcatccgaacccgacgacgacgcgctgcttgcccgcgcatgcgaagtctttgactggctattgaagagttacgaggaaaaaacaacgtga

SEQ ID NO: 533470 - DNA, 732 bp, Stenotrophomonas maltophilia
atgagatcgttgagccgcgaagcgcggcatgagcgccgggttcaggtcatccggctacgcaaggccggcaacacctacgacaagatcgccgcgctcaccggcctgagtcgcacaggcgtcttcaacatctgcaaacgccatgaggcgctcggtgccaaggcgctgcacgacgccattggcgggcgcaagctcggcgaaaaccgcttgctcgaccccgcccaggaggccctggtgcgcaagctcatcgccgacaagacgcccgatcagctcaagatgccctacgcgctgtggacccgcgctgctgtggcccaactcatcgaacagcgctttgggctgcgactgcaagtgcgcaccatgggcaagtacctggcgcgctggggcttcacgccgcaaaagccgatgaagaaggcctacgagcagtcaccggcggcggtcaagaagtggctcgacgaggactaccccgccattgccgcgcgggccaaggccgagggagccgaaattcactggggcgacgagagtggactgcgcagcgacgatgtacgcggccgtggttttgcgcccaagggccagacgccggtggtgcgggtcaacaacaagcgccacaacctgtcggtcatctccaccgtgaccaacaaagggcagatgcgctggcgcatctttgacggggcgctcaacaccacaatcctgatcgacttcctgcgccggctgatcaagggacagacaacaaggtga

SEQ ID NO: 533471 - DNA, 231 bp, Stenotrophomonas maltophilia
gtgaaggaaggcaccggcagcttcggctacaacgcggccaccggccagttcggcgacatgctcgagatgggcatcctcgacccgaccaaggtgacccgcaccgcgctgcagaacgccgcctcgatcgccggcctgatgatcaccaccgaggcgatggtcggcgaactgccgaagaaggacgagaaggccgccggcgccggcatgggcggcatgggcgacatggatttctaa

SEQ ID NO: 533472 - DNA, 2253 bp, Stenotrophomonas maltophilia
atgcggcataccgcagcaacgcttccgctcgccctgctgagcctggccatcagtggccagctcgcagcacagaccagcaccaccaccggcatccgccagctggatgctgtcagcgtcaccgccgtgcgtggcgcgcgcagcgtggccgagatcgccggcaccgtgtacgccatcgagcgtgagcagatcgcccaacagaccgcggccggccgcagcaccgccgacatcctcggccaactggtgccgtcgctggcgccggccagtggcactaccagcaactacggcatgaccatgcgcggccgcagcgtgcaggtgatgatcgatggcgtgccgctgaccggcgcacgcgacggctcgcgccagctcaacagcatctcgccgacgatgatcgagcgcatcgaggtgatctccggtgccaccgcgctgtatggcgctggtgccagcggcggcatcatcaacatcatcaccttgcagccgggcaatgcaccggtgcagctggccagtcagcttggcctgcgcacgccgtcggatgtatccagcgacaacctggcctggaatgccgcgcagaccatgaccgtgcgcggtgacaccttcagcggtgcctttggtattgcctatggtcgccagggcgcatcgctggatgcacacggccgccgcatcggcccggagatcgcccagaccgaccgccaggacaccgaaaccaaggaactcaacgcccgtctggattgggcgctgagccctgcgcagcaactgagcgtgggcatgcgctggtatgacgaccagcaggacagcgactacggcccggactacggcccgcgcctggcggtgctgttcaaccccgcttaccagcccagccacaatgcggtcgatggcctgcagttgaatgcacagccgcgtacccgccaccagggcgtcaacgcgcagtaccgcaaccgcgatgtgttcagcggccaggaactgagcgtggaagcctattaccgaaacgaacagggccgttggttcccgtcggtatccaccctggtgcatccggcgctgcccggtggctatgcctatgtggcgatgcagtccaataccgacatcgacgtctggggcctgcgcaccgcgttgcacaagggctttgatatcgacggtcgcagcctgcagctgtcctatggcgtggaccatgagcgcgaggaagacagccagcgcgggcagatgtacgacatcaacaccttcatcgccagcaatggcttgaaatacacgccgactgcccagtatgcgatgggcccggatgtacgggtggataccaccggcctgttcctgcaggccgaccatgcgctgagcgagcgcttcagtgtgcaggccggcgtgcgtcatcagatcctgcgcaacaacgtggatgattcgctgccctacaccgaggccatcaccgccgacgccgtgcccggctatcagccgcagctgctggccggtggccgcgtgcggcattcgcagaccttgttcaatgccggtgtggtctacaagttcagcgatgcgcaacagctattcgcgaatttctcgcagggcttcagcctgccggatacacagcgcatgctgcgcgacgtgccggccaacttcgtcatcgacagccgcaacatcggccccatcaaggtggacaactacgagctgggctggcgcttgaacaatgcgcagctgcagagcgcggtgaccgcgttctacaaccgctcggacaagaccgtgcagttcaatcgcaactacagcgtgtcggtggctgacaccgatgagcgcgtgtatggcgtggaagccaacctgcgctatacgcctaccgcgcaactggagctgggtgcgagcgtggcgagcacgcgcggccagtaccgcgatgccgccgggcagtggcgcgagctcaatgccttccgcgtgtcgccgttgaaggctggcgtgcatgggcagtggcgttttgccaacgacagcctgctgcgtctgcagggccaagcggtgggcggcacggatgatgcctggcgtgatgcgcaggtggcggcagtcagcccgaccatccgcgcgacgccggcagcgaagatccgcggctacgcggtgtttgacctgattggtgagctgccgctggcgggtgggcgcttcagtgttggcgtctacaacctggccgaccgtgactacaagacggtgtatggccagcaggcggaagcgacctacggcaagttgtcgagcgtgccggcgcagggaaggacgtttggggttgggtatcgggtggagtactga

SEQ ID NO: 533473 - DNA, 1221 bp, Stenotrophomonas maltophilia
atgcgtactgagcgcgccgctgcctcccatttcggcctgggcgtgatcgtggtgctgtacatggcccatgcgctgccgctgtatttctacaacgtggcggtgccggccatcctgcgcagccagggcgtggacctgcgctggatcggcatgttgtcgctgctgtatctgccgtgggcgttcaagttcctgtgggcgccgctggtggaccgctggcacctgccggcattgggccggcgccgcagttggttgtggctgacccagctgctgttgctggtcggcatcctggtgttggccttcaccgggctggaccacggcctcacggtgttcgtgctggtcggcatgtggatctccaccattgccgccacccaggacatcgccattgatggctataccgtggaagcactggcaccggccgagcaccgcctgggcagcatggcgcagagcgtaggcgtggcgctgggcagcatggtcggcggtgccggcgtgctgtggctgtatgaaacgcgcggctggaatgtggccctgctcagcctggccgcgatgagtgcgctcaccctgttcgccgtgcagcagatcaacgaagtgccacgcccggcggcaggccagcggcccagcgtgctgcgtgcgctgcgccggcccgagctgcgctgggcactactgctgatcgtgctgtatcgcatggtggaagcaccggcgatggcgatggtcaatccgctgctggtcgaccagaagtggagcctgaccgagatcggcctgctgatctcggtgggcggagccggtgttggcatgttggccgctgtgggtgcggcctggctgctcaaacagcgcagcgccgaacagctgctgatgcacgccggctggtggcgcacgctgctgtatgtattgctggccgcgctgctgtacagcggtgtgcttgccacgtcgcagtttgggctgggcgcgctggtgattgccctgctggcgctgcgctatgtggcgatgaccagcctgtatgccttgttcatgcggatcagctcgcgcgagcaggccggcaccgatttcaccttgctggtctgcttcgaactgctgatctatttcatcggcggcgcgctgtccggcttcctcgccaaagaccttggctacgccgcgtattacgtggcgctggcgattgcctccgcgcttggcttgctgctgtgccggccgctgctgcgccgcttcgcgccttccctttcttctccctga

SEQ ID NO: 533474 - DNA, 387 bp, Stenotrophomonas maltophilia
atgggtttgacgatcaagcaggcggccgtggtccgcgccgtcttccacgatgcggtcagtgcggacgagatccgctattggttgcagcgcgtggaagcactgatcgtggcggccacgccgttctacttcatcgccagcaccgcgcccggcgccagcttcagtgacgattaccgggccatccaggcggtctggtacaagcagcacaagccggccttccgccagtactgcaaggggctggtgcgcattgccagcagcgccgccgaacagcagcggctggataccccggccctgcatgcggcctggggcgtgccctatctggtcaccaccgatgccgccgacggcatgcgctggatcggccaacagttggagcaggccgatgcgtactga

SEQ ID NO: 533475 - DNA, 945 bp, Stenotrophomonas maltophilia
atgcaggtctatacctgcgccgaactgatggacgcagcccacgccttgggcggccaggtggacttcgcgtccggcctgcccgacgccatgccggtgttggccggctggcagcaggtgcaggcactggacgccggcctggtgctgtacctcagccgcagccgcgacatggtgggcggctgcagccacaaccgcctgccggcgggcttgaccgccagcttcctgctgcagggcgaggccgacgtggccatcggcgaggaacgcctgcgcctggacagccgccacaaccgcaacccggcgatgctgatccacctgcgcgaggacgaccggttcctgcgccactggcaggccggccgccaggaaaccaaggtcagcctgcacttcagcgacgactggctggcccagcagctcgacgccgtcgccacgccgggcatcacccgcctgcgccgcagccatgcccgcaaccagcgctggcagccgaccgcagccctgctgcggcgagcggcaggcttgttcgaaaccgatccctccagcccaccgctgctgcgccgcctgcagcaggaaagctttgccctggaactggcggcaggcgtagtgcaagcactggcagcagagcagggcgagcgcgcgcttggcgcgcacctgcagcgctgcgtggaacgcctgcagcaatggctgcacagcggcgaggccgatagcctcagcatcaaccagatggcgcggcagctgggcaccaacgcggtggacctgcagcgcggcttccagcaacaacacggcagcagcatctgcgcctatctgcgcacgctgcggctggagcgtgcgcgacaagcgctgctaaagcagcgagtaccggtagaagtcgccgctgatatcgcgggctacgcacacagcagtagtttcagtgccgcgttcaaacggcagttcggcgtatcaccttcgcagctgtag

SEQ ID NO: 533476 - DNA, 564 bp, Stenotrophomonas maltophilia
ttgaaaaccccgcaaagatgcaagctcgaaaagctgtgccgctacatcacgcgcccggcgatcagcgagcagcggctgtcgatctcaccgcagggtagggtgcggtatcagctcaagacgccgtggcgcaatggcaccacgcatgtcgaatgggatgcggtggacttcatcgccaagctggcggcactggtcccgccgccacgcgcgcatctcacccgcttccacggcgtattcgccccgaatgcaaacctgcgcgcgcaggtgacgccatcggggcgcggcaagcggcctgcgggcgatgcggcgccagtggacgcaagcgcccacgacgagccgcgcagccccgagcagaagcgccgtgcgatgagctgggcgcaacggctcaagcgggtcttttccatcgacatcaccacctgcgcccactgcggcggcgcggtacggatcgtcgccagcatcgaggaacccaccgccatccgcgccatcctcgcccacttcgagaagcacggcgcgctggagcaagcgcactaccggcccgcagcgcgcgcgccgccgccggccgcgtga

SEQ ID NO: 533477 - DNA, 1038 bp, Stenotrophomonas maltophilia
atgccaagcacttcgaagacataccgccaactccagcctgaagaccgggtgacactggccagcctgcgccagcagggcttgggcgtgcgtgccatcgctggcatcttgcaacgctcgccttccaccatcagccgtgagttgcagcgcaacgctggcccactcggctacgccagcaccacagcacgctctcgctgccagcaaagacgtctatcggggcgccctgctcgcaagctcgatcccgagggcgtgctgtttggcgtcgtgcgtcagtgcctgcgctggcgctggtcgcccgagcagattgccctgacactggcgagtatctaccccaagggccacccgtaccgcgtgtcgcacgagacgatctacaactgcatctatgcccagcccgtgggcgagctcaagcgcgagctggtggcttgcctgcgtcaggctagaaacaagcgcaccccgcgcagcaagggcgatgaccggcgcggccagatcccggacatgctcagcatccatctgcgcccacccgaggtacaggatcgacagttccccggccactgggagggcgatctgatcaagggcgaggccaacgccagtgcagtgggcacgctggtcgagcgcaccagccggctgctgatgctggtgaagttgcctcaccccaggcccgccagtgcggccagtgtgctgcaggccttcacggacaagctcaacgccatcgcccagccgatgcgcaagacgctgacctacgatcagggccgggagatggctcgccacaaagagctgacggccaatacgggcgttgcggtgtacttttgcgacccgcacagcccctggcagaggggctccaacgagaacatcaatggcctggtgcgccagtacctgcccaagggcacggacttgagcagctacagccagcagcaactcgatgccattgccaatgagatcaacaaccgcccgcgcaagggcctgggggtgagaacgccgctggcggtgtaccggcaattgctgctcacccatatccagccacaatccagtctcgttcactga

SEQ ID NO: 533478 - DNA, 696 bp, Stenotrophomonas maltophilia
atggctgtccctgctggccgcgcaggcgcaggaatggcgaaggttgatggaggatgcttcgagctcggagattcgaggtcgagatcgccggaaacgcttggcatacaaggctgccgaaattgtagatctccgagatgctgtccggcgacgcaccgaaaagcggttgcccagggtgatggctggccccgacgccgagccaccagtggcagtcctgcaagtaccggggccgaaacgccgccagcgcgtgtgaggcgcttccgtaggggcgctgcccctacaccccgtagaatggccgctagatcgcttgggggtgccatagatggcgagttcgacgggactggtgtggaaggtggccctaggggtgttcttgggcggaagtgcattgctcttggcgacatgcggtgtcctgggcgtagcgcgacacgccgccatgaaggagcaggagcgcgccggggaggccctcgcccgcaagctctaccccaagtccatgccaatcgaagaagcgcggtcgaaacgggaaagcctgctgcgcgaagaagcccccaagaagattccaccgggataccggtgtatcaatggacaagcatttcgacgcgtggagaaaggctgggtgcaggtgtcttcttcctgcacaccgtgacgcatcacagcttgcggcgcgagaaggcccaatccatccatcgggcaacccagtag

SEQ ID NO: 533479 - DNA, 177 bp, Stenotrophomonas maltophilia; identical to SEQ ID NO: 324481

SEQ ID NO: 533480 - DNA, 1218 bp, Stenotrophomonas maltophilia; identical to SEQ ID NO: 351976

SEQ ID NO: 533481 - DNA, 831 bp, Stenotrophomonas maltophilia; identical to SEQ ID NO: 351977

SEQ ID NO: 533482 - DNA, 720 bp, Stenotrophomonas maltophilia; identical to SEQ ID NO: 351978

SEQ ID NO: 533483 - DNA, 357 bp, Stenotrophomonas maltophilia
atgaccggcaggggtgcggccgagaacagtgatgtgacgacaggtatcgcccgggtggcgatggccgagatcgtgcacgcgctgttgtcagatgccgaggtggcattgtttgccagattcgcccgcgcatgcaagctccgtgccggacagtggctgttccagcgtggccaccgcggcgagcgcatgtatgtgatcctcgaaggccagatcgaactggacttcggcgaggacctggtgatcaagacactcgggcagcatgagttcttcggagaactgggcctgctggtcggcgaccacctgcgcagcgccagcgcgcgcgctggtcgactgcgatgtgctggaactggggccggctga

SEQ ID NO: 533484 - DNA, 963 bp, Stenotrophomonas maltophilia
atgaacatcactgcggtagtcggcaatccggcgcaggtcctcaggatccgtaacccgcgcctgtgggttgtccagtacagattgcaccggacccttgtcggtcatgcgatcaaggaaatgaaccactcgatgggagtcgcccaactggaccgccaccgcggcggacatgacatggccgctcttcatcccgggtgttccgatcgaggcgatgcgctggctgtgctcggcgttgcgcaggatctccagttccctgggcagtgcatacatctcgaccttgccgtaatggggaccgctggcactgaccaggtcgcctgccaagacgtggttggtgaagggcgccgcgctggctggctggccttcaggaaggcgatatgccagcccggcggcaccgtagggattgaacgcgtcgccggggaggttgtagtggtgtgcagtgatctgtgcgagcgcgccgccgagggagtggccggtgacgtgtactggcccggctcccctttcttcggccagcctgagggcttgctttgtcagcgccagcgcgtcagtcatttgcgcgttgactctggcggtgaccatcgcggcgtcgatgccgccatcaagcataggctgacgatcaaactcggtgccgcgatgggcgacgattacttcctttgtattgatgttgaggtagacaatgccctgatatccgctcccagagtcacgacaagcgaggacctcatactttgttccgccgacggtgatgtcagaactgacgggcggaagcgggtccttatagacattgtccgaaagcgccgcgctttctctaggattcattacgatgctccttcaatccgtgtggagacttcgattggaaagtactcctcgcgcttctctgggggcatcttttcgtaccaacttgaaggctcggttggcgtccgctctgtcgactgtcctgtggtcaagggcggcaatgcgcgctttacgtaa

SEQ ID NO: 533485 - DNA, 1230 bp, Stenotrophomonas maltophilia
atggacgagaggctgcttttcgcgtcggccctcaatctggcccagccttggtacgtgagcggtacgcgcttcgatgcccaggccaggtcgttgacgatcctcatcgatttcactgcgggcagccgcttcgcgcaccctgccgcatcggggcagcacccggtgcatgacacccagatcaagcgcttccggcacctgaacttcttcgagcacgagtgcttcctcgaggtgcgcgtgccgcggatcaagctgccggacgggcgggtgctgctggtcgagccgcactgggccggcaggctgtccggcttcacgctgctgttcgaagccttggtgctcacgctgtgccggcagatgcccttcgccgcggtcgcgcggctggtgggcgagtcctggcatcgcgtgcacgcgatttgcgcgcgttatgtcgagctggcggtggatgaattggacttgtcggcgaccagggcgctggcgatcgacgagacgtcctaccggcgtggccacacttacctgacgctggccgcggatgccgagcagcgcagggtcgtgttcgtgaccgaagggcgtcgtgttgaggcaatcgccgcgcttgccgggcacctggccgcgcatcaggccacccccgggcagatcgaatcggtgagcatcgacatgtcgccctcctatatccgcggcgtcaccgatcacctgcccaatgcgcgcatcaccttcgacaagttccacgtcatcgcccaggcctccctcgccctggatcgcacccgccgagccgagcagaagagcgatccggccctcaagggcctgcgctgggccctgctcaaggatcgcgaccgcttgccgcgcgagcagcgcggcgaactcgatgccctgatcgccgccgccaccagcaagcgcaccgcccgcgcctggctgtatcgcgagaacttgcgcgagatcctcgagcgcaagcagatcaacgtggtcgccgcgctgctcaggcagtggtgcacgaacgtcatgcgctccaaggtcgagccgatgaaggacgtcgcgcggatgatccgcaagcacttcgacggcatcctggcctggagccagacccgccagaccaacggcttcctggaagccatcaacggcctgttccaggccgccaagcgcaaggcccgcggctacacccggctcgacaccatgcgcaccgtcatcttcctgatcgccggcaagctcgacttctcgcgcctcaacccgcacgtggcataa

SEQ ID NO: 533486 - DNA, 222 bp, Stenotrophomonas maltophilia
ttgaacgcgcggccggtgcatggcctggcgcagatggtgcgggcactcagtgcacagcacactccgatggcctggctgagccgcgccgaggtggtgcagctgggcaacatgctggtgttcgcgctgcccggcagcccgaaggcggcggcgcagtgcctggacatcctggcgccggtactgggccacgccctggtgatggtcgagggtggtggccacggatga

SEQ ID NO: 533487 - DNA, 354 bp, Stenotrophomonas maltophilia
atgccgcttcccgactccttctactggaccgcacgctctgcgagctggccggacgatccgcttactgtgattgcctgccagggcgtctgggtcttgtccatgaccgagcgtgtcgatgatggcatctgggtcgcacacctcgatcgacatcggtatggtcctggcaacggaccatgtcggaaatgcaccagctacgagcagggccgcgccggtgccgagctctgggtggcgaggcacgaggcgaggctgcgggacgacgtggcgaagatcgtcggatggcgagaagcgatccgaggcaatcggctggccaagggccgcttgaagcctccgtttccggggatggaaggcgagtag

SEQ ID NO: 533488 - DNA, 177 bp, Stenotrophomonas maltophilia
atgggtgatgtgtttgcagtggttgcaacggacactgactgcagtcacgcggtcgaggttgccatcgcggtcgcgtactgcatcaagatcgagaacgtagaaaaggcctgtatcgggcattgcggtgtaccaagaaattttggggatgttgcactgctcaatgcctccatcttgtga

SEQ ID NO: 533489 - DNA, 1005 bp, Stenotrophomonas maltophilia
atgaatgatctgttgtcccaggacgagatcgatgccctgctccacggcgtggacagtggcgcggtcgaaaccgatccggaaccgccgtcaggcgaagcgcgctcgtacgacttcgccagccaggaccgcatcatccgcggtcgcatgccaaccctggaaatggtccacgagcgtttcgcgcgcctgtggcggatcggcctgttcaacctgatccgccgctcggccgagctgtcggtgcgcggcatcgagctgatcaagttcaacgactacatgcactcgctgtatgtgccgaccaacctgaacctgatccgcttcaagccgctgcgcggtaccggcctgatcgtgttcgagccgaccctggtgttcgccatcgtcgacaacttcttcggtggcgacgggcgctaccccacccgcatcgaaggccgcgagttcaccgccaccgaaatgcgggtgatccacctgctgctgaagcagaccttcgccgacctgcgcgaggcctgggcaccggtgatggacgtcgacttcgagtacatcaactcggagatcaacccgcacttcgccaacatcgtgacgccgcgcgaatacgtggtggtgtgccgcctgcacgtcgaactcgatggcggcggtggcgacatccacgtcaccctgccgtattcgatgctggagccgatccgcgagctgctcgacgcaggcatccagagcgaccgcaacgaccgcgacgagagctggggcaagaccctgcgtgaacagctcaacatcgctgaagtcaccctgtccagcgtactggccagcaagcgcatgaccctgcgtgacctgacccagctgaaggtcggcgacatcctgccgatcgagctgagcccgcaggtgccggtgtgcgtggagaacatcccggtgttcaccggcgagttcggcatcgccaacggcatgaacgcagtgaagatcaccgctacccatccgccgggcacccgcccgcgcgtacccgtcatccaggaagacccgcaatga

SEQ ID NO: 533490 - DNA, 420 bp, Stenotrophomonas maltophilia; identical to SEQ ID NO: 511585

SEQ ID NO: 533491 - DNA, 780 bp, Stenotrophomonas maltophilia
atgcgtgtcacccgtacccgtcttgccaccctgatgccgtggctgctgatgctcgccctgtgcctgttgccggcactggccttcgctgcacccggcgcaccgaccacgccactgccggacatcaacgtcggcaagatcggtggtgcgccggtcagcctgccgctgcagaccctgctgctgatgacggcgatcaccctgatcccgtcgatgttgctggtgctgacctcgttcacccgcatcatcatcgtgctgggcctgctgcgccaggcgctgggtaccgggcagacgccgtccaaccaggtgctgctgggcctggccctgttcctcaccgcgatggtgatgatgccgacctgggacaaggcctggagcaccggcatggcgccgtacctcaatggcgagatcgacttccagaccgcctggacgctgaccaccacgccgttgcgcggcttcatgctggcgcagatccgggagaccgacctgatgaccttcgccggcatcgccgggcacggcacctacgccagccccgacgcgatcccgttcccggtactggtcgcatcgttcgtcaccagcgagctgaaaaccgctttcgagatcggcttcctgatcttcatcccgttcgtgatcatcgacctggtcgtggccagcgtgctgatgtcgatgggcatgatgatgctgtcgccgatgctggtgtcggcaccgttcaagatcctgctgttcgtgctggtggatggctgggtgctgacggtgggtacgttggcggcgagcttcaatccggcgtga

SEQ ID NO: 533492 - DNA, 792 bp, Stenotrophomonas maltophilia
atggacgccgccacccagatggctgccgacggcctgcaggcctttggcatgatcggcaccgtgctgtggaccatgctgcgcatcggcgcggtggccatggccatgcccatggtcggcacccgtgcggtgccggcacggatccgcgtgatcctggccggtacccttgccatcgcgttggcaccgctgctgccgccggttccggactggaccggcttcgatgctgccaccgtactgaccatcgcccgcgagctggccatcggcgtgtccatcggcttcctgctgcggctggtgttcgaggccggcgcgatggccggcgaactgatcgcccagggcaccggcctggccttcgcgcagatgagcgacccgcttcgtggcggcacctccggcgtgatcgggcagtggttctacctgctgttcggcctgctgttcttcaccgccaacggccatctggcgctgatctcgctggtggtggacagctaccgggcgctgccgatcggcgccccgctgccggacccgcacgccttcttcagcatcgctccgaccttcctgctgaccgtgctgcgcggcgcactgaccctggctattccactgaccgtggcgatgctggcggtgaacctggccttcggcgtgctggcgcgtgctgccccggcactgaatccgatccagctgggcctgccggtctcactgctgctgggcctgttcctgctggccctgctggccggggaaatgggcccgccggtacagcgcctgttcgatgccgccttccaggctgcggacgcggtcacacactga

SEQ ID NO: 533493 - DNA, 2136 bp, Stenotrophomonas maltophilia
atgctggtaggcacgtacaacccgtggctggtggcgatctcgttgctggttgccgtgatggcgtcatacaccgcgctggcgatggccgggcgcacggtcaccgcacccggcaagggcgcggcctggtggtggcgcctcggtggtggcttcgccatgggcctgggcatctggtcgatgcacttcatcggcatgctcgccttcgacctgcccattccgctcggctacgacctgccgatcaccctgctctccctggccctggccatcgcctcatcggtgttcgcgctgtggctggtttcgctgcgcaccctgccgcacccacgcctggccggcggggcattgctgatgggtaccggcattgccggcatgcactacgtcggcatggcggcgatgcgcatgcaacccggcatcgactatgacccgggctggctgctgttctcgctgatcgtggcggtcgccgcctcatggactgcgttgtatgtggcattccgcctgcgcgcgcagcgcacccgtgtcggcgaccggctggcagccgctggcctgctcgggctggccatcgttggcatgcactacaccggcatggccgccgcacgctttccggaaggcagcatctgcggcgcggcggtcggcgatggcctgcagaacgagtggctggcgatgctggtagtggtgctgacggtcgcgatcctcgcggtggtgctggtggtgtcctggctggaccagcgggtggaggcgcagctgctgcggctgcgcaattccatgctgagcacttcgttgaccgatgcgcagcaggaactgacccaggccgcactgcatgatccgctcacccgcctgcccaaccgcctgctgttgcagcgccgcatcgtgcaggcactggccgaggccgaacagggcggtagccgcttcgcggtgatgttcatggacctggacggcttcaagcaggtcaacgatgcctatggccaccaggcgggtgacgcattgctggtggcggtggccgagcgcacccgccagctgctgcgcccgcatgacatgctggcgcgcctgggcggcgatgagttcgtgctggtggtgcgcatcgagcacgatgaggatctgccaaccctcgcccggcgcatcctgcaggcggtcggcagtgggccgttgctgccggacaacgaactgcaggtaaccgccagcatcggcgtggcgatctgcccggatcacgccgccagcgagcggcagctgatggcctttgccgacgcggcgatgtaccaggccaaggaatccgggcgcaacgccttcgtgctgttcgccgactggatgaatgacagcgccgaacaacagttccggctgctggccgacctgcgccgggccatcggcagcgagcagctgttcctgcactaccagcccaagatccgcgtggccacgcagaaggtggccggtgccgaagcattgatccgctggcaccacccggagcatggcctgattccgcccgatcggttcatccgcctggccgagcgcagtggtgcgatcaacgagatcgggcgctgggcgctggaccaggcctgcctacagctgcggcgctggcacgatgccggtcacgaaggctggtcgatgtcggtgaacctgtcgccggtgcagttcagttcgccgcacctgctgcaggatgtgcgcgcggtgatcgaacgccacaacatcgccccgcgccacctggtgctggaaatcaccgaaagcacggtgatgcgcgataccgacaccagcctgcgcctgctgcaggcgctgtcggcgctgggcgtaggcatctccatcgatgacttcggcaccggctattccagcctgctgtacctgaagcggctgccagccaccgagatcaagatcgaccatgcgttcgtgcgcgacctggaacacagtgcagaggacgtggtgatcgtctcggcgatcgtggcgctgggccatgcgctggacatggacatcgtcgccgagggcgtggagaccgccgcccagcgcgcctacctggagcgcctgggctgcgactacctgcagggctacctgctgggacggccggtcgatgcggcgcgcttcatgcagctgcacgacctgccccggccgcgggtggaactggcgcagagcccaccgcccagcgacaacgcgccccggtag

SEQ ID NO: 533494 - DNA, 1131 bp, Stenotrophomonas maltophilia
atgtccgagaacgaatccgccggcgaaaagaccgaacaacctaccgaaaaacgcctgcgcgacgcccgtgaacaaggcaacctgccgcgctcgcgcgaacttggcaccgccgccgtgttcggtgccggcgtgctggcgatgatggccatgagcggctcgatcggccgtggcgccagtgcctggatgaagcacgcgctcagcccggaacagggcctgcggcagaacccgaaggaactgttcggccacttcggcgacctgctgctgcagttcatgctggtgatcgcaccgctggtgctggtctgcctgctggccagcttcgtcgccccgttggtgatgggcggcctgcgctggtcgcagaaggcgttgctgcccgacatcaaccgcatgaacccgatgagcgggctcaagcgcctctatggccccgaggccattgccgagttcaccaaatcgctgctgcgcgtggcgttcgtcggtgtggccgccggactggtggtctggaccggcttcgacaccctgcgcgggctgatccaccacccgctggagaccgccatcaccgacgggctcggcttcaccctgcgcctgctgctggccaccgccggcgcgatgctggtgctggccgccatcgatgcgccgtaccagcgctggaactggatgcgcaagctgaagatgacccgtgaagagctgcgccgggaaatgaaggagagcgagggcagccccgaggtgaagggccgcatccgccagctgcagcagcagatggccaaccgccggatgatggaggcggtacccaccgccgacgtggtggtggtcaacccgacgcactacgcggtggccctgaagtacgagggtgggaccatgaatgctcccaccgtggtcgccctgggcgtggacgaaaccgccctgcgcatccgtgaggtggccgacggcaacaaggtcgcgatcgtctccgccccgcctttggcacgcgccttgtatcgggaaggccaactcggaaaggaaatccccgtgagactgtattcggccgtcgcccaggtcctgtcctacgtctaccagctgcgcgcctggcgcactggcccgatgccggacgccccgcacatccaggtggatgaattcggcaaggggggccgcccgtga

SEQ ID NO: 533495 - DNA, 1683 bp, Stenotrophomonas maltophilia
gtgcagaccaccgaccacccgagttctccgaccgccaccccgccgtcttcgtcccgtgaccacagcatgaaaatcaaacgattcgtcgccgccgacatgcgctcggccatgaacctggtgcgcaaggaacatggtcctgacgccgtgatcctgtccaaccgccggatcgaggaaggcgtcgagatcgtcgctgcggccaactacgacgagagcgccgtccagcgtgcactggaagcctcgcgccgtgatgtcgcaccgccgccggcacccaagccgcgcaccgccgccgacgcggtgatcgccgctgtcacccgccgccgcagcagcaccccggcgccggaaccggtcgccgccaccacctcggcggtggccgccctcgcccgtgcggccgttggggccaccggccgtaccctggacagcgccgacgagatcgtgccgacccgtggcagcactggcttcgccgccaccctggcgcgcgccgccgtcaacgaaccggcgctacccgaacagagcttcgccccgttcgccgaggccatcgttgcaccggccgctaccgtgccggccaaccgcgcccgcttccagatcgacccgccgcgcgacatgcatcacgaaagcgtggccccggccgtgcagccgccgccgctgccgaccgctgccgtgaccgaagcgcagcccgggatcgccgccagcgaaccggcagcggtcgaagccgccggcgaagccagcccggcccccatgctggccccggcaccgacgctgaccgtggttgctcaggacgacgccgagatccgccagctgcgccaggaagtggccggcatgcgccaggtgatcgagcgcgagatgaaccgcttcaccgacgagcgcctgcgtggcagcccggtgcgcgccaccgcgctggacctgatggacgagtacggtttcgacgccgggctggcccgcgacgtggccatgcagatcccgctggagacagaagcccatcgtggccgcggcctgatgctggggctgatctcgcgcaagctgccgatcgccccggtcgacccgctggaagaaggcggcgtgatcgccctggtgggcccgaccggcgccggcaagaccaccaccatcgccaagctggcctcgcgcttcgccgagaagcatgcgccgcgcgacgtggccctggtgaccaccgacaccacccgcatcggcgcccgcgagcagctgtacggctacggccgccagctcggcatcgcggtgcacgaggccaacagcggcaccgacctggaccagctgctggaacgcctgaaggactacaagctggtgctgatcgacaccgccggcctgggcccgcgcgaccgcgcgctggccgcgcagctgcagtggctgcgcgccgcccgccaggtacgcaccctgctggtgctgccggccaacaccagcttcggcgacatggacgaggtggtccgccgcttcggcgccgccaacctgcagggcctggtgctgagcaagctggacgagaccggccgcttcggcaacgccctgtcagtggccgtggaccacgccctcccgatcacctgggtgaccgatggccaggacgttccggaggacctgcaccgggccagtgcggccaatctcgtacttcgccttgaagatttgcgccgcgcggccgatatgccctgcaacccggagttgaaccatgccgtcgcgtga

SEQ ID NO: 533496 - DNA, 888 bp, Stenotrophomonas maltophilia
atgccgtcgcgtgagtacgccaagctgaccaagaccttcccgctgtcggccacccgcagcgagccgctcggccctgtgcgcaccattgccgtcactggcggcaagggcggcgtgggcaagacgaatgtgtccgccaacctggcggtggcactggccggcatgggcaagcgcacgctgctgctggacgccgacctgggcctggccaacatcgacgtgatcctggggctgaacccgaccttcacgctggccgacctggtcgccggccgctgctcgctggacgacgtcatcgtcgaaggcccgaacggcgtgctggtggtgccggccgcgtccggccgccggcacatggccgagctggccccggccgagcacgtcggcctggtcaacgtgttctccgagctggaacgcgaactggacatcatggtggtggacaccgccgcaggcatcaccgacggcgtgctgaccttctgccaggccgcgcaggacaccgtggtggtggtctgtgacgagccggcctcgatcaccgacgcctacgcgctgatcaaggtgctgtcgcgcgaacgcggcgtggaccgcatccaggtagtggccaacatggtgcgcgaccccaacgagggccgcgtgctgtacgaaaagctgacccgcgtctgcgagaagttcctcgccgatgtctcgctgaactacctgggctgcgtgccgcaggacgactggctgcgcctgtcggtgcagcgccagcagccggtggtgaaggcctacccgtccagcccggccgcgctggcgatcaccgagatcgcgcgtcgcaccgcacgctggcaggcgccgaccgaaccgcgcggcggcgtcgagttcttcctcgagcgcatcctcaagcagcgcggggtggccgcatga

SEQ ID NO: 533497 - DNA, 744 bp, Stenotrophomonas maltophilia
atgaaaggcgcagcccagtacagggaagtccagcgctcggcggccaacgaggtcatcgcccagcattcggacctggtgcggcgcatcgcccaccacctggccgcgcggttgccggccagcgttgaagtggacgacctgatccaggccggcatgatgggcctgatcgaagcctcgcgcagctacgacgccgaccagggcgcctcgttcgagacctatgcctcgatccgcatccgcggctcgatgatcgacgagatccgccgtggcgactgggtgccgcgctcggtgcaccgccgtgcacgcgatgccgccgccaccatccgccgcctggaacagagcagtggccgcgccgccagcgccaccgaagtggccgccgcgatggagatgccgctgcccgaatacctgcggttgatggaggacgccgcacgtggccaggtgctgagcctggagtcgcgcatcgaggaccagggcgagctggacaccgtcgcccagggcggcccgaccccgcagcaggtgctggagcgtggtgagttcggccgcgagctgggcaaggccatcggccacctgcccgagcgcgaacagctggtgctctcgctctactacgagcaggaactgaacctgaaggagatcggcgcggtgctcggcgtgagcgagtcgcgggtctgccagatccacggccaggcggtgctgcgcctgcgtggccggctcaagattttcgaggcggcggacgccggcctggaagaatga

SEQ ID NO: 533498 - DNA, 381 bp, Stenotrophomonas maltophilia
atgcgcatcctgatcgtcgatgacttctcgaccatgcgtcggatcgtcaagaacctgctgggcgatctgggcttcaccaataccgccgaagccgaggacgggcatgccgcgctgtcgctgctgcagagccagccgttcgatttcgtggtcaccgactggaacatgccggtgatgaccggcatcgagctgctgaaggcgatccgtgccgatgccaagctgaagaccctgccagtgctgatggtcaccgccgaagccaagcgcgaacagatcatcgaagccgcccagaacggcgtgaacggctacatcatcaagccgttcactgcgcagacgctggaagagaagctcggcaagatcttcgaacgcttggcggccagcgcctga

SEQ ID NO: 533499 - DNA, 1830 bp, Stenotrophomonas maltophilia
atgagcgcggtatccgacgacatcactgccgatttcatcatcgaggcacaggaaatcctggatcgcctgggcgaacagctggtgtcgctggagcaggcaccgcaggacaccgagcagctcaacgcggtgttccgtggataccacacgctcaagggcggtgccggcttccttggcgtcactgcgatggtcgagctgtgccacgccgctgaagaggccctgggcatcgcgcgtgccgggcaggcggtgctgcaggcccaccacttcgacgccgcccagcaatcgctggactacctgcagtcgatgctggacgccgtgtcctccggcaccgagccgggttatgcgccgccggacctgatcgcgcagttcgacatgaacggtggcactgccgcgccggtcgctgcggccgcccctgcggcagctggcagcgacctgatcaccgacgacgaattcgaggccctgctggaccagctgcatggcggcaacgcaccgaccgcggtcgcgccggccaggaaggccgacgacggcctgatcagcgaagacgagttcgaagcgctgctggaccagctgcacggcggcgctgcgccaggcgcgaagcctgctgccaccgtcgcggcggcacctgccgctgcaccgcgcccggcgcctgtaccggcgcccgccgccaagccggcggccaagccgatggccgaggccgagcacaccgtgcgcgtggacaccaagcgcctggatgcgatcgtcaacctgatcggcgaactggtgctttcccgcaaccgcctgaagaccctgcgtgcacgcctgcgcgacgaggagctggaccgcgccgtatcgacgctggacatcgccactgcccgcctgcagtcggcggtgatgcgtacccgcatgcagccggtgggcaaggtgttctcgcgcttccccaaggtcgcccgcgacgtcgcccgctcgctgaagaaggaagtggacctggagctggtcggcgccgaaaccgaactcgaccgcaacctggtcgaagcactggccgatccgctggtgcacctggtccgcaacgccatcgaccatggcgtggaaatgcccgacctgcgcgaagcacaaggcaagccgcggatgggccatgtacgcctgtcggcgcagcaggaaggcgactacgtcagcatcgaggtgcaggacgatggcgccggcatcgacccggagaagctgcgcgcgagggcgcgtgagaaaggcctgatcgatccggaagccgccgcccgcctgagcagcgaggaatgcctgcacctggtgttcctgcccggcttctcgaccaagcagcaggtcaccgacatctccggccgtggcgtcggcatggacgtggtgcagtcgcgcatccgcgaactgagcggccagatccagatccagtcggaactgggtcgtggcagccgcttcctgatccgcgtgccgctcaccctcgcgatcctgccgaccctgctggtgcaggccggcgaggacgtctacgcgctaccgctggcacgcgtgatggaagtgctgcacgcgccgcgcacctcgctgggctggttcgatggccgcgccgtgcttgatcgccgctcgcacaccctgccgctggtcgacctgcgccagtggctggatgtgacgccggccgcgtcaaccctgctgaccatcgtggtgctgcaggccggcgaagcgcgcttcggcctggtcgtggaccaggtgcgcgggcgcgaggaagtggtcatcaagccactgccaaaagccctgcgcggcctgcgcggttatgccggtgcaacgttgatcggcgatggtcgcatggcactgatcctggacgtggacggcatacgctga

SEQ ID NO: 533500 - DNA, 945 bp, Stenotrophomonas maltophilia
atgcgaaatcgtgcagccaaactgatcgtgatcgccttcgtcgtcgcggcgatgggctgcgagaagaagaagccccaggatgagtaccactacctcgccgccgactgcgcctgccgcgtcgacggtgcgccgtcaagcgcgatggtctacttcaaggccaagcccgacacttacggacaggccgctacacttgaggtcgagagcacgcaatgcacggttgtctcggcgtgcgaccacggatcgtactgggcaccagggaagttccgcctcacggtccaatcctcgagcgcgtggtcgcatccgaccggctggtatcgcgcgcttggtcagcgctcggctttggttgctgcgccacagccgcatggcaccaaggaagcagccgaggagatggtttccgtctgctgggccacgtgcgaccacggtgacgccacatggcgccctgccttcccatccacgcaggacacgtttgacgacatgtccgcgtttctggatcgaatcaagaatgcccaagtacgcgcgcgcacggaaggcgatgtcagcattccagccagtgacgtgcaggccatttttggggtggcctcggatgcctgcgagcgcggtccggtcgtagtcggccccgacggcgtaaggaacgcgtcaagtgacacggtcagcgactgcgccatcccgttcgctaccgcgcggcgagacgacggccccgtgctatccggcaatttcatcgtcggtccagaagttgagtcgcaactggtggaaagctccgatgtcgacgcacgattcacagacccgctgaagcggccgagaatcgaagcgaagccaccaaacggcgacgccttttccggtgaccttgcggggctccgcaggacatcgacaagtgccggcacgacggtaatcacgtacgcgaccgatcggcacgggtgcttcatgacctaccgcggggacaagtga

SEQ ID NO: 533501 - DNA, 660 bp, Stenotrophomonas maltophilia
atgctggcggcgccgaacgcgttcgccggcggcaatttgacttgtcccgagctgcaggagacggaggaattttcatcctcgaagttccagccgcccgggcagcggggagcaaaggcgcctgacccgaacgcggttccaatgaggatccgttgggaatacgagccagctggtctcgaagagaacccgcatgatcaccaattgcatcgcaagtgcatcatgcgaatgcgcttagacatccggatcgattggcgcattgcaagtgacatcgcagccatattccagccttacagcatctgcgaggcaaagatcagcacgggcgtcggaggctggctcgcgcggggagaacactcgctccaagctgacacgcacctgcaggtgaagatcaaaaagtgtgggacgcacatctggaccgaatgtcacgatgtttggaagtgcagcaagactaggcgcccctatacgatccaccttggcgaattggacgtgacgctccgtgctctactcctggcaagtgccccggaaggggttggtcaactggatgtcgacagcgtcgcgagggtgggcgacgtcaagtacacgctgccaggggatatcggcgctcgcgtccctcaagcggtcgtggatctgatcgttccagacgcattcgactccgcgttggagtag

SEQ ID NO: 533502 - DNA, 663 bp, Stenotrophomonas maltophilia
gtggacagcttcgccacgcagcttgcgggactgaatatatcgggaggccgaccctgcatgcagtcaggcgggtggaatggcggcgcggcgatctgcatccgcgacccaacgtatgcggacaagcactatttcgagttcgatccggccacgttcgccgtaacgaacggagtatgggcagcgaacaatacgagtgatccatgcgtcgccgacaccagcggccaagtgtatcgagcttgggcgcagcagataaagaaattcgccgaggataaggcggggtataaggttgtggtcagttctggcgatagcttgtggaggctggctgaggaagcgtatggatttggctctcactgggtcgcgctggcctcagcaaatgagctgcaaattgcgccggacgtacgcctacaacccggacagctcatttacgtccctaggccgagcctactctacgacgccgacgcgccatcggtaattctgcgaggcagctctctgtggaaagagtggaagctcgcggccacgacgtgtcctgctggaacggtccggatttcgtgggaggaactgactcagaacctagatctcggcgagggcaagtcctaccagggggaaaggcccgagatgtgccgagcgcccagtgaaacgagcatgccaatcccaagcgcagactag

SEQ ID NO: 533503 - DNA, 390 bp, Stenotrophomonas maltophilia
atgggcatcacggtcgaattcgccaaactaggggccagactggtgaacaaccagtgggccgtttccgcgttaaccgggaccgagatggttgcgagcctgtggttccacaggctcaagactgggaacggacaactcgtgtatcgcgactatctcggtcggtggtctgggcacggcaaccgcctatttgcagaacacctcagggttgcgatgtctgatcaacgcccggtgcgcctggtcattgcaaagacggaggatgtggatcttatcgagtcgggtggagatggttccaaggccaagaagacattcaaggctcggccggaatgggtgggccgggtaacggactttgatggtgaccgctttacgatcgctttcgatagggttgcggcttag

SEQ ID NO: 533504 - DNA, 2793 bp, Stenotrophomonas maltophilia
atgtcgctgaagccatggcgtgaaatcgctgtcccgcacgaggatgtcctcaaggggactttccagcaggccgagttcgctgcggacatcagccgcgtgcacgatcgttctgcgaccagcgaatatcaggacccggtgctgttcttccagcgcacctacatcaccgagggcatgcgtctgctgctcgattctgttgtgcggcggctggccgggaagggtggtgatccggtcattcaactgcaaaccgcgttcggtggcggcaagacccacaccatgctggccgtgttgcacctggcgggcggccaggctgcagcgagcgatctggcgggcattccacccatcctcgatgcggcgggagtgatgacgctgcccaaggcgcgcatcgctgtattggacggtactaagctggcgcccaaccaaccccgtcgggtggaaggacatgccattcgcactttgtggggcgagctggcttggcagttgggtggggctgaaggctacgcacgcgtgtccgagtccgacgcggcgggcacttcaccgggtaaggatgtactggccgcgctgatcgccggtgctgcaccttgcgtgatcctgctggacgaaatggtggcctacatccgccagttcgaggacgggaaatcgctaagcggtggcactttcggttccaacctgtccttcatccaggcgctgaccgaagcgatgaagatggttcccacggcggtactgctgggctcacttcccgagtccaaccgcgaaaccgtggatcagcagggcgccaaggcccttgaagcgctagagcactactttgcccgtgtgcaggccatctggaagccggtggcgacggaagaggcgttcgagatcgtgcgcaggcgcttgttcgcccagatcaaggacagggctgccgccgatgccacctgtcgcgccttcgccgatcattacgtcacccatgcgacggacctccccggggaaacgcaggagggtaattacctgcggcgcatgaaggcggcctatccgatccacccggaagtattcgagcgcctctacacggactggtccacgctgcccaacttccaacgcacgcgcggcgtgctcaagctgatggccaaggtcattcatcggctgtggcaagacggcaaccaggattatctgctgatgccgggtagcctgccgctgtacgacggctcggtgcgcacggagttgaccaattacctgccgccaggttgggacccggtcctggagcacgatgtggatggcgagcgcgccgaacccacggacctggatcagcgcgagccccggtttggcgctgtgcaagccagccgtagggtgacgcgctgcatcttcttgggcagcgcacctaccagcagcaacagcgtcgccaagggcctcgagaccgagcgggtggtcctcggttcccttcagccgggccaagcaccccatttgtatcgcgatgctctcgggcgcctggagacacgcctgacgtttctcaacaagggcaacaaccgctggtggctggacgttcggccgaatcttcggcgggagatggaggagcgcaagcgtcggttcgccgagaccgatgtggtggaaggcatccgagacgcgttgcagcgtgtcatgggaccaagttctatcgacgccatccacttcttcacgccaagcgtcgatattcccgacgactggactctgcgactggctgtattgccgcccaatacggcatggacgcgatctgggcccaaccctgcgcgggacgcagcggccgcgctgctccggtcgcgcggcgatcagccgcggcagcgacaaaaccgtttgctcttcctggctgctgactccgatcaagtgatgcacttgaaggagacggtgcgtgcgctgttggcttggcgcagcattgagacggacattcgcgaattgcgactcaaccttgatgcgctgcaggctcgacaggcgacccagaaccgcgagcagaccttggacacggtgcatcgactggtgcgcgaggcatacaagtggctcgtggtgcccagtcaggcaccgaagagggacggcggtttgggcgatattgagtgggaaggttttgtgctcaatccggcgaagccgggtcttggtaaggaaatcgaccaggtgctcgccgagaacgaactcgtcattcgggaatgggcgccggtgcatttgcacaacctcctcaagacgtggttctggcgaaacgatgtagtggatgtcccggcgcaggaggtgtggcagaagagctgcaactacctctacttcccacggctggcgaaatctacggtcatgcagacaaccgtggctgcaggtgctccgagccgggacttcttcggtgtggccagcgacaatactgcagatggttatcggggattctcactcggcaagatcacgacgcccttcatggatgcgttgctattgatcgagccttcgattgcagctgcgtacgaagctgcgcaagctcaggcccaaccacagcccggagctgaggctcgcggtagtggaaacgggagggctgttccagctgcgaccggtataccagcgacccaggcgacgactccagagcaaaagtcgcagccgacgcgcttctttggcaccgccgacatcgacccgcttacggcgtcgctgcagttctcgaagctggtcgcggaactcgtcgaactgttcagcgcagatccgcgtaccaacgttcgcatccgtgtcgacatcgaagcggaggacgcacgaggtttcagcgagaccaccgtaagggcggcaaaggaaaacggcaaacaccttggggtcaaaacggattttgactga

SEQ ID NO: 533505 - DNA, 1728 bp, Stenotrophomonas maltophilia
atgtcgatgcagaacaaccgctgttcgatcatgaaactagtgcggtcactcaatgaccgcgaggcgaacggtggcttttggctgccgaacatccagcggccgttcgtatggaaggaagagcagatcgagcgcctgttcgactcgatcatgcgcgaataccccattagcacactactggtctggcgaacgaaggagcaggttaagcaccgcaagttcatcgacaactacaagacggcaacgcacctctccgactacttcgtgcccgaccacgagggtgccaagaacctggtgctggacgggcagcagcgcacgcaaagcctgtacatcggattgcgcggcagctacgagggcaaagagctgtacctcgacatgctcagcggtgagccgaaagcgccggaagacgtgcggtaccgctaccggttcctagctgatgccgcttggccttgggtcaagctgaaggatgtggtaaaccagcttgatcgccagaaccggttgccaacccaggtcgctgcggatcttgaagaaaaggcggggacggcgctatccgaagctcagcgaaaccggctcctggagaatgtgatgttgatttggcgggagttcgtccatgacgacaacatcagctaccaggagctcgacggtgttgattcgacggcataccggatcgacgatgtggtcgagatcttcatccgcgcgaattccggtgggaccaagcttggcaagtccgacctgatgttcagtctcgtcgcgcagagctggagcgaggccgacgagagccttgaggaactgctcgataagttgaaccagtccggctacggcttcgaaagggacttcgtcctcaaatcttcgctggtgatgctgggtcacggagcgaagtacgacgtggccaaattccgcgacccggccattcgggacgagttcgtggagaaatggcaggagctgtccgacgccattagaggcgtcaaggactttctgcaaggcaagactttcctgcgcaccgacaaggctgtcccctcgtacttgggccttattccgctcatctacttctgttaccggttgccggaccgctgggccagcagcgccggccgcgagcagtacgtactgcggaccatgctgacgggcgcattcagcggcacgccggacaacctgatcgaccgctgcgtcaaagccatccaggagcgaggcgatttcgacgtcgacgaaatgttccagatcatccgggacgacggccggagcctggaggtcaatgccggaaccattctcggcacgcgctacggcaagccgctgtcgcacctggttttcaacctgtggtaccgggatttcgattacgagccggcgctggaggacaacttgccccagcaggatcacattttcccgcaatcggcgctgaaagagcagaagcacatcaacccggcgaccggtcgttggggacgcatgtacgacaagaacactcgcgaccagatcgccaatctcgccttgctgacagcgaaggacaatggcttcagtggcaagtccggtcagctcccggagaagtggctgcccgaacagatagcgaaggaccccgccttcctggagcgtcacctaatcccgaaggatccggaactttggaagctggacaactacccgaagttcatcgaggcgcgccgcaagctgatcctcgagaagttcaagccctacctgcaggcaagccagagcgttggagaagaagatgtcgctgaagccatggcgtga

SEQ ID NO: 533506 - DNA, 480 bp, Stenotrophomonas maltophilia
atgaaagcagtatgcgtcgcgttgctcatgttgatcgccggcacggcagttgccggtgactacgacatgacggtcactcgcaagggctccaacctctacaaggtggatggcaaggacgtctacatccatacgcgctactgctacgagtacgtctacggcgaggattcgctactgcgaatgtccggcaccagcggcaagatcgtgttcatcgacgagggatcgagttgcgacgtcaaggctgtgttcggtgaaagcgatgtgtcagcggggaagtacaaagttacggtcagccgggaggacgatgactggtacgaagtgtttggcacggacaccttcatcaagaccagcgcgtgcctgaatctgtccttgggggatgaggccatcctgaagctttctgggcctgggtatggctcgctctactttatcgatgacgacgatgactgcatggtcgaaggcgtctattctaagttgcgcctttga

SEQ ID NO: 533507 - DNA, 2940 bp, Stenotrophomonas maltophilia
gtgaaagcaccgattcgctccccgaagaaacttatcgaagttgctctgcctctggacgacatcaatgctgaggctggcctgcgcaaacggaaggcgcctgcggggtatccgaccgcgctgcacaaatggtgggcacaacggccgcctgccgccgcgcgggcagtgctattcgcacaattggtgaacgatcctgggtatgagacaggccacggctttacccgcggggtgaacaagcgtgaggccgcggtcgaacgcgaacgtctgttcgacatcatccgcgagttggtcaagtgggagaatactaacaacgaggcggtgttgaacgcagcgcgcgccgaaatccgcaagagctgggaagaaacatgtcggctaaacgcaaggcacccacaagcggcagagctcttcgatcccgaaaaggtaccccccttttacgaccccttcggagggagtggcgcgatcccactcgaagctcaaaggttaggcctggaagcgcacgcttccgacctcaacccagtcgctgtgctcatcaacaaggcgatgatcgagatcccgccaaaatttcccggctgcgcggcagtggggccgattcctgcgggtgagaagcagggccgccttgctgaggactggtccggcgctcgcggactggcggaggatgtgcgccgttatggctattggatgcgcgaacatgcgcagcagcgcattggccacctgtaccccaaagtcgagatcactacggcgatggccgaggctcgcagtgacctgaagccactggtagggcagaagctggccgtggtcgcgtggctgtgggcgcgtaccgtgcgcagcccaaatccggcttacgccaatgtcgaagtgccactggcatcgacctttctgctgtctaataaggccggcaaagaagcttgggtcgagccggtggtagacggcaaagactatcgcttcgaggtgaggacaactaagggcaagcacaagctgccggcaagcgctaaagcaggaaccaaagttggtcgaggtgggaactttcagtgcttattgagcgagaccgccatccctgttgactatattcgagatgaaggaaaggcgcatcgaattgggcagcgcctgatggcgatagctgcagaaggccctagtgggcgagtttacttgtctccaacagatcttgatgagcaagtagctgcctcagccgttcctcagtgggggccagatctagtaatcaatcacaatccacgggatatcaggacgcagctctacgggctcacgagttaccgcgacctatttacttcgcgccaactcgttgccatgaacacgtttcttgatctcgtcggcagtgcccgcgagcgcatcctcagtgacgccaagaatgccggcatgccggacgatggccgcggcctcagcatgggcggcacgggcgccacggcatatgcggaggcggtcagcatctatctaacgtttgcggttagtagatgtgtggactacggatgctcacttgccacttggcgcccgaaagacaatgccatgcgatccggcatgtcgaagcaggcagttccaatgacctgggattttgccgaaggtaatcctttcggtggctccagctctggatttgtcgagtgcgctgaagtggttgccaaagttctagccgtggcgctcgcgccgccccggatcgggccaggagtagccattcagcgcgacgcggctggagcatttccgacggggtggcgtatgccggtagttagtacggatccaccgtactatgacaatattggctacgcggacctttcggatttcttctacgtctgcatccgtcgagtggcgcgaggtctatttcctgatctcttcgccactatggcggttccgaaagctgaggaactagttgcgacgccctatcggcacggcggcaggaaggaggctgaagacttttttctgaccggcatgaccgaagcaatgcaccgcattactgagttcgcgcatcctggatttcctaccacgatctattacgcgtttaaacaatcagaaaccagggggcaggagactgcctcgacaggctgggtgacgtttttgtcggcagtcatccggtcaggcttcggcatcagtggtacctggccaatccagaccgaaggagacaatcgacaagtgggtgtcggcgctaatgcgcttgcttccagcatcattctggtctgtcgtcgtcgtcccgacgatgcgccgagcatctcccgaaaggaattcctgagagaactcaagtccgagttgtccgaatcgctggatgccatgctcggcggtgatgttggcgtttcgccgatcgcgccggtggacttagctcaggccgccatcggcccaggtatggcggtgttctcgcgctacgcggccgtgctggaagcaaacggtgagccgatgagcgtgcatgccgcgctcacgctcatcaacaagcaggttgatgaggtgctggatccggacgctgtaggcgacctcgacgccgacaccaagttctgcgccgcctggttcaagcagcacggctggtccgccggcgccttcggcgaggccaataccctggctcaggccaaggccaccagcgtggacggcgtggccggcgccggcgtcatcgagtccaaggggggcaaggtcaagctgctcaagcccgccgactacacggccgactgggacccgatcgaggacaaccgcaccccggcttgggaagccctgcaccaattgatccgcgcgctcaaccaaggcggcgaagccactgccggtgcgctgctggcccgcatgcccgaacgcgccggccatatccgccagctcgccacctggctctacaccctgtgcgagcgcaacaaatgggctgatgacgcacgcaactacaacgagctggtcaccgcctggcacggcatagaggccgcggcccatgagactggccaggtcaacgttcagggtagcctggacgtgtag

SEQ ID NO: 533508 - DNA, 1668 bp, Stenotrophomonas maltophilia
atgagctgggaagacgtccaggcgctccgaaaagcagctcgttttcgcgaggccatcgaccttgccctcgagctgctgtcgcagggccatgaccggagggtcagaacgcaactcgactggtcctggtacggacttgtcaaggaactggtccgggagatgggagccaagctgaaggcctcgcaaccggttccgcccggtgacgtcactggattggtcaatgccttgcgtggctatgcacgccagccagccatcaggcctgacaaccccttgtccaacattctcagggaagtttccaaagtggcggggcacttgccgccgttcccggggtttgtgcgctgggtgggcatcgatggcctagctatcgaagactggcagtaccaggagcgcgacggcaagacctatcggccggttgcgatcgccgtggcgcgaggattggccaaatgggccaaggcccatcgtgatgccgaacaggcggacattgcacttgcacacgaatggctggaacgcatccgcccggtagcaaggggagacgacgcgctctggctggactgggatcgggcgctgatgctccggcgcatgggcgagtaccggctagcggcggagacgctcagcagcgtgttgaaagccaagcgcggcgagttttgggtctgggccgaagcggcacgcctgtatgcggacgagcagccggaccttgcccaagcgtgctattgccgtgcgctgcaatgcggcgccgaaggcaagttcactgtcaacgttcaccgcgagcttgccgtgctgttggccgaccaacaggaatacggccaggccagcagcgaagtcgcgcaggccatcgagattcgccagcaggaaggctggagtgtcgacgcgccgttgcaacacctgatcgatagcgcctggtatgacccgacgtcagaaggcatcgaggatccgaaagtcttctatgccaggcactcgcctgatgccctcgtgctttgtttcgacaatgtcgaggcaaaaccggccacgtatctgggcctgttgattccacatgcgcccaaggacccgccgccaggctggaaggcacggccgctcccgcgttttgccatccgcgacacgagagggcaggccatgagcctggtgggtccaggcctgcgacacctgaaatacgaactcggggcgcccgtcacggtggtgatcggcagacagaacggcgacgaccgggacacgattgtgcaggtcgcgtcgcgtccggatggggcgccatgggactgcacgcaatcaggcgcaggtattgtcgtacgggaagcaaccgcagacaaaccgatgaagatctacatcgggcgcgacagcgacgatgtcagcgtcgatagagcttggctcgacagggagccagcccgcttgggacaaggcgttcgtttccagctcacggagaatccgaagaacgggcgcaaggacctgttcgcagtggagccggggcccaggccggaaaacgacgtcaagcttgtgcaggggcgcctgaggcgaaatccgaaagggtttgcgttcgtcgacgacgcattcgtaccgccccatgtcgtggagaccatcgcgtgcgacgtggatgacgtcgcggctttgatcgtctacgccaagcatcccaccaaagacgaatacagctggcgtgccatcaagatgagcgccgccggatga

SEQ ID NO: 533509 - DNA, 2736 bp, Stenotrophomonas maltophilia
atgaccatccatgccttcgccggggaaaaggcgtccaggacacacgagaaccagatgctgcagatgttccttgaacgtctggaagatcggtggtcgcagagtacggactggatttacgtcgtggcgaatgcgatgtgggaaggggcggaggtcgatctcgtctgcatcctgcccaccatgatcctcgtggctgacttcaagaactaccgtgggcgcatttctggtgctgagaatgggccgtggttcgcggatggtgttcccgtaaagggtggggcgcaaaagaacccgtatgttcagttgcgcaacaaccgctattcgatcatggactggctcaaagccagagccaacctgggcggtcgcaatctcgggcacctcgccgcgggcgtgatcttctcggggccgatcatcgatgagctggatatttcacagcgatcaaagagctggtttcacgtaaccgatctcgatcgttgcgttacgaccttggactgcctggcatctcctgagctgacgctccggcaggacgaggtggagcacattgtccgtgtattgggagtcactccccatcgctggcggagttccagaccagccgtgcgtcccgttggagggcgcattgaggaggtcgccaagcccccgctgacccaacaccagttggaggcactcggcgcgattggccatttcctgcaatccgatgagagtcggtcgatgtccgtgctgggcatgacggcgactgggaagacgcgcctgctttcggaggtcgtggagcatgtcgagcgattggggcgaaaggcggtagcgctgacgcccaatgctcgcctcaggctgatggcagaagaagagcatggaatcgaggctcggagtgtctatcagcacctctatctggattctgatgacgctgagacggacaaaacatccccagctgcagacagcaagccaaatggaagggggaagtctgccccgacgatcccgcttcgggaatgcaaggatcccgaagattgcgtgtacctgattgatgatgcgcacttgctaggagatgcgctgttccgtacggcagacggcaagcagtacggtagtggccatctccttaccgacctgttcgaattcagcgggctggctaagggatcgcggcaggcaatcttcttcggggacccctaccagattcaacgtgcggcgcctcaggagtccgtcctcgacggcacattccaggcacttcgaggtgtcgctcacgtctccctcccactcgagcacgtcatcgagcttgggaacgggaaggccctgctcgggaatgcattgactctggttgaggcaatgcgcgccgagcgattctcttaccttgatctggcagaagacgacagctttcgcatcgtcgatgccagaacggccgcccaggagctgcaagagcatttccgcggagacccgttttccgtctggcatctggcggatacgaacgccaaagtagccgagttcgttcgctggttgcgaccacgtctctacaagagcagccctttgcaggtgcttgagcctggggaactcattgagttgagcagtgcttgtctccccgatggggtcaagttcactgaagcgcgccaggttcgcccggggtaccgctactgcgtcggcgatgtcggcccatcgaagaatgtcgagcagaccctgaaagggcggcccgacccgattgtgttccgcgttatcgaaactatgacgctggaaggggccggagtccttgtcgctgatcactcgggcgaggttgtcagagttcttgagaactatctgaccgcggaaaagcccgagcttccggccgacatggccattgcggtacgtgtctgggccaagccaagcccacgtctcaacacagagaattccggagcaaccgagcaagatggtgaggatgaaggtcaggatgaggccggccttccgggtgtgacgctcattcgttatggctatgccgccacggtccatcgcgcgcaggggatgtcgcagccgctctgttacgtcaacggcgatcatgcggctggccgccactcggacgcatacttccgatggctatatacgtctttgacgacggccggccggacgctgacgctgttcaactacaagccaattcacccgttcgattccatcgtgtggaatgcacgagctgccgaacagttgacagagatccccgtcggcgcaggttggtccttctcacccgtcagcacgatctccgagagtgaagagcggcgcgcgccacttggccttgccgaatccaagaacctgccgacatccatcgccatctggcttcggatcgtcagtgctgctgactgcgccggctggtcggtcaccaaggccaattgcggcccatacgcagagaagtacgagctatccgggccagacggcgataaagcctcgctggccgtgaagtacgacggcaagcatgtgatcaaagccctgcacctggatgaccaagcccattggccgctgctgtgcggtatcgccgaagcttgcctaggtagcaacgagtacagccccatcgcccgaaatctgcttgctgcactgggacgattggtcagctcaggcggctggcatgtggtctcggctgccgagagtgattggcgcctcaacgcgtctgtcgttcgcaatccaggcgaacgcgtctggttggagatcaacttcgacaagcagggtctggtcaccacggtcaggccactgaagttcagccagcccgccgtgcttgaggaaatccgcggagtcctgcaatga

SEQ ID NO: 533510 - DNA, 3516 bp, Stenotrophomonas maltophilia
atgttgaagctagaagaactcacaaagggcgcacaggtcgtcggtatagaccctggtggtccagtaacgatcgtcgccgcggatgcggtcggcgaggatgccctctccgtgttctataagggcgctgatggcgttccggccgagcgcatgctcttccgcgccgacgaacccaagctcgccattgcgactgttggccgcccttggggcttcgatgccgacggcgcggccttcaagctcgcggccgagtcgatgcgcatcaagctcgcgcacctgttcgacccgatgatggcggtacacacctccaacgttgaaccgctgccgcaccagatctccgccgtctacgagtccatgctgccgcgccagccgttgcgtttcgtgttggccgacgaccccggcgcgggcaagaccatcatggccggtctgttgatccgcgagctgatgatgcgcgcggatgctcgccgcatcatggttgtggctcccggctcgctggctggccagtggcaggacgaactgcgcgagaagttcggaatcaacttcgagatcttcagccgcgagcgtcaggaggcatctgcctccggcaactacttcgccgatgaggaccgcctgatcgttcgcctcgaccagctcgcgcgcaacgtcgagtacagggagatgctcgccctgacccactgggacctgatcatcgtcgacgaagcgcacaagatgtcggcgagcttcttcagtggtgaagtcaagaagaccaagcgcttcgaccttggcgagcagcttggcggtctgtgccggcacttcctgctgatgaccgccacgcctcacaatggcaaggacgaggacttccagctgttcatgtcgctgctcgacggcgaccgcttctacggcaagttccgcgaaggcgcgcacaaggtcgacgtgtccgatctgatgcgccgcatggtcaaggagaaactcctcaagtttgacggcacgcccctgttcccggaacgtcgcgcttataccgccagctacgagctctctccgctcgaagccgccctctacgaaggtgtcaccacctacgtgcgcgaggagatgaaccgcgccgaccggctggagggcaagcgcaagaacacgatcggctttgcactgacccagctgcagcgccgcctagcctccagtcctgccgctatctacgagtcgctccgccgccgccgcgcccggctggaagtgcagctggaagaactcaagaccctggcccgcggccgcagcgtgcgcgagatcacgcccatctacgtccccaagatcctggacttgcctgacaacctggacgaggccgaggacgaactcagtcccgaggactacgagacctatacagagcaggtcgtcagccaggccaccaccgcggagaccatgcaggagttggaggccgagatcttcagcctgcgcgagctggaggcgcgtgcgcgtcaggtcgtcgattcgcgcagcgacagcaagtggtcgcagctttcgcacatcctgcaggaccagccggagatgcgcgatgccgccggccggcgccgcaagctcatccttttcaccgaacaccgtgacacgctgaactacctgcaggcccgcatcagtgacctgctgggcagcacgcgcgctgtcgtcactatccacggcggcaccaaccgcgacgagcgccgcaaggtgcaggagctgttccgccaggacaaggacgtgctggtgctggtcgccaccgacgcggccggcgaaggcgtgaacctgcagaacgccaacttgatggtcaattacgacctgccgtggaatccgaaccgcatcgagcagcgttttggccgcatccatcgcattggtcagcgcgaggtctgccacctctggaacctcatcgcccagggcacgcgtgagggcgaggtgttccagcgtctgttcgagaagctggagatcgagcgcgttgcgctgggtggccaggtgttcgacatcctcggcgaggccttcgacaacgtttcgctcaaggacctgctggttcaggccatccgctacagcgacctccccgagacccgcgccaagctcaaccaggtcatcgacggcgctctggacaccgcgcacctcaaggcaatcatcgaccgcaatgcgttgatcgacaacgccatgtcgctggaacatctgttcgcgatcaaggaggagatggacaaggccgaggcgcgcaaattgcagccgtacttcctgcgcagctacttccttgaagctttcgcccgcgccgggggcgaggcgcgccggcgcgaaggccaccgttacgagatccgctacgtgccgggggtgttgcgcgagcgcgatcgtcagatcagcgaaacgcgcatgccggtcctaaccaagtacgagcgcatctgcttcgacaagcaggatgtccatgtcgacggtcgccccatggccgacctggtgcatcccgcccatccgctgatggcatcgcttctggatgtcacactcggcgacaaccgcgccgcgcttaagcagggtgcggtgctgctcgacccggctgatcctggggaagcgacgtcgctgctactgctggttgatcacagcatccgcgagggtaccggcaacaacgcgcgtgtgatttcccagcgtctgcaattcgtccgcgctgacgcgcagggcaccatgagcttcgcaggctgggcgccgcacttggacctggaatgcctgtctgggacggaccaggaacgcgtgattccgctactggacgaaccatggctcgcttctggcatcgaaggccgcgcactgcagcatgcggcggccactctcgcgccaggccatttcgaggaagtgcgttcacgccgcgagcgccagatcgacaagacccacgcagcggtacacgagcggctgacccgagaaatcaattacctggcccatcgtgcggccgagcttgaccaggaagtccgcgctggcaagcaaccgcgcacgacgccggatcagttgcgccgccgcgccgaagacctcgccgcacgcttgcaggcgcggaagcgtgagttggaggagtcgcggcatatcgtttcggcaacgcccgtgatcgtcggtggcgctgtggtcatcccggcaggcctgttggctcgcttgcgtggcgagcaggcgccggcattctcggccgatcccgccgctcgcgccgagatcgagcgtcgtgccatgcaggcagtgatggcgcacgagcagtcattaggtcacgcagtgtgggacgtgtcggcgcaaaagtgtggttgggatgtcacggcacaaccgcccgtcgtggatggcgtgctgcccgacgcccgccatatcgaggtcaaggggcggaccaaggcagcagccgatgtcatagttactcgcaacgagatatgcacggcgctcaaccaaggcgacaagttttggctcgccatcgtcctggtcgacggtgacacgacggagggtccgcactacgtgagtcggccgttcacccaggaaccggagccgggcattactgcggtcacctatcgcctggcggaccttctggccaaggcggtgaagacatga

SEQ ID NO: 533511 - DNA, 267 bp, Stenotrophomonas maltophilia
atgctccgctacaagctcaaggaactgatcgccgaccaagagttccgtgagcggcgacgcgtcaccgtccaggagcttgccaaagccacgggaatcacccggaacaccctatccaagatgctcaaccagcatggggccagcgtccggtcggaaaatctggatcgcctgtgcgcctacttcgactgccggatcgaacaactgatcgcatacgtccctgatccgcctggcgccgagccggtctcaccggctgagaacggcgcgggataa

SEQ ID NO: 533512 - DNA, 561 bp, Stenotrophomonas maltophilia
atgaaagaagaagacaaggggcgctccggcgcccttcatcgtgtaaccgggcggtcctcgtcctccgagccaagcatcggaagcccgctatacgtgcgaggccgtagctcgcgttatcgcccagcaaccacggaccagatcgtggaagctgcacgccaggtcatcgaccaacgcctgcagcgtggggcctcgttccgggatcccgcggtatcccgtggatacttccgcgacaagcttggcggcttggagcgggaggtgttcgccgctgcctttctggatacccgccaccgcttgatcgagttcgtcgagctctttcagggcactgtcgatggtgccgaggtccatccacgtgagctcgtcaggcaggcgctcctgcgaaatgccgccgcggtcatcgtggggcacaaccatccttcaggagacgtggaaccgtctgcagcggaccgggcggtgacaactcgactgaaacaggccctggcgctggtggacgtgcgcctgctggatcacgtcatcgtgggtggctgcaacagcctggcgatggccgagcgcggctgggtgtga

SEQ ID NO: 533513 - DNA, 216 bp, Stenotrophomonas maltophilia
atgtttcgagtaatcggtggcgcggtggtgtacggcttggcgctgtatggagtggtgaagattctcgagcgtccaaaggtgggggggatgattcatccgaacgccaaccatggcgtgacgagcggcggcgaggccacagacatcggtgaaagcgacgccgaagggcagtcggcgggggaaacgacgactagcgccagcacggccgatacggtctag

SEQ ID NO: 533514 - DNA, 906 bp, Stenotrophomonas maltophilia
atgctgaaaggttcggcgattacgccgcccgtggtcgggcgaatctcgattggccgcgtggtggaacgcaacggcaagcggctgccggagaaggacgaccagttcaccctgaccagccaggtgcagaaccgggacggctgggtgctgcatcccttggacgagctgttgcgccgagacggcggaggcaagctccgttcgatcccagtccggctgttgttcaacgatccagccctcaacctgcgtgccgactactccctgttcgatcgcagcaccggtcgaccggtgtgtgtgggcaacggagagacctgtcggcgcaccggcggtaaggacggcagcgagaccttgccctgcgccgggcccgatgtgtgcccgttcgcggacggcgagtgcaaggcttacgcccggttcaacgtggtgatcggggacggagaagaagacgccttgggtaccttcgtgctgcggaccacgtcgttcaacaccatccggacgctggccgcacggctgcagtatttcagtgccgtctcgggcgggcgtctggcctgcatgccactggaactgaagctccgcggcaagagcacgaccatgagtcaccgcaccgcgatcttctacgtcgatctggtggtgcgctcggggctgacgctggagcaggcgatcgccgaggcgagggcgaaagaccaacagcgcagggacagcggcttcgatcaggcagcgctggacgaagcggcgtggcgtggctttgccaatggggcgttcgaagagctggaagaagacgtaccggcggtcgtggaggagttctacccggaagcaccggcaacgggccccgaaaccaccactacggcaaaggacgcgtcggtctgcctcagcagccgactgcagaacaaggttgcccgcatgggcgctggttaa

SEQ ID NO: 533515 - DNA, 975 bp, Stenotrophomonas maltophilia
atgaacgaacgacacacggccctgcgcctggtcgagaccaaaggattagaccgggacgagtggctggaagtccgcaagggcggcatcggtagttccgatgcggccgcagccgtgggcctcaatccgtacaagagcccgctcgaactgtggatggacaagaccggccgcacatccgccaacggggagcatgccggcttcgatgatccgcgttactggggcacgctgctggagccctacgtggcgatcgcctatcagcagaagaccgatcgccgcgtgcgcaaggtcaacgcggtcctgcagcacccgtcgttccccttcatgctggccaacatcgatcgggaagtcatcggcagcccggaagtccagatcctggagtgcaagaccgccggtgagttcggctcgcgactgtggcgggacggcgtgcccgagtacgtgcagatccaggtccaacaccagctggccgtgaccggcaaggcagccgccgatgtggccgttctgctgtgcggccaggagctggagatctttcgcatccttcgggacgaggacgtgattgctcggctgatcgtgctagaggcccggttctgggggcacgtggagaccgacacgccgccgccggccgatggcagcgagtcttcggctcgggcgcttcggcagctgtatcagggcggtggagacaccctggacttctcggagaacctgcacctgtcgcaggtgctcgcggatctgcgcgcgctccggaacgagctggagaccaagggtcgacaggccgaaggcctcaagcagacgttgcaggaaacgatgggcgatgcctcccgcgcggtgttcgccaccggcgaggtggccttcaagcgctccagggacggcacccaactggatacggggcgactcgcccaggaccaccccggcatcgcggcgcgctacacggtcacccgacccggctcacgccggttcgtgatcgtggacgaagctgcctga

SEQ ID NO: 533516 - DNA, 321 bp, Stenotrophomonas maltophilia
atgcccatcgacgcactggacattgcttacatagccatcggtgccaggcaggcactcgcggactcctctgctggtcacagcgccatctccgggttcgaaggagagttggactacgtacaagcgtgcattgaccaggccagcttgctgcatcgggtttggcaggaggtcgagggaaccttcccaggcgtctggtgttacgaggtggccgaaccgttcggctatgcgttcggcaagcacctgcaactgggcggctacttggtagatgccgagctcatcctgcgcgacatcctggtcgggagcatgacgtccgcggtgccatag

SEQ ID NO: 533517 - DNA, 912 bp, Stenotrophomonas maltophilia
atggcctcggtaacaggctggccccctcagcaatccatcgagacctggaagcagcagacggggatggattggcagatagacgagtccgaggtccggtacatcaccggaagcaataacgtcggaatcatcaatgcgttccccgagcaaaaggttctgtatcggtccgacaccaaggcgccattggccgtggtcagcaagcgattccaagtggtccagccgggcgaaattctcgagttctatcgggacctgacggcttacagtgggttcgagcttgagacggcgggcgtgctgcgagcaggtcggaaattctgggcactggcccgcaccggacagagcactacgctcaggggccgggacaatgtggatggctacctgctgttggccaccgcctgcgatggcacgctggcgaccacggcgcagttcacctcggtccgggtggtctgcaacaacaccctgtcgatcgccctgggcaatgccagcggggcgatcaaggtgccgcatcgcggccaattcaatccggaggcggtgaagcgccaactcggcatcaccgtgtcctcgtgggatggcttcgtggctcgagtgaaggcgctgtgcgagcgtccggtggatccggattcggccgaaggattgctgcgtcgggtgctcacttacgccggcccggaaggcaagcacgccgtggtcaacgagcaggcgctggccaatgtccggtacctgtacgaaggcggcggccgaggggcgctcatggcgtccagccgagggacggcgtggggcctgctcaacagcgtcaccgagtacgttgaccatcatcgccgggcgcgcagcgaagatcatcgccgggacgaggcatggttcgggcaaggggcccagatcaagcagcgggcgtgggatgaagtgatgaagctggtggcgtga

SEQ ID NO: 533518 - DNA, 708 bp, Stenotrophomonas maltophilia
atggccagcttccacttcgagatcaagagcggtcgcaatgcatacgagcattcgcgctacgttgcaaggaaagggttccatcgcaagcgcgaggacttgatcgctgccgggcatggcaacctccccgcatgggcacaggacgaccctgggcagctgtggaaggcagccgagaagttcgaacgaaagaacggcgcggtataccgagagtctgtcattgcgctgccgaaagagttgagcatggaccaaactcgggttctcgtagccgatctggttcgacgtctggcaccaggaaagccccatcagtttgctatccatgcgccgacatcatctctggagggcgaattgatccctcacctccacttgatgacgtcggatcgcgtcgatgatgggattgagcggccagcggagcgcttcttctcgcgacacaacccggcaaaccccgaaagaggtggccgcaaaaaatccagcggcggccgaaatcggatggaaattcgggacgacctcatcgctacgcgaaaaatcgtggccgataccatcaatcaccacctggatatcaacggacatgaaacgcgggtcgatcaccgcacgctgaaagagcgaggcatccgcaagaaggcagaaaagtatctcgggccggcaaagatcaaggacatgtcgcccacggaaagagccgcctacgtcgccgcgcgcaagaacgaaaacgtctga

SEQ ID NO: 533519 - DNA, 1182 bp, Stenotrophomonas maltophilia
atgggcgatagccttgaccaactcttcgtgcatcctcgtgctgtgctggctgcaaggaagatcaacgtttatgacgcgatcaatttggtggtctacgccaagcggccattcatcggcatgcgtcggggtaaggagaccgtagcggggtttatcagcctggatgggtcggggtcgagacccgttgtgcgtgtcgtgccgcagttccaggcacgtgatttcctgagtaagtacgaacgtgagatcgaatctttccgctatccggtttctccagcccagtacgagcctctgctggaaaggatggtggcggctcgtgagttcgccataccctacttctttcatgagcaccatcacttagtcgacaagcgtcgtcgagctgccttgttcgcgaccctgcacgcggagctggcgattcaagtcagcaagggggacgttgtcctccaactcacagattcggagcgaacccgcatgatggtgagtcatgcgtggatgacccccgagatcttccgcacatacctcaatttttacggggtggcgccttggtgggaggagctggagaacctggcaacccatgcgcggctggagcgcatcctgttgagcgatgggctgaacctcgcagcgagcgattctccggaggaatacgacaggcaacagcttccctcctatcttttcggtcagatgttgctccaacgagcacgcattccctccggcaaagcgcaagcacacgaggcagttggtagagccgaggctgtcgagccccggcggcccggcttacaaccttcagcctcccacgacaagcctcggcggccggcagccgcgcctgtagccgcgacctccccgagcaacaagggcatcctcgaaatcatcaaggcgtcttcttcggcggatcctgacagggcaaagaatccgggtggaacacgctccggtgccgcaatcgatgaagctgggccggagcggcacttcgcggaagacgccccgccgcaaacgtctgaaacgccgctggatcaggacgaggtgatgctgacgaaacgtgaagtggccgaatttctcggcgtatcggtcaatacagtggacaatcgtcggaatgatccggacttcccggaagccgtctcatatggacgaaactcgctgcggtggaagcgcagcgagattcgccaatggagagatcgaaggaagaccaagtag

SEQ ID NO: 533520 - DNA, 1218 bp, Stenotrophomonas maltophilia
atgcccaagaaggccaaagagctaagcgcactcgaggtgagtcggctgaacaagccggggaaccatgccgtgggcggggtctcgggcctgtacctgtacgtaaacgaagcccaaggccgatcctgggtcctgcgggtcatgattgctggccagcgaaagcacctgggcttgggcggttaccccaccgttacgctcgcgcaagcccgtgagaaggcgcgcgcagcacgggagcaggtagaaggcggagtggaccccatccagcagcgccgcgcagcggtgaacgctttgcgtgcccaccaggccatgcgccgctctttcaaggaagtagcgaccagctacatcgcctttcaggagccggcttggaaaaaccccaagcatcggaagcagtgggccagcacgctggagacgtatgcctacccggtcattgggcagctctccgtggatgcgattagcgaacaacacgtcatcgcggtgcttgaaccgatctgggcgaccaagactgagactgcatcgcggctccgaggacgcatcgaaagcatcctggattgggcacgggtccgcggtcaccgcgagggagagaacccggcacgttggaagggccatctcgacaaagtgttcccagcgcaaggccagattcaccaggttcgccatctaaaggcgatgtcggctgctgacactcccgggtttatggcgcgtctggcaatgcaggaaggcaccagcgccttggctctgagattcttgatactgacagctgcacgaagtggcgaggtccgcggcgccgagtggtccgagatcgacttcaacctggccgtttggaccatccccgcgtcgcgtatgaaggcgaagcgccagcaccgtgttcccctgagtaatgccgccttgggaatactgcaggaagcccgccaatgcctgccgtccaccccgaccaacctgatcttcagtaatcacaaaggtggcgtgctttcggatatgagcctgaccgcagtaatgcgccgcatgggtgtggatgcagtcccgcatgggtttcggtccactttccgcgattgggttggcgagtccacgcagtacccgagtgacttggcagagatggccttggcccatgtacttccgaacaagacggaggccgcctatcgccggggcgacgcccttgagaagcgtcggggcatgatggatgcttgggcgttccactgcctgcctacggatactcatgggcgatag

SEQ ID NO: 533521 - DNA, 744 bp, Stenotrophomonas maltophilia
atggcatctcgagaacatgagcggtacttggagatggtgctgctggagaacgaggcagtcgatttggttgtgaggagcatcgctcgtgcgtttggcttcggggcgccaacacggcccgcaatccggcatgcgacgaggcggagccccagcgaggagtgctgcccggatgacggtgcgtacctacctatccatcgggtgcactcgattgagcaggccgcatccaagtacctgccgacgcaggcggcggcccgtaagcacgctctggataggttcagcccgaaggatcgccaatcggtgctggactttgatcagaaggcagtgatgcgcgcgccggccgcggctgatcgtactcgccagctacggagttggaagacgcagggctcgcttacggccgcgcctgtcagggggttgagcaggtctgtgctgcatgcgttggccgatgctcggttggatggaccattggcggcatggctgatgctgtacgccttaggcgaagagagtggctggccgttggtgtgtcgatacatgaccgcatgtggccacccagagtgggcagcgtgggaagcggcacggaggatcctggacggggatcggcacaggtcctatcgggaagcggctaaggaccaggcctgccaggagagtcgattccggaggcaggtgcaggcagccgagaagcggctgctcgactggcttgatcgggctagtcgccgcgttgccgctgcgatgggcgctgtgcacgactag

SEQ ID NO: 533522 - DNA, 732 bp, Stenotrophomonas maltophilia
atggaattggcttgggccaccgtaattgaaggatcggaaacgccggccggagacggcgactttggggctctccggtgtgtaattgagacggtggacggcgagcttcttgccgcagttcttaagcgcgaccctccggaattcgtctttgcagaagcgctctgctcaattcttctaagcagatggggtctagttgttcctcggccattcctcatcaaggacactcacggggtgtcgtttgctagtgcagacgttggataccccaatctcaagcagcgggttggactaggaccaggctacgcggaggctgaccaggaaacggcgtttaaggtggctatcactctggtcggttccttcccatccaccccgctcgccctcgcgatagatgaagcgatagacaaccgcgaccgcaacctcggaaatatcctttgggacggcacccaagaggcatggatagatcacgccctagctcttggaaacggtcttcacatggatgacctgaataagctgtgcatactgatggtcgaagccggcaaagcggacgaggcgctacatggtgcaatcgcccagtggttggctctaaatcgatcagaagttgccagcgcagcccttgctgtggaaaggctgcacaatgcaggaccttggcaagcgctgatcgtggagcgccttgaggacttgggtgctcgtctcactgctcgcttccctagacctgatgatctattggcagatctgtga

SEQ ID NO: 533523 - DNA, 858 bp, Stenotrophomonas maltophilia
atgaatacgcctacggaatccatcgtgaccaaaccccaacgccacccgtggcggcccatgttctgggagccggtgacgggaactggtgaacgaatcctcgttggagtcctctactgtttcgagggcacagcgggtgtatcccgtttcattcgagatgagtcgcttgatgggatgttcggtgctcaggcggctggtgcgcgccgtttaattgaccaggcgttgtctacatatgtcgctattgctgagcagcgcaatgggaacattggatcgacggaagcaaagtacatggggctggttcctgggccgctgagggaaacgtcagcccacagtttgaacgacctcttgcgtacagctgcgttgctctactccagtatggcaagcctcgccaagctagaggacctagatcaagcggagacaccgcttccagaggacgtcaatcgacggttcagtaccgaggttaaggatctggtactagcgcagcgcccggaattctcggagtacttcggccgttccacacctctggtcaacggaggcaaccctgtgaagttcggtttcgcctcacaacgggcgcttctccacttctgtgtcgtccatccattgcgtgttggggcaagcattcgtgatgctagggcccgtctttttgagcttcagcgtgctcgcgaactggttgaaatctcagaggcggcgttgatcggtgcgactacccgcaacgacgacgttacgctgggcgacaagcagagagccgctgtagccagtgcgcgcgaagagattgaggctgaggcattggcggcaagattgcgcttctatccagtcacatctgccgtcgaaggggcagagagggtcttggaagcagcgtag

SEQ ID NO: 533524 - DNA, 318 bp, Stenotrophomonas maltophilia
atgaccgaagcagtgagccaaggccgcgaagctctgtcagctctctatccagacctgcagctactcaccgatgcagccgatgccgccaagcacgggaggttggcctcaattcagtcacgcgtccgccagatcgaccgagcggatcagctgaaggtaacgccgagcctgttcaatgctccattcggccaaggcgtattcgccgaggcagtggagatctactttgaaagccctgacggccgacatgtgagcatgcgagggcttctgactcaggccctagacttctggcggggccagttaggaattcaatcccgcccatag

SEQ ID NO: 533525 - DNA, 174 bp, Stenotrophomonas maltophilia
atgcgggttgaagcccagaactacttcgccttgatagtcgagccaacttgctccgagtacttagagcgaccgtgggagttccgccgagggatcttgtcactgatcgtaacctctcacatggtcgattactgggtgatgggcagctacacggcgggtcatccaggaaggacatga

SEQ ID NO: 533526 - DNA, 450 bp, Stenotrophomonas maltophilia
atgccgatcagggctgtggtgtacgtgagcgaggcagggccgacagtggctggttgcgctcttgacctgccgagcgcgaagcttgaagaactggtagacgacgccgcgcgttttaacagggatgccggagtgacgggcgtcctgctttttgacggagcaagattccttcagtacctggaaggtccagaggatggcttgactgtcgcctactctcgggtactgggatcgcagagccatggcggggttgtcgagcttcagcgcggccgcgtcggacagcgccgcctgcctttctggccgatgcgctggcttccggtagaaccggtagagctgaagcggttggctcaagccgactggactcgattcaatcagcgcggcgacgccgaggatgcaaacccagcggctatggatctcctagcttcgctggttgagccttacgctgtggccgcctga

SEQ ID NO: 533527 - DNA, 498 bp, Stenotrophomonas maltophilia
atgcattcctcccatggcttccgcaccgccccgatcccctctggctgggtccagacaggcgagcgctgggcactgtggtggaacggccgggaggtagctagcctcacccctgatcgcgcgggcggcctgcgcatgacgcttaatgcgctgaagatgtggcagaccaagagcgtgagagtggtcagcttgcgccagggcaagcgattcgccgagcgatggtgcgccgccaggctatatccggacctgcctctgcgagacgcggtcgtccgcctgaccgacaacacacccatccagccggcgccaccgctgcctggcctgccacctacccgcgagcaacaacagcaggccgaacgcctagacgcggcagcggcggcagcatcggcccgagtgatggccgcactggagccgatccggacgccggcggagatcaagcccagggcaaaggggccatggaaggggagaatccgacccagcaatgccgatttctcaagggtatga

SEQ ID NO: 533528 - DNA, 579 bp, Stenotrophomonas maltophilia
gtggcaagaaagcccgttctggatgaatttgagtacttggagagccgagggtggacgtcggagctcgtggtcgacaagtcccatttcagcgccttagaccggctggaggggagcttcacacggatcgggggccggggtagttcggagctaattgagctgtcccaggagaacttggacttcgtggagggccacttgaggcaggccaaggctcatcatgcggaaggcagcttagaggacgcgtggtttcatctgcttcaggcgagcaatacgctgtcctatcaccgaggcatccgcgaaggacggtttcaagcaagcaaggtcgaccgaccagcccgcgccgggaaaagagggggtaaggcaaaagcggccaacctcaccgagaatcttgatgcgatagcagccaagttgaaagcgcaccatttaaaggccgctttcaggacaatcgaaggtcttgagcttaaggctcaggaatttggcgacgagcacggtatgagctcaaaccaggctgattggctttcgaggctcaagaagaggcccgctatgctggaattggtagctaagctgcgttcggcgcgttga

SEQ ID NO: 533529 - DNA, 246 bp, Stenotrophomonas maltophilia
atgaatccgccgcgctacccgccggccgccttccgcgcgggtatccagggcgaagtgatcctgatcattgatgtcgatgccaacggcaacgtcaccaatgtcacggtggaaaagtccagccgtaaccgcgacctggaccgtgccgcgatggaagcggctcgcaagtggcgcttcaacgccgctgaatctggcggtaagaaggcggcaggtcgcgttcgcgtcccggtcaactttgcgctgaactga

SEQ ID NO: 533530 - DNA, 762 bp, Stenotrophomonas maltophilia
atgctgcaggaaattttcatcgccgctgctgccgggggcaatccgtccaacgccctgtcgcagatgggcttcgagcacctgatccacgaaatgaccaccaagccgggtgatttcgcggtttcctgggtcgtgctgctgaccctgatcgccatgtcggccatgtcctggtactggaccgtcatcaacatcttccgtgcgacccgcctgaagagcgctgctgatcgcgtcgtcagcctgttctgggataccccgaacgcgcaggacgccatccgtgccatggaagagcagccggcttcggagccgttctcgaagatcgccctggacgctgcccaggctgctgcgcaccaccagcgcgctgaaggcggcgccaccggcggcgtgggtgagaacctgagccgttcggagttcgtcgaccgtgccctgcgtcaggccgttacccgcgaaagcaacaagctgcagtcgggcatgaccctgctggccaccgtcggcgcgaccgctccgttcgtcggtctgctgggtaccgtgtggggcatctacggcgccctgatcaagatcggtgccaccggctccgcttcgatcgacgccgttgcaggcccggtgggtgaagcgctgatcatgaccgcgatcggtctgttcgtcgcgatcccggccgtgttcgccttcaacttcttcagcaagatcaacagcgcgaccatcagcaagttcgataccttcgcgcacgacctgcacgacttcttcgccaccggctcgcgcgtccgctaa

SEQ ID NO: 533531 - DNA, 426 bp, Stenotrophomonas maltophilia
atggctttcagtagtggtaacagcggcggccccatggccgacatcaacgttacgcccctcgtggacgtgatgctggtgctgctgatcatcttcatcatcacggcgcccctgatgtcccacaaggtcaaggtggatctgccggaagccaacctgatccagaagccggaagacgctgaaaagcgttccggaccgatcaccctggcagtcaaggaagacggctcgatctactggaacgacgaagaaatcaacaagcagactctcgagtcgcgcttggcgaccgccgcccagcagaccccgcagccgccgctgaacctgcgtggtgaccgcaccaccaagatgcgcgtcatcaacgacctgaccaaggtcgcgcaggagcagggcatgctggacgtcggcttcgtcgcgaccaaagaaaaggggcaataa

SEQ ID NO: 533532 - DNA, 414 bp, Stenotrophomonas maltophilia
atggcattcagtagtggtggtggcaagggccccatggcagacatcaacgtcacgcccctcgtggacgtgatgctggttctgctgatcatcttcatcgtgaccgcgccgatcatgacgtacccgatcgccgtcgacctgccgcagcgcgtgctcaacccaccgccgcagctggtcgaaccgccgccgccgatcgaactgaagatcgacgccagcaaccaggtctcgtggaacaacagcccgatcaataccagcgagctgcagcagcggatggagcaggaggtccagcgtgacccgaccaaccagccggaactgcgcatcgacgccagcccggattccgagtacgacgtgatggccaaggttctggccgccgcgaagaatgctcagatgaagaagatcggttttgtgcagcagtaa

SEQ ID NO: 533533 - DNA, 1539 bp, Stenotrophomonas maltophilia
atgacgcgactgcagacgcccctggagacaggggcgtttttttttatgcctgccggcctggaccgctatgatcggcggatgctcgccctcttcgactccctgcgtcattggctcgacggcatcgcccaccttggctcgatcctggcggtggcctacctgctgtatctgttcgcgctggcgggctggatcatgctgcagaagcgtgagccggtcgccacgctgagctggatcctgtcgttggcgctgctgccctacctcggcttgttcatctactacctgctgggcccgcagaaggtgaagcggcaacggctgcgccgcggacgcgcacgatcgggcatggagcactacagcgatgtctgcccaccggatgccgactgcaccgagctggccaagatcgcgcaggccaccacgggcctggcgccgagcagcgcgaccgaggtgacctggctggtggatggtgccgctacctacgccgctctgttggaagcggtggcgcaggctcgcgatcacgtgcacctggagtactacatcttcaatccggaccatgccggcaccgccctgcgcgacgccctggtcgagcgcgcccgtgccggcgtgcaggtgcgcctgctgctggatgcagtgggttcttccgccctgcctcgccgcttcctgcagcccctgatcgatgctggtggcgaggcggtctggttccatccccggcagttgctgaagccgttcaagcggccgtggttgaacctgcgtacgcaccgcaagctggtgatcgtcgatggccggctggccttcaccggtggcatcaatatcaccgacgatgaagacgagagccgcaagccgaacgcctaccgcgacctgcacatgcgcatctgcggccacgtcgtgcgcagcctgcagctggtgttcgccgaggactggctctatgccagtggccaggatccctcgcgcatggacattgcccgtctgtggccggctgacatgccgctgcgcggcgatggtgcgatcaacgcccaggtgctggtctccggcccggactcgggctgggaaacgatccaccgcctgcacgtggcggccatccaggaagcacacgagcgcgtgtggctggtgacgccctacttcgtgccgggcgaagcggcgcggatggcgctgacttcggcggcactgggtggactggacgtgcgcctgctggtgccgaagatgagcgactcctggtttgtcacccaggccgcgcgctcctatttcgacgaactgctgcacgccggggtgaagatctacgagtacggcccgcgcatgctgcataccaaggctttcatcgccgacgacgatgtctgcatcgtcggcagcgccaacttcgaccaccgcagcttccgcctgaacttcgagctgtcgatgatgatcagcgaccgtgaccgcgtcgccgctctggccgggctgctgcagggagagttcgaccgcgccacccgcgtgcacgaccaggctggccgttcgctgtggctgcaccgcctgcccgaggccttcgcccggctggcctcgccgctgctctga

SEQ ID NO: 533534 - DNA, 270 bp, Stenotrophomonas maltophilia
atgtactggttgtacctgctgctggcgctgggctgtttcgccttcgccctgaagacccccagcgccgcattgatgaccctgtgcctgctggccgccctcgccttcctgctggcctgggtgcgcggtcgctatgtagcccgcttcggcgaccttcagcgggaccctgccacccttgtcgatgccgaggagctgcgccgcctgcgcgagcaggcccaggcccgccgcaatgccgacgccaacgaccacgatccgtcccctctttccaagtag

SEQ ID NO: 533535 - DNA, 744 bp, Stenotrophomonas maltophilia
atgacccagctcagcgtcaacgtcaacaagatcgccgtcctgcgcaattcgcgcggcggcgccgaaccggacgtggtgcgcgccgcccaggcctgcctggatgccggtgcacatggcatcaccgtgcacccgcggccggaccgccgccatatcaccgccgaggacgtgctggcgctgtccacgctgacccgcgcgcgtggtgtcgagttcaacatcgaaggcaacccgttcgcaccgccgcgcgagggctacccaggcctgctgccgctgtgcgcgcagacccgcccggcgcaggcgacgctggtgccggatggcgatggacagatcacctccgaccatggcttcgacttcgagcgggatgccgagcggctgcgaccactggtcgccgaactgaaggcgatgggctgccgggtcagcctgttcgtcgatgcgggcaacccactgctggagcaggcggccgaagtcggtgcagatcgtgtcgagctgtataccggcccctacgccgaagcacacgcggccggcgacgctgcggcgatgctggaactgttcgccactgcggcgcggcgggcgcaggcggtgggcctgggcgtcaacgccgggcacgacctgtcacaggacaacctacgcgatttcctggcccacgtgccggacgtgctggaggtgtcgatcggtcacgcgctgatcggtgaggcgctgtacgacggactggacgccacggtgcgcgggtacctggcgttgctctga

SEQ ID NO: 533536 - DNA, 1092 bp, Stenotrophomonas maltophilia
atgggtatcgcgatcaagggccgaggttccacgtcccaccttgccgggcgctttgaaagcaccgtcagcgaggcggtggacgacggctgggcagtcgatgagagcgaggaattcctcgccccacgtctgcgcactgaagtacgtgccgagaccgcacgcagcatcatcagccgcaacacctcaccggacgtcggcttcagccaatcggtgaatccgtaccgcggttgtgagcatggctgctcctactgcttcgcgcgcccctcgcacgcctatctgaacctgtcgccaggcctggacttcgagaccaagctgttcgccaagaccaatgcgccgcagctgctgcgcaaggagttgtcgaagccgggctacgttccgcaaccgatcgcgctgggcatcaacaccgatgcgtaccagcccatcgaacgcaagttcaagctcacccgccagctgatcgaagtgatgctggaaaccaagcatccgttctcgctgatcaccaagaacgcactggtcgaacgtgacatcgatctgctcgcaccgctggcggcggagaacctggtcagcgtgcatttctcggtgacctcgctggacccgcatctctccgcaaagctggagccacgcgcgtcggcgccgcatgcacggctgcgtgcgatgaagcgcctgcatgaagcgggcattccggtgggtgtgatggtggcgccggtgatcccgtggatcaacgacagcgaactggaagccgtgctggaggccgcgcacgatgctggcgccagcaccgcaggctacgtgctgctgcgcctgccgctggaagtggccccgctgttccgcgattggttggacacccatcatcccgatcgcgccgcgcacgtgatgagcaccatccagcagctgcgcggcggcaaggattacgacagccagttcggcacccgcatgcgtggccagggcgtgtatgccgatctgttgaacaaccgcttcaagctggcgcgaaagcgtctcggcttcaatgcgcagaacagccattggccgaagctggattgcagccggttcgtgaagccgctgacgccgaagaaggattcgccacagggttcgctcttctga

SEQ ID NO: 533537 - DNA, 1566 bp, Stenotrophomonas maltophilia
atggacaatggcggtggcggcggtgcaattccgaccgaaacggcgaaggaacagccgaccgatgacaaggagaaggactgtaatggccgcaagggcaatcctgtcgtgctctacagcggcaacaaggtcgagccggaactcgatttcgccagccagggcgaaatgggcctgttcctgcagcgcaactacaatcattactggagcgcgaccggtctgttcggcaatcactggctgagcaacttcgactattcgctcgcgttcaccgatgcaaaccagctggcgtgggtacaacggcccgacggtcgccgcatcaagtatctcaaggatccagccagcggccgctggtacgaggacaagacccagcccatcgcgtatctcgccgcgaacggagacggcacgttcacgcttcgaaacgaaaacaacgggacggaaatctacaacgccgagggctacatcacccggctcagcaatgagcaaggtgtgagctggacgttctcctataccgatcgctacctgcagaaggtcacccactcctcgggatgcagtatcagctttggctggaccaatggacaggtctcccaggtgaccgacccggccggcaacatctaccgctacacctatacccccaacgtgttcgggaatgggcgtgggcggctcgccagcacgacattgccaggcgctcctgcaacgacgatcagctaccactacgaagacggccgcttcccgggtgccctgaccggcaagtcctttgacggcgtgcgctattccacgtttgcctacgacgcggagcggcgcgccatcagcaccgagcacaatggcggcatcgaacgattccgcttcagctacgccgtgcgcagcaccgaaccggtgcttccgccccccgccccggctcgaccgggcggtgtccgcgccgacgaagagcgtggatggtgcgagcagcgccccggaggctcacgcatctgctaccagccgcgctcgctgcctgtcgattcgctgccgatggagagcgctctcggcatgaccgccgccgctgcgccgagccttacgcggcccgtcgatatcgatgtcactgtgatcaaccctcttggccgcagcaccacctacacgttcaaggacggaaagatggtgtcgaccaagggtgatccgtcgccgaactgccctgccagctacaaggagcagagctacgacgccaatgggtaccctgatctggtccatgatttccaggacaatctgaccaacttcgactacagcgcacagggctacctgctgaagcgggtggaagcggtcggcagcacggccgaacgtacgacgttgcaggagtgggataccgcgcgtaaccggctgctcaagacaacggtggtgggtgatcttgaagtcgcctacacctatgacgatcgcggaaacgtggccagtgtgactgagcgcaatctgacggcacgtggggtgcccagccagacgcgggtaacccgcaccacctatagctatcacgccaatggattgaaggcctcgatcaagatcgatggcccgcttccgcaggatgacgtcacctcgaccttcaacaactag

SEQ ID NO: 533538 - DNA, 1389 bp, Stenotrophomonas maltophilia
ttgggattgccgggacgtatcgtcaatgcgaacggtggtgtgcgggagctgacgtatgacggtcgtggccgcgttgtgtccgacagaaccagctcgggaaccggctgggcgaccacagccattggctacacctccgcaggcgacatcgcctcgctcacccagcccgatggcgtgacggtacgctacggctacgatgcaggacgccgcctgacgcatgaagtccgctcgctgggagacggtacgtgggcgtggacccgtcatagctacaacaacgcttccaatcgcacgcgtaccgaggtttcacagaccgactatccgatcgatacggcagtcaagggaatgattgacgaaatcacccatgacgggcagtggaactggttcgctcgaggctgggcctgctccaccggatcggccggatccatccaggtggatggctacgccgaaggcaacgtctacctgggaagcacccaggcaaacctcgccagcgagccaggggttgctgccgcctgccaagcctcaggcaatggctatagataccagctgccgatatcgctggcccagaggcagcagctgggtggccgtaagttctccatctacggtgtatctccgaagggagcacagcacaaccaagcgctgggcaactccggcaacttcgccattcccacggcaacgatcatcggagacgtcgcaggggttacgaacgacgcgaactggaacttctccgtacaaggatgggcatgctccgtgggcgtcaacgcggccaccaccgtacacatctatgcgggagggccggcaggcgctggtacgtatcttgggagcgttaccggcacgctggttccgaacgacgacgtaaaggccgcatgccaatcgcaaggggcgtattggtttggcttcacgttggattccaatatgcggaacgcacatggcggaaagcccatctacgtccacggcatctcgccctcgggccaggctcatctgctgctcaatcgctcgggtacgttcacagttcccgcggtagtgcgcaacgccgaagtcgttggcgcgtcggcctatccgtaccagatcttcaatggcggctcctcaacattgatcttcgagttccgcaacacaagcaatgtggtctggaatccaggcgatacctacctcgcgttcggcctcaatcagcccaacgagaacatcgcactctctgcgccggtgccacccggtggcgtggccaggttcagccgcagcgtggggccgaataatccgggcagcgggaatcgaacgttctcgtacgtggcgagaatggcgtccggcggcgttgcctggggcgcggaagcaaaggtcttcctgtctgttgagaacaacaagggaagttgcggtcgcgtcgtctgcgaacgccctcggtaa

SEQ ID NO: 533539 - DNA, 2151 bp, Stenotrophomonas maltophilia
atgccagcactgacgcttgccctgatcgggctgaacgctgttgtctccgtcaatacatatgagtacgacgagctgggtcgcgtgattgtcgagcgcggaaacggcgtacagaacgtgcgttatgcctatgacgcggagggacgcgtcacccaggtcaccgactcgcagaatcgggttacccgcatgagctacgacgctcgcggtcgcttgatccaatcaatcgatgctgctggagggaagacgcagattgcgtacgatcatgcagatcgtccaatccgagtgagcgatccccgcaatctggtcaccacctatgagtttgatggcttcggccagatgtggaagcaggtgagcccggatacgggaacgacacagcaccagtacgacgctgcaggtctacggacatcgacgaccagagcggacggaagcgttgtttccttcgactatgacggcctgggtcgcatgacctctgcgagtgcggaggaccggacgttgggctacagctacgactggtgtggcaatggtaaaggactgttgtgcggcacctcggggccgggaacagcaacacattttgcctacaccgcgaatggatcgctgcagatacgccgcgacttcacagatctgtctggtcagaagacggattacagtacgacgtatggctacgacggcatcaatcgcctgagcgagatcacctatcccaatggtgacaaggcaacctactcctatggttcccacggaaaaccaagcgcgttggtggcaaccgtagacggcacgcagcgttcgatcatttcccaggcaagctggaaggccacgggagcgcgcgggtggctggcttatggcaatggcctcggccggggctataaccacgatccggagggacggctgacggcaatgtcggtctggggacccaacagcagcaaggtcagctattgggactaccagtacagtggtgatggagaaatcaccgccatcgtcgacgctgtcgacccgagcatgacgcagctgatcgggtacgactcactgagccgactgacccagctgactcggtttggcgtcaccaacaatctttcctacgacgccggcggcaatcacgaccgctatcaggccggtagtcagctgacccagtacagcatcgacccggggagcaaccgggtgctgaactacaccaatcaggacggcagccgccagtaccagtacgatgcattgggaaatcgtatcagcgagactgcgggtagccggatcagtacctacgaatacgatgccttcaatcgcatgagccgaagcaacatcggaggagtagcgaccgactacgtgctgaatgcgcagggacagcgcgttgccaagatcaatcagaacaccaacagccgctacttctacgctggccagaaccagctcatgaccgaactgaacaatggcgtgtggaccaactacttctggttcgaaggcgaactggtggggctggcccgcagcgggcagcacaattacgtgcataccgatcatttgggacgcccggagttcgtcacgagcccaagccagcagaccgtctggaaggcgtacaactacgcctatggacgcagcgtccagaaggatgagattggcgggttgaacattggcttcccgggccagtactacgacgcggaaagcggcctctggtacaacggcttccgcgactatgacgcaagcattggccggtatgtgcagagtgatccgatcgggttggcgggtggaatgaacacatacgcgtatgtctcaggaaaccccatctcaagaaccgatccgtggggcctgacccagtgtgatatcgacgtggcgttctcatttgcaaagcagaacaatccagacctcaagttcggcaacggcgcgccgcaagtggatattccacgctcaggtgatgaggggcgatcggatctatatggtgatggtcgtattcatttgaacaagagatacctggatgtgcttgattgggcgggcgtatacaacgttctggatacaatcattcacgaaggcttccacttcacgcgccctagaaagttgcaaactgaagaaaatggttgggatcatcgctacatttcgccggaagcaacgaaacgagcacgtgagcaggtttacaactatgacaaggcccgcaaggctacttgtgagtgcacacaatga

SEQ ID NO: 533540 - DNA, 594 bp, Stenotrophomonas maltophilia; identical to SEQ ID NO: 497731

SEQ ID NO: 533541 - DNA, 711 bp, Stenotrophomonas maltophilia
atgcacgagcagggcccggtcgatttcatcgaggtcatccacaacgcggtccccagcgaggtctgcgcggcgatcgtcgagcgcatgcgggcggcgcgtggcctgcagcccggtgccgtgggcagtggcgtgttcccggaactcaagcacagcaaggatctgcgcatcagcggccttgatggctggcaggatgtggaccatcagctgcagcacgcggtgttcaacggcctgctgacttatctacgccgttatccacaggcgttgattgcgccgctgatgttgcagatccaggacagcaagggccaaccgcgacgcctgtctgccgaggacttccctgacatgccgcagcagcagctggccgacctggcccgcacctgcctgcgcccgggcgccatcaacctgcagtggtatgcggcgggcgagggcggttacccgtactggcactgcgagctgtaccccaaggatgcgcaggccgagaccctgcaccggcacgtgctgtggacgctgtacctcaacgaggaattcgaagagggcgagaccgagttcctgttccaggggcggaagatcgcaccacgcaccggcagcctgctgattgcgccgacggcgtttacccatacccatcgtggcaaccgaccgcagggcggcgacaagttcatcgccaccagctggattttgttccagagtgcgcagaagttgttcggcggcggctga

SEQ ID NO: 533542 - DNA, 1017 bp, Stenotrophomonas maltophilia
atgtcccgtacttcgttgacccgcttcctgatccaggaacagcacgccggccgcatcaacgccgacctgcgccagctgatcgcggtcgtcgcccgcgcctgcaccagcatctccatcgccgtcagcaagggtgccctcggtggcgtgctgggcgatgccggtaccggcaacgtgcagggcgaggcgcagaagaagctggacgtcatcagcaacgagatcctgcttgaagcgaacgcctggggtggccacctcgccgcgtgcgcctcggaggaaatggaccacagccagccggtgccggacatctacccgcgcggtgatttcctgctgctgttcgatcccctcgacggcagctccaacatcgacgtcaacgtctccgtcggcaccattttctcggtgctgcgctgcccgaccaatgtcgaactgccgggcgacgacgccttcctgcagccgggtagcaagcagatcgccgccggctactgcatctacgggcccagcacccagctggtgctgaccgtcggccatggcacccacgccttcaccctggaccgtgagaagggcgagttcgtgctgaccaccgagaacatgcagattccggcggcgacccaggagttcgcgatcaacatgtccaaccagcgccactgggaagcaccgatgcaggcctatgtcggtgatctgctggcgggcaaggaaggcacgcgcggcaagaacttcaacatgcgctggatcgccagcatggtcgccgacgtgcaccgcatcctgacccgcggcggcatcttcatctacccgtgggacaagaaggatccgtccaaggccggcaagctgcgcctgatgtacgaggccaacccgatgggcctgctggtcgaacaggccggcggcgccgcctggaccggccgcgagcgcatcctcgacatccagcccgaccagctgcaccagcgcgtgccggtgttcctgggttcgcgcgaggaagtggccgaagccgtgcgctaccaccacgcgcacgacgacgcgcagggctga

SEQ ID NO: 533543 - DNA, 1203 bp, Stenotrophomonas maltophilia
gtgtccttctttgcaaacgtggaactggtcccaggcgacccgatcctgggcctgaccgaggcgtacaacgccgacagccgcccgaccaaggtcaacctgggtgtgggcatctactacgacgagagcggccgcattccgctgctgcgcgccgtcaagcagatcgagcagcagctcgccgctgaagccaaaccgcgcggctacctgccgatcgatggcctgccggcgtacacgcaggcgacgcgtgagctggtgttcggcaaggattcgccgctgctggccgctggccgcgtgaccaccgcgcagaccgttggtggcagcggtgcgctgcgcgtcggcgccgacgtgctgaagaagctgctgccgcacgccaccgttgcgctgagcaacccgagctgggaaaaccaccgtgcggtgttcagcgccgctggtttcgacgtgctggattacacctacttcgacccgagcacccatggcgtcgatttcgacggcatgctggccgacctgggcaagctggaagccggcaccgtggtgctgctgcacgcctgctgccacaaccccaccggcgccgacctcacggtcacccagtggaagcaggtcgcgcagctgctgaaggacaagcagctgttccccttcatcgacatggcctaccagggcttcgacaagggcatcgagcaggacggcgccgccgtgcgcatcatcgccgaagctggcatcgacagcttcatcgtcgccaactcgtactccaagtcattctcgctgtacggcgaacgcgtgggtgcgctgtcgatggtggcaccgaccgccgctgacgccaaggcggtgcagtcgcaggtcaagcgcgtgatccgcaccatctactccagcccgtccacccacggtgccgcgctggtggccggcgtgctgaccaacccggaactgcgtgcgatgtgggagcaggagctgaccgagatgcgcgagcgcatccacgccctgcgccagggcctggtcgagaagctggctgccgctggcgcaccgcagttcggtttcatcaacgaacaggccggcatgttctcctactccggcctgagccgcgagcaggtcgagcgtctgcgcgacgagttcggcatctacgccgtcggcaccggccgcatctgcgtggccgcgctgaaccagaacaacctggaatacgtcgccaaggccgtggccaccgtcgccaagggctga

SEQ ID NO: 533544 - DNA, 2094 bp, Stenotrophomonas maltophilia
atgaatcccgccgcacgacgccgttgcctgccgctgtccgccctgctgctgtcgccctggacggcggtggccgagcctgcgcccaccgccctgcctgcggtgcaggtacaggccgcccgggtgccgggcatcgatccgttcgcgctgccggccagccaggacacggtctggatcgacgccagccgcgcgggcaccggtgcgcagctgtctgaggccttggccgcagtccccggactgctggcacgtgaccggcagaacttcgcccaggacacgcagctgtcgatccgtggcttcggcgcacgctcgacctttggcgtgcgcggggtgcgggtgctgatcgacggggtgccggcgaccatgcctgacggccagggtcagctgtcgcatgccagcctgttgggcgccgagcgcatcgaggtgctgcgcgggccgttctcggcgttgtacggcaattcctccggcggcgtgctgcaagtctggagcgcgcagggtcaggccggcgacccgtggcggttgcgcgtgaatgccggcgccgacaacacgctcagtgtcggtgcgcagctgaagggtgccggtcaagtgctggactacaacatcgccgccaatcacttccgcaccgatggctggcgggaccatagccgcgcgcgccgtgaatcgctcaacgcacgcatcggtggagagctgggcggtgggcggctggagctgctgctcaatgcgcttgacgcccccgatgcgcaggatccgctgggcctgacccgtgcccaggtggcggctgatccgcgccaggcctcggcagtcgcgcaccagtacaacacccgcaaaaccgtgcgccagcagcaggccggcctgcgctggacccgtgaaacgggagcgcagcgctggcaattgatgggctatgccggccagcgcgcggtacgccagtacctgccgattccgccggcaccccagaccaacagcccgctgcatgccggcggcgtgatcgatctgcagggcggctatggcgggctggacgcgcgctggggctggcacggtgatctggccgggcgaccgctggacctggtagccgggctcagcgccgaccgccagcgccagcaccgcaccggcttcgagaacttcatcggcagcgccctgggcgtgcgtgggcggctgcgtcgtgaccagatcgacgtcgtgcagaacgtggatcagttcacccaggcctggtggcaatggagcccgcgttggtcgctgctggccgggctgcgccacagcgccgtgcgattcgaatcgaatgaccgctacatcgtcggcgccaaccccgacgacagtggccaccgccgctaccaggcgaccacgccggtggcaggcgtcagcttcgaggccagcccgcagtggcggctgcacgcggccgtggggcgtggtttcgagacccccaccttcaacgaactgggctatcgcgccgacggccaagccgggctggcactggatctggccgccgcgcgcagccgctccatcgaggttggcagcaagtggcacgcacaggatggcaaccaactcgatatcagcctgttccgtgcagatgccgacgacgagctggccgttgccagcaatatcggcggacgcagcacctaccgcaacattggccgcacccgccgccaggggctggagctgcagtaccgacagccgctggccgagcacctggaactacagctggcgtggacctggctgcaggcgcaggtgcgctcgccgtacctgacctcgaacaccctggtcgctgcaggcagccgtctgcccggcgtgccgcgccagcaggccttcgcccggctgcagtggagccctgccgattggcagtgggcgctggaggcaatggccagcagcgataccgtggtcaatgacgtggccaccgagcgcgcgccgggctacgccctgctgcacctggaagccggccgtcgatggacgctgccgggcggcgagctgcgcgccttcgctaggctggagaacgtgctggaccaggcctacatcggctcggtgatcgtcaatgacggcaatggtcgcttctacgagccgggaccgggacggcgagccaacgtcggcctgcaatggtcgtggcgttga

SEQ ID NO: 533545 - DNA, 339 bp, Stenotrophomonas maltophilia
atgagccgagagacctcgcgagacccgctgcgggagaaccacccgcccattcccggcgagcagcgcggcaagcgcgatgccgacaacgccgactaccgcggcaccggcgcgccgttcttcgatgccgagcacgaccacctgccggtgaagcacgaggctgaacaggcggcccaggaccgcaaggatggcggcgaccgccatcgcggtggccaggagagcccgctcaagcgccgtgaacgcaagcagcgcgccagcgacaaccaggacgaggcgctggaggagaccttcccggccagcgacccgacctcgccgttcgtgccagccaaggcccccgactga

SEQ ID NO: 533546 - DNA, 399 bp, Stenotrophomonas maltophilia
atgccccgtcttgaacgacccgcaccgtccgtgttcaacgccctgctcgatccgctcggccagcgcagcgcgcagcgccgtacgcgtcgccatgaagacccccaggcggtggcgcaggactacctgcagtacatgctcagcgactacgaggagcgccgcgggcagagccaccggaactggcgcgacctgtgcccggtgtatgccttcgcgttgaccacgcatgccgcggattggccacgcggtgatgccgccgatacctgcgaggaactggccgagcactgggaacagatgcgcgggcagtcacgcttgggctggtcgcaggcgcggccggtggtggaagacgcctggcgcgcgctggaccatattccggcggcggcggtgaggccgttgctgcagtag

SEQ ID NO: 533547 - DNA, 921 bp, Stenotrophomonas maltophilia
atggcccgcccgatctggaccggcacgctgtcgtttggcctgctcaacgtgccggtgtcgctgatgtccggcgaacgcaaggtcgacctgcagttccgcatgctcgattcccgcgatcgcaaaccgatccgtttcgaacgggtcaacgccgacaccggcgaggaggtgccctggaaggacatcgtcaaagcctatgagtacgacaagggcagttatgtcgtgctggaggaaggtgatatccgctcggccgcgcctgaaagccacgaagcggtggaggtggaatcattcgtggatgcggcgcagatcgacccgcgctattacgagaaaccgtatctgctggtgcccggcaagaaggccgagaagggctacgtgctgctgcgcgaaacgttgcgcagcaccggcaaggtgggcatcgcgcgggtggtcgtgcgtacgcgcgaatacctgtgtgcggtgatgccgcatgaggacgcgctggtgctgatgatcctgcgctatccgcaggaactggtggatcccgaggactacaagctgcccaccggcaaactttccgactaccgcatcaccagcaaggaaacggcgatggccgagcagttgatcgagtcgatggccggcgactgggatccgtcgcagtaccacgatgaattccgcgagcgcctgcagcaggtgttgaacaagcgcatcaaatccaagggcggcaccacgcgggtggacgatgagccggcaccgcgcgaggacgccagtaccaatgtggtcgacttcatggcgctgctgcagaagagcctggatgcgaacaagcgaacgccagcgaagaaggccgcaacgcgcaaagcagccgccaagtcgccagtgaagaaggccgcaaagaagacaacgaagaaggctgcaaagaagaccgcaccccgacgcaaggcggggtga

SEQ ID NO: 533548 - DNA, 2487 bp, Stenotrophomonas maltophilia
atgtcgttgcaccagtatcggcgcaaacgccggcttggcggtggcgccgggcagacaacggagcccgacgacacgcccacaccgggcgacccgaagcagcggccgacctttgtcatccagctgcaccatgccagctcgcgtcactatgacttccgcctggaaatggacggcgtactgaagagctgggcggtgcccaaggggccttccctgcgcgtcggtgaaaagcggctggccgtggaagtggaagaccatccgctgtcctacgccggtttcgagggagacattcctgaaggccactatggtgcgggccacgtggaagtcttcgatcacggcacctgggcctgtgaaggcgatccactgcaggcactggcggcgggcaggatcgacttcgtgctgcatggacaacgcctggccggtggctggaagctggtgcggaccgcgatgaaaggacgccaggtgcagtggctgttgatcaagcgcggtgacggggaagcgcgcgacgcggaggcggatgacctgctgacggcaccgatgccgaaacgaacacctgcggcgaagaagcgttccgcggacaagacggcgcgagctgcacccgtcgcacgcacgaccacacgcaaggccgatgtgcgctggcatgcacgcgcgctgcaactgcacggcgcacgtgacgcaccctacccgcatgcattcaaaccgcagttgaccgatcatcgcgacagtgcgccgaacggcgaccgctggcttcacgaaatcaagtgggatggctatcgcctgctggctgatctgcacgatggcgaggtcaggctgcgctcccgcaatggtctggattggaccgatgattttcccgaagtggtgcaggccgtgcaggcgctgccggtgcgcgatgcacgcctggacggcgaactggtggtgctggacaaggaaggacgcagtgacttcgcagcgttgcagcgggtgatcgacggcggttcgaagcaaccgctgcgctacatcgtgttcgatcttccgggcgtggctggagcggatatcagtcgtgcgccgttgctggagcgcaaagcactcctgaaagagctcattgggccggcgcctggcaccctggccttcagcgagcacgtgatcgaccatggcccgcaggtgttcgatgccagtggcaaggccggattcgaaggcatcgtcagcaagcaggtggatgccccgtacgtgaatacccgcgcacgcagctgggtgaaggtgaagcacgaagacaccgatgagttcctgattgtcggctacacggcacccaaggggtcccgggtggggttcggctcgctgctgctggcgacgccggacaagggcggcttgcgctatgtgggccgcgttggcaccggtttcgacgaccaaagcctgcgcgcgctcctcaaggcactgcagcccttggcggtgaagacgcccgtgctgcagctgccggcgcatgtgccgttccgcgctgccagcgtacgctgggtgaagccggtggcggttgccgaggtggcctttcgtggctggggcaaggaaggcctgctgcgccaggccagtttcaagcgactgcgcagcgacaagcagaaggaggacctgggaatgagcaccgcagataccgaaaccggaggcgaggtcgagatcactcatccggagcgggtggtgtttccaaggcagaaactgcgcaagggtgacgtggccgattactaccagcgcatggcgcgctggatcctgcccgagattgccggacgtccgctgtcactgctgcgctgcccggacggcgtgggcaaggcctgcttcttccagaagcaccatggccccggcctgggggacgcggtacatgcggtacccctgcagcagaagagcggccgcgaggattacgtctacgtcgacgatgcgcggggcctgctgcagctggtgcagatgaacaccctggagctgcatccgtggggcgcgaccgtggccgatcccgagcacccggatcgtctggtgttcgatctcgacccaggcgaaggggtgagctgggcacaggtgaaggccgctgcgcgcgatgtccgtgaccgcctgcaggaggtgggcctgcagagcttcgtgcggctgtccggtggcaagggcgtgcacgtggtggtgccgctgcaacccaaggctggctgggacgaggccaaggcgttctgcgaggcgttcgcgcaggcaatggcgctggagcagcctgatcgctacgtggcgacgatgagcaaggccaagcgcggcggcgtgatcttcatcgattggctgcgcaacacacgcggtgccaccagcgtgtgttcgtggtcgctgcgcgcgcgcgatgctgccggcgtggcggtgccgctgcgctgggaagaactggcccgggtgagcgcggccgacgcgtttccgatggccaaggcgctggcgcgcgccaagcggctgaagggcgacccatggcagggcatcgcgcggttgaagcagaggctgccgtcgctgaagcggtag

SEQ ID NO: 533549 - DNA, 393 bp, Stenotrophomonas maltophilia
atgcctggcctgctcaagaccctgttcctgtccatcgtcgccctgatcggcggcgtgctgtcgcttgcgctggtcagcagcgtcgccggctggctgccgccgttgctgggcctgtcgccggacagcaacagcgtgcagctggggtgggacctggccttcagcgtactcggtggcgtcgccggcatttccttcgccacctattacgcaccgtgctggccgcgttcacatggcttctcgatctggtcgctgatcgcgctgggctgtggctacgcgatgtggacggcgggtgcggacttcccgttctggttcgtcatttcgctgttggcatcgctgccgttgcaactgctggtcggttggtggttcgggcgccgcccctcgcgcgatctgcgctga

SEQ ID NO: 533550 - DNA, 1029 bp, Stenotrophomonas maltophilia
atgcaatccaccatgaaggccgccgtcgtacgcgagttcggcaagccgctggtcatcgaggaagtctcggtaccgcgcccgggggcgggcgaggtgctggtcaggatcgaggcctgtggcgtctgccacaccgacctgcacgccgccgagggcgactggccggtgaaaccgaacccgccattcatccccggccacgagggcgtggggcacgtcgtggccgtgggaggcggggtagggcacgtcaaggaaggcgacagggtcggcatcccctggttgtactcggcgtgtggccattgcgaacactgcctgggtggctgggaaacgctgtgcgagacgcagcgcaacaccggctactcggtcaacggcggcttcgccgagtacgcactggccgatgccaactatgtcggcctgcttccgaaagaagtgggcttcgtcgagatcgcgccggtgctgtgcgccggcgtgaccgtctacaagggcctgaaggtgaccgacaccaagcccggggactgggtggcggtttccggcatcggtggcctgggccacatggcggtgcagtacgcccgtgcgatgggcctgaacgtggctgcggtggacgtggacgacaacaagctggcattggcccggcagctcggcgcgcagatcaccgtgaacgcgcgtaccaccgatccggccgcattcctcaggaaggagatcggcggtgcgcacggcgccctggtcacggcggtttcgccgaaggcgttcgaacaggctctgggcatggtccgccgcggtggcaccgtgtcgctcaatggcctgccgcccggcaacttcccgctggacatcttcggcatggtcctcaacggcatcaccgtgcgcggctcgatcgtcggcacccggctggatctgcaggagtcactgcagttcgccgccgaaggcaaggtcgcagccacggtcagcaccgaccgcctggagaacatcaacgacgtgttcgcgcgcatgcacgcgggcaccatcgaaggccgcgtggtgctcgacttcgccgcctga

SEQ ID NO: 533551 - DNA, 639 bp, Stenotrophomonas maltophilia
atgtccagcgctgatccgcgcctgcgcgcgctgttgaagctggcaccggtgattccggtgtacacccccgaagatgtgaatgaggcggtcgaagtggcccaggcgctgttccgcggcggcctgccggtgatcgaagtgacgctgcgcacgccgcaggcgctggatgcgatcaaggccatggtcgaggccgtgcccgatgctgtcatcggcgccggcaccgtgctcaacgccacgcagatgcaggcggcgaagcaggccggcgcgcgcttcgcggtgtcgcccggtgcaacgccggcgctgtatgccgccgcgcgcgatgccgacctgccgtacctgcccggtgccgccaccgcctcggacctgatcctgggcctggagcacggcacggacaccttcaagttcttcccggcggtgcaggccggtggcgctgcgttgctggcggcctggcacggcccgtttgccgacgtgcggttctgcccgaccggtggcatcagcgcgcagaccgcgccgcagttcctgcacctgcccaacgtgctgtgcgtgggcggttcgtggctgaccaccccggcgctgctgcagacccgtgactgggacgccatcgaacgactggcgcgcgaagcatcggtgctggccagctga

SEQ ID NO: 533552 - DNA, 708 bp, Stenotrophomonas maltophilia
gtgatcgctctactgcgtttgcatctgaaccgtttttcacgcgtgcttgccatgaatgcgggtgccacgcgcgcgaacaccaacattcccttaaccatgctccgctacagtcggggcatggacctgcagacttctccgtttccggcgttccgtggccgcgaccggttgatcgccgcagtcgacgcggcgatgacctccggtgatgccgggcgcatcaccgccgacctgcagctggcgctgcaggaagccatcgcggacagccgcatcgagctacccgaatgcgtgcaccgtccggtcagtgatcattacgcgcgacgcccgctgtaccacagccaggaacacggctacagcgtgattgccatgagctggggcccagggcagggcacgccgctgcacgaccacgatgccatgtggtgtgtggagggcgtgtggttgggggaactggagatcacccgttacgagctgctggaatgcgccggcgaacgctggcgcttccgacgccacgccgcgctgcgcgggggctgcggcagcgccggcagcctcattccacctcacgaataccacaccctgcgcaatgccagcgatgaagccctggccatttcggtgcatgtatacgaagcgccgatggaacgttccgcggtgttcgacccgcttgggggtgactggtaccagcgccgcatccaggcactgcaggccgacgcagtctga

SEQ ID NO: 533553 - DNA, 1041 bp, Stenotrophomonas maltophilia
atgagcgatgccgcgttgccggcatcgaaaggcaaggctgccacgatcaacgacatcgcacgactgtcgggagtttccaagaaaacggtttcaagaatcatcaacaactcgccgctggtgcgcaaagacacccgcgacaaggtcgaggcgttgatgcgcgaggtcggttacgtgcccgaccccctggcgcgcggactcgcgttccgccgctccttcctgatcggcctggtgtacgacgaccccggcgctcaatgcattgtcgacctgcagcacggcgcgctggaagcgctgcgcggcaccggctatgagctggtgatgcatccttgcgacagtcaggacccggagtgcgcgcagggcgtgcgccgcttcgtgcagcagcagaagctgcatggggggatcctcggcccgcgtgcatccgaatcggttgcactcgcgcagatgctggacgacatcgactgccgctacgtgcggatcaacgcgcatgcgtcggaagaagacgtgcaggcggtggtcacccacgatcgcgatggcgcggcagcagcagcgggctacctgctgtcgctcggccaccgcgacatcgcggtgatcgccggaccgggtgaccggcgcgcggcgcgtgagcgtacccatggcttccttgaccggttggcccaggtggggctgaccttgccgggcgagcgcgtgctggaagcgtgcgacaccttcgaatccggcgtgcatgccgccgaacggttgctgctgggggaacgccgccccagtgcgatcttcgccggcaacgacgagatggcggccggtgtctaccaggtcgcgctgcgtgcgggtattgccgtgccacagcagctgtcggtcgtcagctacgacgacagcccgctggcgtcgcggctgtggccgcctctgacctcggtgcgtcgccatgtgtccgatatcggccgcgtggccgcgtcgatgctggtgcaggccgacgtgccggatgcgccgaccgcaaccagcgtgcatccgcagttgatggtgcgcggttcctgccgggccgtggacgcctga

SEQ ID NO: 533554 - DNA, 894 bp, Stenotrophomonas maltophilia
atggacctcgcccagccccgccgcgtcgaacaccagcagaccgacaagggctacgtgccggtgtacaccaccgcgctcgtcgagcagccgtgggacacctataccgccgacgaccacgccacctggagcacgctgtaccagcgccagcgcgagctgctggtcggccgcgcctgccaggagttcctggatgcacaggacgagatgggcatgagcgcgcacatgattccgcgcttcgaccagctcaacgaagtgctgggcgccgccaccggctggaccctggtcggcgttgaaggcctgctgccggaactggatttcttcgaccacctggccaatcgccgttttccggtgacctggtggatccgtcgcccggaccagattgattacatcgccgagccggacctgttccacgatctgttcggccacgtgccgctgctgatgaacccggtgttcgccgactacatggaggcgtacggccgtggcggcgtcaaagcccacgcgatcggcccggatgcactgcagaacctgacccgcctgtactggtacacggtggagttcggcctgatcgatacgcccgaaggcctgcgcatctacggcgccggcatcgtgtcgtcgaagggcgagtcgctgtactcgctggaatcggccgcgcccaaccgcatcggcttcgacctgcagcggatcatgcgcacgaagtaccgcatcgacaccttccagaagacctacttcgtcatcgacagcttcgaacagctgatgcaggcgacgtcgccggacttcaccccgatctacgcggcactggccagccaggcgcatctgccggcaggcgatgtgcagggcgatgaccgcgtgttccagaagggcaccggtgaaggctgggccgacggcggcgacgtgtaa

SEQ ID NO: 533555 - DNA, 486 bp, Stenotrophomonas maltophilia
atggccggagaagtccagtttgatcgcacggatatacgcctgctggctgaaatccagcgggatgggcgcgccaccaacgccgaactggcggcgcgggtgaatctttcgccttcggcctgcctgcggcggttgcagcggctggaaagcgagggtgtgatcgtcggctatggcgcgcggctggagccgcggcagctgcggctgggcctgcaggccttcgtgcgcgtgcagctggaaaagcacgaccaggccgccatcggccacttcgtggacagcgtgcaagcgtgggacgaggtggtggcctgccatgcgctgaccggcgacatggactacctgctgcacgtctacgtgcgcgacctggagcacttctcgcgcttcctgctggaccggttgctcaacgccggtggcgtggccgatgccaattccagcttcgtgctgcgcacggtgaagggtttccaggcactgccgctttcgcagctggagtcgtga

SEQ ID NO: 533556 - DNA, 744 bp, Stenotrophomonas maltophilia
atgaaagtctgccttgctccagtcattgccctgcttgttgctggcctgatgccggccgctgcgggtgcttccccccagatcgccaacgcccaacctctggcgctgagttgcggtaccactgaattcgtcggcatgaccagcaactcgtcgacgctggccaagcgccagtgcaatggtagctatgtctatggaatcggcgtctcggtcaatgaagcggtggagaacctcaacggcttcatggcggtgctgcaggccggcgtgagctgcagcgcggatgccagcagcatcgtcagtggtgcctacggcaagggtgttttcgcccagtttgtctgcaatggctggtcgatcgccggcgtgggcaactcacccaccaccgcggcgcgcaactcgctggccatcgcgacggaaatggcggccacgggtacccattgcgcagcgccgctgcagggttcgtactatccggaatcctgggggttccgtttccgctacgactgcggcaacacgcagaccctgaagagctggtccatcagtgggctcggtgccagcatcgatgacgccaacgtcatcgccatgcgactgatgcgttactccacagcggcaggccagagctgcaacttcgagaaggccgaaatcaatggcgtcattctgcacgccacgctggtctgcaacggctcgtacatccatggctacggcagctcggtgacggccgcagccaacgacgcactggcccagatcggcgcctga

SEQ ID NO: 533557 - DNA, 993 bp, Stenotrophomonas maltophilia
atgagcctgttccgcccccgcatgctgctgtccgtcgccctgatcggcctgctggccggctgcggtggcgatccggtccgccctacgccgccgccggcgccgaccgtggtgccacaggccaagccggtgaagatcggcatcgcactcggcggtggcgcggccaagggctttgcccacatcggcgtgatcaagatgctggaagccaatggcttcgaaccggcggtggtgtccggcaccagtgccggcagcgtggtcggcgcgctgtacgccagcggaatggacgcgttccagatgcagagcaaggcggtggcgctggatgaagccagcatccgcgacgtgcggctgttctccggtggcctggtgcagggccagaagctgcaggactacgtcaacgaacaggttgccaaccgtccggccgaacgcctgaagaagccgttcgccgccgtcgccacccagctggaaaccggcgagcgggcgatcttcgtgcgcggcaacgtcggccaggcggtgcgcgcgtcgagcagcattcccggcgtgttcgaaccggtgaagatcggcggtcgcaactacatcgatggcggcgtggtcagcccggtgccggtggatgccgcgcgccagctcggcgccgacttcgtgatcgccgtggacatctccagcaaggccagcggcaaggcgccgaccgacatgctgggcatcgtcaaccagtccatctcgatcatgggccagcgcctgggcgaacaggaactggcacgcgccgacgccgtcatccggccgaaggtgctggacatcggcgctgccgatttcagccagcgcggcacggcgatcctggaaggcgaaaaggccgcgatggccgcaatgccgcagatccgcgccaggatccagcagctgcagcgtgcgcgtgctgcggccgctgcaccggcgccggtggctgcccccaagtgcgaggaagcctcgcgcctgggcaagctgatgggccgcaaggacaagtgctga

SEQ ID NO: 533558 - DNA, 168 bp, Stenotrophomonas maltophilia
atgcgcgcgcaggtaactttcctgagcgattaccgatgccccgccatgggtagaaaatcgcccaagcgccatggccgtgaagtaatgcaggtgcttaagatcgctggcaggatcctgatccctgaggacaatttcgaagagccgcaagagatcgactcacttgaatga

SEQ ID NO: 533559 - DNA, 1563 bp, Stenotrophomonas maltophilia
atgagcgggtatcaattgctgagggtattcttcgtcttgggtggcctgtgtgctgtacaggctgcgcttgccgattgtggttcgtcaaacgagaagagtgcaccgtttcacggcaatgaagtggtgctcaagttctcgccgagggaagttggcgaggggtctgcagtagccgccagtctcgatcgtgcgaacaccgatgccccctatgtgcgaattgacctgaaccctcatgtaagtgagttgaacaataagccgttcgactcgagtggtggttcggtctactacttggaaaaaggcgttcaaggacaacggatatgtcgcgccgagcaatggaaaaagcgagagtccaagttgattggcgcacagtttcctgaaagcctgcaccctgcagtcaggcatgtgtatccctacttcgaggtttacaagacgcacgagcttgattatgacgggtcaggccaattgacatcgattcaacagattgacggcgcagggcgcaaggtcacgacattctgtgcactctacgacgaaaatggtcgcatagaagtggcaaatgagagttctggattgatagtctcggataatccagagttccagtgttcgcagctccgctatatgccatcccgcactaccactcgatacttcacttatcgaccggatggatcgctggcttccgatgtagagaaggaagccacgcgtaaaccaggtgaggatcccgaccgcgaggacactggccctggaaccgaggcgaccgacggtgcctggacggtggggggcttcgtcaatgtcgacgatgctgaattgaaacgggtcgtcggcattcgcttttacggcggcgagaagcgagggattgtaggagtgcgaagcccttccgctaccctggttccgtctgacgtcactccggttttcgcagagcgcagccacgtcgcgtcacaggaggtgcggtacacgttccccggtgaacgcgtccctccagaggtcgccaagggacactttgagggagtcacaggctatacccgtgtgcgtgagtatctgcaccgttcgggtagcaggattttcgaagtattcgctcccggcgcgaagcacccccgcgaacgccagtggcgcacgctggatctgaatcgtcaggaaaactacgacgcaaatggcaagctcacgcgggtgatcctgtccggccctgtctctggtgacgcctacaccgagaacctgcgcgcctacgccgacaagggcgtattgaagctcacgcccctcaccaacggctacagctcttaccgcgtgtacgactacgacgctgccggaagagagacgttgtcgttcgtgtgctggcgctatgaagtctcgaccaacaagccctacgcccatttcccctggtgggagcccgatccccggccgaagcgcagtcgtgaagccgagctgcagtacgccaggacgcaggtcggtacacgctgtggcacgccggacggcaagatgagcgtggagggaatgggcccggtgaagaagctgatggaaaccaagtatggctttggtaccacgaagcttgggttcccaggcgaagagaaggattga

SEQ ID NO: 533560 - DNA, 129 bp, Stenotrophomonas maltophilia
atggaactgacgccgttgagcgatccgctggtggcggccatcgctgcgcgcatccgtcgcgccatcgtggccggacagggcttccatgtgtacatcatcttgcccgtgcatccggaaggcagcctgtga

SEQ ID NO: 533561 - DNA, 1611 bp, Stenotrophomonas maltophilia
atggaacacatcagcattccagacattctagaccaggtagcgaaggggcagattcgcgtcccagcgttccagcgtggctatgtctgggagccagaccgagtcgcctatctgatggactcgatctacaagcgctatccatttggtaccttgctcttttggcggaccaaggaaaagttgacagtcgagcgtgacttgggaccattcaagttgccggagccaaaagaggattatccagtcgactatgtgctcgacgggcagcagcggatcacttcaatctttggcactttccagacgagcttgccctctggcagcggtcccgcttggacggatatctactttgacactgaagcggaggatagcgcgcaagacactctattcgtagcgctgtccccatcagatgctgcaggaacacgctatttcccaatccgaacactgtttgatccggctgcctttagacgtgcaactagcaagttgcccgacgataaggtcaccagaatagatcgcgtttacacagcgtttcagcagacgcagattccggtccaggtgtcgaagacggaagacaaggccacggtcgccatcatcttcgaacgcgtcaatcggcagggcgttgagttggacactttgcaactactgtccgcttggacatggagcgaggacttccagctgcaggaagcgttcaaggatctcactgaggagctcgctcccttcgggttcgaaggggttggcggagacagcaatcttctgctgagatgctgctccgctgtacttacccaagacgcttcaccagaagcgttgatgtctctcaatggcaacaaggtccggcagaacttccagacagtgatgaacggcgtgcgctacgcagtggactacgttcggtcaagttttgctgccgagagcattgcaaatctgcctttcactacggccttggtgccactgtcagtgttcttcgcagtcccagggaactcagaagcgggtattactgatgcccaacggagacagatcaatcaatggttctggagatctgcattcaccaagcgctacagttcaggagtccttcgcagtctcaacgcggatattgaagagatgcggactctcagagaaaaaggcgtcagtaaacttggcgactttgcggcagatgttaaaaaggagttcttcctggagaacacttttggcatgggcaacgtcaacaccaagaccttcatcctcatgctggccacgaaggggccgctttcattcaaatctggaatgccagtggacctggcaaagaccctcaaggctagtaatcgggctgaatttcatcacctgatgcctaaggcctttctgcgctcaagttgccagacctcctatggcgaaggcatccttgcgaactattccttcttatccagagctgataaccgagcactgggaggggtggcgccatccttgtataaatcgaagatgcctgcggaccatgcaaagatcctagatgccgccatagttccgtcagagcttttcaatgacgattactcttcattcgtgatgctccgcgctcagatgttgactgagtacgcgcggagcctctgcaatctgcctccggggcagcaatcacctccagcagcgcccctgatctaa

SEQ ID NO: 533562 - DNA, 198 bp, Stenotrophomonas maltophilia
atgggcgcagttgagatcattcccgaggtcctgctgaagctcgagcaggtcgaagcccagaccgggatgaagaaaagttacatctatcgcgaaatggcaaaaggcacattcccacacttgcacaagatcggtcgtagtacacgctggtttcagagtgaggtccaacgatggattttggacaagcacagagcccactga

SEQ ID NO: 533563 - DNA, 411 bp, Stenotrophomonas maltophilia
ttgaacgtcgagaaaatcatcgccatctcgggtgaccggtcagcgctggtcaaccagctgcgcgcggccattgcggttgcagcagcgctggaaaccgcactgaccagcacgcatcccgccagcggcggcggccgcgcattgaccttcacgttcgccgacgcgccgcagctgcaggccgcatgcgacgcctggcgcacatacgccctcgccacgatcgatacaccggcgccggtggcggcgacagctgcccagcggctgactgcccagatcggcctcgcccttttcgatgacccaaccatggacctgacacaaatcgcaaaccttgtgacgacggcacggtcggattcgcaaacggcgctgctgccggcgcccaccaatgaagcaacggaggccggccatgggcgcagttga

SEQ ID NO: 533564 - DNA, 918 bp, Stenotrophomonas maltophilia
atgaatggtttggtggcgcaagtatctcagatggctgggatatcatcttcaagttgcaggttaattgcgcgtggggcgcatcggcgctacaagaaattcacgattcgaaagaagaatggtggaattcgtgttgttgctcagcctgcaagagaagtaaaggcaattcagagggcgatttgcgtcattctttctgaaaaattgtttgtgcacgcctcggcaacggcttataagattggttcctctatactgagtaatgctgctgcgcacgccgaatcgcgatatctgagtaaatttgatttttcggatttttttccaagtatcggcgcagattctttaattaacttgctggcgatccgtgttccgaatctgagtgaggctgaggttagattcgtggtggatgcttgtacttggcagccgaatgggcgcgcggaattatgcattggtgctcctagttcacccttgctttcgaatgctgtgatgtactcctttgatgagaatattttcagcgctttggcggagatgggtgtttcctacactcgttattctgacgatatttctatctcttcaaagcgtgagggaatattggctgatgccgaattgctgcttagagctgccgttgctcggtcccgatttcccgttctgcgaatgaatgaagaaaagcgagtggctgtcggtcgaggggtttcaatgacagtgactggtttaactctgaccaaccaaggtggggtttccgttggtcgcgcaagaaagcgtggagttcgtgccggagttgagaaattcgtacgatttggtgcaacggaagttgagttcgccaggttgaagggcgagttggcatttgtgctcagcgtagagcctgaatttcgtcaggttttaatcagaactcatggtgagaggattctccgcctgcttcccaggtag

SEQ ID NO: 533565 - DNA, 945 bp, Stenotrophomonas maltophilia
atggatgatccgaggctgaatttcgttagccagattgatctatcaaaatctcgaatcaaagcatttgaaggttttattctgctttgcggtggggagagtaatgttgatgcctcccctttgagatctgttcgtcatctcatccaaatggagctcactggtggaaatcacagtgagttggctggtcgcgtccgcttggccgaggataccaaggattggtttgatggtggcgtttactcagacttaattacatttgaagagcatttggcagggctctccgctgttgtagtgcttgtcgtggaaagtcccggtgccattgcggaattgggggcattctcgatcagtgagcctttcctcgacagacttttagtcattgtttcccaagagcattacgaacagaagtccttcatccggttaggtccagtccagaaaatcgagaatagtgcttccgacgctgtgctagtttacgattggcatgatcggcgagttggtgagagacctgttccgaatttcgagttgttacgagaagacgtgagtgaaattgtttcggcaatccgatcctatacgtctccatcgggtcgtgagcgcgtcttcaagtatgaagatccttcgcatgcgatgagtcttatttgcgagttgtgtgatctgtttggtgctttgtccgaaagcgatattcacgaatttttattgaagatgggacttgatcctggtcttgacaacataaggcgatatttgttcctgcttcagaagtgtgaattactattcctgaaatcgaaggggcatgggcggtattactatgtggaagagtggaaatcaagattgtctttctcattttctggtaatgagaagttcaatagggagcgaatcaaaatcgatacggttgcctactacgacgcagtgatgaaaggtcgcgcagaggtagtacgtaggataaggaagtcatcatga

SEQ ID NO: 533566 - DNA, 372 bp, Stenotrophomonas maltophilia
atgaagaagactgtacagcaatccgcacccgaagcaatcgggcaagcccccgacgcacattcagaaaaatctgacgcgctggagccggcagacacccgacacgactggctgcgcgaggaatggcggaagagcaaccacgctgatcggtttcggctggagatggttgaccgcgcgctgtacgccgccagcggtctccagaggattttgatccgggagcagcgtggccgcgcgctgcaggccgcagcccctgatcagctgtcccatgacctgctgaacgagcccgaggccgaatcgatgtgcgacgcggtagcgctgctcctgcacatggccatcgacaccttggagcccttgcgcagcgaggcccgccgatga

SEQ ID NO: 533567 - DNA, 153 bp, Stenotrophomonas maltophilia
atgaacgccatcatcatccccttccctgcacaccgcatcgtgcggactccgccgctgtccgcactgtctgaggctcgcctacaggcactcgccgagcgcctggcagctgccattgatcgcgccccaccccgccaacaggagcgcgcaccatga

SEQ ID NO: 533568 - DNA, 492 bp, Stenotrophomonas maltophilia
atggcagctgagaggaaccgccgcaagatcaccggccggcagtcgagcgacacgttcgttcggttgccgcatccgatgatccagtcgccagcgttctacgcgctcggtggcggtgcgatgaagatgctcatgtttctcgctgctcagtacaacgggcgcaacaacggcgacctggccgcgacgaagggcatggtgtccgctgctggcgtatgcgccaccagcaagataggcggcctactggacgagcttgaggcggctgggttcatcgtcaagacgcggcacgggaaccgcaagctatgcaacctgtatgcgttgacgtggtacggcatcgacacatgcgcgggcaagggactggaagtgctgccgggaccaccgcgcaacgactggaggaaaacgcaagttgatgccccctcagggggccaaaccaacgcggaatcagtggccccaacagggggccacattgcacccctcaggggggcaaaagccgcatga

SEQ ID NO: 533569 - DNA, 198 bp, Stenotrophomonas maltophilia
atgtccagttctgttaaggcagatgttgaactcgcaaagcagctgtttgtagcaatggttggcgaagagtttggcgacaagagcagtgccccgaattacgactccatcgcgtcgagggcgttctcggcagcggaagctttcgctaagattgagaaagatcgcggtccgacatacagccttaaaggtcttgacggctga

SEQ ID NO: 533570 - DNA, 936 bp, Stenotrophomonas maltophilia
atggcagagaagcaacccaacaagcgcggcgccaagccgctcgcccaggccgagccgattgtccaggatctggacgcggacaagctggccgagcgcagccaggagctggttaccctcggcgagcaccatagcgaggtggtggatcagttcggtgacggcctgccgtggcacccggaccactacgagaacgccattcgcagcgaactgcgtcgcggctgcgaagccttcattcgagcaggccgctacctggtcgtcgcccgcgaatgtgcaatgcacggcgaatggcgcgggatgcttgagcgccttggaatcggcaaagaccaagccctccggatgatggaggctgcccgcagggtgtcggcactgccaaatgtcgcgaattcgcgacatttgatcgaagccaccaagaaccacagccgcctgatcgagttgctctcgctgccggaggaacagttcgccgaactggctacggagggcgaaaccaacggcctgacgctggacgacgtggagcacatgtctttccacgagctccgtgccgcgatccgcgaagcccgtgccgatctggatgccaaggatcagcgcatcaccaagttgagcgacgatctcaacaaggcggaggagaagacggcaaaagctcagaagaagtggaagaaggccacgcctgacgagcagtcccaggagctgctgacccatctggaacaggcggccggccaagtgcgcatcgccatcgccagtggcagcgaagaagccggattcagcggtgcagtgatcacgctcatgcagcacgccgagcagcacgacctcaatgttgatgagcaggtggccgggatcatcgccagcctgatcaacgacctgcgccttgtccgcgaccaccaggaggtgggcgtcacggtgattcatgaccgccgcctggccgactggaagcgggagggctga

SEQ ID NO: 533571 - DNA, 348 bp, Stenotrophomonas maltophilia
atgaacgttgaaatgtatgcggtcactggcaccggctaccgcgcagtccgtgaagggatggaactgcaaccaggcgagacggcgatgctctcgattcctgcctcactccttctgcggatctacgccgaccaagtcaggcttgagcggtcccagcgtttgcgagccactgattggacgcaggcgcctgacagtccgttcgctccggaggcgaaaatggcatgggcggtctaccgtcaggagcttcgtgatatgccggagaaggcgggcttcccgaactgtgcgtggccggtgccaccggccctgcctgaaggcgcggcggggcaggaacgagccccactccataactga

SEQ ID NO: 533572 - DNA, 252 bp, Stenotrophomonas maltophilia
gtgcccgacgagtattcctacaatgatccggacgaggaaaccgtgcgctacctccagcccgacggtaccctcgatccggaagtgctggttgccgttcctgattcgcgcgcgctgtccgacccggcagccaccatcatgaattcggtcgactgcgccgtgaccctgccgcgacatgcctggaacattgcgcgcgagatacgcgagctgctgagccgccagatcggccgggagataacatgcaccgtcaagtga

SEQ ID NO: 533573 - DNA, 1824 bp, Stenotrophomonas maltophilia
atgctcacaactgacgacattgtgccctactgtggcgtggttctagcgcgctcagagaagcccggcggcttgattcttgttgtgcagaggctgaagaagcgaatcagccaggcattccatgcacaatggacagcacatgaccaagactccgcagatgggtcgagttacatcacgtgcttcttctcatatcaacgcccacctcactgggctcctagatcccaggtattggagacgacccatgcctatttcagcgtaggccttgtcaatgggtatttcatctttcactgttcagacaatgacgtgaaggatgaaatccttgatcttctagattccgacaattttgatgtaagcaagatcgcgcgtgacgtcctgaactacgccttcattgaaggaagtaccgtcaagacactatggctgcacggcatacacaatcgcaccgctgtcaaggcagacagcaaagcaataactggctccaaccttgagctcgcactagacccaagcggcgatcaaagctactcgtacaattcgctacgaggcaatgtagagctgcttcgcacggagcggacattcggtgtaaacctgaccgaatcctacctctggctgtaccggatgaacacatggcccgagttcctggcagcatgtaacgcgctcactgaaatactccgaaaggcaaaaggaaaggtttcgagcaaaccgcttgaaatcgtatctcaccctatcagtgagacagccgcaatgaaggggctattcgatttcagcatagtcgatagcgaaaacccgagcggcattaccctcggcacaggaaggtcatctctactgagcaagctcaggcaggaatatgatttcgagcctattcatcagattacccaagacaacatcatcaggctgaaggttcaccataggaataacggactccgatcctacctcggcgagctacacgccgagccgacccttaattctggaaagcttggcttcaacacgaccaaggttggcgtccagccacggcagaatggaaagcttcaagagttcgcccgcatcttctctcatgcaccactactgcaagcgtggtacgacagcggccattcgatcacgggcggagcatgctacgaaataagctacaagaacgcgccctttaatggaatgtactggggagacttctccaacttcgacctgactaaagagaagccgatcgccccggccacaggcgcattcctatctaacattggcacctcaggagaagactctttgttctcttgggtttacttggcaatatgcaggggatcaaaagcgaagcgtctttctcacataaggatgaaatcgagtaatgactggctcctttgcgacgacggatccggggaaatatccgatttcctccatgcaacaacaatagacaatcatcaccacctaacattgattcatgtgaaagccgcaaactccgcccagcccacgcggttgatttcggtatccgcacatgacgtcgttatcaaccaagccataaagaacatcaatcaccttaacaaggcaaacctactggcagcactgagcagtcgcatcggcacgacaaacacaaagcccgcgtggacagtcacaaacggcgtgacaacgcacgccaatgccatcggctttgtcaatgcggtcgcgaaatggagcgccgcgagaatcaatgtccacgtcgttattgttcagccacatacgctgcgcaaagcgtttcgaaataaagccagcaccaagccccattaccaactatgcacgctactgaacagcgcggctcaccaagtcgcaggtctaggcggaacactgacggtaatcggcgccagaacttaa

SEQ ID NO: 533574 - DNA, 585 bp, Stenotrophomonas maltophilia
atgaccgcaccactgcccatttccccggccaccactgtcgaggccaccaaggcatcgtcgcctgtcgccgcggttgtctccgccatgcgccgggtggatccggccggcgctcccgtttcagccagccaggtccgtacgtgggccgacaccctgatgacggcgctctacaccgcgcagccggtgcgctgggagtaccggcgcaaggacgacttcgcgccaggctgttgggtccatgccaacgcaggtcacgtgtacgccgcccaccagcgtggactcattgtccgcgctctgttcgaaacaccgcgcgtaatccaaccggagaagctgcacgagttccgggggcgcgtgtgcgtccgctgcggcgacagcgaggattgggctgggccggattgtcagcctctgatcaagaaagtcgacccgcgcaccttgctccccttcgatcccagctggctcatccagccactgcagtggctcatcgatgcgccggccaacctcaacacctacgaccgccgccaccgcgcggcgcaagccgccttcctgctggaaaagctcgaagcccacatccaggagtgcaacaagccatga

SEQ ID NO: 533575 - DNA, 678 bp, Stenotrophomonas maltophilia
atgagccatcgcatcaactgcgtggagaaagcgaagctgggtggtaggaggattccgaccggaacctcaggacttacgattcagctctacgatgtgccgctcgacagccaccatccccagctgcatagcatcgcccttgttgcggatcacgccttcgatgcgcagctccacagcgaccccgtcaacctcagccgagtacagaaagacctcatcgacgtggctggtgacggtcagcaggaatctgtggccctgtatcacccctcgcatcgttcggcggtagccaccggtcttcattggcaatgcggggttgtgggcgttcgacaatttacatgtgtcgctcaggacatgaaagaaccagttttggcgtcaccagaatctcgcagcccggttggctctgcattctgtgggatcgagcgttcgggctacagcacgcgccgcggcgatccctcccgccatggcctcctctcggctggcgaagtcagcacctgcgtgtacctgttccagaaacaccgcctcccccgtggcgtagacaaggcccatggacttccacagattcggcgcgcagctgtcctgaccagccaccgccacaagcctaaacgcaccctcgcgctcgtccacacagtccccctccctgagtccagctgccgacactactccacccagggagtgcagccgtga

SEQ ID NO: 533576 - DNA, 192 bp, Stenotrophomonas maltophilia
atggccaccctttccctgggctgccgatcggcagagataaaagtcaccgctgaccccgtcagtgagcgcgtcatcgcagacatgggcgccgcccgcctgcacctgaccgccgacgaagccgagcagcatgcccacacgctgctcgacgccgccaaccaactgcgcgccgcgcagcagcgggccgcagcatga

SEQ ID NO: 533577 - DNA, 540 bp, Stenotrophomonas maltophilia
atgtccgccgacgccttgcagctgctcgcgattggattctcagtcttggcgctcgccctcaacgcctggacttccttccggctctggcagaacaaccaccagcacgtcagcccctgggagtgctttccggagttccgcttggacgcgttcaagtcggcggccgagcaacacgcattcgagtccatcggcggtcgtcgccgtgaccttggtgacccaaaggaagaatgggacgtagtctgccggtgcggtcgccacgaccgatgcccctggttccaggcggcccagcagctttctctcaatgtcggcgctgccgtggatcggcatctcctttaccaggtcacctctggcggccagcacgcgaacggacttgatagtcactggcacgccgccgggatttatcacctcacaccaaaggcttggctccttggtcccctgggatttgtcgtagccgcactggattcggactcgccgagtaccccgccggtagttggtccaagtgttgaacacaccgagcgaagcgcccagcaccgcaattcctaa

SEQ ID NO: 533578 - DNA, 291 bp, Stenotrophomonas maltophilia
atgaagccagaccagttcgggggatctcccctcactcgcgtgactgccctgatcgacacccgcatgagcaagcgcgcgctgcgcgcgcggctcggcctgggcaatgacgcgcacctggcgaaggttctggatctgccggttgagcaggtgatcggctgggcggatgaggacatggtcccggcgctgccacaggtgatgaagctgctgggacacaccgagcagcgggagccggtcaaaccggcgaacgaagaccccgatgcagagcgtatcgccccaattgaggtggcttga

SEQ ID NO: 533579 - DNA, 588 bp, Stenotrophomonas maltophilia
atggacgggcaggatctcacccatgcagacctggtaaagatcgccggccggtggctgcggaacaccgctggatgttctgtggtgctggaagagctgtgtgccgccactggtaacggcgagaacccggacgccatcggttggtacacgggccgcacgatgctggtcgagtgcaaggtcagccgctccgacttcctggccgaccggaagaagcgctttcgcgccaaccctgagcgaggcttgggcctctaccgctacttcatggcacccaagggcctgatcaaggtgggcgagctgcccgcgcgctggggcctgctggaggtcaacggcggccgggtttccgtggcagccggcaagcgcccgaagtcgtggggcggccttgacgatccatgggcgttcaccgagcggtatgcccaaggcgagacacagatgctgttgtcggccatgcagcggatcaaggtcagggtcggcgccaccgacttccattcgatgctgcacgagcggctgatgcgtcccgtcgaggggccctccagagaaagccagacggctgcggcgtgggcgactgctgtcgccacggagccgcccttgtga

SEQ ID NO: 533580 - DNA, 465 bp, Stenotrophomonas maltophilia
atgaagggcaaaatcatcgggagcagcgcggccgccgtcatcgcgctggctgcggcagcattggtcaagccgtgggagaactggtcgcccaccccgtacatcgacatggtgggcgtgggcacgcattgctacggcgacaccagccgtccggagaaggcggtctacaccgagcaggagtgcgccgagaagctcaacagccgcctgggcagctacctggccggcatcagccagtgcatcaaggtcccgctgcgagagcgcgagtgggccgcggtgctgagctggacctacaacgtgggcgtgggtgcagcctgccgctcgacgctggtggggaggatcaacgccggccagcccgccgcgagctggtgtccggagctggaccgctgggtctacgccggtggcaagcgcgtgcagggcctggtgaaccgtcgggccgctgagcgtcggatgtgcgagggcaggtcgtga

SEQ ID NO: 533581 - DNA, 477 bp, Stenotrophomonas maltophilia
gtgaaccgcatcgccatcgcagtcgccgccttcgtcctgtggtcaggtgccatgttcggtgcgggctgggcctggcgcggtgatcgggcagagggctggaaagccacccagcgcgccgccggcgcggtggcagtcgcggaccaggtgaaccagacccgcgccgtcgaacaccgccaggccgacaacctggccaccattggagccaagcatgaagaagcccgcactgcggccgcgaccgtccctgctactgttgtggctgacctgcgctctgggcgtctccagctgcgcgacgacctcgccacctgcagcaccagcctcctgtcccaagccgtcgccggcgccgtcgaacgtgatgcgcacgccgaactacgagcagaggttgcgggagctgctgttcaaatcggtcgcgacgccgacgaccacgtccgcggcacccaagcagtgatagtggctgaccgtgaagcggtgaggccgtga

SEQ ID NO: 533582 - DNA, 399 bp, Stenotrophomonas maltophilia
atggcaaagcagaagaacactccagcacctgcggctggcggtccgctcgataagcaggaagcgcccgctgcggtagtggacgcagcggctggccaaggtgagccgccgaatgccggaaaccgcgacgctgacgcgccagccgccgtcggtgagccggtgacggatgagggccgcgacagcgcgcccgaagccgtagcaacggacaatgacctgacgccacctgaagaactggctccgccgcatggcgaaaccgtgcctgcgctggtgctcagtggcaaccatctgggcaaggttggccaggtgattcaggtcaacgcggctcacgttgaggcgctgcgccttggcgggctgatcgaccctcaccccaatgccatcaagtcggccacgccggaggaatga

SEQ ID NO: 533583 - DNA, 360 bp, Stenotrophomonas maltophilia
atgatcaagagcaatcccctacacgcgccgcccttcgaacccaactcccctcagttcgcctggaagaccaggttcaaggacaagtgtgtctataccggttgtggagtcggcctgcctgggcggattgagagtgacaaaagtgccgaaatccgagcaaccaagcaggcacttgctgcacagcttgcgcacgttcggctttcgcagtaccacgaggtgttcgtccgaaatacgacggccgctctgatcactgtccaccacttcctttctgaagcagcggagagggatgccgtgttctttctatgcgcagatgcagaggtcgcggggcagatcatcgaaacactcaacatctgcacggagtag

SEQ ID NO: 533584 - DNA, 615 bp, Stenotrophomonas maltophilia
atgagcatcctcaacgttttgctgcgtgctgaccagctcctagttgctgttgacaccttggcggaggatgcccagaccggcgcccactcatctggtgcaaaactgctcctgattccgcagcacaaccttgtgctggctgcgcgcgggtccacgcagttcttcgttcgcatctacgagctggctctgcaggcgagcttccgagctgatttcacgatggagcagctctccgccgagttgggcctggtagtggatcaactatggccaaattacgtgagggcggcagcagaggctcgcttgccgatcgaaaagcttgggaccgagctggtgctgggtggctggtcgccgaagagaggccggatggtggccacagcgtatgcgaagagcgacagctccaggccaacgatagtgcagcccctcgatgggggcttggcttctcctggggaaccgctggccggcaggccggaaagcttcgcgccagccgacgttcttgcggctggcaaggtccaggctagatggctcaatgaacgggtagggcgacaggtagctggaggccggctgttggctggtttcctggaaaaggggcaggcggtggtgaaggatctcgggccgatttaa

SEQ ID NO: 533585 - DNA, 429 bp, Stenotrophomonas maltophilia
atgcccaacaaggcggttgtattcgtcagcgaggcggtcagcgacctgacccaggcccaccttttgaaggtcatggcggacgcagagcggttcaaccgcagagcaggagtgaccggggtgacgatgtttgatggaagccggttcctctcctacatggaggggccccaggacggtctggatgtggccttctccagagctgctggggccgccagccatacgaacctgatcgagattgcgcgtggacgcgtggggcagcgcaggcttccatactggccgatgcgctgcatccccttggcgccgccggagctggtgcaactggtgcgagccgactggactggcttcctgcagcggggaggcaatgaggttgccccggccaccgcgatggagatgctggtggcgcttgtcgaaccgttcgcggaggctgcctga

SEQ ID NO: 533586 - DNA, 510 bp, Stenotrophomonas maltophilia
atgcttccctcgcacggctaccaaggctcccgcaccaccccgatgcccgctggctgggtccagatgggggagagctgggtgctgtggtggagcggccgccagattgccaatgtgagcctcggcaaggacggcggcgtgcgcgtgcgcctcgacgcacggaagatgtggcagatcaaggaaggacgggccgccagcatcgcccagggcaagcgctacgccgagcgctggtgcgcggccaggctctatccctatctgccccttcgtgaggccgttgcccggctgaccgacagcacgccgatccagccaccgccgccactgcccggcctgccgccgacccgtgagcagcaacaggctcggcgcctggccgaagccggagcggtggagctggcgcgaatcaaggaggcgctggaaccgcgccgaccgccggaggagaccaagccaagggcgagggatcccatgaaggcgtgggtcagggcagggagagaccagttgtcccgagctcaaatctga

SEQ ID NO: 533587 - DNA, 1197 bp, Stenotrophomonas maltophilia
atggcacggaactggattgtgatgggagacccgacctccagcggtgggcgtgtaatcactgcgtcgaaccgaaccgacatcgagggcatgggcgttgcacgcgtgggcgacaaggcgacgtgcccgcacatgcacaaaggggtgtttgcgattgtcgaaggtgacagcacgatcatcatcgatggccagcctgttgcgctggacggatgcgcgctcgcgtgtggctgcagggtgatgtcaagccaacaactcagggtgtacgtatccaatactgccaccacaggcgggactgccagtcccaacatggccggtacgcagcgtgctgaaacgccgctggccagcggccaccgccttcagttcgaccaggctgtccgtttcaccggctcacagggtatgccgttgcgggaactcccctacacgctccatctggcgaacggccagaccttctccggcataaccaacgcactgggcgagacgtcacgtgtttcaacctgcgagagcgtggcggtggtgcgcgcggagttgcgcccacccagcatcacgagcggttgttgcgaacgcaccttgttggccgggatcgatgatgcagcggtttttgatgtcgatggtgttattactacctcttacaccatgggaacgtcgatcgtaccggtgcaggtaccaagccatgaacgcggcttgacacaaggcgagatcgagatgtcacggctggtgttcggcgatgcgattgactacagcctggttaggattcacaaccatagctattggatgctgtttgggatgcagccagaggacactgtggttgcacctaatggcgagatctactttcccgacttaatatacagcgatgacttcttgcgtgaggaccttgagctccaacatctcttcatccatgaaatgacacatgtctggcagcatcagcttggctacaacgtgaagctgacaaggggaccgcgaccaaacatgagttacaactatgcgcttgacgaagtgcgcctgcttcacgattacaacatggaagcacagggcgacatcctcgcggactatttcctcgctgcattccgtgattcacaacgactgcagaacgatacgccccatcagaccgtgcacgacaaccttgcccggctggagcgcactctctcgcggttccttgcatcaaaaggcgacaagaacaaccttccgaggacgacacgatga

SEQ ID NO: 533588 - DNA, 1647 bp, Stenotrophomonas maltophilia
atgtctgcatacgctccgcgcaccgcgattacggcctgcatcgcgttgtggttcctgctgctctgcacccagcaggcagctgcatccggcctgccacgctgcggcgtattcgaggccgaagccggcgacagccaactccgcgtggacggccctgaccgcggggttgagaaaggcagtcacatagccgatcgcccgttcgtcatacagcgcagcgaaggcagcctcagcctggttgagctcaccttcggcctcgtctctgaactggaggtccagcgcgatggtcgcgtcctgcagaaggacagcagacgctaccgcctgacccagccggccgcgtgtctgcccccgacagagcatgcgcccggcagctgcctggctgacgcccaacagtgtctctacaaccaccatgagctgagccttcctgcactggaatcgggctgcgccgaaggcgttccgcacctctgccagcgcctgcccgagcgctatcgcgaggccgaccaggtccccggcagcgatacgccgaccgaagcacagatcgcggtgatacaggccaccatggaaaaggcgatggccgagatggatttcccccgccagtgtcgcgacgatgaccctgcggccgacgccgaggcctgcatggccattctggaacagcggccggagctcgccgaggccgtcgctactgccattcgcacggcctcgatggcggccagcatggttgaagtgttctcgcctgccgccaagcccgcgttgtccgacgcgcgattgcagcgcctgcaggagctgtgcaggcaggtgggtgaaagtggcttctgcatggaggtcgccacgctgcagtgggacgccggccatcttcaggaaggccgggcggccctgcaagtggtttgcgatggcggcgacggaaaatcgtgtcggcaggcagctgcgctgctgcaactgggcgcggacctggtgccgcaggccgccggcgccgtaccctgtggccactacgtggcctccggcgggctgctggacgagctgacgttcggcgatggtggaatggtggaggtgggcttcggctcgcgggtacgtgcacgcctgcaggacggccagattcgcatgcgccacgagcgcggtggcgactacgtgctgcagtcattgcccaacggcgatctgctggggctggacgaatcgatgcgcttcgagcgtttccagcggcagccaggcgatgcgcagtgcagcgcgccgcggcagttcaatgaagtaccgttcccacaggactgcccgcgcgcgcccatcgacggtgaagccgaagcctgctgcgcggcgggcaggatgcagggttgcaacgtgctgggcagtcgcgccggtctgagcggaaagtgggtcgaggccagcgagcactaccagaaggtctgccaggccggcatccgcgaaggttgtgaaaacctggccagcgtgatggaaaacagcagccgcgtgaacgtccgccccatgcttgagacgctctgtgaagcggatggcagtggccgccacgtggcgtgcgacgtgctggccacccgcaattgggaactgcttgaggcagcccaggccctcgaacgtgccctgcgggagtcgtcggctgacgacgggcaggcccgccccaccccacgcacccccaaccacaagcagtaa

SEQ ID NO: 533589 - DNA, 504 bp, Stenotrophomonas maltophilia
atgtcttgtcttggtgttcatttcgcattgaccagcgaggaagtttcacttcttcgcgggctgcccgatggagaaagcagagtgaacttggtcagggaggtctttgaggaaaactacctgagcgacgagtcaccgtacgctgcggaaagtgcgaaggcctgggacgctatggaccgagcgatggcggtgaagatcaatgactccctcgatccaggcggggcgcttcgctacctggtgcttgagggcgaatccttgaattcggctggtgactacattcttagcctcaagaccccggaacaggtcgacctgctggcaaagatcgtcgacaggattgatatcaatgccttccgtgatcgctatttccagatcgatcctgcgggatatggtgcgcagctaggtgaagatgatttccagtacacgtgggagtggttccaatgtgtgcgcgacttgttcaagacggcggcgagcagcaagcggtacgtccttttcacggccgatcagtag

SEQ ID NO: 533590 - DNA, 753 bp, Stenotrophomonas maltophilia
atgcttctgcatcgcgtcttggctgtactggctctgcttgcactgccgttggcaagtcgtgcggatgttgccatccaatcgacacgacttgttcatcagggcagtgagcgaatggtggtccagcgcatctggaaccagggggacaagccttcgatgattcagacctggatcgacaagggtgacggcgatcagtcattgcaggccggcggccgtctgccgttctttgtgacgccaccgctgttccagctggagcctggtcgaaatcgcgacatcagcgtgcgcctggtggacgcggcgctgctgccaggcgaccgcgagtccctgtattggttgaacgtgctggacctgcccgcgacggagaaagccgcagacgtgatgaacatcgcctatgcggtgcgctggcgggtgaaactgctccatcggcctgcgggcctggccggggtagcggatgccgcgccggcgcagctggcctggcggatgcagaagggcgaggcggaatcgacgcagctgctcgcccacaacgacacgccctatcacgtcaacctgcgcgagctgagcgtgggcgatgcgcagattgagctggagccggacagcgcggtgatcgcaccgttctccgagtggacggtccaggttccggaatcggctgcaaggcagcgagctgtggtgaaggtgctgtggctggatgacaagggagagggtcagtccctgcaggccaatgtgacctgctcgtcggaactgtgcaccggttcgtga

SEQ ID NO: 533591 - DNA, 1023 bp, Stenotrophomonas maltophilia
atgaagatcaacctcaagacacgggtacattcctggcagggtagagcgacgctggttgctgctctgctgctgggtgcgtggacggcacaggcgtgctcgccttcaaccaccacgatgagccccaactccgcgcaaaggtacttcacatacaccggtgtgcgagagcccttgaccgactggcaccggctgcacggttccgttgcgctcgagacgaactatctctatatcaactgtacgggatacccgacatattcggtcacctacatgccgaatctgagctatacgggctacgaagtggatggcgctgctgtcttcaacgttggactcaatattggcgtgcagttccgcgttgccaatggaacggatgggttcggctcagcgacgaatgtcggtagcagtggcataaggctggaagcgaatgacactgagaatgtgatccggatgagaatctggtatcgctatatagctatcgcagacgtcagtacggtggatcagctgaataccattgaccataactggaccttcaccaatcattccgatggaagcctgacctacagtaagggcagtcatggggagcagatcaacaagtacgtcccgccgccgccgccgtcctgctggttcgcgcgctcgccaccagccagggtggcactgccgcacaccaccgtcggcatgctggaacgggatggcagtggtcctgcccagaccttcgattggacgatcgcctgcaatagtggtgtcccgagcggcccgctggtgaagtacagcgctggaacctcgtcaaccgatccgaagacgggccgtatgtccattgagccaggagccggagcggcagaaggtgtcgatctcgaagttcgacgatcaatgacatcgggtggcaggaagaccgcggtcgagtttggaaagtcctactttcccttcagggatggcacggagtacctcgatgtgcgctacgtacccaacggaagtccactgaaaccgggtgctgccaacggtagcctcaaggtggagcttaccttctactga

SEQ ID NO: 533592 - DNA, 735 bp, Stenotrophomonas maltophilia
atgttccgcatttacaggaatctcgcgctggccactgcgatggccgccatcacgctggtcgcgcagcctgccgaggcgggcgtggtgatcaccgggacgcgggtgatctttcccgcgcaggagcgggaagtcacgcttcgcctgacaaacaccgctcaaacgcccgtactggtccagtcgtggatcgatgacggcgatgtacgctcaacgcccgcacaggcagcggctgttcccttcgtcatccgtccgccagtgttccgcatgaacgcggagagtggccaggcgatgcgcatcctgcacacgggtcagccgatgccggaagatcgcgagagtgtgtactacctgaacgtgctcgaggttccggcagtcgggactgaagcagatcgggcgcacctgcagctgattgtccgttcgagactgaaattgttctatcgccctaaaggcctgtcggccgcaggcgcagccaaggcgccctctcagttgatctggaccgcatcacgtgcaggcaatggctgggcattggaggcacgcaatcccaccgcctatcacgtcaacatcaatgcggttatcacggccaatgaacggattacggcggggctggccgcaccgtttgcgacgacccgctacaccctgagccaggcgcagttcaatgcgcttgggccgaccgtgaccttcgaggcggtgagtgaccacggggccaagatttcagcgacggcaccgctcacgcacccctga

SEQ ID NO: 533593 - DNA, 525 bp, Stenotrophomonas maltophilia
atgaacaagattgcaatcgcactgtccgccgcgctctcgctgggcgccatcgcctcggccaacgccgctgacgccaccatcaactttacgggcgagatcaaggatctgacctgcacgatcaccgtgggcgcaggtggcaccggcaccaccgtcacgatgccgaccgtgtcgtccaatgtcatcaacggtggcgtgggtgcccgcgagcaggcgttcactctgaacgtgggcgctgccgggtccaccgaatgtggcgcgggtgactacatcttcagtttccagggcaagaacgtggaagacggccgactgaagaacaccgagaccggcggggcagccaacgtccagctcgcaatcctggatgggggcgccgaagcggatctgatgacccacaccattacgaagaccattcccgccggtggtggctccaccaccattccgctgactgctcgctatgagaagagcagcgctggttccgccggcgaaggcgatttcgccaccgcgctggagatctccgtcaactactga

SEQ ID NO: 533594 - DNA, 210 bp, Stenotrophomonas maltophilia
atgaggaacctgccgcgccgaacgggcaggttgctgcgaaacagaggggaaggagagcggcagccgagtgctgcacggcagggcggcccggtcgagggcggctggcccggcaagggcgacgaagatgtcctgttcaagcatggtgcattccctgcagatcgcccccctagcgattccgtgcccattgtagcggcggtgacgggcaggtga

SEQ ID NO: 533595 - DNA, 189 bp, Stenotrophomonas maltophilia
atggacgagaacactcgcaagctgatcgaggaaatggttcgtcagcaggtgaaggagcagctggaaatcgcgtgccgcccgggagggatgctgttcccgccgccaaaggcagcgattggcgtgtctgaggttgatggacagcgctacgtgaccgcagtcatcaaggttgaggctggcgaaaagctataa

SEQ ID NO: 533596 - DNA, 618 bp, Stenotrophomonas maltophilia
atggctgaggtggtgcgggatctgaagatggcttggccgaagaaccagaccataaacatcgtcgccttcggtcacagcgttccggctggctatgcgattacccctgaggtccgcaagaaggacgcctaccctaggttgcttgaagactcgctggtcgatcgatatccgcatgctgtgttgaatgtgatcacctccggggtaggaggggagaattcaacgcaaggcctgtctcgcattcagagtgatgttctcgatcaccacccacgcgtagtgctcatcgatttcgcgttgaatgaccgacccctcggtgttgaggcggccagaggcaatctgaccaacatcgtcgatgtcgtgcgttctgcgggggcgtgcccagtactgctgacgcctacatgggatgaacaggcatttccgaatcagcctggggacgcactaggcgagcaggccacgatgattcgtgggttggcgaaggagctggacgtaccgttggcagacagccttgccgctttcgacgcctacaagggcgatcggcacctgttgatggcgcagttcaatcatccgaacaaggaggggcacaaaatcgtgctttcgcaggtattgcccctgtttgagaagtga

SEQ ID NO: 533597 - DNA, 606 bp, Stenotrophomonas maltophilia
atggcacgccagaccatcgatacatcaccgccgagtggagatccagcacctacggcattcaacaaggtcaacgcgaacttcgctgagctgtataccctcatgggcggtgccgtggtaggaaactatagccaacggccggctgcagctgaatctcatggccggctgtacttctccttggacacgcaggagcttttcactcccgtgggcgatgtatggcttctgcttccatgtggtggcgtcgagttgggctatgcacaaagaaccaccccttcccagtacacgacgaatgtgtattcggacatcacgggtgtgtcatttacctacgtcgccggggagcggtccggagaggcaaaggtgcggttcaccggcaaggtgagttccggcactgcggtagtcgccctgttcttggatgatgcgatattccagcagattctggtttccaacactggttatcagaccgtgtacagctcccatcgactgcccccaaaggatcccggaacatcagtgaacgtaaagctccgggcaatgcactctgaccccgggcagaccttcgacatctttggtgctgatgtcgaccctgtagcactgacggtggtgaatcgctaa

SEQ ID NO: 533598 - DNA, 243 bp, Stenotrophomonas maltophilia
atgctgatcaggttcaaagagccggatccgcgcgctggcgccaccgttcgaatggacagcagccgcggacagtacttcatcgacaccggcgccgccgacgccgtgagcgaacagccccaggcagagctaccggagccggtgacggaagaagccgctgtcactgaagtcgctgcggaatcctccgatgccgtgatcgaacagcccgttggcaagaaggtgcgccaaggcagggccaaggtctga

SEQ ID NO: 533599 - DNA, 201 bp, Stenotrophomonas maltophilia
gtgagcctgcacgaccgcctgcgccgtatcgagctgcagcaggaggaacagcgccaagccaccgcccgactcgaagagaagttcgacggcctgttggcggcactggcagctgaaggcgatgccgagcaggacgagccgtcccggggccttgatggcgaattggtcccgggtgagcgcgaccagtcgctgagcctcggctga

SEQ ID NO: 533600 - DNA, 477 bp, Stenotrophomonas maltophilia
gtgaaccggtttgctatctatctgctggtgttcgtcgcctggtccgccggcatgttcggtgctggttgggcatggcgcggcgatcgcgccgaagggaatgacgcccggcagcaggccagcgccagtgacacccaggtgcagcaggtcaaccagagccgtgccaccgagcacaaccaggccgaggcactggccaccatcggagccaagcatgaagaagaccgcaccgcggccacggccgtccctgctgctgttgctgctggcgtgcgcgatggcagcctccagctgcgcgacgacctcgccacctgcaataccgctcgcctgtcccaagctgccgccggcgccgtcgaacgtgaccaggcagcccaactacgagcagaggtcgcgggcgctcttgttcaaatcggacgcgacgccgacgaccacgtccgcgcctgccaagccgtcatcgcagcagaccgtaccgaggtgacgccgtga

SEQ ID NO: 533601 - DNA, 342 bp, Stenotrophomonas maltophilia
atggacgccatcgagaagcgagcgcgtgatcttctgatttcgcactacagcgcatcagggttccagcatggtgaccctctgtccgcaagcgatgcaaattctgtagcagtcaaggccatcgccgcagcccttacgccgcccgaagaaccggaccatgcgctgctggtgagcatggcgatgtgtctcgaccaaggattcggcctgctgaggccagaacagcagaagtcccagctgcgcgaaatgcggaagctttgggacgaggtcatgggccgcggctactactcgcccgacaaccgcgagcgctacgtcgccatgctcgccgctcgcccaaaggtatcgtga

SEQ ID NO: 533602 - DNA, 360 bp, Stenotrophomonas maltophilia
atgagcgccgcctcgttgaggccgtgtccgttctgcggcggcgtagccaagctggaaaccttcacggaagagcactcgatctacggagatgttccgtggttgcgcatgcgctgcagcttctgccaagtgctggagcctcagcttgcagaggggccagagatcgatctggtcatcgcatggaacactcgcgctccagtggcgcaggcctggcaggtgatcgctggagcgccccaggacggcaggcggctgatgctgtgggactcggtgagcaagcggccattgttcggcagctggcgcggtgacaacccggcgatcacgcactatgcggccgagccggtcggcccggaggttggtcgatga

SEQ ID NO: 533603 - DNA, 225 bp, Stenotrophomonas maltophilia
atggacttcgccaactacaacacgcgcagccggtacgccaaggagatcaacgccggctactcggcgcggctgaacggccaacgcctgagcgaaaacccgcacttggtgtggcacgaccaaccggagggcggtctggccaagcaggtaggccacttcaccgaaaaggccgaggcgtggcagtacggctggcggcgtgcagaccacggggacaggggcgcgcgctga

SEQ ID NO: 533604 - DNA, 1071 bp, Stenotrophomonas maltophilia
atggacggcgcggcggagaccgcagcggacaccgccggagggccttcgcgccccttcatcctgcgcccggtggcgaccaccctgatgatggtggcgatgcttctggccggcctcatcgcctgtttcaacctgccgctgtcggcgctgcccgaagtcgattacccgaccatccaggtcaccacgctgtatccgggcggcagcccggaagtgatggcgctgacggtgaccgcgccgctggagcgccagttcgggcagatgcccgggctggcacggatgacctccagcagttcctcgggcgcttcggtggtcacgctgcagttcaacctcgatcttgatctggacgtggccgagcaggaagtgcaggcggcgatcaatgcggccagcacgctgctgcccaccgacctgccggcgccaccgatctatgcgaaggtcaatccggccgatgcgccgatcctgtcgttggcgatcacctcgcctacgcgcacgctgggcgaagtggaggcgatcgtcgagcgccagttcgccaaccgcatcggccaggtcaacggcgtcggcctggtctcggtatccggcggccagcgtccggcggtgcgcatccaggccaacatggccgcactcgcttcgcgcggcctttcgctggagaacatccgtaccgccatcggcaacgccaacgtcaacgcggccaaaggcagtttcgatgggccgagcaagagctggaccattgatgccaacgaccagctggccagtgcggaccaatacgcggtgctggtggtggcttaccagaacggggccgcggtgcgcctgcgcgatgtcgccaacgtggtcagctccaccgagaacacgcggctgcgttcgtggatgaaccgcgagccggcgatcatcctggatgtgcagcgccagccgggtgccaacgtcatcgcgaccgtggacgccatccgccaggcactgcccggactggaggcccagttgccggccgatgtgcactcactctgctcagtgatcgcaccgaaggcatccgtgcctcggtctcggatgtgtgcttcgagctggtggtggccgtgttgctggtga

SEQ ID NO: 533605 - DNA, 465 bp, Stenotrophomonas maltophilia
atggacgagcgccgcctcaagcacctgtatgccgccgtcgcggtggtgttcggcctgcccagcctgttcttcggcggcgcgggcgcctgcatcgccgtggtcatgggcttgatcggactgacctccatggacgcggacaaactctggtttgccgccagcatgttcgcgtggggctcgtccgcgattgccggtctggtggcctgggttgcactcagcatcttctggctgcgcgatggggcacggggcctgcgcatggcatcacgccgttggtggtggctgctgggcataggcgtgctggcggccctgcccttgctggcgatggcgctgtactacttcaccgagcttggtccatccgtgctgagcggactgttcgccggaccgtccctgttggtgcccgctggcatgctgatgcttttgtggctgcttgcgcgtcaccctgtccaagagtcctctcaccgtggatga

SEQ ID NO: 533606 - DNA, 681 bp, Stenotrophomonas maltophilia
atgcgaacactgcgcatccccctcgctctgtgcatcgcagttgccgggcaggctgcggccaagcctgcgatgagccccgaacaggcgttcgaccttttcgccagggcggtactggagagcgatgccaacgcgagtgcagaacttcatcgcgcgatgcaggaagccaaccacgacgaggcacaatcggtctcagatcttcaccggttcgttccggacatggttgagggtgttgtagttgggctgaccgagtacagggttttccctgccaagtccgccgaaggatacggcgccctgatggcccgtgcttacgcccgcagtcactgcagggcaaccgggacacgcgcggcgttccagcacgagcctgccgacgcggccattggaatcgtcgtgcagttcagctgccaggtgccggcctggaacaccgaaggcagtgaacgggctgatgcggccacgctgcgaaagatgcgcaagagcacgaagtatgccttccgcgcgcaagctgccatgctcaaacgcgacgagaagcgtacgctggccggcgagacgatgctgaccggacatcatgagaccggctactttccggacgcctacaacctgaattccttgatgccggtggtgtactcggtagtgcccgcggaacgggtggatccttttgcggatatggagcctgatgcggagtaa

SEQ ID NO: 533607 - DNA, 735 bp, Stenotrophomonas maltophilia
atgtcccgcatcgttcttctgctcgcctcgcttgctgccgcggccagcagccaagccggcaccccgcagatcaatgtcggcccgctgttcgactatctgcccgccaccagcagccacctgctcaagcgcgtccgcaatacgggcgatgtcacagcctatgtgcgtgtggaagtcacccagatccacttcgatgccgaaggcaagcccagcgaagcgccggtggacactgccgcgttggtgcgcaacgcaggcaatgcacagggcctgatcgccagcccggggcggctgatcattgccgccaacggccagcaggctactcgcctggtctaccgaggcttgcgcgatgaagaacactactaccgcctgaggttcatccccgtggtgccgacggcggacgaattctctctcagcgaggtgcagctgcaagaggcctcgggtctagcctccgccatccacgtgtttacaggctacggcacgattctcttcgtggcgccttccgttccccgccacgacacgcggcttgagggaaacatcgtgcacaaccacggtaataccactgtcgtgctggataacctgcgctactgcgagcaggaccgtgccgacgattgctcccccggcatcctggcccacgtgcggcccgggcaacgttacacgctcaagagcgggcccacccggttcgcacgctacgacctgctggaaggcgaggccaggcgcagcgtggatacgcgccgctag

SEQ ID NO: 533608 - DNA, 501 bp, Stenotrophomonas maltophilia
atgtccttgaagtttgttgcactggccaccgctgcggccctcaccctcgcccccggcatcgctttggcagccgttgaatccaagagcatcaccgtcaacgtgcaggctgaagtgccgaacacggccggcctgcaggtgaccacccctgatggctgggaaggcctgccgcagaccctgccgtgggataccgcacgccaggagctgcgtgaactgaccggtcgcgtgatcaacgtgaagtcgccctcggccatcagcgcctacctcaccgctgcggcgcagatgtcttcggccgccgaggtggtggatctgaaagtcaagatcgacaacgtggaagtaccggccaccgccgccagcaagatcaccgtggcgaccgaagcccaggctgcggctggcaaggcgctggcattcgccatcgccccggtcaagccggctggcgactacgtgcagggcagctacgcaggccagttccatctgatgttcgaaagcgacatcactccgtaa

SEQ ID NO: 533609 - DNA, 2541 bp, Stenotrophomonas maltophilia
atgccggcaccctttcatcgcaatcgtctccgcctgggcgctctggctaccgcagtgggcaccttggtggcgaccgcttctgcacaggcggctggcatggtcctgggcgaactgcccagcctgctggaacagcgcgagcgcatgcccgccgagttccgtacccacttgttcggcagcccactcaccgtgcgtgtggagctggatggccgttaccttggtgacgccgaagtggtgctgcacgaagacaatcgcgtgcaggtgcttgccttcactgaagcccacgaaagcccatggccggaaaccgagcgcatgcgctgggccgaacaactggccgagccgatgccgctgggcgtgtgtggcagcgactgtcgagggctgacggcgctgcactacagcctgtcaaattccttgttgactctgctgacgcccactggggcacaggcggaggaacggtacatcgccctgcctgaaggcggcagccatggattgatcgtgcgcagcagcctggctgtgcacgccggccagaatcagcagaccgctgcacgctacagtgccgaactgcgcggcagcatcggtcgctggagcacagtcggcagctatcagtactatgcgcaggccgccagccgcgaacactatctgagtgctttctatgcgcagcgcgagctgggcgatcatttcgtgcgtgccggctatttcctgcccaccttcgaaggcatcatccgccagccgcgcgcgccgggcacgcagaacgacaccacgctgggtgtcatgttcggttcgtcggatgtgctgctggccgacacgcgcagccccagcgtttacccggtgtatgtcaccgccagccgcgaaggcgtggtggagatctatcgtgatggccgcctgctgtccacgcagggcgtgaagcctggcatccaggaaatcgatacccggcgcctgcccggtggcatctacgatgttgagctgcgggtgatggccgatggccaggaagcctcgcgcgaggcagcctcgatccacaagcccagccgctgggtcgatcccacccggcgctggcgctacagtctctttgctggccagcagcaaaggccactggacagcagcgacctccaggacaagcagggggcagccgtcggcgcggtcgtgaactacctgttgcacccgcgagcggtagccggcgctaccgcacagaagatcgccgggcgcgaagccgttggtgtgtcgctggattggcaggccaccaccgcactcagcacctacaccaatttctacacgtccagcgatgctgggcgcggcatggatcttcaggccatgtaccgctaccgtgctggcagcgtagtggccaaccacggccgcagctgggtagaacaccgtcagcgcatcattccgggcgatggcagcctgccgcgctggcacaccagcggcggctggcaggacagtacagccctttccttcacccatcgcttcagccaccgcgaccatgccaatgtgcgtatcgcgcgcacttccggctacacccgtggcacgggactggatgtgtcctacggacgccgcgaaactctgttcgggcgccacgatgtgaactggcaggtctctgcctacgaccgtcccggcagcctggccacccaataccgccgccagcgcggtattgatctgaccgtcagcctgtcgctgggcagccatggccgcagttatggtggcagcttgggtagccgcactggcgagagcggccgccgcgacagttacgtgactgcgtcggctgcccaacagtgggagggccgctacgtgcgcagcgtcaacggcatggtcactgccgacagcacaggtatgggcgctggtgccggcatgtatctgcaaagcccgttgctggagggcgacgtgcagctcaaccggggttccagcgacggccgcatcagcggcagtgccaacctggaaagcacggcggtgttcggcggcggtcacgtcgccgtaatcgggcaaggccgcagcggcagcctcgaaaccggcatgatcgtggatgtgcgcagtgacttccctgaggccgagctacgtgccgacgacagcctggggggcggtgtgatgttgcggcccggccgcaacttcgtccccgtcaacccctaccgtgccggccatgtgcagttcgacttccacggccgccacgcaccggcggccgccctgcagccgtctaccgtgcgctaccacctcaacaagggtggggtaacgcacaccacgctggatgtgctgcgtacgtacaccgtgatggggcaggtgatcgatgccgatggcaatggcgtgcgcggggtgcatgtgatcaaccatgcaggacgcactgtcagccaggacgatggcttcttcaccttggaactgagcgcacgcgcgccggtagtgcagatgcagtacccgaaccaggtgagctgcacgctaacgctggaagaagaacagtatccccgcgaaggggacctgctgatggtgggtggtatgggctgcccgcccgcctgggccgccgatccgtccagcaccgacgcaagcctgcaaaggaaccgatga

SEQ ID NO: 533610 - DNA, 1188 bp, Stenotrophomonas maltophilia
atgaagtggatcgccgctctagcgctgtcgctgggttcgctctgggccgccgatgtgcaagcccaggtggtggaaaggaaggtgacgggcatcttccggcccaatgcgctcaacccgggcaacaccacattcgagaacaccacgccgcgcggctcattctgcaactggcgccccgacgaatgtgcccgtcgcaacgcctacatctttgatcttgggggtggtgactactggcgcaaggagggagccagtgacgatgcttcaccgcgcgataccacctacgtacgcttcccctcgccgcgacaggtgaccttgaccaatcccgatggacattcgttccaggcggtcatcagtttcgtggcgatatcgctgcggcttgatttccagaatggtgctgatccgtggtactacggcatcagcggcggatgcacggccatccgcggagtgggcggggtgggatggtccaacggtggttggggagtgcgcgaccccagcaacccacaggcctgctacagcagtattggcaggaacgggcgcgcctatcgctatcgccacgtgggtatcggaatcgacgtacagctgcccagcgccatgacgctgcacaatggacgctatacggcagcggagacctggaccacgggaggcgcgggggccgatatcgatctgggtgacaacattaccgggacacaggcgatccgcctggagttcgagtttgacgtgcagcatgatttcgatgtgcgcttccccatggagaatccacatgcactgcttgcgccggagggcggatggtcgcagtgggccgaccacggcagggtgcctattcgcctgcggcaggagctgccgtttcatctgaccagctcgatggatttcagcatgaagctgcgctgcgcgcatgatgcaccgggcgatcgctgtggtatccgcaatacacgtgaagacaccgttgtgccggtggatgtggatgtaaccattccgggcatgagcaatctgcgcgacggtcgcccggcgcagttcaccccgttgacctcgatggatgcaaacgcaccgaggttttcctcagcgatgtacgtgcaggaccggcgctcgacgctgcgcttcattgccgggcaagcagccgtggaagaaatggtgacagcacctggctcgcaatggcagggcgatatcacggtgatcttcgatgccaacccgtag

SEQ ID NO: 533611 - DNA, 2400 bp, Stenotrophomonas maltophilia
atgagccattccctttccaccattacgtcccccgccctgcgcccgctggcacgggggctgctgctggcaatggctacgcttgccgccggccccgcgcttgccggcgatctggacaatcagcacgccaccgtcgttgcaggagaccccattgaaaggtggtcgttgaagaatggctccacgttgacaggcaatgacgcacagatggacaggatcctggcccaggacacctcctccgtgactctcaacggcggacgtgtcacgcgtatgggatcgggcagtggcatgggacagtactcggtgctgctggagaatgatgcaacgttgacctcaacaggaaccgagtttcgcggaggcggcattttcctgagcggcggcaacacccaggctcatctcactggcggcaagatagtcgtacttgcttctgaaatgaaccccacggccggcaataccgctggcgtcgatctggccggttctgcgggcggctccggcgcacgcaatccctatgcccgactggattcgatgcaggtgtacgtggaagatgcgccgggcgttgcggcctacaacactgggctgggcgtgcgcatccagcttggcaatatggatattgtcaacggctcgcagatttttggcgccaatgtaggcgccatgctgtggggcgagatcaatcctgcaaatcgggtcggtctgaacatcgataattccacgctgcagtcgggccggggtgccgccattcgggtcatgtcgctggctgacaatgactacgacattcttgtttccaacaactcaacactgtcaggtgcagacggcaacctgctgctggtcagcaatgagaactcgcgcgccgggcgcaccgacgtcagcttcaccgtggacgactcgcgcctggccggcaacgtgaccttcgatcccaccaccgtcaccaacggcacgctcgatgtgatcctgcgcaacaaggcgcagatcgatggccgcttcatcaacgtcacctcggccaacatcgacagcgaaagcacctggctgatgactggcgacagcaacgtgggccacctcaccctgggcagcaccggcaccgtggcgctgggcaacggcagcagcttcaacacgctcaccgtcgatgagttcaccggcaacggcggcacgctgctgttcaacaccgcgctgggcgacgacacctcgttgaccgacaagctggtgatcaagggcgatgccaacggccaggccaacgtgcgcgtgctcaatgccggcggcgccggcgccaagaccgaccgtggcatcgagctgatcgacatcggcggcgcttccaacgcgcagttcgacctgatcggtcgtgcggtgggtgggcagtacgagtacttcctggtgaaggatgccaacggtaactggtacctgcgctcggagctgggtggcagtcccgatccgtgcctgattgaccccacgctgcccgagtgcaagccgatcgatccggtggacccggtggacccgaccccggtgctgcgcccggaaaccggcgcctacctggccaaccagttcgcggtggaccagctgctgcgccacggttggcgtgaccgccagggcggcgccatggttgaagacggcgtgcgcggctgggcacgcgtggatgccaaccagagcaagctgggtgcggtgaatgaccagctggacctgcgcgtggaccgctcgcgcgtgcagctgggtgccgacatgggcgtgttcgacaacggccgtggtcgcctgggcgtgatggctacgctggcgcagtccagtgccacctcgcgctctgaactgaccggctacagcgccaagggcaaggtggaaggtggcgcgctgggcgtgtacggcagctggaacagcgatgcgatgtatctggatgccagcgtgcagcgtggccagttccgcaaccgcgtgcagggcgaaggcctggccgaggagcgctacgattcggatatctggcagagcgcgctggaagccggttaccgcatcggcatcggccaggtcggcaccaccgccgtgagcctgcagccggagctgcagctgatctacaccaacaccagcaccgaccgccacgtagaagtcaacggcaccgtggtgcgtgcgctggacaacaatggcctgtccggccgcctgggcctgcgcctgcagggcgaaggccacagcaccgccggcgcctcggtcagcccgtacgtggtggccaactggtaccgcgatggcgccaacaatggtattgccttcgatgatgaagtgctgaaggccggcgtgccgcgcaaccgctatgaactcaatgccggtgcacgcgtcgatttccgcagcggcctgagtgcctggggtggcttcggtgtgatgcgcggtgaccagggctaccgcgaagccactgccaacctgagcgtggcctacaagtggtga

SEQ ID NO: 533612 - DNA, 3234 bp, Stenotrophomonas maltophilia
atgcatgcatcccttccaccgcgccgtgcactgtccattgcgctgtccatgctgctctttccggcactccctgcgctcgcgcagcaggttgtggccgatggcgatgaccagaccccggccgcaggtgattacacgaccactgatccggtcgagccgggcaaccctgcgggctacgccttccatgcactgaacggtggcacgatcgtgcctgcgggcgaggtgaacctgcgcaccgaaggcatgcgtgcggcggccgtgcgtgtagagggggcgggcagccatgtcgctctgaccggcggcagcatcgtcaccacgggttacggtgctgctggtgtttcgattgccactggtggcgccgcaacgttgactggtacgcgtattgagacagagggccaggccagcttcggtatcggcattgaaggcggaatgctggaggccagcaacgtccacatcattacccgcggcgggctggggcacggggtgtcggtgcgcggcggcgatgtgcagcttcgcgacagcgtggtcgagacgcataaccaagccagtggcttggtggtcacagatggcagtgcactggttgagcgggtgcgcttcgaacagaacacctctggcagtgcggtgacgctggagtatggcggcaacgcgcgcgcgaccctgcgcgatgtgcagatcaatggaaccggcgccggtgcatcgggaatttccagtggtctgggcagccaactgctgctggagaatgtggatatcaacctgacccacgaccgtgcaggtgcaggcctgcatgtgggtggcgatgtggagttccggggcggccgtatccatacggcgggtgccaacggaagcgtcatcagctttgccacgggtggcggcgggtcgctgcggctggacgaggtagtgatggacggaacctggggcatcgggcttcgcaagggatcgtacctggacatgcgcaacagccagctcgaggcagagaagagcggcatcgatctcggaatggaagatggtgaggccaacatcgagagttcgagcattgttgtgcgcaatggcatgggcgtatcggtgcagggaaacagcaaggcgaccgtgcacgcgtcaacgatcacgacgggaggcgatcacaaccccgccgtggcagttcttcacggtgacgccacgctgagccagacccggctgcataccacgggtatgaatgcccatgcactgcacacctttggggacaacatcaccacgcccaccatcacggcatcgcacgttgatgttctgaccgagggtgagagcgcctacggcgctacggcacgcaagggtggcactgtgcatctggcccacagcgtgctgcgcacacgcggtgagaaggcccacggtgtgctggccgatggacgcggggagatgaacctgaccaacacccacgtggtgaccgagggtgagggcgcttgggcggcagccatcattgacgggggcaggctgcaaatcgacggcagcgcgctggtcagcgagaagcacggtggcatctgggtacgcgacagccgcgaccccggtctgacgctggccaacggcgcgctggtgtccggtggaaatggcattgcactggcgctggatgcggccgtggccgggcgctttgatgtggcgctggaggggggctcgcagatggtgggcgatatcgtcatcaccccggaagatgaggaggccggcctggtgccgcaatccgaggttcatgtgcgcctggccgacgggtcgctgtggcagggttcgtccgatcttgtgcagacgatggcgatcgagcgcggcagccagtggacactgaccggtgacgccacggttggcgaactgcaggtaatggacagcggcgtggcgttgtccgacggcagcggccgcttcaacacgctcaccgtgggcggggacctgcacagcgagggtgcaacgttcctgttccagggcgcactggcgggggatgacagcgccatggatcgcctgcacgtgcgtggtgatacctccggtgatgcactggtggcggtgaagaacatgggtggggcgggtgcccagacgatcgacggcatccagttgatcgaggtggacggtgcgtcgctggcggactacgcgctggtcggtcgcgcggtggggggatcgtacgagtacttcctgttcaagggcggcctgctggacccgaatgatggcaactggtacctgcgttcgcagtggttcgatgtctgcgaagaagacccgaacgcgccgggctgtgtggtggaccccggcccggacccggacccggtggatccgatcgacccgatcgatccggtagacccggtcatcccgccgccggtgctgcgcccggaagcgggcgcgtatctggccaaccagtcggcggcggtgaacatgttcgcgcaccgcttgagcgaccgcatgggtgcggtggcgatgggcgatgaacgcgccgcctgggcgcgcgtgggccgtagcaatgctgatttcaccgctgtgggtgggcagttgtcggtggatggaaatacgtcggtgctgcagatcggcaccgatgtgtggcaacgcggcaatgcagcgctgggggtgatgctgggtagtggccgcgccgacaacacggtggtctccgacctgaccggctacagcgccaagggccgcgtgcgtggcacggcggtgggtgtgtatggcacctggcttcagcaggccgatggcagcgaaggcgcctatgcggatgcacagttgcagtacgggcgcttcagcaaccgcgtgcacggcattgcgctggaccaggaacactacgattcgcgcatgcgcagcggctcgctggaagctggctacaccttcaacgtatggcagggcacatccagcaacgtgtatgtgcagccgcagatgcagctgagctacaccgattacagcgccaaccgccacgtggagagcaacggtacggtggtcgatggcgcagaggcaggcgggctggccggacgcgtgggtgtgcgcgcgttcggccagcgcgcaggcatggggacggtggtgcagccgtacctgggtgtgaactggctgcgcagcagtggccgcaatgccatcgacttccagggtgaagcgctgcgggccgacctgccccgcaaccgctacgaagtgcaggccggtgccgagctgaagatcagccatcgcctgggggcatggggtgggctgagtgcgcagcgcggtgaccacggctaccgcaatgtgggcgggcagctgggcgtgcgcctggcctggtaa

SEQ ID NO: 533613 - DNA, 2508 bp, Stenotrophomonas maltophilia
atggctgctttactgcaagtaagagaagagatttcacgccttatcgagttttcgagcgtgggcgatgaagttcttatggcccttcggcagtgcccggcgactttggtgccgagagagtgtgaactctgggattacaagcagttgcttggtgaaagtcgtcttgatcaggctgagttggttcgtgacgtcattgctttccacaacagctatggtggatacctgctgtttggtgtcgatgacgatggtgtgattcgcggggccgatccagttgatggcaggcaggttcgacagtggataaggaactatacggcctttgatgttgaggtttcttcatttgaaatttctcatgataatggatctatttccattcttcatataccaaagagggagtatggccaggttccactggctgtttctaagaatgggccggagctaggcaataaaaagccaatatttaaagccggagagatattctttagagcgtcggattcaacgcagctcattagagggactgacgatctgagattcttgttgggggctcgggatcaggttttttcgggtggtgctgatcgattcggcgggccggtcgtatccaataatcttcctgatagaagcgtcatattcgataaattcattgggcgtgctggcgtaaaggagacgctttggagctggctcgctgaccctatgtctaggtatagagtgttggcgggacctggtggggtagggaaaacgtcggctgcatatagcttttgtgaggaggtctgtatgcaggggcctctgaggttggagcaagtcgtctggctcagcgcaaagaagaggcaatttgtcgcgcaatctaataatcacaagccactcccctacaaagaagattcaagggagtttggtgagtcatatgcaaattttgacgggctacttgatgcgctctcatttcatctggcaatatcggatgatgagtgggatggtgctgatcgaggtttcaggtcgcggctgattgcaaactgcctgagtgtgctgccatccttggtggtggtggatgatttggattctctgccgcccgatgatcagcgtttggcggtcgagttggctatgtcgcttggtgcatcaaaatcaagatttctatttactactcggaaaaattacttggctcctttgtcttcaaccactgagctcaaggggttggagggggatgagttcgaaaattatgttctgcatttgcaggaaacatatcagcgggttttgaactcatctgaaaaaaaggacttggcgaaggacacggaagggtctcccctttttgtggagtcagtttttcggctgctgaagcttggtgagcgatttggcgaagctctggctaggtggcgaggggctgatggtgaggctgttcgtgctgcgtctttccggcgtgaattggagcaactctcttggggtgcaaagaaagttcttttcgcgatgtcacttttcgatacagtttctactgtggaagtgagaaagctcgctgagttggagttgtcggaggttgaggcgggaattgtcgagctcgatcgcctttttcttgttcaaagccgtcagatcgctgatatcgcaagatttagcgtcgccgcgaacttaaagcgaatgctccaggatttgaaggtggagctaattccgaatcatgctgatgtgacgagaagagctgcgacgctaaggtctcaaggaaagagtgaacaggctggtggaaaaaatagggcagttgcaagtgttatccgtcaggcgatggcgcagctttctgtcggggaggcgaagggcgcttgtacaacgcttgaaagtgtcatagctgagtttcgagaaagtgcggacatatggatggtctatgcccgatgcttggcggcatgcactccatgtgattcatcgaaagcgcgttcggcgttccaaaaatccttcgatctcggtaagagggatcctcagctctttctgaaatggatctcatttgagattgagcagggccaggcgaatgccgccgtagacgtcgcggagaaggggcgaagagttatggatggggcggccgatggttggagttggctcgagcgccgcgcggccgcacatttcaggcgcgggcaggaacgagagagacgtcgtgagcacacagatgctatgaccgaccttcgcgcggcgtcagagctcgcttcgaaagcgcttaggcgtgctcctgcttcgaccagacctcaactggtgcagctggctcaacaatataatgacagtgtttgggctatatcgacagggccaagcctattctccattcctgatcgtttcgaggctgctaatttggcggtaaaaaatggtgatcggcgcgacttgtgcttggttcgagttttgcagtctattgagttcggttttaatgagccatatttcaagtcaaaacaagctaagcgcttgggtgagtggattgaaattatttcaccgatagtttccgcgcgagggtcaagtgcggcgaaggagcttcttgcttctttggtgggtaggttagattcgtaa

SEQ ID NO: 533614 - DNA, 5085 bp, Stenotrophomonas maltophilia
atgctacaagataacggcggccgtctgatcgtcactcctcacccggtgctgctggacggtcagcgcaatgcgccggtggacctgcgtccgggcgagtctctgtatgcgttcctgatgcgccacgtagaagggctcgacgggcaggcgtggctggtaacaatcggcggtcgtcctgtcgatcgtcacctctggagccacgtctatcccaagcatggacagatcattgaggtccgtggggcagtgggcaagagcgcagttcgcctggtcgccatggtcgcgctgacctactttgcgttccaggcgccgatgctggcgggctggctggccaaggcgggcttgtctggtgctggtctggcggcagcacgtgccggcgtatatctggccggcagtctgttgatcaacaaagtgctgcagcccaagcagcccagagccgccgcgcccgccgaaagcaccttcgctctgtccgcgccccgcaaccgcccacggccctacgagccgctgggcctgctgttcgggtcgatgcgcatcgccccggatgtggcgagcctgccgtacacgaactacgagggcgaccagcagtttgtctcgctgctgctgactcctggcatcaacgttgccagagtggaagagctctacaacggggacgcgttgctctcgagcttcgaaggggtgcaggtctggtacaacggcttctctggcatgcccgaccaggacatcccgatctacagcaacgtggctgtggtcgagggtggtcggctgctcgacaccagtagcgatcccaagaatcggccggggcaatgggtgcagcgtaccggcagtgagcggacgatccgcctggtggtgggcgtcgagttccagatctgggacgtgacgtcgaagggaaaagaaaaggacaaccgggagcagcttcaggttcagtaccgggcggtcggcaccggcaactggctgaatttcggcaactacagcgtgtctggccgcacccagaagacccagaagcgcagctataccttggatgtgcccgaggggcagtacgacgtgcgcgtgcgagcggccggtcagaacaccgatggcagcggtgcccaggccaacttcacctggaccacgctgaccagcgttcgacgggagccgccgggatacccgggcattgcgcgcatcggcatccgtatgcgggcctcgggccagctcaacggcgcgcctgatgagatccgctgtgtggcgcactcggctccgatcccggtatggaagggcgatgccatcggctgggtgaccgagtccagcaacaatccaggtgcgcagatccttgcctatgcccgaggcttcactgatcccaccggcaagcgcattgccgggatggggttgcccgaccgtcagatcgatgtcgaggctctgaaggccttcacactgcactgcgctgcgaacgacctgacatacgaccattggttgaccgaggtgcgcagccatcagggtgtgctcgacgcgatcgcgctggccggtttcggccagatcgcttggcctcgcggccggcttgccgtggtgtgggccgcggacgaacagccgctgtcgggagtggtcaacatggccaccatcaagaagggacagttccaggtcgactacaccctggccagcgccgccgatggcatcgagtacagctatctcgaccgcaccacgtgggaggccaagacgctgcgcgtgccagcaccgggcgtgacgaccatgctcaatccggcacaggtgtccggcgagggcgtcaccagtgaggcacacgcggcactgctggcgcgctggcacctggcgcagagcctgtatcagtacaaggcgatcacctacagcactgatatcgagcacatgtcctatggccgcatgtcggtgctggcgcttcagcacgatctgacgcaatggggcttcggcggccaggtgctgtccgcatcgatggggccggggcgagccgtgacgctgcagctcgacgtgccggtgcccgggcccgcgcagggcagcgcctatatcggcctgcgcatcccgggtgaacgggtgtaccgcgtgatgaaggtggtgccattcaccggcgaaagcgaccagttgcagctggccgacccctggccgaccgatgccgagctgccgggcaacagcaatgccaatccggcctgggacactatctggatctacgacttcaagcagaccccgggctaccgcgtgcgcgtggtcggcgtacggccggaaagcgatctgaagggcgccgctgtggatgtggtgcccgagagccaggagttctggcactacgtcaaaaccggtgagtacattccccccggcaatggctcgcagctgcagacgcggccagtcgccagcaacctgaagatgaccgaacgacaggtggtacagggcgatacggtttacaccgagctgcaggcctcgttcgacatctctggtccggttggagacatcgtggtgctgagcgacctcgacggcaacgccgcgttggaggaagtcgcgcgcactgtcacccgttcggccagctggcgcatccctgcagcaggcacctatccagttaccgtgcggccctacagccccgacggactggcgggtgttgcggtcagcctgatctacaacaccatcggcgcagacgcgccgccggtgctggtggacctgttcgacgtggaggagctgagcggcggcgtgcgccgttacacgtggggattcctcagtgacaccattcaatcggctgactttgccggcgtagagatccgctacatgccgggcctgatcgcttcgccggcctgggaccagatgacgcctctgggcgataccggctatcacgctgctgcctttgaggcggtgctgccgagctcgggtgaatggacgttcgcttgccgatcgcgcaataccagcggcgcgctgtccactggaatgcgggtgttgtcccggacgctggggaacaacctcggtgagaaaatgcaggagacgtgggaagaggcggagcgggccaaccagcgggtggggcaggagatcatcgatcgactggccggcgatctggcggcgatcaacgaggctgtgggcaaggcgcgtcagtacacggacgagcaggtcgccgcgctcaacggcatcctggaggacattgtcggagccgacgaatgggcggccggcacgacctacccgaccggtgacttcgtgcgccgtgctgggacgctgtaccgggcgctggccgagaacgtcgacgtggagcccggcaccgacccggcggtgtgggaggccatcggcgactacacgtcggtgggcgatgcgctggcggcggccatcagtatgtccacgaagaacgccagcgacattgcggcagaggtcacgcgggtggacgccgtggttgcgcggatgccggcgggtgctggaacgctggccacatatgcacaggtggccagtgagcagcaggcacgcgccgatgctgactcggccttgggccagcgcctcgacagcaccaatgcggccttgggtgacaaggcgagcacggccagcgttacggccgtcgagcgagccagcgtcgctcgcgatgaggcgctgggcgagcggctcaacatcacgaatgcggccttggaaggaaaggcttcgtccgacgccctgcagcagctgcgcagtgaggtgaccgagctggacggagttgttgatgccaacagccagctgatcaaccaggtgcgtgcatcgcagtccggcggcgtgaattcgctgcgcaatgctgacttcggtatgggtacgtccggctggcagttcgcggtcaatccgtggcaggcggctttgcagaaaaacttcgcaggactggactggacacctgtcggtggcgcgcaagcgggcttcagcgtcgggggcacgcccagcgggggcgttgcgctggatcatgatgcaaggccagtggcgatcgccggggagaactggatcgcctcggcatatctggcgagccaccgctgctattcgtacctgcagctgattgcacttgatgtgacaggacgcgtcatcgacttcgtcagttcgccggtgtcgcgggcgtttggcggcaagctgctcgggcagtggggccgagtgcatgtgcgatttcccaatggcctgcccgaaggcaccgtcaccgtgtttctgcgctggtggaccgaaggggtgaacggcgattcgcccttctcatggattacgcagcccatgcttgagaaggcggctcccgggcagacagggccgtcatcctggtccgtgagtgccgccggcatggccgaagcgacgcaggccctgtcggtgcgtgcgacgacgctggaaaacggtcaaagccagctgcaggcgtcctatacctgggcgctggacgtcaacggtcgggccatcggcatgacgtcggtcaacaacggcaccatcggtcagatcaacttcgttgctgatcgactcggcatcgttgatccgaacaacaccggtagtacgacgttcgaaggcggccgctgggttacccggtccggagcctacatgatggtgcacggcaagccgttcggtgtgtccaacgacctgatgatgtggatcggtgtgggttccaacccgggcaatgccagcaaggcgaacggcctgttctgggtggacaaccagggcaacggttacttcggtggcagcctgtcggccggcgtgctcaagaacgccgtgcagaccacctcgaccagcggcaacgccgagatcatcaacgggccgttctccaccctggggcgcgccaagaacgtcgtggtcagctacgacatgaccaagaccgacacggccaacacgggtcgttggaccggcgtctccggcccggtgaacgcaaccatcgcgatctaccggagggtcggaaacggcggcgagcagttcatcacgaacttcaacgtcacgggcaactacgaggtgctgaacgagcagggtggcccatcgcagctgatctcgcgcatgggtggctcgcacaccttcaccgacaacacgccgggcaccgagcaattcacctaccgcgccatcatcgtcacccgcaacgtggccaccggcacgccgagcggcggcccggtcggtgtggctatcaatcagacgctgggcatcatttccgtggagcaatga

SEQ ID NO: 533615 - DNA, 183 bp, Stenotrophomonas maltophilia
atggaacgactgaagccacttttctgccgaatcccggcagatgtgcttaccgctacttatctgttgccggtcaccgcgcagctactcgatgtagaacctgaaaatcttgtctttgtaatccatgacaagtcgaccgtgtcgaagaagggatcttccgaccagaagttggtatgcgcgtcctga

SEQ ID NO: 533616 - DNA, 399 bp, Stenotrophomonas maltophilia
atgcgcctggcggatgtggagaagttcgtgggcatcccctacgacgccgattgcttcgactgcgccgacctggtggtgctggtgcagctgcaactgttcggacgaccgatcacgctgcctgggcgccgccctcgcggtgctcagggtgcggccgagctgggaaccctgtcgcggccatacgggcatcggcgagacggcccccctgaagacggcgaccttgtcctgatgttcgatcagggccaccgaaaccccggccatgccggggttttctttttcctggcccatgaaggctgggtactgcacagcaacgagcgcaacggctgcagcgtgctgcaccgcgtgcgtgaactgcccggcttcgggcttcgaatcgagggatattaccaatggaacgactga

SEQ ID NO: 533617 - DNA, 462 bp, Stenotrophomonas maltophilia
atgagtacgttcgccgagcgccgtcagcgcacgaccgacaccgatagcgcgttggccctgatcgagatcagcgcgccgtcgttcccagaggttctgcgcattgccaacgacacggtcgattggacaagccggggtctggtatacgtgggctacccctttggcttcaagctgccggaggacgtgagcggccaggctccgcggctccagctggtgctggacaacgtcggccgaaacatcacagaggacctggaaggcctgttgcccggcgagatcgtgaacgcacggctgatcatcaccgatcgcgcagaccccgacgtcattgaggcggattacgacctcccgatggcacaggtgtcggtgaacagccagacggcgacagcgcaatgcggcgtggactacctgacgcgccagcaggcggtactgctgcgtgccaacccgttcaccttgccggggatcttctga

SEQ ID NO: 533618 - DNA, 1491 bp, Stenotrophomonas maltophilia
gtgctgcaccgcccgctcaggatcagcacagcccgccgccagcagtgtggcaaaactatcgccgaagcgtgcgacggtagcggcgtcgaacagatcggagttgaactccacgcgtgcgcagagcgattccccgttgtcggccaccagcagcgagaggtccagctgtgcgcccgtcgcctgcagatggcgaacctggcactccagtccacccacccggatcgtgtcgttgtcaccgccaccgaacggggaaagggcgtcacgttcagcggtgtagtacgcgaacaggctctggaacaccggcggggcactgcgatccccggcccgttctgcccgcgccagcagtgcagccatcgcaccagcctggtgatcccaagcctcggcaagggccagctgctgggcatgcgcaagctgtaccagggtctggccaggaaccacctgcaccttcagtatggccggcgccacgcaatagccgacacagccggccaggccaggatcgtcgcgcccggacattggcaccgctaccaggaagtcgctctgcccagacaaacgcgacagccacagctggtagacgctgagcagcagcgcatgagcggtcacgcccagccgcgccgctgccgctcgcaccctgtcgcgaaggcccggcagcgggacatccagcgaactgccgcggaaggtctgcaacgccgggcgtgcccggtcgaacggcaattggagcaacggcgtgtcgtcggccagcacctgcgcccaataccgcgcgtcggccgcgcccttcgggctgaacgcccgatgctggcgcgcctcgatgaagcgacggtaaggcacggcggccggcagcgccgcaggcaggcgaccggctgccaacgccgcgtaggtctgtccaaactccgcaatcagcaagcgcgccgacgtcaggtcgacggcgatatggtggaacacgaacagcaggtccgccatctgccgttcccgttgcggcgtgagcatcaacacgcgcatcgcccgacctgccgacagatccatcggtgtcctgcaggcggaacacaagcgggccaccaccgcatcgtcgtcgccaacggccacttcaacctggaaatccacgtcgcccgcaggctcgacatgctggctgaagccgtccagctccgtgcggtagcgcgtacgcaacacttcgtgccgctggatcagcgccgacagcgcgatccgcaccagccccggctcgaagtctgcacgaatgcacaccggcacgtggtacgccgaaccgggggcagcgacagcgtcaagcagcagcagctgccgctgattgtcactgagggccatgccgccctccgcagcaaccgtatccgttgccgtcacaatcccgcgggccggggccggcggcggagcgttctgctggaggtgcgcggcgatcgaggacaggcgcccgtcaccgaagaagacccgcattggaacatcggacgcgccgagtgcggccagatcatgctgcacaccagccaatga

SEQ ID NO: 533619 - DNA, 1281 bp, Stenotrophomonas maltophilia
atgatcacctcggtaacttttgagaattggaaaagctatagggattcgactctgcaagtcgatccgctgactgtgatcatcggaacgaatgcgagcggtaaatccaatgcgcttgacgcactggcaatgctcaaccgaatatctttgggggcgctgcttactgcggcgctgcaaggagataccacgctttctcctattcgaggcggtgttgaatgggccgcgagaaagccgggtcacgcgttcgaagtgggtatagtctgtcgggtcgatgacactctagagtacgaataccgtctccagtgcgaggttgccgacgggagatgcgaagttagctcagaacagctcactcgaacaaagtatcgagttgggagggtaaataagaggattgccgtcggaaagataaagttgttcaggacggatccgtgtacgagtaattcgccgacaattgttgcgcgcctatacaatgagaaacagggctcccccaaaactatggggcggtcccaggcaattatctatcagttgatgggtcagaagcttcggcaggagattcaggagggcgttgatgcagttctccgagctatgcgtgatgtatttattcttgatccgattccatcccacatgcgcgggtattccgcactctcggattccctagagtcggatgcaagcaatatcgcaggagtaattgctgcgctgggtgacgagaagcagcaagacatcgaaggggtgcttacaaaatatgtgagcaagcttcctgagagggatataagtcgagtctatgcagagcgcgtgggtaagtttcaatctgatgcaatgctttactgcgaagagtcatggggtgacggcaagggtacttccactgttgatgctcgaggtatgtcggatggaacgctgcgatttctcgcaattttatcggcgcttttgactcgccctcccggtagtctcctcgtaattgaagaagtcgataatggccttcatccatcgagagcaagtatgcttctcgacatgctgtgcacggtgggtcgagataggggtgtggacgtagtcgcaacaactcataatccggcgctgctcgacgcaatgggtcccgaactcttgccattcattacagtggctcatcgcgatccaactacgggagacagtgctctcacgctcttggaggatgtgaagcagctgcccaagcttttggcgcagggctcaattggtcggctctcaagcagggggctcatagaaggggcgcttcaaagatccttcgattttgtgatgctggaggatagcgagtga

SEQ ID NO: 533620 - DNA, 1254 bp, Stenotrophomonas maltophilia
atgtcagaatcctccactagcaagtctggccccatcggtgacagtgtcgacttcattaccctggtgaagtcctcgctgaagttcgtcagcgatcacaaatggctctttgccgccgcaggtgtcatcggcgtagtcgttcacttctggagaattggctacctgccgcaggtcacggtagccgatgtgggcctggtcgcggccgcaacggccttcttctcattcgttgcagtggtgttcttcttattcgtggtcatgggacccgcgctttgtttcgtggcatggtccacggcagagtttattcccaaggctccctccaaccgcctaagagcacggcgccgcagatctgcccgctctccatgcgcccgctgccatcggccattcgcgaagtcacatgccccgaatttggtcgcgaaggccatgcaaacgacattcctgatcgcctacggaggattcctggtcgctgcggcaatatggtgggcactttggagtattgagctttcggagaactggtccgccattgcagcgggcattgccttgttgatctcgattaccgggctttgcttcggtatttcacgaagcgcgcccgcaaccttccacgcccgaaaggaacgccgccgcaaccgctgggcgaagtacttctggctgtgcgtttcgctgtacgggttcgtgatcccggtcatcctcattgttggatgggtactcttgaagggtgtcgaaagcagtcaaagctccgcgaatcttctcttgctgctggcgcttccgacactccacgttttcacgtatgcgctacagagtagcgggcttatggtgcgtactacggcgctggttgtcatgggcttctatgtcgttttcttcactggcgccgcgttcgccatcagcgacttggcggctgcaaagttccggctcggcatgctgaagggacaggatgtcctggtgacacctctgggttgcgaccttgcgcgtctttccggcgttgcaaagaagtgcggagctgtgacgggtgaatcggggaatcttctgtgcctgaagaatgtccagatcctcactcggctgggaagccacgtgctgatcaccgatctggagtggaggcctcaaacgccctccccatccgtggcgattcccactacagagatccgaggatggtttagcacgcctcgcgacgagaaggatgcggacggcaagcgtgaaccacctacgatacagtgcgcactctccgacgaggcattatccgatcagcgcatcaagcccaagtag

SEQ ID NO: 533621 - DNA, 3291 bp, Stenotrophomonas maltophilia
atgacaagccaagaaaaagcaattaacgaaattcgttcatccctactatcacaagagctcgtcgttattactggaacaggggtcagtctagctctcgcggaaaaggaagcatatgaaatactttcttggaaaggcctagttaaatcgggcctccatgaagctgtgagtcgcggcgtacttgagcaaagtaagcttcaacgctggctggagcaactcgattcaaacgatattgatgaactcctaagcgcagcggagttcatgggacggaagctcgatgcgccggcaggccatctataccagagatggttcaaaaattgtttcgactccattagtccgctcaacaacaaaatggcgagcgctctaaggaaattatctaacagtcgccctctgatggcgacactgaattatgactgccttctcgaagaaataacaaatcgtccaacattggatctgtccagcactcaatcaactattaaatgggcacgaaaagagtctaacggcattctgcatcttcacgggacatggacagagcccgagaactgcattttgggaattagagactaccaaaagaccgtcaccagtgacaccagggatctcgcgcagagattcatttcatcattcaagaggattctcttcatcggatgcggagacactttccaggatcctaatttttcgaacttggtgaagtggctccgaagtgagttgcggggcaaccaaccacaacactttgcgttgataagaaatgctgaaaaagcgcagcgcctacgcgatgaagcatggcaggggttcgtggatccggtatgttttggagaaaactacgatgacctgcctgatttcattgagagacttctgcatggaatccctgagaacagcgctccagcacccacacctcatcccagccacgaaagcaccctagacgcatatactcgatttctaattagagattgcggacaaatgacaatcgaaggaataaaagccgaccttgatactgctcaaagaaaattcgatatcgagcggctttttgttccactatctgtcgcgccatgccccccttttatcgcgacaaatgatcccgaacgcgaaagcaaaattgaagactggaatgcacataatccaattataagctttggcgaagctcttcgaaaattcaaaagaatcgccatcctagccctgcctggaggaggaaaatccctcttactcaagagagtcgcggtagcttacgccgacccttctaggcgccagtatagtcaagatgatctccctgagatcggcgtaaccccggtgcttattagatgccgggaatggcgcgatttcatcaggcagcccattctcacacttctttccaaaatgcgagacatttcaggagatgatcgaatcgcggacttctcccaagccatactaccaagacttaaaaacggagacgtgctactgcttgtcgatggccttgacgaaattcacgacaattcggatcgccagacattcgtcagcaacttggaaagattcattgaagattacccagaaatcagggttgtggtaaccagtcgagaggccggattcgaccttgtcgccccttcaatcgcgagattttgcgagagaattagagtatgcccactagacccaactgccatcgaattgctcacaaatcactggcatctactgatgactggcgacacgcccgaatcgatcaatgaagcgaaatccgttactagaactctacttagatctccagcactacgtagacttgcggaaaaccctctcctactgacaatgcttttggttgtaaaacatggcgcaggcagactccctccggatagagtaagcctctatgagcgggcagtagaagtacttctagacacctggaacataatgggtcatgagccactcaacccaaaggaagcaatgcctcaattgagctgcattgcatttgaaatgatgcgaaatggcacacaaaccgcgacagaagatgaaattctgtcaatcctagacaatgcgcgcgaacaagtcccatacattcgacgctatgcaaagggaacgccacacgaattcctaaaaagagttgagctaaggtcaagtttattggtcgaggccggccatcaactcgacgggatcaagatagttccaatctaccagttccggcacctgacatttcaagagtatctcgcagcagcggctgcggcagagggccactatctcggatatagagaagagttcacggtgttagatgctctaaaagatgagatgttcaacaaagagtggcgtgaagttgtgcctatggctgccgttctgtcgagaaagcaagccgatctattgctaagagaaattgtctctcgcgtcaagaaggacaaggtcaatcgtgttaagcgcggccgtcgcctagatcgagaagagtcacaaaatgggcttccgccaacagacgctgcatccttgatgctgcagtgcttggttgaagaggcagaggtcttccccgccactctcaaggccatgcttgatcttgcggcgtattttggggcgggctgcaaaacgaaagacgaatgggagacaatttcgagaggcccatttggtgatgaccttattgagagaacgcttcatctatacaaaagctctcagcctttagatggctgggttagaaacaccttaggctctcttctctcactccaaagaggcttagcaaattgcttcacgaagcccggaattgacagaactgtggaaaccctgagttccgaatcggaagaagaaatttgcaaaggacttctaattaatctaggagcactctggcaggacagcagatgcacgggagatggagacatgtcgactcttatagtggagattgagaaacatctaaactccagctccaactttacactcttttcagctatcgcaacctgggcatttgtaaggcgggcgaaccctgccctcccctcacccaagccggacgttcttgaaaggataattggcctatttcttcactcagcggacgctggaactaaggacactgcatccttcgcaattacagtattccgagttgacagaaatgaatgggcgcccaccctaagcgacacagaatccaagattgttctagagcatgtcaaccgggagtacaaactcgacgacagtggatatcagcgtgccgccgctctgttcatatgcttctattcgaggttacttagcgataaaaagatatcttcttacctagaggaaagacaccttcctgcggccagtcttgaatggctcgggaggcaggtcggctttagaaaaaactcgaagatgcgcaaacagaacccgcctgactga

SEQ ID NO: 533622 - DNA, 657 bp, Stenotrophomonas maltophilia
atggccaagcccggtatcggcgtgccactggtagatccacggggcgaacagcgtggtatccagacggctggccgggttggtccacggcgccagatcgccgatgcccagcagcagcacggtgtaccccaccagcagcgtgaccagcacggccgcctgcacgcgcggccgcgcatataccgccagcacgcccaccagcgccgcacataccgcgatccgctgcagcacgccccagatgcggaagtgatgcgtatgcagcgcccaccagatcaacagatgcaacagcgcaccggccagcaggatgcgcagcgcacgctccagcacgccacgcgccagcgctggacgtgcagtggcatccagcgcgcgcggagccacgctgaacgccatcgacacaccgaccaggaacaggaagaacgggaacaccagatcagtgggggtgcagccatgccattccgaatgacgcagtggtgcgaacaccgcactccagtcgcccggattgttgaccagcagcatcgccgccacggtgatgccgcgcagggcatcgatcgagcccagccggcgtggcggcgtagtgttcatcaggcggcctcgtactgtccggcgatccaggtgccacgcacctgcagggcgtcatccagcagcaccaggtcggcctggtaa

SEQ ID NO: 533623 - DNA, 900 bp, Stenotrophomonas maltophilia
atgcgagtcggagttggcggtgatccagaagcggatgccatcggccagcatctggtcccagatgccgccgacctgcgcggtcatctgatcgtagccgcccagtgtcggcgcggccgcgttgcggtacagcccgcgttcgctgcggatggcctggtgccctggggcgccctccatgcccaccaatacatggggtgcggccgcgtgccagccgcgcagctcgtccggggtcacctcgccccactcgccgatgccggtcgcggtacgcgaaggatggttgatgaacatcagtggcgcaggggccaggccgcgcaggtaggccagtgccgcctgcatctgctgttcgctatcgcggctgccgtgcagtggctcgctgcggctgaagtcccgctcggcgatgaccagctgctcgcgctcgtgcgggcccggcgcgatgatcagcgaggcgtgctcgcctgcgggtacatcgaattccatgccgttgaactggatcacttcgggcacatcggtgcgcgcctgcagcagcgccggatacgcatggtcgcgggtgaccgcggagtggccggggccaccgtggtcggtgtgcaccatccagcgcaggccgaaggccctggcctgtgccgcgttgtggctgcggctgtacggcgagtcgccaccacgcaccggcgtgggcgacgtggtgctgcggtcccagtccacgctccattcgctgtgcacatggtggtcgccggccagccattggcggccagcgtcgactgggggggctgcctccgccggggcggacaatgccggggccgccgctgcgagcagcgccagcattacaagattcttcatggattcacctctgaaaagcgcgcgaacgacgcacggaccctcgcgggtccgcacgctgccggtgcgtga

SEQ ID NO: 533624 - DNA, 471 bp, Stenotrophomonas maltophilia
gtggcctggtgcagttgggcggccacggccctgtgcgttggggtcgtgattgccgcacagacgcagcggtttgaggcacccgccccttcgcctatcgccttccagtgcatctccaacgatcgcttctcacagctgcgccggcaagcgatgcagttcgtggaggttcggccagggcacggcttccagttcgtggaacggcatgaaggcgcctctttccagaatcactgcaggggcgtgcccgtgttgtggctggagaggcggaagcagcatgtgctgttgcgggcctcactggatgcggagcagcgggcgcctgctgttgtacagctgcgggcgctgcttcaatggcagttgcaacccgtggactatctggagcaggtgctggcgggtgtgccggagcctgttctgatggatcggatgttgctgatgctcgcgagcgaggtgcctgatggggtgcgatgtggcatgccgtag

SEQ ID NO: 533625 - DNA, 777 bp, Stenotrophomonas maltophilia
atgacgacgacagctcagggccttaggcccgcggcaactgaagatctgcggtacatcaaggaatggctggtgcgagaagccgaaggcaacagcggcttcattcacaactggtcgatgattcacgaggcccagaacgaggaccatatgttggtcttcgaggcgaccgagggagtggtgggttttctaacctacggcataagccgcagctccattctgcaaatcaaaagcgatcacgtgcggcgcggaatcggcagagctttggttgagcgtgccatcgccaatgaggtggcaggaggcaatccgatccaggtcgtgcagtgcgagcccaagagctctgcgggcttctggcgccgcatggggtttaggtactatcgccagcgcaacaacggcccgcacgaaaagaatgtttacatgtatcacgtgtccgagttacagcatccaaatactgatacgacggggggtcttcctgtcaccattctggtctaccccagtgccgcccttaacaggcggggtgaggtgatccccgaccaagtgcactacgcgatgggtgagtacaacagccacaacgataccctacttttggaccatcgaatctgcgtggtcgacgaggacgtgctcgaggatgctgtggtagaagtgcgcgcattaggcagcacctggttcttcgaaaaggccaagcggaattcggcttttgaactgggattcaaggagtgcaagaatcacagcgggtggtacattgatgcgatccgccggccgacatccccggtcgagctgtaa

SEQ ID NO: 533626 - DNA, 1641 bp, Stenotrophomonas maltophilia
atgggcggaactaagctaggcaggaacgatctctgtccgtgtggaagcggcaagaagttcaagcgctgccacggcggtccgaatgtcaactacgaagagatgatctcgcgaggcgccgaggaagctcagcgtaaggctgaagtcaatttgatacagcagcagcgacagcaaggcctcggtcgtccaatcattgccgcccaggcggccggtaagcggatcgtcgctgtgggccatcgtctatttcaaggcacatggccaacctttcacgacttcctttatagctacatcctcgatgttctggggcgcgactggttcgaagcccagacgcagctaaaacacgacgaacgtcatcctgtggttcgttggcacgaaagtttcctgctggcgtccaaagccgtaagcctggcgccaggcgagacacaacagacgccgatgaccggcgcgatcagtgcatttctgacgctggcgtatgacctctacaccctggaacacaacaatgatcaaacgcgcgcccctcagctgcggaaatcactgattggtcgcttgaagtgccaagatcagttcatcggggtgcgttatgagatccgcgttgcggccatgctgttgagggccggattcgagctggaatgggaagatgaaaccgatcgtcgaaccaagcatgtggaatacaccgccacctatccgcgcaccagaaaagcctttggcgtcgagtgcaagatccgaaaccaagatgctgcgaagcaggccaaccagcatcttgggaaatttgctgggctggtgagtgatgcgctgaagaaggcaacgccacatgaccgtctgatcttcgtcgatctgaacacgcaagcctatccgtatgttcccggcggaccacatgattggcgaacaatcggcatcaacacgcttcgaaagttcgaggcacaaccgaaggcagcgaccctgccacccgccgtggtgttcatcaccaactatccggaccatcaccaccttgacactcaggttcccgacgctggagtcgccgttgagggtttcaagatcgatgactatcgaaccggtcagttcctgacgctgccgcagaagattgagatgcgcgtgcgcaatcctgaggttgaggcactcgtggcatcgatccaggaacatatcgacctgccttccacatttgaaggggatattcctggactgccatcaaaccgcctactcatcggacagcgacatcagatggacgatggtgtggtaggcaccttggaagacgcctgcgtgatgaacgacaacggcgaggtcgcgttgatcattgatcgggacgaaggtgggcgagcgatctacaccaaccggctctcgcctgaggaatttgccgcttggaagcgctatccagagaccttcttcgggcagatccgccaggaaccgggccctatcaatgatccaattgaactctatgacagattgaaagctacttacgcccgcaccccgaaggaaaaactgcttaagttcttgggagaacacggcgaccgctttgcctcgctcacgcagcccgagctgttggacgtctatgtgcaaggcatggtgaactctgtgatggagcgggcaggcacgcaagaagtcccagtgcacatccaaaggatgaagccgccgccgactcgggcttag

SEQ ID NO: 533627 - DNA, 1401 bp, Stenotrophomonas maltophilia
atgccagcttcgtgctacctctgcgccaaacgctttaacgaaacggacgtgttgcagcacggcgagcacgttctccagaacgccatcggcggcgcactcatctgccaagacatcctatgcgaggcatgtggcggcaatctcgggaagtcggtcgacggacctttctcggatgcgattgcaccgttaacggccctgttagagactccccgcgaccgtggcaatcaagcccacgcagaagtccagttgcgaacgagcgatcccaacgccaaagatctggagtcaatcacctttcatctgaagaatgatttcacggtggcacccgtgcggccggtgctggtcccaaaccaccccgccaagattgcgacaatcgtcgccaagaccctcaaacaggcggaacaattcaagcgatcccgcccgatacaagacttgcttgcccaaggctatatgatcgagttgagcgacaacgcggcgtcctatgccgagcgtgtgcttctcacggcgcggccggatgcacctgcgatccttcgcggcattttgaaaatcgcaattggcttcgcgagtgtgcatggagttgaacgacggtacctagcccacttgatgtccaataaagacctaacgagcaacgcctcgcagttgcgctcgttgatcttcccttactacccagtcgatgacgtcgaacggctgtttgagaccgaaaagcatgtgcacgaggactggtaccctacgcaccacgtctatctcttcagccatggacgtgatctttactgctacgttgagctgtttggcgtgctgcagaagtatgtccaattgagcaacgactatggcgggcggccactatcggagaagttcgtgcagaaggctgaaagatggcagtttaatcaagattccttcattgcacgttcgcctagcgaccttgatattctggcaagacagttcggtgtcccgcaggaccagacatgggagcagatccaagctaaagtccttcactatgcggcgtcgcgctcctatagccttgagcctgacgatacgatcgaaaaggcccaagcactggtcttaatgcttgcacagtactcccgcctgcctgatccgaaagccttcgaatgcgtccgtgagatgttcgccaaggcggacgctgccaaaacacagcttggcctgacgttactggatgaacttatggccaaccctctacacgtgatgagcctgctacgcagggattactgcgagttccgcatcggacggccggacgctagcaggccggcccaggtccgccaagtccccgcatcagacgtggagcgctacacggcctacaaattttatgaactgctgcgcgcgaaggggtgcgaggcagagttggaataccagttgctacggtccgaccacgcagaactgggatttgcataa

SEQ ID NO: 533628 - DNA, 4656 bp, Stenotrophomonas maltophilia
atggcatcgatcgacccgcaagatctcgaacgcctccgggcgttggcacaaggagtcgacccgcctactaagttcgaacacctagtggcttcgctgatgggcgagttgctcggcacgagcgtcgcggtggccaaatcgggcttccagagcggtggcgacgccggtacgagcggacggcagcagcgtgcgctacgcatcgagtgcaagcggtacaaggacaccaccacgctgagcgcgcgggagctccagggcgaactcgacgacgcgattgcccgagatcccgggctggaagtgtgggtcctggcggcgacccgcgacgtacccgagcagttggaggcatcactcttcgcaaaggcgaaccgcctcggcgtgccggtgctcgtgatcgattggaaggcgcacgagactccgcttctcgtcgccttgttcgccgtgaacccggacgcggtaacccaatacctcggcgccgaggcggggaagatcgcgcatcgaatgcgtccggcgatagatcccgcgctcgagcgcctgcggcgcgacatggcggcgtggcagatcggcacggagacgctgcgacgcctgtcgcgcgatcgactgaccgcgatctggaccgacccctacgaatcgcgtgcgcacttcggccaggtggtcaccggcgggatgaacccgttggtgcatcgcctgcaggtcctgcacgcactggaagcatggtgggcggcgccgccagcagcaggttcgcccgtttgcctgtgcggtcagttcggcgtgggcaagacgtgggccgttgccgattggctgatccagcgaaccgacgtgttgccgccggtcctgctcatccctgcctccgctgttcccggcaacgggcaggccatgggatcgacctccgcggccaaggacttcctcgccgatcgcctccaagaattgacgcaggtccgcgactgcgcgcactggcgcgcccgtctggaacgcatgctggagcgtccggccgaagagggcagtgcgctgctggtcgtgtttgacggcctgaaccagcaggcgagcgtgcagtggctggaactgttcgcccaactgcaatcggagcagttccgaggtcggatccgcgtgatcgccaccactaggacgcatcatttcgaaacacatctgcaccggctcgcgggattgcaagaccgcgcggtgtcgattccagtcaaggattacgacgaccgcgacggcggggagttcgatcacattctcgcgaagcacgggctcatccgaagtgatctccaccccgaactccatgcgttggcccgcaatcctcggttattcgcgttggtcgtccgattccgggacaatctggtggacggcggcgccgtcacaacccatcgtttgctgtgggagtacggacgcgacacggccggggtgtccatgagccgcgagttctctgccgcgcagtgggaacagtggctcgtggcggcaggcgaaaagatccggtccggtcaacgggtgttcacctcgcaggaactgagcgcgctagccgccgatgacacgctggacggcccggcgaagtatcgacgcttgagcgcggtgatgggatcgccgttggtcctgcctcgggtcgatcacaaggtggagctgaccgcagagctcatggcgcacgccttgggcacgacggtcgttttcctgttggcgacggcgcagacagcggaccgtcaatcgctgcagtccgaagtggataagtggctcgaccccatttccggactggatcagcgggccgacatcctccaggccgctgtcgccatcgccttgcagtcgcagtacgccggccccctcctgggcgtcctggtcgcagcctggctgcaaacgcagaacctcgccgagacccacgtgcgcgacgcccaggcgctggcaccggaaatgccggatgacctgctcgacgcgatcgagctgtccaatcgctacacgcatgcctattgccgacagatcgctgtggcggcattgcgtggggtgaatcgcgccaacgttcgagtgcgacaggccgtgctggcgcgggcgcatgactggctacggctgatctcgcgcgacctcgacgttcgccagaaggccgagccgcaagccgaacgacaccgacgagagcgcatgctcagtcggctaggcgtggatgccgcgggcgagctgacggtgctgggcgaggccatgcgcgtggtcgaccgggatgaagggcagtggagcgagcacgtgccggcgttgctggagggctatcccctcgtgcacgcgttgccggtcttccgcgtggcggccattgcggcctctacctccttcaatcacagcggttggaaccatttgcgttgggcctgcttgctcaacccagtggatcccgaggccgtcgcgaccgccgttaggaccacggcggccgacatgctgcaacgcgtgccggagcccggtatcgccgaccagctcaatcgccgcgtggccgagctgctgctgtacctttctggagagcgcaaggatgacgaggccgccaacgccatgaaggtgtcgttgggccgcagcttcaactacgacgacgactacctcgccgacccggtacgtagcatcttcagcctcgagcgccggcatgcgttggacgtactcaacgacaagtcgttgccgctgcgcgggcgcgcccaacgctgcgaagcgatgtggactgatccgagcttcgtaccgccccctgccttctgccaggaagtcgccgaggcggtcgaggcaatcgatgctgtcagcttgttcaccgggcgtaacctaaccgcgcaagacaacgatttccgacagctgcaggcggtcatggcgcgctgcgcgccgcgagctctagccgcgctacgtcgccgactagcccgaacccctgcggccgcgaatctgcgcgcgccccgatcctgggaaaccaaccgagccttgctcttgtacgggccggaggaagtggccgcggcgcgcgccatgcgcgagttcggccgagagtcccatgagggtgacgagaccctagcagggtcggaatggattcaggccgaactgctggacctggacgctctcgctcaggccagtctggtcgttgaggcggacttgctgcgtattcctctgtcgattacagacaacctgttgccgctcacgacgcagcaggtcgatgagctgatcggacgcttcggcaacggcagtaagaagcagcagcgcgatttggtggtcgtcctggtcacggccccgccggtgctcagcgacgccgcgtggtcgtgggtcggtcaattcaccacgtcggacgaccccatggatgtccggctcgctttcatggtcttggagggcgcagacgccaagcggctcggtcacgacctggagcgccaaggatggagcttcgttcccgggacggatgccatggcggcgcatgccgccaccggcgcactgatggaggtcaccaagtcgcatgcgttcgatcaggtagccagtcgattggccccgtggcgcctgctggaagcggtgcgagcacgcggcggtgatacctctgaagtgcgggtggctgccgagcacctggacgcgatacttgcgaagggaccgtcggccgtcttcgaggtcggcgcttgcctgaccgtcgagcgcgatgacgacacaaccgctccgccttggctttcggtccgggcaccggcgccaccggatccgcattcacccgaagccttccgaaatatcttcgacagcgacgcccgggtggcagcgcaggagcgggctagtgaacaggcggagaaggccatcaaacaggcccgcaaagaaggcgcgagcctctacctgcagttcgtaacccgtgaggacggtttggcgctgtgccggcatgcgccggaggtggtttgccgctggatcgaagaccacgagagtatcagcaacgatttccggcgtcgcgtgcagcaggccgaaggcttgtttctagccgtgtgcgaaggcttgctggagctggacccgccccgcggcgtcagcctgcgaagcgccctgacccgggccatgttcacccggatcgtggggcgtgccggcgtgccggagttggtgcacatgcttttccgggcacccgagtcaccggccgtcgtcgtggctcgcgacgcgttgctatcgctggaagaagccaacaccgacgccaagctctacgagatcgcgctggtggctcagatcaatggtcaccgggcttggcttgaagatcacatcgcgcgcgacggcgcctcgccgttgccgtggcggcagcagcggggcgcgacgcttgccgggttccggggcgacaaccaattgccaatggctgacgcgtggaccgaagggccgtcgatgtcttgggccgaagacgtggcgcggcgctcggcgcggttgcgccatcacgaagcatgcgcgcggcactggtggcgcgagtactggcggttggaagaccgcgaagaggcgtatgcggcctgggtcctgttctggcaatgcgccgaccgtcgtgcgctgacgtggcaggcatcggaagccgaggtcagcccgaactcggaggccttgaaggccatcaagcgacggcagtggaccgtcaggcagccggactggaagcgcggtgccgagagcacccatctgcacctggagcgtaagttcctgggtcgtgacaccgaagcgcgcgtttggccatggcgattgtctcgacgggactga

SEQ ID NO: 533629 - DNA, 1788 bp, Stenotrophomonas maltophilia
atgaaaccctcgcctatgtcgtttgattacgttgcggcctttccgctgcctgccgaccttattcccgagcggctgcggaacctgctgacgcccgtcggcatcaacccgcgggaggctgtcgaggtcgcctgtctgtacgaggcaccggaccgcgatatcaacgaggaagctctgcatctccagatagccgtggtgcaggatggcagcgacgcgccactggatgttctcgaagaggccgggcatggcgttgtcgcctattccgtacccgtcgataggaagggaaacgctgcggaatatcatccttccctatcggggcacgactatatcgtcgcctcatggggaagcggctccttctatacctataatctggccgaaaaggtctggatggccttggggctaactccgcgttgcatcggcaacgaccaccagaagctcatctatgacgatcttggcctgccagagttcggtgtggcgcagggcgagatttccaatgagtactactggggggcgactcgcaatatcggctggtcgatgtccaatgaatacctgaggaagtatctatggttgcgatcggcgcgcggagtcagagcgatctattacaagaagaagcttccggaccgtcccgagatccgcaaactgatgggcgcccaaggacatatcgatctgaagcccgagacaggacccgcctggtacaccctcgatattcgcgagtacaaaaaaggattcttgctccaagtatgggcctcggtggaagccgtatcgtgcgagctctgccccgagcaaagcgtcgatggcatcgtctggccaggggatgcggaaccgatgactcgcgagcgcgctaacgctctgttgtccgggaagcaggttttcctggacgaccggttccttgaacgatacgagcaaagcgccttctacgacacaacgcctgtccagatcgacggaagatggcattgcagcccttcctataagggtcaatggggatttacggactgtatccgagttggacgcaacctagtcagggtctcaatgcgcgagctgtacaagccgaaacccgaccgcgagatccttcatgcatacgagcatgcactcgggcacgacgagatcgcgcatatggacatggatgccgaacacatcgttgcgaagacgcaacgtctgctcgaccagattattattctcggcgacaacctttcgcatcttggtgccagcagtgggctacataagaccgcagaggagctgactggattctcccgtagggaactgcgcgataacggctggatggcgtatcagaacctgtgcaagctggcacaggtcgcgccgctggacatgacccagcaggcatttcttgcgaggtgcaagcaactccatgagatcctgcagaagattcccaatggctatttgaagtcgttgctggagaaggccggttgcccacggggcaagatcaacgacctagggctgttgaaactgctggaggcactgttgaatgtcctgcaacgactgaacgacgacgaagagtccctggacgccttcggatcgcaacgagagccggaaggatggaatgccaggagcccgctcatagcgcccctgttcttgaacaatgaccttcgtatcgcggacgctcatgaggcggtcgggaaatgcattcagacgctccaggacatgggctttgataccggccatttgagtgacggctatgggttggcgctggacttcgtgatggatggtgtcatccgcgcgcttgaatccatcaattccgccatggagcagttgctggagcgtaaacgccggtga

SEQ ID NO: 533630 - DNA, 684 bp, Stenotrophomonas maltophilia
atggacgcctgctcctgcaccagatcgtccttatacccttgcagagctgcgccgcgtgccgcggatccgttgcctgacttcgccttttccttgtacttcttctcgatcgcctcgaccgccgcagcgcgacgaccttcgatcttctcgacctctgcggtcaggccggcagcctcggcctggcgccgaaccttctccgcttctccgttgatccgagcaatctcgtccttcttcttctgctgcttgctcgcctgtgaatcgataatggcatcactgcgttgcagaaactcaacgcttgcgtcttccgcagccttcagctccgcttccttccgctcctttgtaaggtcagtggccagcgccttgatcctgtctgatcgatccttgatcgacttctccatcgcagcgagcgcgatcggattcctcgccagcggaaggcctcgctgggtgccgttggccagatcgttcaacttcgccagctctcgctggttctcggcaatcaggtgctgcatctgcgctgccgccggcgcgaggcctacgttcgcctgcatggctgaccacgccttggtggcttcggcccacagatccttgaaaccacggattacctggttctggctggcacgcaccttggccatggccatcaccgtctcatcggcagcagcacgggtgattacggtcaccgcatcctga

SEQ ID NO: 533631 - DNA, 333 bp, Stenotrophomonas maltophilia
ttgaaccagagagctttcatgcaggcctgcgacgcaatcgcgttcagtgccttcgccgcagcaggcgtcgccgatgctgcccactacaaggaaccgggggggacggcagaggtgccgtgtaccgtgttgctggacgaggccgtcgagcagttcacacctgatgaagtagcgcccatcgcgacaaccattgatcgggtcacgctgcagctggccgagatcaccccgaaagatggtggtgtggtgcgtatcgacgcaaccggccgccggctgaagctgttccagaagatccgtggcgatgaatccaccgagcagtgggaggttacccgtgcctga

SEQ ID NO: 533632 - DNA, 939 bp, Stenotrophomonas maltophilia
atgaagaaagggaagttgcagaggttcggggcatggattcggggcttgcaatgggctgcgatcttcatgacgctgtgcgcgcttgcaatcgtagttctcagagcgctgtatcccgaggcgttcaagctcgactcgatctccgtggccctgatagtgcttgcagtcctcccgtggctgaaatcgatcgtgaaatcagtggaggttgcaggcctgggtaagctcgagctgcaagatgtcgagaaggctgccgcaaaaattgaggacgccgatcttcccaaagagagtgtcgaagatcgtgttgcacccgaggatggaggcgccgattctgaacctgggcaggaagagccggctgaagaaccctccggctaccaagtgcacgatactgatccaactagctattgggacagcaggcacttcaaggcaggagcatcaggtgcccccacaaatggatccagcactcagccatttgagacgagcattttcaagacttggcgacgggacgggacagacgccgactctcaagcacagttgcgaacagcggaaaccatcttgacaatctcacttgctcagttggcccgtcagcatggaattggtgtgagggagcgacgcagcacggttcgagcgctgattgcgcaaaacgtactcgatcagaagcagggtgacgctgtcgtatctgcgttcagtttgctggaagctgcaatcgagggcgccagtagcggtttggcaatagcccgggttgtgagccttgcatatgatgttgcctcatctctggatgttctttgtcgacgggcaaaccaagcgaacagcgctgggaaccacccgcgcaagacagctatgaagttctcataccttaagcagaccccagaagaaaaagagctccaaaagaggttcatttcaccgcaggggaagtctgacggcgagagtcctgcgaacgattga

SEQ ID NO: 533633 - DNA, 765 bp, Stenotrophomonas maltophilia
atgtctgcagtagccgagcctgcggtggccctgatgccgtgtggcaactgcggcagcggcgacgtgcgcatgcgcgcgcggggtggcgctggcagccgccgcaccgcgcaggtggtgtgcgcgcgctgcagcgcgcggggggagctgcatgtcggggcagacgcagaagatcgcgccgtcagggcctgggcgcaccgaccgacctacatgccggcgccaacagcggtcagggtggtgcacggccgagtgccggtggcagcaccaaccctgcagcgtgacccgctcgagttgatcgcccgcatgctggtaggcgggagcttccgcgagccatcggatggcaggtcaaccatgacgccgctgactgccgccgacatcgccggtgccgtcggcatgatgcgcgattccgtggccaagcaggcagttatggcggtggcgctgcgggggcagggtgtgtccctgtcgtcgcttggcagttccctggccaggcgggtgatgcgccagatccatgggcagcgacgtagcggtggaaagcccgcgctgcgcatggatgacccggccgaccgctggcgcatgaggctggtgctgcaggacgtggtgaacgacctggtgtggcccgaagggaagtgcccggcgcagttggcggcaagagctgcgaagatgaggaagggggactacctgcgggtctacaggcttgcagcggaggtccttgaacaagcgatcgaggctgggagaacggatttcggccggaggctcttctcgcggtga

SEQ ID NO: 533634 - DNA, 369 bp, Stenotrophomonas maltophilia
atgggagccatcgagaagcgggcactgctcgaccagcgctccgtactcatcacggccgacgacccgcaggtggtttcgccgcccgcagctggggcacatgaagtgcagcccgaagctgtcgatgttgggctcgacctgaccgaacccggcgaacgtctcgcggcagtggatgcactggagcatgaccccggtgtacgccccggaggtgacggcgaggctacagccgaccattccgcgcgatacctcgtgggacctgctgacgatgacagtgccatggttgtccaaatgtccggggacgttgctgaggcccacagcaaggcccgcatcgcccgcagcttcagtatcgccgctcgcccggaggtgccgtga

SEQ ID NO: 533635 - DNA, 354 bp, Stenotrophomonas maltophilia
atgagccccatcgccagcctcgggaccgtatgcggtccccagcgaacaataggcttcaccgagagcgccgcgcgcgcggtcgatcatcgacgcatggccgcgctccatgggcagtgccagacgaagatcatcatggacttcgtcctctgggcgagtacgtcgtgcccgttcttccccacggtggtgcaggtgcaggagcgcttcagtgtcagccgcgccacagcgttccgttggcgacgcaccctggccgacgcgttgtgcttgccccagatgccgcgcaatccatgcccaggctttgaacccgagccgctgccgatggctccgcttctgcgtggggcggggggcagggcgtga

SEQ ID NO: 533636 - DNA, 339 bp, Stenotrophomonas maltophilia
atgaccgccggcgtgatggtgagctgggcaatcgccgtagtgggtgagttcgatggagctggctgtcgtatcccggacgcggtggtgcccttgctgccgatggtcgaggtagtgctgtgggcgaaggagcagccttggccactgcgcgtcgaagcactccaggaacgcttcaacctgtcccgcgcgaccgcctatcgctggcacggtgctttgctcgatctgcacgatccggccgcagctcgacgcagggtgccggcggcgcaggtactgcgcggatccatgtgccgcgcgctgcaggacgcagcactgcccactgatgctcccggtggtggcgcatga

SEQ ID NO: 533637 - DNA, 303 bp, Stenotrophomonas maltophilia
atggcaaagaaggcaactacacctgcccggaatcagaggaacgagatccggtatcagaaccactactggcggattcacgccgagtacgcgctcgaggtgttcggcgactcgctgaagaagagccagggctggaagaacgacctgactgggttggatgctgtgcactactacctggtgcaaaagcatcactggctaccatccgtcgttcgggcaatgtctctggaagacctgcgatttgccttgaccgaagaaatgcatggttggaagctgcccaaagacgctggcggtcaagagggcaagtag

SEQ ID NO: 533638 - DNA, 264 bp, Stenotrophomonas maltophilia
atggacacactccgtacctacctcggcaccttggcaccagacgatcaggcggcgttcgccgtcaaggctggaacgacgattggctatctgcggaaagccctgagcaagcggactcgattcgatggcgcactggctcgccgtctcgacgagcagagtggggggcaggtttcccggagcgagctgcggcccgacattttcgatccgcctggtgctgcctacgtcgacctcgacgctggccggatcgtacccgtggagggcgcctga

SEQ ID NO: 533639 - DNA, 384 bp, Stenotrophomonas maltophilia
atgggggatggacggatcaacgatgatttcccggaagtgatcaggtcgatggacttcacatcgagctacatccggtcaatcgtgggatttgttccgccgcccggacgcctggtgcttgtcacaggtcgcggtgactcgatgattccgatcattcagccgggcgaatcacttctggtcgactctggtgtacagacgttcgacggcgatggcatctacctcatcaacactggcagtggccaacaggtaaaggggctccaggacaggggggacgcggtctacattgtcagcgcgaattcgatgctctacccggcgttcccattgccaagcggcgcgatgatcggtggcaaggtgtacctgcgcaatcgaatcgaccgtttcaactga

SEQ ID NO: 533640 - DNA, 222 bp, Stenotrophomonas maltophilia
atggcctccaaggcgggtgtgccgcagacgcaagctgaagctaaggcagagcagtcggaggtagccgagaggaatttgctcgatgctgtagagcattgcgacaagcgctacgctcaaatgaactccgatcggcagtacacgacggcagacctgcgggtgtacgcacagctgtgcaagaacctacgcgacgactacaaggcaaagtggggccgcgagccatga

SEQ ID NO: 533641 - DNA, 519 bp, Stenotrophomonas maltophilia
atgcccctgaccaacagctccaagcgtacggcccgcatcgggcttgctgtgattgcctgctttgccctcctggccttggttggctgggctgctccctcggaccctcccgcctctgagccaggcgccggcacccctcgtgacctggtgatcaccagcccgcgcatctgcgccgcccttgcggtgtatgagctggccagcgatgacgattggggcctgcgcgccaccatcgccaacgccgcgctcaacgccttccacgacgcagatcgggttcccgactgcgcggccggcgtcactgcagccctgacgcagaactttgaaccggcgcgctggcaacttgccctcgacgcttccgatgccgtgctgagcggctcctaccaggtctccccggcagcatgcgtccaggccaatgcggttgtccccctgtcgaccgccgacggcaaagagtcgagcagctaccccgtgctgggccgggcgcagtgcgtgatgtacgacctggccttcatcgaggtggcgccgtga

SEQ ID NO: 533642 - DNA, 300 bp, Stenotrophomonas maltophilia
atgagcgcacccaccgctccgagcttcgcggtaattgaagtgcctggctgcggcatgcgcctgcgtgtgatgaaggatccggccggctggagcgtgtcgggatggcgccgggcgaaaggcacaacggccatggtcgcttacgtgtccgccgagtccgtcccggctttcatggagaccgccggccagcaccacgtcatcgtcggccgcacctacttcgcgctgccgcccgcgagtcagaagaagctgcagacgttcattgcttccatcgaggacaccagtgcccaaggcggttccgcatga

SEQ ID NO: 533643 - DNA, 651 bp, Stenotrophomonas maltophilia
atgaccgcccgctcccgtctcgcgagcccctcccgcactgccggccggcgtgccgagcggttccgtggcgggagcttgcttggcgtggtcctgctggttgcgggttgttccggcgccgccgagccacccgcagctatcgcggctccacctgcaaatcgggtgtcctgcccgaacctgaccttcgatctgccgcagggctggcagcttgagccgcagggggcacagcaatggcgcctcgtgccgccgcgcgcatccagtttcaacggcgtgctggtttgctggcagggcgagtacaccccagcggtactgctgtcactgcgcgaagagagcgatcgcctgctgggctggtcggtgcagtacccgaagttcgagcgcagcggcgggcgctggtttgacgaggagctggtcaacatgaccgatgcgcggctgatcgcctgcgaaaccagcagcgccgacgcagaccgactgcagacctgcatgtggggcgacccgtacccacggcgcgagcagcgtgccgatggcttcatcggtgcgcgatggaccgcgccggatcccgtggccgatgaattgcggcgtgaactgtccgccagcgtgctgagcacattctctgtaacacccactcctgagcgcccgaatgaccaacatccataa

SEQ ID NO: 533644 - DNA, 147 bp, Stenotrophomonas maltophilia
atgaatctgatgaccaggctcgccgcagcgcttgccctgaccttgatcgctcactggatcgccttctacaaccaactgggtgcgtcggagcttccgccaagagcgggcgatgtagaggcccttcatcacacagcacgccgcccgtga

SEQ ID NO: 533645 - DNA, 4926 bp, Stenotrophomonas maltophilia
gtgaccacacttaagaccctgctcgacacccttcgccaatcctcaatgtcggagcgcgaaaagggcacgtattttgaggatttgatcctcgcctacctccgcaacgaggcgacctacaaggatctttatgcgcaggtctggacctggggcgagtgggcaccggccaatgggttcagcgccaaggatgacggcatagacctggtggccgaagtggccggcaccggcgaaatccatgccatccaatgcaagttctatgccaccgactacaagctgcgcaaagaggacatcgacagcttctttaccgcctccggccgcaagccctttgtccgccgcatcatcttcagcaccaccctcaactggaccgagcacgcagaaaacgcgctggtggatcagcagtccccggtcaccaagattgacctgcaggcgctggaagacagccagatcgactggtcgcggttccagcctaaacaagccattgtcagtctgaagccgaagaagtccctgcgcccgcatcaggaaaccgccctcaacgcagtgcgcgccggcctgcaacaggcagagcgcggtaagctaatcatggcctgcggtaccggcaagaccttcaccagtctcaagattgccgaggacatcgccggtcccggcaagcgcgtgctgttcctggttcccagcctgtctttgttgtcgcagaccctgaccgagtggacccaggaaagcgccacgccgctgcacagctttgctgtgtgttcggacagcgaggtgggcaagaagaaaggccgcaaggaagatgacgccctgcagacctttgcccacgagttgcgctacccggccaccaccagcggcaaggcgctggcaaggggtgtggccgcgcgccaagacgcagaccacatgaccgtggtcttcagcacctaccactccattgacgtgatccatcatgcccagcgcgaccacggcctggctgacttcgacctgatcgtctgcgacgaagcccaccgcaccactggtgccaccttcgagagcgatgccgaaagcgcctttgtccgggtgcatgacgcccataccatccgtgcggccaagcgcctttacatgaccgcaaccccgcgcatttacggcaacgaggccaaggccgtggccgagcgcgacaacgtggcgctgtactcgatggataacgaggactggtacggcaggaccctgtttaccatcaacttttccgaggcggtcaagcgcggtctgctggtggactacaaggtcatcgtcttggcggtggaagagacccacatcaaccgcaagctgcagacgctgctgaaggacgaaaacaacagcctgcgcgtggatgacgctgccaagatcgtcggctgctggaaagcgctggccaaactgggcatccacgaagacggcgcggaatcgccggagccaatgaagcgcgccgtggccttctgccaggtgatcgaaccgggcaagggcggcaagacccacaaggtcagttccaaggaaatcgccggcatgttccagcaggtggtcgaggcctatcaggaggccgaagacatcgaggaagctgcccgcctcacctgtgaggccgcccacgtcgatggcggcatgaatgccagccagaaggaagccaagctcgactggctcaaggccgagacccctgctgatacctgccgcgtgctgtccaacgtgcgctgcctgtccgagggagtggacgtgccggcgctagatgccgtgctgttcctgacaccgcgcaactcgcaggtcgatgtggtccagtccgtgggccgggtgatgcgcaatgcgccaggaaaaaagcgtggctatgtggtgctgccggtggtgatccccgccggggtggagccgcacctggcactcaacgacaacaagacctatgccgtggtctggcaggtattgcaggcactacgaagtcacgatgaccgtttcgacgccatggtcaacaagctggagctggtcggtccagaccgcagcaagatggaagtcatcgccattgccgataccgtgcagaagaaggcggcccgcctgaccagcaacaaggcggacaaggcgcggggcaagtacgccattggcgaaaccgcagaaatctacggcccggccccggagcagtttggactggaattcgaggtcggggaaattgagcgcgccctgtacgccaaggtggtggacaagtgtggcaaccgccaccactgggaagactgggcaaatgacatcgccaagatcgcccagacccacatcgaccggatcaatgccctgctggaagacgacacccagcttgacgcccgcaaggcatttgccgagttcgccagcgagctgcgcgatgacctcaacgacaaagtcagcgacgccgatatcatcgagatgctggcccagcacctgatcacccagccggtgttcgaggcgctgtttgccgattacagctttgccagccacaaccccatgtcacgcgccatgcagaaggtgctggacgtgctggatgcccagaacctgcagaaggaagccaccgcactgcaggacttctacgccagcgtcaggctgcgggccgagggcatcgacaacgcggccggcaagcagaagatcgtggtggagctgtacgacaagttcttccgcaacgccttcccgcgcatgaccgagcgcctggggattgtctataccccggtagaggtagtggatttcatcctgcaaagcgtcaaccacttgttgcagcaggaattcggccagaccctgggcagcaagggcgtgcatatcctggacccgttcaccggcaccggcaccttcatcacccgcttgctgcagtccggtctgatcaagcaggaggaactggcgcacaagtacaagcacgagatccacgccaatgagctggtgctgctggcctattacattgccgccatcaatatcgaggcgacgtatcacggcctggttggcggcgactacgtgccattcgagggcatcctgctgaccgacaccttccagatgtacgaaaaggacgatctggtggacgccttgctggtggacaacagcgcccgccgcaagcgccagaagcaactggatatccgggtgattgtgggcaacccgccgtattcggtcgggcagaagagcgagaacgagaacaacgaaaatgtggcttatcctgcgctggatggccgtatccgtgaaacctacgcggcacgttcggacgcgggtctggccaaaggtctttacgacagctacatccgcgccatccggtgggcaagtgaccgcatcggtgataccggaatcctcggttttgtcaccaatgcgggttttgtggaagccaataccgccgatggtctgcgccaatgtctggctgaggaattttcgaatatctatgtgttccacctgcgcggcaatgcacgcaccagcggcgaaacccggcgtaaggaaaaagacaacgtgtttggcgtgggtagccgagcaccagttgcggtttcgctgctggttaagaacccggacgccaagcagcatggtcgcatcttctttcacgaaattggcgactatctaagccgtaaggaaaagctggacaagattgccgactacgccagcgtggccgggattccagaagcgagttggcaggcgatcaccccggatgaacacggcgattggctcaaacagcgcgatgacagctttggccgatttgtggttatgggcgacaagaagggaggttcggtcaagctgttcgataacttctcgctgggcgtggtgaccaatcgcgacgcctgggcttacaacgccagccattccaaattgacggtcaacatgaccagcatgattggcttctataacgccgaggtggttcgtttcgatgcggcttatccatcgttggacaccaaggcgcggcaagaaaaggtcgacagctttatcgacgccgacccggccaagatcagttggacccgcgcgctaaagcaggatttggccaaagaccggcaatacgactttgaggccgactgcatcgtccccagtctgtatcgcccgttcacgcaacaacacctgtatttcaaccgccgcttcaacgagatggtctaccagatgccgcgcatctttcctgatgcgaaggcggaaaatctggtgattggcgtatccgcagccggcgagaaagtgggctttagtgcgctaatttcacagctcgtgccaagtctgcatctggtagatatcgagggatcacaatgcttcccactctatctctacgacgaagtcgcccaacaagccgatgatggcctgtttgcgaatgcgcccagcgatggcccgcgacgccgtgatgcgatcaccgatgccggcttggcccacttccagagtgcttatcccgacgaatccctcagcaaggaagacctgttctattatgtctacggcgtgctgcattcgcctgatttccgcgagcgctttgccgataaccttagcaaggaactgccgcgcattccccgcgtgcgcagcgctgccgacttctggcacttcagccgcgccggccgcgacttggccgcgctgcatttgaactacgaaatcgtggacgcttatccgctgaacatcgatagcaagggccccctgactgacgccgattaccgcgtcgagaagatgaagtttgccaagaccaaggacccggccaccggcaaatccgtcgatgaccgcagcatggtgatctacaacaccaagatcaccctgcgcggcatccccgacgccgcctgggactacgtggtcaacggcaaacccgccctgagctgggtgatggaacgccaggccgtgcgcgtggacaaggccagcggcatcgtcaacgacgccaacgactgggccaccgagaccatgggcgatcccaagtacccgctggaactgttccagcgcgtggtcacggtgtcgctggaaacgcagaagatcgtcgagatgctgccggtgctcgacattcgcgacgatggctga

SEQ ID NO: 533646 - DNA, 1002 bp, Stenotrophomonas maltophilia
atgagtgaggttgtctggggcatccatgccggccgtaccggcgatgccgaccacctgtttctcgcgcaggggcatgtcgcgatcggctgggatgcgatgggtgacctgtcactgctccgcggagaccgggaggcgttccgggaaaagtacgtccaggcctatcctgaggcgaagaagggcggaattgcgacggtgtcgggcatcccgttccggttcctgcatgaaatgaaggtcggcgatctgatcgtctacccctccaagcaggacaagctggtgcacatcggccgcgtcgcgggtagctaccagtacgcgccggacggtacgcatcgctatcctcaccaccgccgggtggagtggctgagccatgtgccgcgcctgcagttcacccagggcgcgctgtacgaaatcggctcggcgctcagcctgttccaggtcaagagctacgccgaggagttccgcgccatggtcggcgacaagcccgcacctgcgttgccggtggaccaggaccattcggtgggcctggtcactgatgatatggaagacaccacccgcgacttcgtgctcaagcgcttggcgcaggaattgaagggcctcccgctggaggattttgtggtgcatctgctgcaatgcatgggctaccacgcgcgcaggacccgggtgaacgaacccagcgtggacgtgattgcccacaaggaccacctgggcatcgaaccgcccatcatcaaggtgcaggtcaagagcagccccaacacagtgaccgacaaggatgtgtcggcgttgtacggcaagctgtcccacggcgaatacgggctgttcgtgaccctgggcagctacagcccggcctgccgcaatttcgaacagggcaaggccaacctgcgcctgatcgacggcgatgaactggtggacttggtcttcgcccactacgagcagttcgattcgcgacacaagggcctgctgccgttgcgccgcatctatgtgccgcaggtattggaggcggactaa

SEQ ID NO: 533647 - DNA, 1506 bp, Stenotrophomonas maltophilia
gtgccgttgagggcgccgccgacggcgccacccactgcgccgactgtgccgttcaatgcgccacccacggcgcctacggtgttggtgagcgtgccgcccagggcaccgcccacgccgccgaccgtgccgttgagggcaccaccgacggcgccgcccaccgcgccgactgtgccgaccgcgccgttcaatgcaccacccacggcgcccacggtgttgttgagcgtgccgcccagggcaccgcccacgctgccgactgtgccgttgagggcaccaccgacggcgccgcccactgcaccgacggtgccgacagcaccattcactgcgccaccgactgctcccacggtgttgttgagcgtgccgctcacgctgccgaccgtgccgttgagcgcaccaccgactgcgctgccgaccgtaccgaccgtgccattcaatgcgccgcccacggcccccacggcgttgttgagcgtgccgcccaccgcaccgcctacgttgccaaccgtgccgttgagagcgctgccgaccgtaccgacagcaccgttcaatgcgccacccacggcacccatggtgttgttgagcgtgccgcccacggcgccgcccacgctgcctaccgtgccgttgagcgcaccaccgactgcgctgccgaccgtaccgacagtgccattcaatgcgccgcccacggcccccacggtgttgttgagcgtgccgcctacggcaccgcccacgctgcctaccgtgccgttgagcgcaccacccagtgcgctgccgaccgtgccaaccgcgccgttcactgcaccacccacggcgcctacagtgttgttgagcgtgccacccactgcaccacccacgctgcctaccgtgccgttgagcgcaccaccgactgcgctgccgaccgtaccgacagtgccattcaatgcgccgcccacggcccccacggtgttgttgagcgtgccgcctacggcaccgcccacgctgcctaccgtgccgttgagcgcaccacccagtgcgctgccgaccgtgccaaccgcgccgttcactgcaccacccacggcgcctacagtgttgttgagcgtgccacccactgcaccacccacgctgcctaccgtgccgttgagcgcaccaccgactgcgctgccgaccgtaccgacagtgccgttcaatgcgccaccgacggcgcccacagtgttgttgagcgtgccacccagggccctgcccacgctgccgaccgtgccgttgagggcgccaccgacagcattcccagcggcgcccaccacaccgccaacgaggccacccacacccagcgcgctgttctgcgccgcaacggtcgcctggcccgccagcttgagattgcgatccgccaccacttcctgcccatccggcgcctgcacgcgcaccttaccggctacgccggtgtcgaaggccgcggtgatcgcacggtcatgggtttcccccggcaactcttccttggccggcagggtgaccgctgccgtcgccctggcctgcccgtga

SEQ ID NO: 533648 - DNA, 792 bp, Stenotrophomonas maltophilia
atggcccgccaccttcagcttcgactccagcgcaccgtcagctgctgccttcagccctggcaggcctcccgccgacgcagcactgacgccggccgcagccttggcactgctgtcgatcgacgcaacctgcgcgcccgcaacaccggccttggccttggcgcgtgcgtctgcggcaatgcccagctgcgcctgcgccgccggtgcgacctgtgcagccagcgatgcatccacctgcgcggcacgcgatgctgcgttgcccaggcctacgctggcgcgcacatccgccgcaagacccggtaccgcaacctgcttcggcgtgctgccggccgccagcttcacctgtacggtggccggcagcacatcacgcaccaccggcagcgacgccgtgctcagctgcaggccaacgcgcgcatccgcgctgatcgccgggctgctctgcgcctgtcgcgcggcagctgccaatgcaacttcggcatcaaccttgaccggcatcggctgcgtgtacttggctgcaagcgcctgcaggtcacgcagcgattgattcgattcggatgcccccgcgtgcccgctggccagcgcacacagcagggcaagggccagggcggtcggcaccagcaggacactgcgcggatcacgggcagcgctgccaccgctgtcgcccgtggccagttccgaggccacaaccagagcattgagctggcggttccatacacgccggtagatgcggttcatgagcatttcccccgtaggcgaacaactggaatgtcagtggacttgccgctaggcaggtga

SEQ ID NO: 533649 - DNA, 189 bp, Stenotrophomonas maltophilia
atgaacgcttcgatccgcacgttcctgaaggaagaagacggcgttaccgcgcttgaatatggattgctggcagcggtcattgccggtgtcctgatcgcggtcggccgcacccagatcacctcgtttttcacaacgctgttcacgcacctgacggacatcgccaaggacgccaccacggcggcgaagtaa

SEQ ID NO: 533650 - DNA, 546 bp, Stenotrophomonas maltophilia
atgacactgctgggattgttggccatcggcgtgtgcctgcggatcgcgatcagcgatctgtatgctcgccgggtgcccaacgcctggctgcttgccgcgtgcgcgctggctgtaccgctgttgatcgctggccagttcagtacgccgcgcctgccgtggggatcccacgttgccggcgcggcgctgggcctggtcgcattgcttccgttctacgccgtgcgctggatgggcgcgggcgacgtgaagttctttgcggtgctgggcctgttgctgggattggaagcgctgctgccgatctgggtggtcgccagcctggccgccgggcttcatgcgctggtggtgctggcctcgcgccgcctcggccccatgctgccggccggcctgcagctgcagatgacccgggccagctcgcagtggcagacacatcctgcgctgcgcgaactgcagagcgcacggcagggacgccacggtattccctacgcggcctatctggcgctgtcggccatcggctggatcatcatccaggtctacggaggtgtttcatga

SEQ ID NO: 533651 - DNA, 477 bp, Stenotrophomonas maltophilia
atgaacactcgcagccctcgccggcaacgcggcgtggccagcatcgagttcgcactgatgctgatgctcggcttgctgccgctgctgctgttcactttcaccggggtgatgatcatggccgcgcagcagacgctggcgaccgcatccgcagagggagcacgcgcctccctgcgctacggcaccaacgcccagcgccgcaccgcggcctgtgtcgcagcacgcaactcaatgcagtggctgctgcagttctccaagcaggacgtggactgcagcgcaggcggcagcaatgccatcgtggtcgccgcgcccgcgccctgtgcagggctgcccgccgcgcagtgcatcaccgtcacggtcagctacgactatgccggccaccccttcctgcccggcaccgccaccctctacgggtgggtgatgcaggctcccatccgcagcgtcgcggtcgcccagctcgacctcggcagcggcacctga

SEQ ID NO: 533652 - DNA, 1032 bp, Stenotrophomonas maltophilia
atgctcaagttgacccgcatcgccgccgtcgccctgatcggcctggccgtgctgctggccgtgattgcactgatgatcggccgcaagcccgacgcgccggtacatgtggcgccggttgccagcgcggacccgcaggccatcacggtggtcgaagccgtcgcccggctgccggccggcgagccgatcaccgccaatgggctgcgactggcccagcgcaccacgccggtcgccggcgccgcgaccagcatgtccaccgtggtcggcaaggttccggtccaggacattgctgaaggcagcgcgatcagcacctcggccctcgcgcagggcttctcgctgcagctgcggcccggtgagcgcgcactggcggtaccggtcgacgaactggtcggcgcgggcaatcgcatcctccccggcgatttcgtcgatgtgttcctcaacctgcgcaccgcccagcccagcgcagggggtccgggcgaggccgcacaggcgcgcctgctgctgtcgcgcctgcgcgtgttgagctatgggcaacaggatatcgcgccgaacccgggcgacaccgccgccagcaccgatggcagcgaacgaaacgacgcacgcgcggcggacatcaccggcagcagccatggcgccagcgacgagacccgccagccggcacgcagcgcggtactggcggtaccggtggcggacgccaaccggctgctgctgggcgcccagcagggcaagctgttcctggcgctgcgcaatccggccgataccggactgcccgaccttgccctgttcccgcaggcgcggggcgtgatcgatccgctgcgcggactggatgcagagcagcaggtggccctgcagcgccccgagaaccacgccttcgcaggcatcgatggcgatgcgctggccgggcgtggcgccgccccgacgcgtgtcaacccgcaggcgccgccgcgcgcaccggccgtccgccacggtgcaccacgcgcctccggcattgaaatcatccggggtgacagctccgctccccgtggttccctctga

SEQ ID NO: 533653 - DNA, 1359 bp, Stenotrophomonas maltophilia
atgacccaacgccgactgtctccacgcccctcccctcgccagcgctggctggccctgatgctggtgctgctggcaccggcaacaagcgtggccgccgacgatctggtgctgcaggcccgtgagcagcgtccatggagcctgcccgccgacctcgagcgcgtggccatcgccgaccctggtgtcgccgacatcgtgatgctgcgcggccagcgccaggcgctgctggtgggcaaggcgcccggcaccaccacactgctgctgtggcaccgcaagcaggccgagccacagcgcgtgcaggtgcgcgtgcagagcgctgtgcagggcgcggcgaacaccggcacgagtggcctgctgttcacccagcaggaccagcagggcctgctgcagggaagcaccgacagcgtgcttgcgcacatgcaggagcagcagacggcggcgatggcactgggcaaggagggccagctcgccgacgcatcgacggtcagcagcggtggcgtggtacaggtcgaggtcaaggtggtggagttcaacaagaccgccctgaagcagatcggcatcagcttccagaaccgcaacggtagcttcgcctacggcatcgcccgtcccggcggccagctgcccggcaacaccggcatcctgcccggcatgaaggaaggcgaatcggacaacgagtcgacatcaccgatctcctcggcgttccgcctggtgttcggttccaccaagggcctgtggaatgccgatgtcgacctgctgcagagcaacggcatggcccgcgtgctggccgaacccaccctggtcgccttgtccgggcagagcgccagcttcctggccggtggcgaactgcccatcctggaaccgcagggcctgggcaccaccaccatcacctacaagccgttcggcatcgggctgactgtgaccccgaccgtgctggcgccgaaccgcatcgcactgaaggtcgcgccggaagccagcgacctggactacagcaattcgattgctctcaatggtgtgcagatcccttcgatcaccacccgccgggctgataccacggttgaactgggtgacggcgagagcttcgtcatcggcggcctggtcagctccaacgtggtgtccagcgtcaacaagattccgctgctcggtgacctgccgatcatcggctcattcttccgcaatttcgattacaagcgacaggacaaggaactggtgatcatcgtcacgccgcggctggtgcagccgctggcacgcaacaccgagctgccactgcccggcgcacgcgaagccaagccgaacctgcccgaatggggctcgtggctgctcggcccgatcagccaggatccggtgcccggcttctcacgctga

SEQ ID NO: 533654 - DNA, 1212 bp, Stenotrophomonas maltophilia
atgaacctggtcctgtacggaatggatcgcgatctgctgccccggctggccgccaagctgccgccgaccacgaccctgcactggcaggacagcaacgcgccgacctccgcacaggaccttcaacgcgggggccagagcctggtgctgctcgatttccgccccgaacacgcggccgcctccagtgcactggcccagcagctgcagcagacacagccggacctgctgctggtcgccgtcggcgctaccagtgccggccaggtcgaaggcgtggtgatcgcgctgcgcgccggcctgcgcgacgtgctggacctggacagcgacaacgccggcatcgaagccgcgttgcgccgcgcgctgtcgccgcgaccagcggcctcgccacagctggcgcacaaggcccgcctgatcgtgctgctgggcgtgcgtgccggggtgggcaccagtaccctggccgcgcatctggcggtgctcgcgcagcagacccgcgccctggcccagggcgaatcgctgcagcaggatggcctgctgatggaactggcacagccgtccggcgatctcgcgctgtacctcaatctggacagccgcttccactacgaagacgcgctgcgcaacgccagccgcatcgacgccaccctcgcccgcaccgccatggcccgccatgactccggactggtgctgcttgatcgggccggtggtagtgacgcggtgccgccctccgatccgggtgcactgctgcagcgcctgcgcggcgtcttcgccagtgtgctgtgcgatgcgggcggctgccccctgcggcaattgccgccgccgctgctggaccaggccgacgaaatctggctggtcaccgacgcctcgatcgccaccctggtgtcgctcgaccaggcgctgaagcatctggcgggtcagcgcgaacgcgagaagcggctgcagctggtgatcaatcgccacgatgacagcagcggcatgagcccggagcagatcgcacgccgcttcgaggtgccgctgctggccaccttgcccgaacgtccacgcgtccgccttgctgccagccagggccacctgttgctgcaggacgctccgcgcgacccctacctgcgtgccctcgccccgctcgtttcgcgcctggacccggctgcatgcccggtgcaggcacagggactgcgggaaagactctcccttgccctgggtggatcgcaatggaagacaaggtaa

SEQ ID NO: 533655 - DNA, 1350 bp, Stenotrophomonas maltophilia
atggaagacaaggtaaccccgttcccgcatgccgccacccgcccggtgctgcccgacaacccgccgggccacctgccgttcgcgcagaccgagcagtaccagaaggtgctgtcggccgcgcacgagcacctgctcaacagcatcgaggacgagcgcatcgacatcgattcctgggcgccggacaccatcgcacgctgggtgcaggtgcagacggtgggcttcatccaggaatggcgcatcccgatcaacgaagaagaaatgcaggtggtcgctgaagggctggtcaaggagctgaccggcttcggcccgctcgacgacctgctgcatgacccgacgatcgaagacatcctgatcaacggcttcaaggacgtgcacgtctcgcagggcggccagctcaagcgcgccacgcagcgcttcaccgacgatacccacctgctgcggatcctgcgccgcatccttgctccactggggcgccgcctggatgactccaacccgatggtcgatgcgcgcctgcccaatggcgggcgactcaacgcgatcatctcgccgctggcggtggatggaccgatggtctccatccgcaagttccgcaaggacccgttcacgcctgacgaactgctggccaaaggcaccttcgacgcgccgatgcaggcactgctgaaagccatggtgctggggcgctgcaacatcctggtgtcgggcggaaccagctccggcaagacttcgctgctgaacgcactggccagctacgtgccgcccaacgagcgcgtgatcaccgtcgaggacactgccgaactgtcgctcaaccacccgcacgtggtgcgcctggaaagccgtatcggcggcgccgaaggccatggcgcagtgagcatccgcgacctggtgcgcaacagcctgcgcatgcgcccggaccgcatcgtggtcggcgaagtccgtggtgccgaggtgctggaaatgctgcaggcgatgaacaccggccacgacggctcgatggcgaccatccatgccaattcaccgcgtgattgcctgtaccgcatcgagatgctggcaggtttcgccggcttccagggcagcgaggacagccttcgccggcagattgccagtgcgatcgacttcatcgtgcagatctcgcgactgggcagcggccgccgcgtgctggtctcgatcacggaaatcaccggcgtcagcgacaacctgatcaccacccaggagatgttccggcacgaactgcagatcgacgcaaacggccgggagatcgaccgctgggtcggcctgggcttccagccccactcgcacaagctggaaccgttccgccagctgctgcgcgaatcgctgtatggagactattga

SEQ ID NO: 533656 - DNA, 957 bp, Stenotrophomonas maltophilia
atgggcaccggtctgctgctgggcgtgctgagcatcatctccgtgctgctggcgctggcggcatggctgtggggcacggccagcacccgcgagcagcgccaggcttcgctgcagcatgccgagcagcagctggcgcgtggcaatacagccacttcgccatcggccagcatcgccagtgccgccgccaacgagcccgcgcggcctgccagcagcgggcgcaggccgctgccctggaatggactgctgcaacgtgcgggcctgcaaccgggctggaaacttccggtggtgctgctggtgccggggctggtgctgtcactgacggccatgctgcggctgggcactgcgtggatgtttccgctgaccctgctgctgtacgcgctcggttgctggctgtggatcatgcgccggaccacccggctgcgcgcgcagcttctgcaccagctgcctgatttcctcgacaacctggttcgcctgaccgcgctgggcaacagcctgcaggcggccttccaggtcgcgtcgatgcagaccagcgcaccgttgcgcggcctgctcgacaccacggtgcgctatgcccgcagcggcatggatctggatcgcgcgttgtccctcgccgcgcagccctatcgcatggatgtactgaaggtgctgtcggtggtcatcggtgtcagcgtgcgcatcggcggccgctccgaccagatcctgcaacgcatgggcgacttcatgcgcgacctggaacaggcgcagcaggagttggcggcgaccacctcggaaacacggatgtcggcctgggtgctgggcctgctgccgccggccagcgccgtgctgatggccatcgccagccccgacttcttccaacccgtgctgcacgagccgctcggccacaaggtcctgctgatcgcgctgggcctggagctggtgggcgctttcctgctgtatcgactggccaaatcgctatga

SEQ ID NO: 533657 - DNA, 936 bp, Stenotrophomonas maltophilia
atgagcgcgagcacctggtttgcgctttcattgctggtgctggctgtgggcgtggccctgctcgggtttgccggctgggtccgcagccatcgagaacagcgtacgtcggccacgctcaagaccgccctgcagccgcgtgacgaggcgcgcgaggcggagaccgcgggccgcgactcgctgggctggctggagcgcttcggccgcgcgctcagtggtggtcgcctggaagccgcgctgctggccaacgaggatcgcctgctgctggatctggccggctggaacacgcgccgcggcaccgccatctatctcggcgtccgcctgctgctggcgctgctggtgctggcccttgcgctggccttcagcgaggccaccgggctggcgaagatcatggtggtgatcggtgcactggccgcaggcctgctgctgcccaagttcgccctgtctgcctgggtcaagcgtcgccgccgcgcagtcgagaacgagctgccgttgctgatcgacctgctgcgcctgctgcagggggtgggattcagcatggaccagagcctgcagacgctgggcgacaagctgcgtgatgcgctgccgatcctaggcggcgaactgcaggaagccaacgtggcctacacccacgggcgcacccgcgcacaatcgctgcgccggctgagtgacgtctacggtgacgacgacctgagcagcctggtgcagctgatcctgcaggtgcatgcacacggtggcgcggtgcaggagccactgcgccagtttagcatccgcctgcgcgagcagcgccgcaactcgctgaaggaaaaggtcggcaagctctcggtgaagatgacggtagtgatgatgctgaccctgctgccagcgctgatgctggttcttgccggcccggcgctggttgcgctggccgccaccatgtcctcgatgggaacgacctga

SEQ ID NO: 533658 - DNA, 882 bp, Stenotrophomonas maltophilia
atgcccgcccttcgcaccgcctgcctgctgtttgcccttgccgccgtcgccagtggctgtgcgtcgaccacgccgaagtacctgcgcgcgcccagcctggctgcgcccgaaccggcaccacaggatagccgcaacgcctacctggaactgatcgcgcgcatgcagcagcaaggcgcctggtacgcctcgctggcccacgtcgatgcattccgccagcgctacggtgatcgcccggcgctgcggctgctgcaggccgacgccctgcgcgagaccgggcaggccgacgcggccatcgcgctctaccgtgaactgtcctcggggccgcaggcggccgccgccgcgcacggcctgggcctgatcgccgcgcatcgcgatgacgatgacggcagcgagcaggcactggcccgagccacccagctggaaccgctgaacaccgactaccttggcgatctgggctacgcacggctgcgtgcaggacagttcgaccaggcccgtgagccgctggcgaaggcgctcgagctgtcgcccggcaatgccaaggcgacggccaaccttgcgctgtgggcggtgctgcggggggacaccgccacggccgagcgcctggcccagcaggccaacctcaacgaagacagccgccgcggcatccagcagcaggccgagcagatccgcgcgcgcctgcagcagcgccaggctgcagcagcggcgcgcgaggtggcagccacccgcgcggttgccagccagccagcccgcccgcaggccgcagcccggctggccgccgaagcgcgacgcgacctgcgcgatgagcgggatccgcaacgcctgccaccttcaatgctcgaacgcttcagcaccccagaccagcccaccgggaacacgccatga

SEQ ID NO: 533659 - DNA, 471 bp, Stenotrophomonas maltophilia
atgatcaagccgctcctgacccgtcgcctgttgccagcgttgagcggcctgctgctggcgacagctgcccaggcacagcaacagccgttgaccgggcagatgctcggcggtgcccgccccgcggcaaccgcagcgcaaccgctgcagtccgaaacgctggcaacggtcgacgtgtccgcgcccgaggcacgtgtgcccatgccggcacccgcatcaccccctgcctacgacctcgccagcactgcggccgcacctgcacccgcggtacgccgcagcgagatcggcgacaccacgcgcagcctcttccagctgcaggcctcgggacagcaggccggcgcgcgcctgccgatcctgggcgaccaggccaccctgagctacgcgcgctacctgaagagcttccagcacgagattcccgatttctttgaaaccgatgtcggcaagtccaagggaacatcctcatccggacgttga

SEQ ID NO: 533660 - DNA, 2154 bp, Stenotrophomonas maltophilia
atgaaacgcccacgccagttcagcttcgaccgcccgcgcggcggcatgtcggtcaccatgatgctggtcatgctggcgctgcttgccatgctcgggctggtcgagatcggctacctgttctgggccaagcgtgatgcgcagaaggtcgccgacctggcggcactggccggcgcccagcgcctggaactgtgcacgtcggacaacagcgacaacagcgcggcgcggcagagcgcgctgacccagaaccggttcgccggcagcctgcagatcaggtgcgggaactggagcgcgacacgcgacacgaccaaccgcttccaggccaccgtggatgcggccaatccccgcaatgccgtgcaggtcatcgcgcagcgcagtgtgttgcccttcttcgggcagaacaccagcttgccgaccgtcagcgtgcaggcggtggcgcgccgctccgagcccactgccgtgttcgccgtcggctcgcagctgctgcggacccgaggcgattcgctgctgatgtcgaccctgcgcctgatcggcctggatgtcaccaacgccaccgtgctttcctatgacggcctggcgcaggccaacgtcacaccctccggcctgctgaaggcgctcaacattccagtcagcgccaacctcagtgtggccgacttcaaccgcctgctggcggtcaacaagatttcgctggcgcagctggtcgatgccaccgccacggtggtcggccgcgataccaccgttggcgtgcagctgcgtgccctgtcggacctggtcgccacccggctggacatcaccaagctcaacatcgcgctgggcagcgaatccggtggcggcggcctgttcgccgaagtcatctctccggacggtaccgccggcagcgcgctggaatcgaagatcagcgtcctcaacctgatcagcactgccatctccatcgccaatgaaggcaacggcatcgcgatcggcggcctgaacctgctgggcatcaacgtgcaggccggggtggtcgaaccgccgtcgatcgccatcggtggcgtagggtcgcgcgcctacaacgcgcaggtccggctgatggccgatgtcgacagcaacaatctgtttgcgcttggcccactgctgcagctgctgggtacgcgcctgcatctgcccgtacacgtcgatgtcgccaacgcaatgggcacgctgaccggcatccagtgcggtggcacctcgccacaggccaccatccaggtcgattcctctgtgctgcgcgcctgcgtcggcaacgtcgatcccgcacagcggttctccaagaacaatgtctgtgacaacaccctgcagaaggaacagctgctgacactgctgggccagcccttgatcaacgacaagatcaccctgcccgcgttgaccagttcgcagaacctgaccctggctgccggcgagagcggctccacccagatcaatccgctggcactgggcaatgccgtttccgatctggtcaacgagttgctgcgggtcctgtccggcatgctcagctcacccaagcagggcatgagcgcgaacgacaccgccaaggcgctcgccgaccgctacctgcaggcgacgttcccgcccaacacgcgctatgacgtcaacaagctgattccgctgctgcgcgatggcgaccccagccggcagctggcgccgctcaacagctggaatgtgcccggcggcctgccctacgcctgcggcctgctgaacctggtcacctgccacaaggacgggccggtctgggatgcgttcaaggtcaccgtcaccggccagggcctgggcgtgctcgacgggctgctcggctcactggtcggcggcctgctgatcaaccgctgcgacagcctgctcggcaacctgatcgactacaacggctgcgtgcgcaacaacctcgcctcgtacatccagaccgcgccggccggcttcctcgatggtgccggtggaaccggcgtcagcaaccccgatggcagcgtcagctgcagcggcctgctgtgcacgctgctgaagccgatcctggccgcgctgcgcccggtcctcaacagcgtcggcaccctgctgaccaacctgctggccagcgtgctggggctggaactggggcggaccgatgtcaacgtgcaatcgatccagtgcagcgccgcgcagctggtctattga

SEQ ID NO: 533661 - DNA, 714 bp, Stenotrophomonas maltophilia
atgcgagaaacttcagggggcgcggtcttcgcccgtcaggcgcgcggcgcggtaatgctggccgtggccatgatgctggtggcaccggcggcgatggctgcccgtggcgaccgcgaagccgccgcagagccggccgcgcgcaccgcaccggtagtgcgcaacaccgtggacgaactcaagcagctgatggattcgcgccagctgaccgagctgcgcaccacctacaacggcaactacggtgccagcctgctgttcaacgcaaacaccctgacgtattacgtcgccctgttccaggaaaagaacttctggcgggtgatcaagaccgatgccgtggacaacgccgagcgcgtctaccgcacgtttgcacagcagtccgaacagctggcgcaggtctatatcgacaccacccggctcgaagccggcaagcgctacaccgagcgcctggtggcctacaacgaggagcgcctgcgcaccctgcagcaggaaatggaacagcagcaggcgcagtcggcccaggtcagcgcggccctgcagcaggcccagcagcaggcggtcagcctgagtaccgacgtgcagagcaccaacagccagctggacgcgctgcagcgccgtatccagatcctgcaggccgaacagggcaacccggagctgagcctgcccaagccggacagcgtgccctcgccggcaccggcggcggccagcgacggtcgctga

SEQ ID NO: 533662 - DNA, 387 bp, Stenotrophomonas maltophilia
atgccgagagtgcaatgctgcccgttgttgtgtctgctgctggcgggcgccgttcacgcccagacccaggtctacaagtgcgtggatgggtcccatccggtctatcagcagacgccgtgccaagggcgtgcgcaatggcgctgggagattccggcggaacagtccttgtcgcgtggccctgtgcctgccgcggccactccggcgccggcccggcggcgggcgtcacgccccgggcgcgcgcgcgctgcgctgatcccgatcagcgctgatcccgccgcctgtgagcgtgcacggcagcaacgcgggaaggcgctggccagggccaggcgcctggacttcgtacagcgccgacagctggatgacgcggtgcacgacgcgtgtcgctga

SEQ ID NO: 533663 - DNA, 825 bp, Stenotrophomonas maltophilia
atgagcaactacgtcaccgtcgccgatggcgcccgcatcttctacaaggactggggcagcggacagccgatcgtgttcgcccacggctggccgctgtcctccgatgcctgggacccgcagatgctgttcatggggcagaacggctatcgcgtgattgcgcacgaccgccgcagccacggccgttccagccagacctgggacggcaacgacatggacacctacgccgacgacctggccgcggtgatcgacgcactggacctgaaggacgcaatcctggtcggccattccaccggcggtggcgaagtggcccattacatcggccgccacggcagcaagcgtgtcgccaaggtagtgctggtcggcgccgtaccgccgttgatgctgaagaccgccggcaacccggccggcactccgcttgaggtcttcgacggcatccgccaaggcaccggcggcgaccgttcgcagttcttcaaggacctggccacgccgttcttcggcgccaaccgcgatggcaacagcgtcacccagggcatgcgtgattcgttctggctgcagggcatgctcggcggcgtcaagggccagtacgactgcatccacgaattctcggaagtggactacaccggtgacctaaagaagatcgacgtgcctgcgctggtcgtgcatggcgatgatgaccaaatcgtaccgttcgatgcttcggccaagctgtcctcgcagatcatcagcgacgccgaactgaaggtgtacgccggcgccccgcacggcctgacggtcacccacgccgacgcgttcaacgccgacctgctggcgttcgcacgcaaatga

SEQ ID NO: 533664 - DNA, 1650 bp, Stenotrophomonas maltophilia
atggtgaacgcaaccgcgtcgcaaccttccgcacaggccacaggtgcctggtccccgttgaagatccggatgttccgttcgatctggctggcgatcctggccagcaacatcggcacctgggtcaacgacgtggccgccgcctgggtgatggccgagcgcaccggttcaccgttgatggtggcgctggtgcagtgggcgaccacggtgccgatcgtgctgctggcactggccgccggcacgctggccgacatcgtcgaccggcgcaggtatctgctggccacccagggctggatgctgctggtggctgcggtgatggcggcgctgaccgcgatggacctgctgaccccgcagctgctggtgctgctgaccttctgcatggggtgtggcgcagcgatggcgatgccggcgcaggccgcgatcgtgtccgagctggtgccgcagccgatgctggcctcggcggtggcgctgaactcgatcggcatcaacatcgcgcgctcgatcggcccggccatcggcggcgtgatcgtggcccagctcggtgcggtctgggccttcggtttcaacgccatcaccttcgctgcgatgctgttcgtggtgtggggctggaagcgtgacccgaagcagtccagcctgccgccggaaggcttcggtgccggcctgaaggcaggcctgcgctatgccagccgcgccgggcggctgcaggcagtcctgatcaagtcggtcggcttcttcttcttcgccgcggcgatgaacgcgttgctgccggtggtggtgcgcgggcagatgcagggtggggcagggcagtacggcatgctgctgggctgcattggtatcggtgcggtcggcggcgcgctgctgctgccgaagctgcgcgcacagatggaccgcgacctgctggtgctgctggccacgctgtcgctggcgttgagcctggtcgggctggcgctgacccgcagctggtatgtgcttcccgtggtgatgctggtcaatggctttgcctggatcaccgtgctctcttcgctgcagatcgccgcgcagacggcggtaccggcgtgggtacgtgcgcgcgcgctggcgctgtacatcatggtgttctctgccggcatggccgctggcggcctgagctggggcgcgctggcgcagcgcacctcgcctgagctggccctgctggtggctgccgccggtgcggtgatcggcggactgctggtctggcgcgtgcgcatcgccggtactgaagacctgaacctgcgtccggccgggcactggccggcgccggagctttcagtaccggtatcgaatgatcgcggcccggtgctggtgaccattgaataccgcatcgacgaagccgatcgcagtgcattccaggcgcagatgcgcgcgctgggaacgatccggcgccgtgatggcgccgtggtctggggcgtggttgaggatgtggcgacgccgggcatccacctggagtatttcgtgaccccgtcgtggctggagcatctgcgccagcacgaacgcatcaccgccgatgacaaggcgatccaggaggtgctgcgcgaactgcatcgcggcgaacgggcaccggtggtacgtcacttcgtgggcggccatgacccgctgcccaaggccggcgttccgcaccaccacagcgacatctga

SEQ ID NO: 533665 - DNA, 1284 bp, Stenotrophomonas maltophilia
atgctcgtgcttcgcgttctgagcctggcgctgctggccatgccggcgctggcgctggcctgcgacggcggccactgcagcgatgcgggcgacggccaactgcaatgggatgcgtcgctacgcgtgcgtggcctgtactacgatccgacccgcttcggcatcggcggcgcagaggatggctacggcctgctgcgtgcgctggcctcggccacctatgtggaagacacctggcaggcgaagctgcagctgggtgtgcatgccgagagtggcaaggcaggtggccccggccgtaccgatcgcagcgcgttggacgtgcagcaggcgtactggcgctggcagcacggtggctttcatctgcagctggggcggcaggaggccggctacggcagttcgcggctgttgtcggtacgcgatgggccgaacatccgcctggccttcgacggcgcacgtgcaggctggaaaggccgcctcggcatgctggacctgatggcgctgcggccggtggagaatcgagccggtgccttcgatgatcggggcgaacacggtgccctcctgtggggtgcgtacgccacgacggcgcgcggtcagacggcgggccagtgggatctgtacctgctggactaccgccgcgacggcgcgcgcttcgccgcaggcggcggtaccgaacgtcggcagaccctcggcgcgcgctggttcggccaggccggtgcactggactggaacaacgagctggtggtgcagggcggtgaactgcgtaccgccacgggtgacctcgacatccgcgcctggacgctggccaccgatacgggttggcgctggtcggacctgccgctgcagccacggctgggcctgaaggccgatgttgccagcggcgacggtaatctgcgcgatggccggctgggaacgttcaatgccttgttcccgaaatcggcctacttcagcgaggccagcctgctggcgccggccaacctgatggatatccagcctaccctgaccctgcgcctgcacgacgcggtgacgacggagctgggcgtacagatggcctggaagcatcggcgcgccgatgcggtctacaccacgccggcaccgctgctggcgctgccaggcactgccggtggcgcgcgccggatcggcaaccagtacaaatccgaaacccgctggcaggccagcgaacactggcaatggcagctgcagctggcctgggtcgatgccggtcctgcactgaagcaggccggaggccaggacacgctgttcgcctcgatcgttggagcatggcaatggtga

SEQ ID NO: 533666 - DNA, 1971 bp, Stenotrophomonas maltophilia
atgagtcacgatccactcgaccacggccgccgcaacgtggtgctgggcggcagcgccgcgatggcgctgggcctggctggccgcgccggagctgcattcgattccacttccaaggagcgtcgcatgagcacgctggtcatccgtaatgcccgcatcaccaccctcgacccgcagcagccacacgcacaggcgctggccgtgcaggaggggcgcatcgttgccgtcggcagtgacgagcagatcatgcgcggctggggcaacgaagcgaccctgatcgacgcgcagggccggcgcctgctgcccgggctcaacgacagccacacgcacctgatccgcggtggcctgaactacaacctggaactgcgctgggatggcctgcgttcgctggccgacgcgatggcgatgctgaaggcacaggttgatcgcaccccggcgccgcaatgggtacgcgtggtgggaggtttcaccgccgcgcagttcaacgagaagcgcctgccgacgctgcaggaactcaacgacatcgcgccggatacgccggtgttcctgctgcacctgtacgaccgggcgctgctcaaccgtgcggcgctgcgcgcctgtggctacaccaaggacacgccggatccgccaggtgggcagatcgtgcgcgactcgctgggcaacccgaccgggctgctgctggccaagcccaacgcgctgatcctgtacgcgacgctggccaaggggccacgcctgccgatcgagtaccaggccaactcgacgcgccatttcatgcgcgaactgaaccgcctgggcatcacttcggtgatcgatgccggtggtggtttccagaactatcccgaggactaccaggtcatcgagcagctgcaccgcgatgaccagctgacagtgcgcatcgcctacaacctgttcacccagaacaagggcaaggaagtggatgacttccgcggctggagcgagatgctgcagccacgccagggcgacgacctgctgcgccacaacggggccggcgagatgctggtgttctccgcggccgacttcgagctgttcaacgagccacgcccggaattgccgccggagctggaaccggaactgcacgatgtggtgaagctgctggtggagaagcgttggccgttccgcatccacgccacctacgacgaaagcatcacccgcatcctggacgtgtacgagcaggtcaaccgtgaggtgccgttcgatggcctgcactggttcatcgaccatgccgagaccatcactccgcgcaacatcgagcgcatccgcgcgctcggcggcggcatcgccgtgcagcaccgcatggcctaccagggcgaggccttcgtcgagcgctacggtgtgcaggcggcgcggcatacgccgccggtgaagcggatgctggccgaaggcgtgccggtgggtgccggaaccgatgccacccgcgtggccagctacaacccgtgggtggcgttgtcctggctggtgaccgggcgcaccgtgggcggcctggccctgtacggcgatgagaacctgctggagcgcgaacaggcgctgcgcctgtggacccagggcagcgcctggttctcgggcgacgaagcggtgaagggcacgctgaaggctggccagctggccgacttcatcctgctgtcggctgatttcttccgcgtcgatgacgcgcagatcgccgacatcaccagcgtgttgaccgtggtcggtggccgcatcgtgcacgccgacggcgactacgagggcctggccccgcagctgccgccggcgatgcccaactggtcgccggtgaacaggtttggcggctaccacgtgggtggagccgcgaccgggctggccgctgcccaccgccatcaccacggtgcggcctgcactacgcatggcgcccatggtcatgccgcccggcacgcggcaccgaccgatgacctgaccgcgttctggggcgcgatgggatgctcgtgcttcgcgttctga

SEQ ID NO: 533667 - DNA, 426 bp, Stenotrophomonas maltophilia
atgctggccggccatggcctcgacctggccctgctgatgctgcgcgtggcagccggaggcttcctgctgccgcacgcgctgggcaagctgttcggctggttcggaggccccgggctggccggctttgccactgaactgcgcggcttcggcctgccagcggtggcaccgctgccgctgttgctggccctgctgcaggtgctgtccgggctggccgtgctgctgggctggcagacccgcgtcgccgcgcttgcggcggctgccttcatcggcttcaccgtactgttggccttgcccaggggctggttctggatgcgcggcggcagcgagtacccgttgatgtggaccacggtactgctggccctcgcgctggccgggcccggcgcctgggcactggacggccagcgccttccaggagacctcgcatga

SEQ ID NO: 533668 - DNA, 657 bp, Stenotrophomonas maltophilia
atgagccttgccaccgccacgcctgccccggccctgctgtcgcccaccgaccatgccctggtgctgatcgacttccagtcgcagatggcgttcgccacccacacgatcgacatctccgcgctgcgcaacaacgtgtcgctgatcagcaagggcgccaagggcttcaacgtgccggtactgctgaccaccgttgccgaagcgtcgttctccggcccgatgttcccggaactgccggagatcttcccgggccagacagtgttcgaccgcacctcgatgaacacctgggaagaccagccggtgatcgatgagatcaatcgcatcggcaagcgtcgcctggttgttgccgggctgtggaccagcgtctgcatcgtgggtccggcgctgtcggcgctggcgcagggcttcgaggtctacgtgatcaccgatgcctgtggcgatgtcagcgaagaggcccacgagcgtgcgatcacccgcatggtgcaggccggcgcggtgccgatgaccagcgtgcagtacctgctggaactgcagcgcgactgggcacgtggcgagacctacgagctgaccaccggcatcgcccgcgaccacgccggcggctatggcatcggtatccagtacgccaagcacatgttcggcgcgcaggaaggcgggcactga

SEQ ID NO: 533669 - DNA, 417 bp, Stenotrophomonas maltophilia
atggccaccgttgttccgcccgatccgcccgccgtgtcgctggcaccgcagcaggccgccgcattgcagcgcgccctgcgctacgtcgacgagcatctgtcacaaccgttgcgggtgaccgaactggcgcaggccgcctgtgtcagccgcttccacctggtgcgcctgttccgcaccggtaccggcgccagcccattgcgttatgtgcgccgccgtcgcatcgaacgcgcgcggcaactgctgcccggcgcgcagctgccgatggcatgcctggcgcagcagctgggcttcttcgaccagagccatttcgtccgcagcttccgcgctgagaccggctgcagccccggccagtacctggccggtgatgccgccctgttgcttccccctgatcatgtttccaacggagtccatccatga

SEQ ID NO: 533670 - DNA, 333 bp, Stenotrophomonas maltophilia
atgcagcgcctgttcgtgatgttccccgaccgcggtccgggcatcggcctgctgtggctgcggctgtgcgtggccgctgcgttgtgcacgccgggcgcgcaggcgggctggctgtcggcgctgtgcctgctggcggtggcgatgctcgcgctgggcgtattgacgccgctggcggtagtcccggcaacactgggcctgtatgcacaggcactgccgtggccactggtggtgttgccgctggccttgctggcgctgggcccgggtgcctattcactggatgcgcggctgttcggtcgtcgccggctcggccatcgacctcccccattcgggtag

SEQ ID NO: 533671 - DNA, 3021 bp, Stenotrophomonas maltophilia
atgcgtggccgccccttcccgttgcaacgtcgcctgcggacgctgctgacctgcctgctgctgttgaccgccctgcccgcccttgccgtgcagcgtccgccggtgagcggcgggttgcccgattacgagcacacggcctggcgcgtcggccagggcgcccccggcgacatctgggacatcacccaggaccgggatggcctgttgtggctggccaccggctcggggctgtaccgcttcgacggtcgtcgttttgaacgccaggcacctcccgcgggcagccatttcccgtccaccaacatggtcacccttgcgatgggtcgcgacgatgcactgtggatcggctacttccaggccggcatcagccagttcgcgcgcggccagctgcacaactacggccgcgaccagggcgtgccggtgggtgtagtgccacacttcagccaggaccgtgacggccggctgtgggccgcgatcaatggtggactacgcgagttcaatggccaacgctggcggccgctgcccactggcatgggggtgccggaacagcgcgtgcaatggctgctgcatgacagtcgcggcaccttctgggtactggccgacctgaaggtctggatgcgcgcatcgggcgatgccgtgttcaaggacaccggcatcgccgtatcgcagatggcgtcactggcggaaagcccgcagggcgaagtgtggctggccgaccgcgtgcgcggcacctcgccgctggccaacgcgcagggtctgatgcccgagcgcgagcgcgaagcacgacgattgccggatctggtcgccgcgcgcctgcagttcaccgccgacggtgcgctgtgggccacgatgagcccgcatggcggcgtggcccgggtcaccttccagggcgaccatgccatgcgcatggagcgcttcgattcaccgcacgggctgaccgccacctcggccgtgccgatcatcgtcgatcgcgagggcaacctctgggtcggcaccaatcttggcctcaaccgcttccgcgcacgcagcgtgcatgcgctcaccgccggccccagcgacccctaccgctcactggtgcgggccagcgatggacgcgtgtatggctatggcgaggacctcaaactgtacgatctgcgccggccgttgctggacggcaacgccgcgcagctgcaggcggccgcacgccaggcgcccacgccggtctggcagttcgactgggtcaacctggcacgcacggtggccggccacaccaccctgattccactgccggcgccgttcaccgggcaaccgctgcatgccctgctgttcgccgacaacgaacaggcctgggtctgcagtggcgaacaaggcgtgctgcattaccaacatggccaatggcagcgcgaggcgcacttgccggagcaggcctgttcgtcgcttgcattggaccgcgacggccagctgctgctcggctatgccgacggccggttgcgtcgcatgcgcagcacgggcatcgacaccttcgatgccacccagggtcttgccgtggggccggtgaccgcgctgctgcagcatcaggatctgctgctggtggccggcgaagccggccttgccgcgcgcgtgggacatggcccattcgtgcccgtccgcaccgacatggccggtgtgctcgaaggcatcaccggcatggtcgccgacgcacgcgggcacctgtggctcaatggcagccggggcctggtgcggctgcagagcagccagctgcgccgcgccctgcgcaccggcatgcaggtgacgccacgcctgttcgatgcggtggacggcatgccgggcatcgccctgcagagcggaccgatcgccaccgccgcgctggccgatgacggactgctgtggctggccaccaaccagggcctggcctggctcgataccacgcgatcgcatgtcaacacgatggcgcccagcgtgcgcatcggcgaggtgctgtacggcagcgcacaccagcccctgcacgacggcctgcgcctgcctgcgggcaccagccagctgcagatcgactacgtggcgctgtcgctggcacgcccggagcgcaaccgctaccgctatcgcctgtccggcgtcgacgacggctggcaggacgccggcagcagtacccgtgcgtactacaccaacctggaaccgggcagttaccgcttcgaggtggaagctgccaacgaagacggtatctggagcaccacgccggccagccgcagcttccgcatcgcgcccacgttcatgcagacggtgtggttcaagctgctgtgcgcggcggcgatactggcactgctggtgatggccgtacgcgtccgcagtggccagctggctgcgttgttccgtgcccgtctgcaggagcgccacggcgaacgcgaacgcatcgcccgcgacctgcatgacaccctgctgcagggcagccaggggctgatcctgcgcctgcatgcgatcagccagtccgcgcagaccccggcgccggtgcgcagtcagctggagtcggcgatgcagctggccgagcgcaacctggccgagggccgcgaacgggtcaacgcattgcgcgacggtccgttcgccgggcgcgaccttgcatcggcgctggccgatgtgcacgccgagtacgccggcaagggcaccaacccgctgcgcctgaccgtggagggcgcagccccactgctccaagctgacgcggccgaggaggtcttcctgatcgggcgcgaggcgatccgcaacgcgttgcgccacgctgatgccagcgccatcgaggtggagctgtcctacggcacgcgttgcttcctgctgcacgtgcgcgatgatggcgtgggcatcgccgacgagcacgccggccacggccactggggcctgcagggcatgcgcgagcgggcgcagcgtctgggtgccgagctgcagctgtggacccgccccgggctgggtaccgaaattgcgctggcggtccccgcgcggcgcctgtatcaccgacttccatcgcgttggcgctggccctggagcacaccgaagcatgactga

SEQ ID NO: 533672 - DNA, 654 bp, Stenotrophomonas maltophilia
atgactgaaatccctgccccgatccgcgtcctggtggtcgatgaccaccccctgctgcgcgatggcctggccgcactgctgggcgcgcaggccgacctgcagctgcttggcgaagccgccgacggcgaagaggccatcgcgtgctaccagcggttgcacccggacgtggtgctgatggatctgcagatgccacgcctggatggcgttgaagcgatcgtgcggatccgcgcgctcgacccgcgcgcgcggatcatcgtgctgaccacctaccgcggcgacgtgcgtgcggtgcgcgcactgcaggccggcgccagtgcctacctgctgaaggacatgctgcgccatgaactggtcgacaccatccgcatggtggccggtggccggcgcgcaccgatcccaccggcggtggctgccagcattgccgcgcacgtggtggaagaccggttgtcaccccgcgagaccgaagtgctgcggcacgtcgcgggtggcctgtcgaacaagcgcatcggcgaacgcatgcagatttccgagcagacggtgaaggcgcacatgaagagcctgatggacaaactgggggtgggtgatcgcacgcatgcggtcacccaggcgctgcggcgcggcatcatcagcctggacgacagcggccacgattga

SEQ ID NO: 533673 - DNA, 531 bp, Stenotrophomonas maltophilia
atggccaccgcagtacatctgcccgagctgcgcgttgcggtgtcctgggtgggcagcccggctcctttccgcggcatcgcgcgtgatgtggcgcccgccgacttccgcgcggtcgaccgttcgccgttgagctggcagggcaggccgctgccgtggctgccgtatcgcgaagacattgattggggagcgccagggccgcaatgggagcccgcgttgcaggctgcgctgctgcccatcgagacgatggccgcgcgcacgctgtggatcggcggaggtgatgatcggctcggcgattccggtgtgatgatggccgtggcgcagcgcaggctcgctgcggcagggcgtggtgatcgcgatcgcttcctgtactacgcggatgcagggcacctgatcacgccgctgctgcaaccgaccacccaccgccatgatgtggggccgtatctgcaggtaggtggaacgcctgaaggacacgcacgcgctgatcgtgaggtggggccggcggtgctggcgttcttggcggaggccctgtag

SEQ ID NO: 533674 - DNA, 2922 bp, Stenotrophomonas maltophilia
atgacgcgcgatagcaaagatgggtacgactccagcgggcccttcacgggtgaaagcaccgtcgggatccgcagcgcgggcagtccagacatcgtcgatcttccggcggttgccgccacgctgccggacgagacagagaaatcagcctgcgacgtctgccgctccactgggctggccatcctgccggtgcgctacacggtggtacctgccagttgcaacgtcgaccttggtggcctgtcgcccgcagtcgccagcgatattgatgtcagtgcggcgggatacacctacgcgctcagaacgttgcgccagggtctgctgtacctgtactacgagcagggtccctacggtccggagtactgggagtgctacgccatcgccgaaaacggcaccctgtggcgccaacccaccgcctacagtgcgcgcgcgatcgcaggcggtggcctgcccagctgtggccgcagtggccacgatccgatgcgcacggagttcatcaccatccagcgcccgcatgtatgcgggacggtctggctggcctactcccaacacccctggacgccagcgacgctggatcgctgtggagctgactcggccctgcgcgctgagcggatgcagccgatcgagccagccagatggatcacgtcggcgagagcagaaggcgaccaagcgccattgaaggatgccaccgggctggcctcgatcatggaatatcgatggctggataacccctcaggcgatccgccagaccttccgtacagcagcgcactcccgggtgcctccaattcggacggagcgcttcgcaaggcgcggctgcacgcgcatggcacgcgttacccctggtcgcggcgggattaccctcgcagcgacggtgtcgacccgcgccagcagcgctttgaacgcctgaagcaacacagcagcaacggccgcatcggcaatgatcgccaggagtacccgcccatgctgctgggcctgtgggatgcggttggcgtcgtgcacgagctcagtggttactgcaatgacctggtcgcctgcatcaaccagttcaagagcgagcgcgaactggaagtcagcgctgttgaccagatcgaacagatctcgcgcctgctggagctcaacggtgcggtgatggcagggaactacgcagcacagaccgtccgcgaggtggagcggcagcgccgcctcggcaatccctcgcttccctcatgggaccccaaggtaaagctttccgaggaggagaagcgggaactcgcgcgggagtatgagcgccagtttctgccgctctatctgaaggacgcccaggacgcgtggaagaacaagtactggccactgattgacgagccccgtttcaccgcgttcaagaggaacatggacgcgatggcgcaacaggtactcgaccggctgggaccgaagatgtcggtgctggttgcctggctccgccacgatcttctgctggcgacgctggaagactttgacggcaagtctgcggcgcaaggggagtggttcgaggagatcatcacagaggcgatcgccgtgcttggtatgcacgagataggccgtgcgttgctgactgaactgtcccacgatatagaagttaccggaagaaaatccctgctctggcgagtcattgcgaagaacgacgaagagtctcgcaaggagctgcagcagacactcacggcggcgcaggtgtgcgccaacacgattctcgatgtggccggcgcaagctgggcggcatttgtcgcaggcaccgcgcatctgaagtcttacttggccctttaccgcaagttggaggtggcgcagaaggaggctgcgccccccaccgccagtgcccgcatccttcgcgacagtggcgttgatcgcttcgtcactaccgcaggtgcgtaccttctgaatcgatttccgatgaagggcatccaggacactgtcggcaatgccatggtccgcgttgtgctcctgacgcgggcattgatggagcgcgacgaggcgatcagcctggtggccgaagagctgagcagcggccagcagggcaagcgctatttcctggagcgcatccagttctatcgcaagaaggggagtgcactgccgatgcagttcgcgctccgcgatctggagctgcaccatagcgcactggcgatgcgcaagcgttggcaggcagcggcggaaagcagccgcaatgttgtccgcctgaactcccttacggccgtgttggagatggtgaacttcatccatctggcaacaaaggtcgataaggacacgcgcgactatgcgacgttattggcgtccggcatgtcgcttttggctgtgtataccagtgtgcatgaaacggtagccaaggagttctttggggagggcagtgtcagtgccattcggatgaaggttgccggcagtgtgcttgcgggagcgggtagttttattgggttttattatagccattcagatgccaaagcagcaggaaggcaacagcagaccgctgccgagatacttctgcatatcaagtcatttgtgacggcggctgcgggtggcgcgcagttcctgacagcgcttgcgtactcggcccccgtcatcgagcgcagattgggacgcaattcattgaccttgggcctaaggggattgagggcgggaattgaagcggctgcggcgactgaggggggcggagtcgtggcttcgcaggccatgaaacgccttggtgtgtggattctacgattgggcggctgggaagttaccttggctgtgctcgtcatcgaagctcttatatgggccgtcagcccaaacgacctggaacgttggtgtatgaacaatccattcggcagaaaggctgagcgtgaaaaaggggttcgaatcttcagtggtcagccgtatacagcagcgcgagaacagaagttggcgtttgaccaagcaattggctctgtttcgcttaggacgcaatga

SEQ ID NO: 533675 - DNA, 750 bp, Stenotrophomonas maltophilia
atgaaaattaacgtagatgtgtcgtccatgaacggcccgcttgatttggaagtcggcatcgtctccgatcttcgggtcaggcacgttgtggagaatgtattctggagagaaggtgatcgttcaagcatcgcggcgactggtgccgttgctgctgcgctggggttaagtggcccggctgctggaatggcgatgatgtccgctgaggagatgactgagccagttaccagagtggagttccggcttggcgaaacccaagtggaaggattgctttggaactggccattcagtgaaggtgatcgagtgaagatcgttggaagcaggatggaagatggaaaattctttgctctgtcagtactggatgaagataagagaatgattgtttcttatccccatgtcagctctgggagctgggcgcactggatcggtgtcatgaagtacacactgatgttctcattgccaagtgctgcgctatatgtcctggttaccgtccttggatcacttgatgaaatgccttgggactggtcatcattgaaaaaaatgctatacatatttgctggctgcatctcagtttcttgtttcattggaattcggatcggctctcgattcacgcgttatgcaaggatggctgactcaattttccaatctcttggttgggtcaatggtaaatatatgaatttaaggaatatcacgaagttgaataggagtgcggatgaccatcctgctttgggtgatacgtacttcaggtactga

SEQ ID NO: 533676 - DNA, 855 bp, Stenotrophomonas maltophilia
atgccgccggcgcggtgcgtggctgggagggcggctacactacgggccgcggccgttggccgagccattgacgtgagtgccgtgccccgcctgttgctgctgttgtccctgtccgcgctggctggttgtgccagtgctccgccaccgccggcccactccgatgcgttgtggcggttgatcgagcgtgactgccgcggggccgaaggcccgcgtggtgactgcctgcaggtggaggcggcggtggatcggcgcgatgtgctggtcaaggacgcgcacggcgactaccagttcctgctgatgccgctggacaagctgagtggcatcgagaaccgcagcctgtaccggcgcggcgcaccgaattacttcgccgccgcctggcaggcccgcggccataccgaacgggccctgggccaggcgctgccgcgcagcgtggccagcctggcgctgaattcaccgcatgggcgctcgcagcaccagctgcatatccacgtcgactgcctgcgtgcagacgtactgcaggccctcgatgcacacgcggcagcggtgggcaccgagtgggcgccactgccggtgctgctgcgaggccatcgctaccaggcacgcctgctgccgggtgcggagctgaccgccaatccgctcaacctgctggcctatggtctggcaggcgtggacgacgtgggccagtggagtctggtggtggcggggcgtgaccaggtacagggcggcccgggcttcattctgctggccacccgcgtggacgcggaaaccggcaacgaggccagcggagaagaattgcaggaccatgcctgctcggtgctgaccggcgtcggcgaagtgctggagcgggtgcgctag

SEQ ID NO: 533677 - DNA, 306 bp, Stenotrophomonas maltophilia
atggacaaggctggatggcaggtcgcaagcggtgtgctggcaatggccctgatcggaacgggcttcgccctgatggctacacgcggtgtcctggcgcaagagagaaacgaccgccgggagtgcccaacggccgagccggaaactgtcattgtccgagagcatacccagcccgtgacggtgcagatcgacggcatgccagttcccgacaacgtgagctgccgaggcggcgtgtatctgatccggacagagcaaggcatcgagtcgctcaccaaaagcggccgcgcgatctcctgcagcagcccttga

SEQ ID NO: 533678 - DNA, 1566 bp, Stenotrophomonas maltophilia
atgcgttggctcgctcgcatgttcgccagggcgattgttcgccgtatcgcgtacgtcattgttgccgcactgttggcgcagctcgcgttgtccacgaaagcgcacgccgtggattgcccaactgccggtggcgggcagaatcagcgcgtatgtgatcgaggtgtcgcgctgacgatgtgcaaggcggcggttgccagaacgctggcgcgcatgaaggcgagtccgacgcagtggggtgagccgaccgtgcgacaggactgcacggggggcactccagatgcgagcggatacggaaactacagctgtgccgtgcaggagggaccgaacggcggcgcggtgcgctgctacaactctgcgggcgataacgcgcaagaattctggtactacgggacgtgcgccatgcgcaatcagaatgcgctggccgatgcggcgcttgcctactcgccgtcgccgacttgcatcagcggctgcaaggtgcagggagagcctttcacgtcacaaacaggcggcgtgaagctgtacgggatgcgcaaccggacgtataccggcgacacatgccagacgcagaacatcaacgccaacgaaatcaatcagcccagcgaatctggcaaggacaaggaagagaagaagccaaaagagccggaatgcaccgcccttggcaacggccagaccggttgccaaaagccgaacggcgactactgcgcaacttcttcaaccggtaaaacgttctgttggacccctaatgagaagggcaagaaagcggacggccctgatgctcagtctcgcgatgagaagggcaaagctgtcgcgcctccaaccacgccacccgcgcctgataaagactggcagcggaccgagggccaccagcaggaggcatgcataaacaacacatgtgtcacctacaacgtgaccaactttggaagtaccggcaaggggaacgccaagaactcatccggtgacaacagtcctgacggcagtggcaacacgagcggcaatggctcgccggggaagggcagtggcaataacggcggcaaggaaggcgagggggactcagcgagtgacagcggcaactgcgatacgccccctctgtgcactggcgacacgttgaagtgtcttcatctgcgatacacgtggaagagccagtgcaacaccactaaggatgaaattgcgggtggcgagagttgctcggccgttcctgtgtgcatcggaaagggctgcaaggcgcaggaatacgcatcactcctccagcagtggcgagggcgatgcgctgcggagaacgaccgcgcaaagctctctagcgatgctgcggccggcgcggcagatgcggccggggataacgaggcttccgccgtttccgatctatggaagaaggggccaggacaagacgggcaggggctcgatcgtggcaagttgacgctggggggtggggagcttttcccagcgattgaaattatgggtaccgcgtgggcgccgccagcgcagctgtatacggtgctggacatgatccgacagatggtgagcgcggccggcgttctcgcagctatgtacatcctcttcaggaagtga

SEQ ID NO: 533679 - DNA, 162 bp, Stenotrophomonas maltophilia
atgattccggccccacccattttcgttactgcgccagtcgttcagatggcaggcgatcccctcgatctgttcctgcgcatcagtgtgttcgcgttcggcgtcttcgttctcggcgcctgcatcgtcgtgtggattgccgacgaccgcgagggtggccgatga

SEQ ID NO: 533680 - DNA, 462 bp, Stenotrophomonas maltophilia
atgaccgccgtaggtgaactgctcgacgccgcccgcgaacgcacgggaatcccgtctgacaacgctttggcggcaagacttgggattcagcgtcagcttttgtcgaaggcccgcgcgggcgaaaagccgctgtccgatgagcgaattgcgcaaatctgcgccctcgccaagctcgacggccccacttggatcgccatgattcacgccgagagggcgacctcagccactgagcgggcgctatggcggctcatgctggaccgaatgggcgcggcggctgcggtcgtcgcgctggtagcgctgtcgttgccgagcgtcggaaacgcaaaaaccgcccaaattcaggcggttagcgatggtctactgacccattctgtatattatgttcaatgctctgtgactgacgccttccttgcgtcggcctcggctcctactctggcatgttgggcggcctggatatcctga

SEQ ID NO: 533681 - DNA, 813 bp, Stenotrophomonas maltophilia
atggcggcagtgcggccagctgctgttgccagtaacccagctgcgcctgctggcgcgcctcgctcagccagctgcgctgccagtgtgcgtaatcgatgtactgcagggccagcggctccagtgccggaccctgcccgcgtgcggcctggtaggcctgggacagctcgcggcgcagcacccccaccgaccagccatcgccggcgatgtgatgcaggcacagcgccagtacatgttcctgctcacccaggcgcagcacaccggcccggatcggcaggtccacggccagatcaaacggcgtgccggcatgggcctgcacgtactgctgcacgcgcgcatcgcgctcggccggcgggtgctgcgagcagtcttccagcgccacctggaacgcctccaccggctgcacgcgctggcgcggctcaccgtcacgctcatggtaggtgctgcgcagcacctcgtggcgcgccaccacggcctgcagtgcctgcaccagtgccggcacatccagggccccgtgcagcacgatggctgcaggcatgttgtaggtggcggccggaccgtccagctgggccaggaaccacaagcgctgctgggcggccgacagcggcgcatccgcgccgcgtgccaccggcaccagtcgggcgccctcctcgccgccctctccagtaccctgcacgcgcagcgcctgcgcggcgatggtcggcgcttcgaacacatcgcgcacggccagcaccaacccgtgatggctgcgcagctgggccaccagcttggccgccagcaacgagtgcccgcccaggtcgaagaagcgctcgttga

SEQ ID NO: 533682 - DNA, 441 bp, Stenotrophomonas maltophilia
atgtccgggatcgaaatcgactcgatcgctccccaggatgctcgcctgtgggcggcccgcggccaggcgcttcaggcgcttgctgcgggagacatggccgccgcgcttcgcaccatgggcatggtttcctcgcggatcatggaccgagacgaagcatgggagatcgcatcgaacgcggtttccctccgcatcgccgccggctggacgcgcgacatgctgtacagcagcaccgaggccggccgggcgccgtgtggtcgcggttactacctgttctgctccggggccattgcggtctgctatttcccgatgacctgcatcaccgacatgagcggccggggctaccacttccatatcgcccaagacctgctcaacgagcgagatccaagcccctacgcaatccgtcgtccgaccgtaccgcaacagctggagatgttccgatga

SEQ ID NO: 533683 - DNA, 603 bp, Stenotrophomonas maltophilia
atggctgactggcttgatcctggcggccgcagaggcgcgcgaactggccacgcagcagttgcgtacggtggtgtggggcgtgctggcgatgggaggcagtgcggtgctggtcggggtaatgcgcggcagcggcacggttttgctgccagcgttgctgggcatggcagcggtactgctgctggagctgccgttggcgatgtggttgcaggcgcggcatggtctggccggcctgtggtgggcgtggccgctggggttgctggcgatgctggtgatgcaggtgttctgcttcgcgcgttggcggcgccgcgtgcaggccggctctaccactcggacggatcgcatccggcgcggatgcaggttttctgttttgctcgctggcggccggctctaccactcggtcggatcgcatccggcgcggatgcaggtgttctgttttgttcgctggcggccgggtgcaggctgggtagtgccggcccccggccggcaatccgcaatggacggagcagccggccagcggccggctctaccactcggacggatcgcatccggcgcggatgcaggtgttctgttttgctcgctggcggccgggtgcaggcagggtag

SEQ ID NO: 533684 - DNA, 237 bp, Stenotrophomonas maltophilia
atgtcgattttcatggttaagcggttgtatcggcagggtcacggtgatttcatcgctgcccaagcgaatgtctacgtacggatgaattgcggtcggctgcactttgtccgcaatctgcacgggaaagtcggccatgagcatgaaggcaactacaccttcggcgtcgacgcaccttccggcgaacttgtggttgatgccgcgcctgaagtcagtgttgacgtggtcaggttgagctga

SEQ ID NO: 533685 - DNA, 354 bp, Stenotrophomonas maltophilia
atgttccccaaggtctaccgtaccgtccggacgccggcagttgccgcgatcgttgatacacgtattggccggcatggcgaggtatcccagaccgagacccgcccttacatcacttggcagatcatcagcgggcagcctttcgacaatctgagcggtgcgcctggtggcgacttcaccacggtgcagctggactgctaccacgctaccgatgccggcgcagagcaactggcgctggctgttcgcggggcactggacgccggcctgatctgcaaccgggtagtgatcaacagccgggatcctgacacgaagctttaccgggtcggcatggaggccgacttcatcgaccagcgctga

SEQ ID NO: 533686 - DNA, 423 bp, Stenotrophomonas maltophilia
atggcacgacccgcacacaagccgaccaaggccacgcagctgaaggtcgccgtcgctgccggtggcggcatgcggcacgaagagatcgccaacgcgctgggcatcaccatcccaaccctgcgcaagcactacgccaccgagctttcctcgggcgcgtccctgaagcgaatggaggtcctcgcagtggccttccgatcggcaaccaagaagggcaacacgtcggcggccaggctctacctgcagcattcgccggagttcgaagtggcgcccgcagcgcctgagcagcaggcgccggaggccgcgaagccggaaggtaagaaggcccaggccaacgcgaaggcggtgggtgccgagctcggtaccgggtgggaaggcctgctgggcgagaacgtcacacccatccatcgggcagcgggtaagtga

SEQ ID NO: 533687 - DNA, 207 bp, Stenotrophomonas maltophilia
atgtttgtactttttgccagccacatgatccgtaaggaccacgtttcagccatcagtctgcccttcgacacgggcgcagagggttcttcgaacaggtaccgcgtcgccgtctatctgctgggtgggagcacgattgaaggctcgttctcgaatgacgcagacgccatgcagcagtatcaggcgttcaagggtgccgtcgagacctaa

SEQ ID NO: 533688 - DNA, 201 bp, Stenotrophomonas maltophilia
atgcaccttcttgttaaccacgctggcggcccgggattcacgtcgatcaaccagttcgaggaggctcaggagttgctccgcaacggcacattggcgatcactgacagcgagaaattcatcgagacgctggtgttcgcccagaaggaatgccgcgacgccatcgaccgcatccagaaattcctggccacgctgactgcctga

SEQ ID NO: 533689 - DNA, 414 bp, Stenotrophomonas maltophilia
atgagcaaaaaggatatcgacaccacgatgctcccgttggggcgtggtactcgccgcgtttcgcgagaagaagtgcgcggcacgacccatcttcgcctgcgctggaccttgggcgagaacgagtacgtgtgccactacgaactcgtgatggcactggacaaggacgacattcgccgggaggtctacaagaacggcgaggacaccggtaagcggcgagttcagaaggtggtgaagcttgatttcacccgccgtgcatcgggccgcgacccatgcgtgatgtggccggaaccgcatctcttctacgaccctccattcagggatggagcccacgcgaaatgggacgcggtgaagctaggcaacctgcccatctacgtggttgctctcgacgggacctatctgcaggaggtcgcataa

SEQ ID NO: 533690 - DNA, 234 bp, Stenotrophomonas maltophilia
atgaccaccgacaacaagaccctggctgttgatgttctggctgtgttgggcgatgccgagggtgtactccgtatggatcactacaaggcaattccggatgacttgaaagtgtctcgtgccgcagtcgccgagctgatcgaggcctgcgaaaggctgcagcagcatccagacgatctagagattcaagccgacttctgtcgtgccctcgcccgcgtcaaaggagaagcagcatga

SEQ ID NO: 533691 - DNA, 3786 bp, Stenotrophomonas maltophilia
atgtacatgattcgacacctcctcgatgccttgcgcagccactgcgcagcttcggcactgctggcaatctgcttgcttggggtcagcccatcggtgttggcgcaggcctgggtgcggctaaccgggcctgcacagaccgtctacactgcgccggcaaccgtaagcatgacggtcgagttcggtagcaccaacggcggccccaaatcggaatacatcgacaatgtccgcttgacgcagaacggcaccctagttaccaacttcgcctacggcacctataccgtgcagggcctgccgcccggcacctacgtctacatgcttaccgcgcagggcatacgcaacctcaatggtgaggaagtggtgcggtcgctatccagtggaccggtgaccataacggtgaatgcaccgcctgcgcccatcgattcggctgagaaggtgaccgcatctctttccaccaatcgcgttgtggccggacaacccttcaatgtcagcgtgacgatgaagaacaccggtgagacgacttggacgcctgaaggaggctatgcactagccatgcctcagggcggctggggtgtaggtagcatcccggtgtctggacctgtggccccgggccagactgccacattcaacttcactgccacccccaactcgggtgccaccaatggcgggtggtacggctttcagttgcagatgcagcgcaatggcgcctggttcggcttggccacagggcagattggcttctttgtctggcagccagtcaacaatgccgatttcgaagcccagtcggtgccaacgtctatgaagaccggtgtcgcccaggtggctacggtgcgcatgaaaaacaccggagatatcgcttggcagccgggtagctactggctgggttcgcagaatcccaccgactctaccgtatggggcgcggtacgtactgcgctgccacggacggttgcgcctggcgaatccgtggacatacccgttacgctgcaggcgccgcctacgccaggcacctacaacttccagcgccagatgtgggcggatggtaagggctggttcggccctgccacgccaaatgtggcgatcaacgtcagtgccccggtgaactcggcgcgaatggagggcggtccgatgccgctgggcatgcagaccggaagctctacgcaaatgcgcctgctggttcgcaacaatggtgagacaacctggacctcagccgccggctatgcattggcatcggaaaatcctgccgacaacatggtctggggcatgcaacgtgttgcgctaccaagcagcgtgccgcctaacgggctggtggagttcgtcttcacaatcactgctccctccacgccgggtagctacccgctgcagtggcggatgaaccaagaaggcgtcggccggttcggtgagtccacgccgaacaccaacgtgcaggtaacgctgcctccggtgaagggcacatggaaggaatacgatgcgctgggtcgcgttacatctaccgcccaagacacagacgatggactggccatcactgtatccacctaccagccaggtaattggcaaaccacggtggatccgctaggccacacgacgcagatccaataccaagcctttggtaccccggcgcagtcgaatcccatcgccattcgcgcaccggaaggatcattcacagacgtgctacgtgaccgctacgcccggcccaccgctgtgatccgacgcaacgcagacagcagcgtgcagctacgccgcagctttgcctatggcgagggcggaactctgtgcaagctcatcgagccggaagcaggtacgacggtaaccgcctatgatggcgccggtaacctggcctggtccgcgagtggcctcaacctgcccagtccagacaactgtgatctgacagctgcacagggctccgggcgtcaggtgacgcgtgcctacgatgtccgcaaccgtatcatcaccctgactttcccagacggcaacggcaaccagagctggagttacacctctgatgggttgccggcggaggtgcagaccgcaaacgacggtggtgctaaccacactatcaacacttacacctacaacaaacgtaggctgctggtgggggaatccacatcccaggccggatggtttacttgggcactaggctatgcctacgacgccaacggcgcacgatcgggcattcagtatccaagcggaacctacattgcacttgaccccaatgcgctcggtcaggcaacgcgggtaggcaactatgtcctcggcgtaacctaccatcccaatggcagcccggtgggcttctcctacggtaacggcgtcaggttcgagcaggcgtttaacatccagcaggcgcccagcagcatcggtgctcttccgagcgtcagtagcttagcgtatgcgtatgatcgcgtcggcaatgtcacccgcatcactgacatggtcagcgcaggacgcgaccgccagatgagctatgacggtttggggcggctagtgcaggcaacgtcccccacctttggtggcgacggaagcctgctatatacctatgacgtgctggacaacatccgcagtgcgcgggttgcgagcggcaaggaccacacgtacgtatacgatgcgaagaaccgcctgaccaatgtcatgtccagccaaggcgccaccaccatcggcttggcctacgacgctcaaggcaatctcgcactccgcaacggccaacctttcatctttgatatgggcaaccgtctgcgctctgctcctggaccggaaaactaccgctatgacgcggagggtcgtcgcgtactggcgtggttgcagggcagcggttcgatcctatcgatgtacgatggggacggtaagcttcgccgtcagcagagcgagcgcgacggcaaaagtcgcgagtacctttaccttggcggtatgctggtagctaccttggaaaccggtactgatggcgtgactcgtccaacctaccagcatctggatgcgttgggatctccggtggccgtgaccgatgcctctggaactgtggtcgagcgcagctactacgagccctatggcgaactacgcaatcgtcccctaaccgatggcatcggctacgccggacatgtttcggatagcgcaaatagcctgtcctacatgcagcagcgctactacgacccgagcatcggcatcttcctgagcgtggacccgattacggctctacagaagcccgcctcgcacttcaatcgctaccgctatgccaataacaatccatacaaattcatcgatcctaacggagaggcggggcgtgtggcatggctagttcggctgacggcgaatcaggcgaacaaggtagcccgcatcacacaagagcaagcagttgctgcacgccgggcggggcagaatgtcgttgcagatcgcaggcaagtggcaagtcagatcgaaacagctgcgcacggaagagcagatcagttaaagcatgcggctcatgaattggaagatggcagcaaaggcttgccgcactatcaaacagaaggtattagagggcattcgttctggggcaaactgagtgtggctgcgctggcggcagcgggcgcacttgagcaggtggcagaggcagcagagtacattccggaccctacgccgcgaccggctgagcaggccgatatagatagatggaacaacttgatgggaacgatcaataagtccacgggcatacctatgccaggcgtcaaggtcgggcaggacgggggattccaaggctacttcaatgttgggggaagacttgattccaagaagctcgacgaaaagctaaatggaaatagatag

SEQ ID NO: 533692 - DNA, 2340 bp, Stenotrophomonas maltophilia
atggtttccagaaaatggtgcgtagcgtcagcaattgcatgcctcgtctgcagtactgcaggggcccaggatcgggtcgaacccgagtcgcaatatgcgaacaaggttggcaaggctcagcacactgggcagctggatgaaggttcgtttggtgaaaacgtctcccttttcaacgggcaactcgacttctcgataacggatatcaccatcccgggcaacaacgctctgtctgtagcgctccgtcgcaagcggacaatcagtgagcgttacctccatcagaatgccagacctggcgacctggccggcttctacgattgggatttggacgtgccctacctggaaggcattttcagttcccgtggctgggtggttggggcagacgatgatgccagccgctaccagcgctgctcattgcagaagaagccctttatcggggaaagcacgccctacccggaggacctgatctggaacggatataacctgcacctgcctggggagggtgatgcgcagttgctggttgcctcggccaacatcccaatgccaagcgatgggaaaagctatccttgggtgaccgttggtgacacacgcgtgcgttgcttaccgcagactcagaacggtgttcctggcgaggcttttcaggtcgttactccgcagggaatcacgtactccttgaactgggtcgtcagccgcgagatgcccctgtacagttacaaagacaaccccctagcgcccacccgctatctgtcgcgtagccatgttttcttcatggccacccgcgctgaggaccgcttcggcaactgggtgaactacggctacacaggcgacaagctgacttctatcagtagcagcgacggccgcagtatcagcatcacctatactggggagcgcatcaccagtgcgacggccaatggccggacttggacataccagtatcgtgagccgggagcgctggggtcgcggcttgacgggggtctagccgccgtcattttgccggatggctcccgatggacctattcacccaatggaaccttgcgcccaccgatcttcggccccacgccggagggctctgaatgcgatccccgcatgcccgatgtgctgggaccctatatctacaccgtgacccacccggccggggcgacggccacttataccctgaactataggtacttctaccgcgccactgacatcagtccctgctcgtccagcgagcgcgcgccttatgtggcggtttggaacctgcagcagcgctcagtcaccggggccggactatcagggatgaccaccacctacgcttatgaaggcacattcgggccgcagggccgctggaccacggtaacgcagcccgatgggtccacgaaccgatatcggttcggcgtacgaccgcgccaagacgaaggccgtttgctggaaagccggacggtcagcacagcgggaacgaccctggaaacggtgaactatgagtacctcgctaaggagcaggcggccgggcagttcgtgccgcttgtggggcagtccctaagcgccatcacccccacagaaggtctggtcgagccgcagcggctcgtcacgactgttcgcgacggaacgcagtacgtggagcgagtggatcgcttcgatgctttcgcacgcccggtggaaacattcagcggcagcgatttgggtgtcgcaaaggacagaatcacctatcacgacggcctgggaagctggacgttgggccagaaggcggtcgtggcggacatcgactctggcgtggaaagctcacgcatagagttcaacgcgcagtcgctgccgtacaagacctggacgttcggcaagcttacctccacgcttgcatatgattcacagggcatgctcagtcagagcatggatggcaacggcaataccacccacttccaggactattaccgcgggactccacgcacgattctctatgcagacggtaccggcattaccgcgctggtggacggtaacggctggcttttgaaccggaccgacgagacgggggcagttaccagctttggctacgatccgatgggtcgcctgacccagatcaactatcccagcggcgacagcgtgggatggaatgccacaaccttcatacgccaacgcaccgccagcacggagcggggtttggcaccaggtcactggcgggagctcgaggcgactggcagtgcacgacgcataacctaccgcgatgtgctgctccgccctgtgctgtctgaagaatacgacgcgacaaatcgcggcgacacgctccgacaggtgattaacagttatgactatgctggccgagtgaccttcacctcctatcccggccgctatcgcatgggggagccgtga

SEQ ID NO: 533693 - DNA, 903 bp, Stenotrophomonas maltophilia
atgactaataaattcaatgacttgaaagtaagcgctggccgtaaggagcgttgggggcaggcccgccggctagagttcattgactcccgtctcttgtgggcgggaaaggtcaatcgttccgacctggtcgagttcttcaaaatttcgccccctcaagcaactctggattttgctgaatacgctgcacgcgcgcccgagaatgcgaagtacgacgccaaggaacgcgcgtacgttgcaatgccgacctatgcgccgatatttaccgaaggatcgagcgcccgatatctggcagagctgcatgccatcaccactggcttgctgagccccgacctaagcttcctaggcaatccgccgccttcagagatcgtgagcttcccgacccgtcgggtcgatatcgggctcctgcgggagaccttaactgcagttcagtccgctaagtctctggagatcacctaccagaccatggcacgtgctgagccagatgtaaggtgtatctctcccttagcactggcatacgacgggtttcggtggcacatccgagcctactgtcacatgcgcaaggactaccgcgacttcctcttcgcccgaatcttgacggccaagccatctggagacgctcaagccgcgatcagtggagacgaacaatggaaccgcataatcgatgtcgagatagcccctaaccccgcgctctctgagggcgcgcggcgagttattgaacttgactacggcatgtcagacggaagattgaagttgaggtgcagacaggctatgggctactacttgttggcacgcttgggtctcaaggagcaggagaacgaatccgcaaaatcgcagcagatcgtccttgccaatcgcgctgaactgtcaacctacctccccaacattgtgcggccggagcggtag

SEQ ID NO: 533694 - DNA, 636 bp, Stenotrophomonas maltophilia
gtgtctgcaaaaggaggactgcttaggtggatcggagcctttgtagctttcgacatggcgctgctgacatatgcactgacgcccgattggcggtggggtgccgccgagccgaaaatgatcatcggcgggctgacgacagtgctgtcgccccccatgctgtacatgatgacgtcagtgttgtcaccggagctgaaggcagcgatcgtcttctggaaaactaggtatcacttgcctggctattcggcattctcgaggcacctgaaggaggattcgagaatagacgccgacgcagttgcggcacgacggggtcctcttccgtcggacccggatgcccagcaacgcctttggtacaagatttaccgcgaccatcgcaatgatgaggcggtccttgatgccaatcgtcgctatctcacttttcgggatctggcagtagtctcactcatggtaaccgtggcggctcccatcacactcactgtctttgatctcggcttcgcccgcggtcccgtcgcagcagttttctgtcttcagtaccttggcgctagtgtcgtggcccgcgtagccggtgtccgtctggttcgaactgttctagccattgagggaacccaaccaggttccgctgctcctggcgccgcatga

SEQ ID NO: 533695 - DNA, 1338 bp, Stenotrophomonas maltophilia
atggaacgagtactcgaggtctaccacgacggtggtccggtacgtctggtcgacgaggctgaagtcagtgcaagggacaacacatatacagttgttgtgggggagaatggcgttgggaaaagccggctgttgtcggacattgctcggggacggatcagcgactacaacctaatgggtgctcggcgccttagcgcctcccccttgcctgtggtcatagcggcatcaaccagtccgttcgacaagtttcctgccccgccgaggcgacaagcgaaagcacagaagaactaccgctatgttggcatgcgcggtgaaggtatttatggcgcttcatcagctgtatcgctgctgtcttccgcagctcgcggattgctatctaaattgtccgaagctccacctagcttgaacctactgggtgttctggattcgctgaagttctctccagtgttccactttgtcttaaagccgcagtttgaacgctcgcgcgagaatgagacgtcgacccgtcacaggggtgacagaacctccttcaagtttggcgcctacaggtacagcttcgatacccgcgtcgcatccatccttgaggcgaccgaaagcttacggacagtcttgagggacctccacttcgcctctgcccttatggatgcgcctggcgcgttgcgtctcacagttgatttccgaagtagcgtcgcaacacttagcggggcggtgattgaaccaaagcatcttggcgcaattctaaggttgttcgacgagaatctgcttcggctgatggacatcgaggtggagaaaaatggacggcagcccttcagccttaagcgggcaagctctggtgagcagtgcttgcttgtgttgatgctcggcgtcgcaggacacatccaagaccactctctgatactgatagacgagcccgaaatcagtctccacccagagtggcaggagcgcttcatggcgctcctgcagtccgcgttctcacattacagcggctgccagtttgtgattgccacgcactcgcctcagatcatctctaggcttagtggccccggctccttcatctgtcacctacgcaaaaggaagctctatcctgcatcgcagtttcaacgccgctccgcagacttccaactggcggagctgtttgatgcgcccggcatgatgaacgagtacatctccagggtatgcttcaatctcatcgcccaagtgcgcgtcggccgcccactcacgctcgaaatgaagcgcgaaatcgactggctgttcgagatgcgctcaaagcttgaccctagcgacaagctgatagcgttgatcgactcactctcggcgcttctcagggaggagcggacttga

SEQ ID NO: 533696 - DNA, 348 bp, Stenotrophomonas maltophilia
atgtacctaggatacatgtttgagccactcaacctgtgcgtctgctgtcctgattgtaatgagtacaagagtagccgggaggttcatgtcgacccacccgtcaagggttacgttcctgtggcttaccccaatgatcctgagaagtttaggatcgtacacccgcactttgatgagtactcaaagcacattaggcgggccggcatactctacataccgatgagccagaagggcagctacaccttctatgtctgccatctaggtcgctatcttagtgagctgggtatgtccgatgagctcttcaacgacttgaatgccgttatgcaacgtcataggttccatgaggggtaa

SEQ ID NO: 533697 - DNA, 606 bp, Stenotrophomonas maltophilia
atgccactcctgcgggatggcgcgtggtgggatactcactctccttactaccgttatgcctatcaagaggccgacgcctacgtccttgctatggagcggctgactgctggggaagcgcagtggacgaaagtgcatggggctgccgggttcaatgacgtgtttgcgagtgatgtgccggatggtcttattgagcttcacgaggccgcctatcgccatgccattagctgccatctttttgtgtgcatggctctggagggattcatcaacgcctacggagttcgccggctaggcgaacggttctaccagcaaaacctggagcgcgtgggcatcacagagaagctcgcaatcttgggcgtatgctgccgtcagtggaccctcgcgcctgattcagaagttcgtagggatttcaggcagttgttcgacgatagaaatcgtcttgtccatcccaagacgagagagatgcgctgggacaggctcgaagatgcgctttacgggcatccttcagagatcgcgctccacgaaactatggctcgcttggagagatgcatcgacttcttgtgcgaggcagacaacgacatccaccgggatttctacttccgtaggtag

SEQ ID NO: 533698 - DNA, 276 bp, Stenotrophomonas maltophilia
atggcgaccaaaacgatctaccaaagtgcataccttcggttggtcggccagcttcgcgagcgacgtgagtcgctggggatcagtcaaaccaagctggcttcccatctgggatggccccagcagagaatttcttcggtcgagtccggcgcacggcgcctggatgttctggagttttgtctcatcgcctctgccctggggctctcccctaccgaggtctctgagcacgtatcgaagctggtgaagagcgtgcgtgccagccagattaaggacagatag

SEQ ID NO: 533699 - DNA, 423 bp, Stenotrophomonas maltophilia
atggaccttcaagctataggttcttggggcgcgaactatctcatcagcctgatcgagccatgggagttcaaggagcttcagatcaccgatctaccggagcgtgcgagatcccatggcctacggtggtacggtctgccaattgtggatggcaacgcgcccgaggccatattccttcagagctggaaggacctggagacgcgcttctgcgacgcactgcttgagggagagagaattgtcgtccattgcaagggggggcttggtagagcaggtacagtcgcctgcatgcttctcctcgcaaccaagacctccctgagcagcgaggatgcgatcaagcgcgtgagaagcgtacgccttggtgctgttgagacattggagcaggaggagttcctgcacgagtggggatctgcccgccatcgcctctag

SEQ ID NO: 533700 - DNA, 237 bp, Stenotrophomonas maltophilia
atgtctcttttccttgtgtgccccgaactgcaattcacattggagttggcgctaaacgcggctgcggaagagctagtcgagcggcagatagagcgcatccagcaggatggtgacagcactcgatttgagctccggctcgcagatgaaattgggaagatccttcccgagaccgtcgactgggacatcaaagctccgacgacggctcagatggcgctagcgcactccctctgccagtga

SEQ ID NO: 533701 - DNA, 1047 bp, Stenotrophomonas maltophilia
gtggcgaaggtcatctgcctgttcaaccacaagggcggcgttagcaaaacaaccaccgctttcaacttaggttggatgttgagcctcatggggaagaaggttctgctcgcagacttcgatcctcaatgtaatctgaccggcatggtcctaggatttcgcgggcaagatgatctcctggcgctctatggctcagcccctccaaacaatgtgagggatgcactcgcaccagcgttcgagtcgaggcctgtcagtgttggcgcggcaaattgctatgctgtgagaccggacaacagcgaaaatctactgctacttcccggccacatcggactgtctgagtacgagacgacactcggcgtagcgcaagagctcagtggctcacttctgccattgcgaaacttgcccggctccatccgctacatgatcgatgcaactgccgacaagtacggcgtcgactatgtactagtcgatatgagtcccagcctcgggccgctcaatcagaatctgatcgcgacctgcgaccatttcatcgtgccattacacccggacttcttttcgtccatggcactgaactctttatcacgagccttgccgagatggcagcagtgggcaaagacggcctcatcgatagacgcacttaaaacggctgactatccgttcccgcaaccgcgggcgaagtttataggctcgatcatccaaaagtaccgtcctcgaaatggcggcgctagtagtgccttccaaacttggatcgaccgtctccacgaaggcatgagacaagagttggttccagcactgatcgaatccggaatgctcgatgcgaaggactacgaagatcgggtgcacatgcatccttgggtgcccctgatggaggtcggagatttcaacggcctcattgccctgtcccaagagcatcaaaccccagtctacgcattgaccgaaagtcagctaggcgtcagaggtgccgtgctgcgtcgaatgcagggcgacatgtccaaatttagcaacgccttccgaaccctggcggaccggatcatattgcttaccgcctag

SEQ ID NO: 533702 - DNA, 645 bp, Stenotrophomonas maltophilia
atgacccctatccagatctttgactctgtgtgggaacgcgtggatatgctcgcggcattgcacgcgtatctgtcaacacaggtgaccgcagttctgagggtcgatgaactgctgcggtcagaatgggttgcccgcgtagccgcgttagacctgtatgtccatgaagtcgtcgcgcagcgcatgctaaaaattcagtcgggcgatcttcctcccacccctaagtacctgaacttccgagtcagcatggagactcaggcgagaatggttgcaggcgcgggctcggcagcggcccttggtgcgttcgatctcgccgtacgtgagcaattgggctttcaatccttccagagtccggacaagatcagtgatgcactcaaactctgctcccaagtcgatctttggagcgaagtggcaacccaccttcagacgacgaagggcgacccatctatcacttcaaagtcactgaggaacacgctctctgcaattgcatcgcgcagacacaagattgcacacgaggccgatcttcagcccacaacgccgcgggagccgtggccaattagtgtttccgatcttgaactggttcgaggctttataggcgccatcgttccagccatcgatgaagtaatcactcagaacgatttcacctga

SEQ ID NO: 533703 - DNA, 1656 bp, Stenotrophomonas maltophilia
atggacatagatagccttcggcttgcatacagctacgactcacttggcgccctattcgggatccctgggtccgcgctcaagaccaacctctacaagtctcgtgggtacacgagctttacgattcccaagaaatctgggggtgtccgggccatctctgcaccagggcggttgagaaagacgctgcagcgaaagcttttgcccgtcctatacgacgcctacaagatgggccccaatgtgcacgggttcgctcgcggccgtagtgtaagaaccaatgcacaaccacacgctgcgcgaaacgtcgtcatcaactttgaccttaaagacttctttccttccataagcttccaacgcattcgaggcgtgtttctcgccaatccgatgcgtctcgactggtcagtagccaacattctggcgcagatgtgctcactcgatggcgttatgcccgccggcgcgccgacctcgccagtgctgtcaaacatcatctgcgcgaaactcgataagcgactatccacgctcgccgcccgactgggcggatcgtacacgcgatatgccgacgatttaactttctcattcgataggccacttgctcaacttcgaagcatcgccatgctagacgaggagggcaaagccgttgttggcgcatcaatttccgagattgttaaatcagagggattttccataaacatggataaattccgaatttcagtcaaaggtagtcggaagacagtcactggactcgttgtaaacgagaaggtcaatgtaaagcgctcgtggtatctgaagctggaatcaatcatccatgcaatggataaatttggaatccccgcagtggcagcgcaggtttttccagatgaaaagatccccgccgtcgcgtcggcgaggctgcttcgacagattcatggaaaggtgtcatacctcagcatgatacgaggaaagggcgattggctagctgcagacatagcacaccgcttcaatgggcttcacggggaggcacaactaagggtcccaagcgttgagttgattagtcaggccggtcgccgtgcgcgaggtgttcatatcgtgaatgccagtactgaagaactgctggtattcgatcttgctgcaagtcaaggaaccgccttcacaaccccttcgggattgatggtgactgctgcacatgtggttgagaaagacgacacaaaaacgctcctcccgcacgtttacatcatgaacgagcgcaagaaggcgctggctgcttgtgacgtgcttgcagtagattgggatagagacatcgccatactccgcgtaaatgacgaaaaacaccgcctggatctggagcgctcacgctataagctaggcctcgaccccggccaaggcgaacatctagtcaccgtcggctatccagactacatgcttggcgagcacgcaacggcagtgaactctccagtcagtagagtatttaagagtaaggctgccactcatggcgcacctgatgtgaacaaggcccgagttgatgggccaattcagggcggaatgagcggtgggccagcgttagactcgaagttcgaggttcgcggggtcatacacaagggcgtccttaacccaggcggagtagcagagatcatcgctgtaagcgaggtccgccgtgtggccctgacgcatggactgaaggtctag

SEQ ID NO: 533704 - DNA, 801 bp, Stenotrophomonas maltophilia
atggcccggcaagcggtcaaagcaggcatcaccagcattgcccatgcctgcgtgacgttcggcgtgagcccgacttgctaccggtaccaggccaaagccagcgacgagaacgcaatcatcgctgatcggttgatcaggttgaccagcgcttaccgagactggggcttcggcctgtgtttcatgcatcttcgcaacgtcaaagggttcgagtggaaccacaagcgcgtctatcgcatctaccgcgagttggagctgaatctgcgcataaagccgcgcaagcgcatcatccgtgaaatgccggagcctttggctgtgcctgccgcagcctacgacacatggtcaatggatttcatgcacgatcagcttgcggacggacgcagcttccggctgctcaatgtgctggatgacttcaaccgggagggtctggtgatggaggttgatatctccctgcccgccactcgggtgatccgcagtttggagcaggtgatccaatggcgtggcaaaccccgcgccattcgctgtgacaacggtccggagtacatcagtggcgcgctgcaggcatgggcccagaagcagggcatcgccctgctatacacacagccaggcaacccacagcagaacgcctatatcgaacgctacaaccgcaccgtgcgctatgcctggcttgccagcaacatcttcaatgatattgagcaggtacaggacattgccacccgctggctatggacttacaacaacgagcgcccgaacatggcgcttggaggcatcaccccaatgcaaaagctggccttggccgcctag

SEQ ID NO: 533705 - DNA, 267 bp, Stenotrophomonas maltophilia
atgaagaagtcacgctttaccgacagccagatcatcgccgtactcaagcaggccgaggccgggacacccgttcctgacctgtgccggcagcacggcatcagctctgcaacgttctacaagtggcgcagcaagttcggcggcatggatgcctcgatggtgtcccagctcaaggagttgcaggatgagaatcgacgcctgaagaagatgtacgccgacgctcagctcagcgctgagtttctgaaggaagccctcgcaaaaaaatggtga

SEQ ID NO: 533706 - DNA, 330 bp, Stenotrophomonas maltophilia
atgatggctggccacaagatcatctttgtacgtaccgtcgcaatcgaagcgggcataagccgtaacaatttccgccccggcttggaacgccacgcccacgtctacgaggcaatccagagagccagcaaggaggagacccagacagtcaatggggctgcattggagcaggcacgctcggagatcgccaggttgcgcgagcagctccacaagagtgatctgcagaatgcttcgctcaagtttgaactcaatcgtctccgtagttcgccggttcattctgactctgacaacgtgacggcgtttcgtcagaatcggcggacacgacctcgctaa

SEQ ID NO: 533707 - DNA, 2127 bp, Stenotrophomonas maltophilia
atgcgagatgagtacgtgccaagtagcgcgctgaacgaagaagcgaagttcctccacccaaagttcaatgtcgaagccagttcgaagctctggcggttcgcgtatgacctcgctggttccaaccgggaagaggtaatcctcgactgggagtttgaggttggggcaaagacgaagttcacggacatccagaacaaagggcttctcctggagtttcagaacttcatgcaaaccgcgattacggcagacgatgccgggatccgtatggaagtcggcagcatccccagtaccttcatgggtctacgagagcttgccgtcttcatggtctctcgcggactgaagagcattcgtgaaatgacctcggcactaagctgggagtacgtggaagagctagatgatcagtacaccgacgtagtgaacgtgcagggacgtgagcgcaaatggacgttctcgtctgccttcaagcttctgcatcctctcgttcagtttcacactgtgtctcgagtgtgcaagagcagaccaattgcaggacctagcgaggcgccatttgatgggaggagcacctacaacgtagtggtccattccctgggcctccagaagaatggccgcctgggcccaattgaagacgacatctccgtccccgctctgtccgaggcacagatttggattgagtgtggagcggaagatcttgtagatcttgttaacgatgtgatgcccgcactagagctggcgagatcgcaaacaggacctagaaggaatgaagttctgaaggaaattcgatctcgaatcgagcgctttgagatgagtactaatcctttgacaggattggcttggcacgaatcccttgagccctatgaaaggacgacggagtacggcgagttcgaagtgagcgggcttcaagtactcagaagagcgatcatagagatgcagagtgcgtgcacgaccgtcatccagggatgcactggaattaggtcgcatgagctgatgggactaaaagtctcaaacgaagcggcgattggcggaggcattgtggagatcagccgatcgacagatctggtgatggatgtcttctcgctggttgggatctctgccaagcgtcaggaaacccagcatcgctggaccgtgggctttcgaccgtcggggacgaacagtttgccaattatcgtcgttgctgtagacgtgctctgtaggttgttcgcctactggagagagctgtcgggaagaagcgatctactcctttcgttcacttctgcgaagtcactgccgactgatgcgtcgaacgttgggcgcatgcatacagccaagcacgccatccatcagcgtgagttcgcggcgaatgctctggtgcgccgtttaggcatctcaaaggaacaagcgatttccctggtgcgggcagtgcgtccgcagcgttggcgccccacctttgcccatttcgtctatagatccaatccgaagctcatcactcagctccgacatcacttccgccacatgagcgagcagatcacagaccacggctacattggcaacgatccagagctactcgcagagcttgagggtgagcggacaatggagactgcccgcatgatgcttgagataagcgtcggaaaaatggtggtggcagggccggcagcggcgctcctaaagaagcatgcaagctcggtcacgcagctggtggagagaatggagggtgaagacccgctccagaaggccgcagcattggtggagcttgcggatatccacctctggacgggtacgtacgcaagttgccttatcaacattcttcctggcaagtccagctgcaactcgcaagctgcgatgctgcctcgggctgcacgccccaactttggcgctcgatcaccaggtctctgctcatcgtgtcaatgctgcgtaatccttcccgaacatcaggacttctgggagcaaaggttgaaggcgaatgagcgtctcgtcgcggaggaacaacgcggacaaaccttcagtaaaggctctgctgctggaaggcgggtcgcacagagcagaagcatcctcgctcgacttactgaggttagcgaggtcgtgtccgccgattctgacgaaacgccgtcacgttgtcagagtcagaatgaaccggcgaactacggagacgattga

SEQ ID NO: 533708 - DNA, 1728 bp, Stenotrophomonas maltophilia
atggtggcggttttcgatagagaagccggcctagagccgaacatcgtgaacctcacccgctggaagcaaataggcgccgcagcgccaatctttgcccaagcctactgtctcgcctttcgatacgacgctaggtctaccagaagtagttcagcaaacaacttcatcagcggcttcgtgaaatttgcgcgggagaatcaaatagagatcaactccccagacgacgttcccgagggcatcggaaacgccttcgtcgaattcctcgatgcaatcgaggatggcaaaaagcggttctcgatcaacacacagctgaactatcacaagacctacaagaaagtggctgaggcgctacacaagctggacccggcttggaaacgcctatcagtagctcaccagccgtttgcagggaaaccggccgtcagcatgcccaaggaagacccgaccgaaaggcttggggtggtgatgaccgcagctgccaaacaggcgaaggagaccatggatgatgtctggacatccttacccaggctgcatgaggagctagcggcgctgatggacggtggaaagcctagaacttccagtcccgaagcgaaggtagcctggatactcgatgagttcggcggcaactatccgctgctcaagacagtcagaaccctgccgggcctgagggatatgaaggaggatgagtacgtcgaactacgccgaatcgcccatcccatcggcattgacctagtgcctttctttctgctgttgagcatgcacacgggattcaatgagcagactctgcgagagctgacgttgagtgggattgtcccgatcgagttcctcggagaagccaggcttctaatcaaatcgtccaaaagaagggccgggcccagccagattggtgccccgcaaaggcgcgccattcctgccagcgactacgagttggcacccgaacgccttatccagttcgtgagagattggactgctcgaattcgaagcttcgcaatttcccagatccaagatgacctgttcatgcacgtcacctctgagggtgggaagaacaatcgtcgcggactccgcgtcgacagctatgccggaatcaacgacaactacaacaccaaggtcgcgaacttcatcatgaagttctgcgaggttcgcaacatcaagtactcagcgaccagagacagcaggctcgcattctccaacttgatcgacgagctatcgggaggtgatgcgctcgagctgaagaggttactgggccacaagcgaatctctactggacaggattcttatcagacctgggagatgcagaagcgaggcgcagagaagctagcaggagctattgcagcacaccagcggttcatcaattctggaggaaagattgactctcggaggagcactacacagcacgatcggacggctgctacacctggcttcatctgtgctgatgtattccagagcccccagtttggagagcgggagggaaggatgtgcgcaagctacgggaaatgcccggcctgcccgctagccgcttcagacgcgaacaaggcttatgcactagcaaggttcctccagctcaaagaactttacgagtcgagcattggcgagcttggcatcgagatctggaagagcaagttcagcgacagctacgaagccctgaccaccaagtggatccccgcggtcgacagcgagaagaaccgggaagcagccagtcgagtcgttctggcgacgctgccgtcgctcgaatag

SEQ ID NO: 533709 - DNA, 1152 bp, Stenotrophomonas maltophilia
atggccatcgagccagcgtttgagtttctttgctatgaaaccctgaccagggaaaagcgaccgtctctcgtctgttcccctgcatcagcaaaaggctgggctgaggacctcatagacttccatcactacctcgatgcgagagacagaacgttcgagctgatcgatgaagagcttcttcaaggctatgcatacgatctaaacaacagcatttcgcctgtgacctttaggaagtttgcggcaagtacgatacgtcgccgctggtcaacattgaccaaggcaatccggttctgccagagccgtggctacctgaaaaaccgcttcgctatcgtagaggtgcagacgccacagggcaccgctctcaacctcgacgttggagtgaagcttccgggtctcaatgaggcggacgaacacgttaccgcgctgcatatagacacactcaatggtgtgttcgatcagcttgggcccagtcccacccatgtggaggacggggaactcatcatcaacgatggcctgacaggcccacgccttatggcagagctctgcaggcatgctggacttagaagagcagaagtctgcgatctgaaagctcagacagttctgaacgcgatcacgaatggaaaggacaactttgttcaagtcgcgatccaggtgatgggcaagggatcgaagaagcggaaggtgccggttcccgtttggcttctcaacgcgctcaaaagatatgccgtggaggagagagcccgcctacttgggccgaggacagccaggggcggaatggaccacggcttcctcttcgttcaaaggaccaagaactcgcgctacaaaggcaaaccagtcactcccgaaacactcaatcgcgtcttcgccagagcgcgagacgagtatctgaagaagctggcaagcaaagacgacatagcttatgagcgtgcatcccgcgagcgaatcacggtccacgcgctccggcacacgttcgccctacacacctatgtggcgcgacagacagccggcgatccagatcccatcaagtacatccagctggttctcggtcacgccatgcgtcagaccactgagtccatatacctccgaagctgcgaggctcactacagcgagctggagagcgagatcctgcaaagaatcaacgccagcatgaaatga

SEQ ID NO: 533710 - DNA, 1443 bp, Stenotrophomonas maltophilia
atggctggagatctccggaacgagcttctcgtcggccagtaccttgctgatctgttgagcaaccgccatcgtattggccgggctggaatccggagacagctcgatggccatctgcagctgatggcgctcggacggcggcatcagctcgttggggacggtggtgaacaaccagccggaggttgccagcagtgcaaccattacgccgatgtagatggccttgtgccccaggatccagcggaccttgccgcggtaccagcccgtcagccgctcgaccgcgcgtgcggtgcggctgagttcggcatggtgatgggcaaagtacttgcacagcagcggaatcagggtaacgccgatgaccagcgacaacagcagcgcgatggccatcacgataccgaggctgcgcagatactcgccggtttccgtgctggagatggccagcggcatgaacgcgaggatgatcgccagcgaagaaaccagaagcggcacgaacatcgtgctgcctgcgtgagcggcagcctggtccggcgactcacccagcgagagtcgccgctccatgtcctcggcaaccacgatcgcgttgtcaacgaacagacccagggcaatgatgattgcacccaccgagatcatgtgcagatcgatgttgaggatcttcatgattgccatcgtccccagcaccgtggtcggcacgatggcgctgacgatcaggccggtcctcattccaaggaacagcacgaccaccgccatgacgatggccagggtctccaggaaaaccttggcaacacgcagcagctgggtggaaacaacctcggcctgatccgtgatctggacaagctgcatgccggccggcagcgtttccgaaagccgttcaacgtcgccgcgcagcagatcggcgaagctgactacgttgagtcctggcgccatggagaccgctatcaccacggccggcgtgccattgacgaatgcacccgtcatcggcgggtcctgggtcacccgttccactcgcgcaagggcacccagcggcaccgagccacccttcggcagcggtatcggcgtgctcttcagctgggaggggttgtcggcgtcaccgctcacgttgagcgtgatctccgaacctccgatctcgacatagcccgccggcgcaatgacattgcgcttggaaaccgcatcggcaatcacattggggttgagcccacgtgcggccagggaaggcacgtccaggatgatctggacctgctcgtccctcacgccgtgcagcgagacacgttccacccccggcagccggaacagttcatcgcgcaggcggcgggcttccgcccgaagctcgcctgcgttatagccatcgccggtcaggcccatggtcatcaccgcaacccgaccgaattcgtcgtccacgaccgggccaatcgttccctcgggaagctggctctggatgtcccccatgcgtga

SEQ ID NO: 533711 - DNA, 207 bp, Stenotrophomonas maltophilia
atgggcgacctcggccaggtcaacgataccggcacgcccgaacggccgtttctggccgcctcgggcaatccccatcatccgacgccattcctgcgcctgtgctgccagcagagagagccaagccagatcctgcggttccagctcacggccttcgggtgtgaccagtcgaccggccttaaacgaaaaaccggcccaagggccggttag

SEQ ID NO: 533712 - DNA, 453 bp, Stenotrophomonas maltophilia
atgcattcttcaatcactgtcaggcaatcgaggcttctcaagctcaacatcttcttgattacggttccgctgcttgtgcttgccgcgttggcgaatctgtttgcctcggcctcgggtggccttggttatcgaagtaccggcatcctgatcaactgggtaggcgtctggctgttggcaaccgttgccattggcgtggcatgccttgagctcgccaggcgctggaaacagggtgggcttgaagcactcaggtctgcctccaaggcactgtggtgggtcaacattctcgggacactgatagcggtcgttgcctgggaacatgttctgggaatcggcatcaatgatccgctggacgtgctcctgatcctcgccgggttgccatttctgagtatttgggtacacctgggatggctacatggttgccaaccccttgacgaggggccgcacagcaaatga

SEQ ID NO: 533713 - DNA, 609 bp, Stenotrophomonas maltophilia
atgccggcgttactcggtcatgggctgcggctgcttgtgatggcggggcatccggcgtggctgcgctggggatcgcgaacgtcgactctcccgcacagctcactttcagacaatttgcatggtggtgagaagatcgcctgcctaacctccccatggtcttcattctggggggaaacccatgaataccctggttcaccaaaaacgcatcaggttgcgtttgcatctgctgttgttttccattccatgtgctctggcgagcgtgctggtcgcgctggtgcttttgatgatctggatcagccgccagtcgtcggaggcgtttctgatggctatcgcaaactggtcggtcatgtcggtgtggagcgcctacgcggcactgatgctggccaacacttggcgaaccgctggagcgcaagggctgcatgccaggaaaagttggttggaggctctccccatcgtttctgctctccaagcggccgcggccgtcgcgatgctcttcacggcaactggttgggaccccgggcttctgctggctgcaccagttttgatcatcatcggcgccccgtgggccagtttgagctggcatttgcggtggctttcaaggctggataa

SEQ ID NO: 533714 - DNA, 723 bp, Stenotrophomonas maltophilia
atgccggctggactgcaagtgaccaacgacgctgggtcctacatcatcgacagcgagaacagaaacctctgcctcgcatggcgccgcacgatcccggcgtcggcatggcagaccggtaccacgtccatctacctgcgcgtgcaactgcgtttcagggctggtaggttcaatgcccctatggtgttcgccagagctggccaccgtatggcggcaacggcctacatgtgggatccgggcgccctgacgatcgacctgacctgctgggccaacgagccaccggtgggcgacgtcgacctgctcatcttcgacagctggattccgccgcaggacggctatggcctggaggtcttcgacgcacagggcaacgtggtgttcaactcgggatggcccatcctcatgctggccggcgcggtgacactgccgccgggcacgccatcttggaatgccaatcaccagatccctatcgagaccaccaacctggccgtcgcgatcgactcatccaggagctactactacggggggtcgtctggtttcagcctggcgcccggattcaagatcaacagcggcagcgttgatgtcggcctggtgatatgggacaccgaatcagagacctatcctggtagcggtgcggtgccctttaacggctacttctcacccagtcagatgagcgttctgctggccgatgtgagcatgcttcccgcagcaccctacggatcggactga

SEQ ID NO: 533715 - DNA, 381 bp, Stenotrophomonas maltophilia
atggctgatcaagctggcctgatgacctatgcagccgatggatctccacggctccgccttgatcgctattacgggcggatcatcggatggatcgacatcgtgctgccagctggctacctcaatcgcttccagtctggatcgatagctcatccaggctttgcgacgggagtgccgtttcacttcttcgtggcgcagaagcgctacgtggacggcggggacatcagctacggcttcattccgccgcaggtcacgttcagtggaacgacgctgcagtgggcctacacgcgtactgccgctactgacttcgcccacgacaacttcggtgacggcgccaacgccatgggaccggccgatggccgtctcttctacggggtgaactga

SEQ ID NO: 533716 - DNA, 474 bp, Stenotrophomonas maltophilia
atggccggcgatcgacacaggattcccgagcacaagcgccccaagcacacggggcgcggcaaggggcattcgttcgtccagctgccgcactacatgttgaagtcgccgcagttccaatcgctcggcggcgccgcattgaaggtgctcatgttcttggccgctcagtacaacggaaagaacaacggcgacctcagcgcgaccaaggacatggtggacgggaccggcgtgtgttcacccagcaagatccacggactgctgttggagctcgaggctgcgggcttcatcgtcaagactcggcacggcatcaagaagcagtgcaacctgtacgccatcacgtggtactcgatcgacgaatgcgaggggaagggcctggagatcgctcccggcccaccgaggaacgactggcgaaaaacagaatccttggccccctcaggggtactcactggccccctcagggggttaaaagcagcatga

SEQ ID NO: 533717 - DNA, 177 bp, Stenotrophomonas maltophilia
atgaactgcgttgtgattcccttccctgccgcgcgcatcgtgcgcgtgccggcactgcctgctgtccatgcccaccccacaaccggacggctctctgaggagcgcctgcgcgcccttgccgaacgtttggcggcagccatgggccctaccaccgctcaacatgaggtgatcctgtga

SEQ ID NO: 533718 - DNA, 228 bp, Stenotrophomonas maltophilia
atgaacgacaagatcgccgttaccgacctgatcacacgcctgaagggcccggacgcggccgcgtacctcgggcttagccacagcaccctggagaagatgcgccacatgggacgcggcccccggtacctgaaagttggcggccgggtcttttaccgccagtccgatctggatgcctatctggaagccgccgtcgtcgagacgaccgatagccgcagccatgccggctga

SEQ ID NO: 533719 - DNA, 258 bp, Stenotrophomonas maltophilia
atggcgggaatggcctcgttgtcagcggcggaaaaggcaacggaggcggcctactggctctatgtgcaggcttcagggggcgatcagaccgatccgtcgaagctgcgcgagaaggagctcgcacagcgagcttggtcggaagcaacggtgcgcgagatgcgtgaggcccgacgggtggccgatctgattctcgacctctgcaggttgcatgaccgggtcgccgacaggttgttccctgacggaatacccgatctgtga

SEQ ID NO: 533720 - DNA, 717 bp, Stenotrophomonas maltophilia
atgcgatccgccaggtgttgggaggctgacgtgcaagatagaagctcaaagacttgtgatcatccgcttctgggtggcgacgtgccttcagacaggtgtcagacacctgcaggcgggggtgcagctgacgttgttcggggcaaaggtcaggcagcgaacatgagcagcgcggtggctttcacgaatgagggctcgggcgtgatggagagcctgggtggcgctcttgcccatgcattgcacaagctgaactcagaggtggacgttccttcggtcattggagcggccatacagtacgtggcccgtgagtatggcggggtcaatctgtgctttccggtctctgccgaaggcgcgggacgccgtagcgacaccaaggctcgccgggacgggttcattgccggattgaaagcggaggtcatccgccaactggtaatccgtgggtgcgatcaggacagacgcgaggcagctggtgcagcggccgtggcgtctgtgctgacggcattctctgggggatcggtctacatcccatcgatggcggcttaccgccaggccgagcaacatgcggccatcgtttcccgctaccgagccggagagaggactcacgaaattgctgcgtcctacggcatctctgagcgctcggtccgtcgaattttgcagcgaaaccgcgaacgcaatcgacgggaaggtcggagctggaaaactacgactgataggccgtaa

SEQ ID NO: 533721 - DNA, 192 bp, Stenotrophomonas maltophilia
atgtttttcgagtacaagggcactatctacaatcctctccatgcgattaaggttggcaaggtcgccagcatgagtcacggcagcggaattttcaccgtcgtgttcttgcagatcggtgaggtcaagttccagtacggcagtgtggaagaggcgatggccgcacgcgcccggtttaccggcggggcaggctag

SEQ ID NO: 533722 - DNA, 342 bp, Stenotrophomonas maltophilia
atggacgccatcgagaagcgggcgcaggacttgctggccagctgtctggacgaatgggggcaccaccaggaagccgccaacgtccgggaaggcgaggacctggagagctatgaatttgagctgcgcgtcatcggccagctgctgcgcttcgggttcgaaactggaagcggtcgtgaagcttcttcgctcacgccgcccgatggctacgtgctggtgccggtggttccgaccaagcaaatgatggacgcagccgtgcccaccagctcgcaggatcagactggccggcgacagcgcgccgtgtggggcgccatgctcgccgctcgcccggaggcgccttcttga

SEQ ID NO: 533723 - DNA, 384 bp, Stenotrophomonas maltophilia
atgaataagcccacctacagctggtcagccgacgaagagacctggcatggcccgtttggatccatcgacgaagcgattcaggacgccttcgtcgccagccccgaggacgtgaccgacgtttcgatcggcgaaaccgaaacgatcgacactggttcgttggtcagtgccagccagttctgcgagctggcgcaagagcggctgagcgatgagatcggagagggcggcgacgacttcttgcgtaccgctacgcctgagcagctcgcggaactggatgcgttcctacgcgcgtgggtggccaaggtcgagccgggcgagtacttccgcgttgatcgctggtttgcccaccggttcgccgactacggcctgaagcgggatgccgagtaa

SEQ ID NO: 533724 - DNA, 207 bp, Stenotrophomonas maltophilia
gtgcgtaatcagttcgacatcttcgatcacgacccggcccgcatggcagcggccaaccgcgccgccgagcgtgcactgcacgactgcagttcaccgccaccgtccggcaggaacgccacgcgtactaagtgggcgaagccgaacgctgggaacacctcgccgcgcgcagcgcgcgcgcaatccgatcgcaaggagcagcacgcatga

SEQ ID NO: 533725 - DNA, 843 bp, Stenotrophomonas maltophilia
atgaccgagcccccctccaccctggccttcgtgaagcacggtagaagcgtgaaccactccgtcaggcggcttccaacgaagagactatgggtccggaatcagcgcttcctcctgcgcgtagtcggcatgctccgcaccgatgaagtcaccaaaatttctcgctgtgcgaatgctgtcgcggagcgtctcaaccaactgccccttcagcgacaaaaagtcagatgggtcgccgttgtagccaatgatgatcttgcgattgacgctggagacgcgagcgaaccgcgagtcaatcctaatgctggcatcgacgagccccctgcacattccaacgagttgcgcgatttcgccgccgagtgtgccaggaaggttatgcagccgatccagagactcctctgcagacggcatgaatgttttgcgaagttctgccaagacccactctacggtagcgtggttgtccggatgtatcgggccatttgggaaaatttcgttaaggtggcgcagtgttgcgccaagcttcagcggcaaaatagtaacttcaacccccaaaagacttccaaggattccggcaatgccttcccgcaactgcaccgcttcttggtgctgttgctgagcgattcctttggcgtcttcagcgatcgctgccgctcgtcgcgaggtcttgttggcagagaacgcaaccaagatcgtaccgatagccgcgcctacgccaacaattaccgccgcccagtcagcccagtttccccacgccgattcaagcggacaaaactcgatagccatagatcctccctgttagggcggattctgccacggcagaacccgacgaggggagcaccgcatggctga

SEQ ID NO: 533726 - DNA, 660 bp, Stenotrophomonas maltophilia
atggtagttacgcgcctggctcgggtgagatatttattcatgagacctattttgaccgcttcgaatcgggtgaccgaagcccagaactcctgcagaagatggaaagaacactggagcacgagttggttcacttctcggagtatttctggaacaaaaatcagtacaagggcgaggagggttggagctatgaagagtatgtctatgggatcagaaggcctgcttcacactaacctctttcgcgttggcttgtgcttgataattgcatttaccctatttggatgcgcaaagtcatccagtgaaagaggtgctccgtgtagtcatgatccggtggcaatcatccaggcggcatcctcggattcagcgctttctgcatacggaggagatggatggggatcttcacggataaacgttctatgggatggcgatgaatcgtcatcttcattgccgttgtgcgaagccaacggcgggagatttcagttcgtaaagtcgtcgtcatatgatcgcacttcgccattcattgccattgagaagttgtactttgatgacgatgctgctttcatggaaatcggattccctccgacaggaaagaacgcagatgtgttcttgagaaaagaggaaggagtatggcgggtcaagaagacacatctatgggagaactag

SEQ ID NO: 533727 - DNA, 1080 bp, Stenotrophomonas maltophilia
atgcgcatgaccgctgctgtgctgggaggaatgctgctggcgttcgcgagcgtcggcgccgcccgcgaaagcggcgtcgccggcgagcgccacggcacgacgacgctggccagcgccgccgtgcgcgacgcagggcaccgcgacgcgctgcgctacacggtctggtaccccgcaccggccggcagccgcgaaaacgcgctgaccatcggtctacccgacgcgccgctgttcgacgtcggccggtcggccaaggatgcgccggtcgcgggtgatcgcctgccgaccctgctgctctcgcatggcaacggcggcagcgcgcgcatgatgggttggctgggcacggcgctggcgcgggccgggtatctggtgattgcggtcgatcatcccggcaacaacggtgccgacgagatgacgctggccggcagcatgctgagctggctgcgcgcggatgatctgcgcgctgcgctgaccgccgtgcaggccgatccgatcctgggcccgcatgtcgaccctgagcgactgggtgtggccgggttctcggccggaggctacaccgcgctgctggccgccggtgcacgaccggacctgcaacgactgctggccttctgcaccgcgcatccggatgacggtgtctgccggccccagcaggaggccgccaagcatacgatggaagtccgtattgccgctgcaggctcgccggaactgtcgccatggatcgcccgcgccaacgaatcgcgcgcgatccccggcgtgcgcgcggtattcctgctggcgccagcaatcgtgcaggcatttgcgcccgagcagctgtcctcgttgcggcagccggtctcgatcgtgctgggcgaagcggacgcggttgcgccgccacagaccaatggcgcggccgccggggccctgattccgggcgcggaactgcagcgcttgaccgatgtgggccactatgatttcctggccgcgtgcacagagaccgggcagcagcagctgcaggacctgtgcactacgtcggtgccaaaggcacagacccacgcgcaggcagtggatgcagcgatacggttcttcgaccattcactgcgctag

SEQ ID NO: 533728 - DNA, 393 bp, Stenotrophomonas maltophilia
atggcgaaagcagcgaacatcaactacatccattacctctactacccgctgttgtccatgtcggacgacgaactggcggcgttcaggataaacgatgcgcaggacagagcttggctgttcggtgagatgggcaaagtcctggagacattcggtcctgctgcccgtgcccatgtctgcaacactctaggcttttttgcagggatgaatggcgccgaagatcactggcgaaacctgatcccacacgaacttccgcttggcgaagtcgagaacagggctggctacgtgagcgaactatttctcagccttttccatcgcctccccgttgaagaagactgggcggatgtcgagctcttactggatcttccagccgacggactgagaaccaatatatag

SEQ ID NO: 533729 - DNA, 546 bp, Stenotrophomonas maltophilia
atggatctgccccaattcacctaccaccccgaccccattgccaccggcagcgtgattgccgcagagacaccctgcgtgtgctgtggccagtcgcgcggctacgtgtataccggaccggtctatgccgaagaagagtacgggcaggaaatctgcccttggtgcattgccgatggcacagcgcatgagcgcctcggcgccaccttcactgacgaagaaggtgtgggtggtggcggcgaatgggatgaggtcgatgcggagatcgtcgacgagattgcgcagcgcacccccggcttcaatggcttgcagcaggaacagtggtggacccactgcgaggatgccgcgcagttcatcggccgtgccggtcgtaccgaactggaagaacacggtgaggatgcgatagctgccatccaggagagcaccggcctggacgacgggccacagtgggatcgcttcctctcagcgatggacaagaacggctcacccagggcctatctgttccattgcaggcactgcggcgaagtgggcggctaccaggactgcgactga

SEQ ID NO: 533730 - DNA, 3858 bp, Stenotrophomonas maltophilia
gtgggcgcgagcagccatgcggctacccagtattccgtggcaatggggacgtcgtccaaggcaactgggtatagcgcgacagctttgggatggaataccgcgtcagtcggcgaaggcgacgttgccattggtagatcagcgcagacttcgggtgctggtgccggcatttcgagagttgctatcggtggaggggctcgcgctggaacggagggttacactggggcagtcgctctgggtggcagctccaaggccgagttcgatggtgtttccattggctacaactccaaggcatcaaagacgggggcagttgctctaggggtgcactccatagccgatgaggtgaacactgtttcggtgggcaacaacacaacgaagcgccgcatcgtcaaccttgccgacgcccgtctgaccagttccagtaccgacgcagtgaccggcaagcagctcaacgccaccaacggcaacctcacggccgcacgatccgtcgcagacgccgcaaagaccaacgcggatagtgcgttgtcgaaagcgaacacgctttctgggctactgagccaaacgtccgcctcgggcaacgtccgcgtgggtgcaagcaatagcggtaccgtactggacgtccgaaacagcgcaaacgccagccgtaagatcacgggcgtgtcagacgctacactcagcaccacaagcacagaagctgtgtcaggcaagcagttgaatgctaccaacagcaacgtcacggccgcccgatccgtcgcagactcggcgaagaccaatgcagacagcgcgctgaccaaggccaacactctctccgggcttctgagccaaacctctgcctcgggcaatgtccgcctgggtgcaaccaacagcggcaccgtgctggacgtgcggaacagtgccaatgcgagccgcaagatcaccggtgttgccgatgcagcgttgtccaccactagtaccgatgcggtgaccggccggcagctcaacgccaccaacagcaacgtcggtaccgcactgagtgatgccagcgcggccaagaccagcgcaaacgccgctctgacccaggtaggaacgctcaatggattgctcagccaggccagtgccagcggcaatgtccgcgtgggtgagaagaacagcggcaccgtgctggatgtgcgcaatagcacgaacgcgaatcggaagctgactggtgtggctgatggagtggtcagcgccagcagctatgaggccgtcaacggcaggcagctcaacgcgaccaatgacaaggtggcgacggtggagggcattgccaggtctgcgggtacggaagctggcgtggcaaagacggatgcggccaaggcgttggtcgaaactgcggcgctgggtggactggtagcacaggtatctgcgtctggcagtgtgcggctgggtgagaagaacagcggtacgacgttggatgtgcgcaatagcaccaatgtcaatcggaagatcagtggtgtggcggatggagccttgagcgccagcagtgccgaagctgtgtctggtaggcagctgtattcaaccaattcacgcgtctcagatcttgaggatgtcgcgcagtttgtaagtatcggctcagcgcccttcagtgagcgcgcagcagccggtgtggcaggtgttgcggtcggaaattcagcaaagactggactagaaggagggaccgcggtcggcacgtttgcggaggcgatgggaaggaactccaccgcaatcggtagagcggcgagtgtctctgtggattccgagaatggattcgcaatgggagtcggtgcacaggtcggtggaggcgcgggcggcgcgaatgaaggtatcgcgattggtgctggcgcaagagttggaagcggggctcacggctcgctagcacttggaaatagctctctagcagatgaagaaggagttgcgtcatttgggggtgttggcatccagcgccgccttgtaaacatcgcccgcggcaccgctgaccacaacgccaccaccgtctcccagctcaaggattccctcgctacgctcggcggcggtgcaggcatggatgccaatggcaacatcatcgccccgacctacacggtgcagggcggaacgcagagcaccgtcgaggatgcgctgacggcactcgatggcgccgtcatcaccgccggccgtcgcgcggacaaggtggaaggtcagctcagctcgatcttccaggattcaccttcggcgcgtgccgacggcacgagccagatcgcgctgaatggcgtgaatggcatggtgttgaccaatcttgccgacggccgagtgtccccaggaagccgtgatgccgtaacaggcaaccagctgtacgccgcagagcagaagatttcgcagaatcggaatgatctggacgcgatgcgcaaggagcgggagatggggcagcaggcaatgcgtgggttggatgcgagcgtcattgactacggtggtgcgcgtttgactggtgtggccgaggcgaagctttcggctgacagttcggatgttgttcgcggcagtcagctctacgagaccaatgaaaaactgcagaagctgtcggcctcgtcgcgatttgttgctgtcggcgaccaagggcctgggcaggcagcgaaggcgggaccagtaggggttgcgattggtgattccgctgaggcttctttgctgagtgaaggggcggttgccattgggagctacgcgaaggctgccggaaagaactcagtggcgcttggcagggccgcctatgttgatgcgatggctgtgaatggtttcgctatcggcgtactttcttctgtccatgaagagaacggcatcgcaatcggtgttggcagcgtcgtgaagcagggagcaagctctagcgtagctattggtgtccactcagtcgcagaagaggctggtactgttgcattcggcaatggcgagatgaagcgccgcctcgtaagcatcgccaacggcaccgccaaccacaacgccgccaccgtcggccagctgcgtggtgcactctccgccctcggcggtgaggtggatgccaacggcaacatcgttggcccgcgcttcaatgtccagggccagacacagtcctcgttgaatggtgcgctggaggcgctggatggtgcggtggtcaccaatacctcgcgtgtggacaaggtcgaaacccagctccgctccgtcttccaggacactcccacagtccgcgccgacggcacccaccagctcaccctcgccggagccagcggcatggtcatttccaacgtggcaaacggcctgatcgcggccggcagccgtgacgcggtcaacggtggccagctgcattcgatgcagcagcagctcaacggccgcatggatgggctggagcagcgcatcgacgatgccccggcgccgcgtgcactggcgtcgacctcagtgccggagccgcgggccgaggaaactcctgtggcaccggaaggcaaggattcccagcaggtcgcctcggtcggcgagggtgacaagcccacaccgcagccgaaggccaagcaggacgactcgccgaagccgcaggtcgacaccgccgagctggagaagatgctggcccgcgccaacgagtacaccgatggtgcgatcagcaacttcgagcgccgcctcgacaagatggacaagcgcttcaaccgcatggcagcgatgagcagtgcacagagcgcaatggcgatgaacactgccggcctggccacctacaaccgcctcggcgcgggtgtgggttacagcgagggtgagtccgccatggcggtgggctaccagcgcgtactcaacgagaagggctcggccaccttcagtctcaatggcgcgttcaccaacagcggtgagcgcagcatgggcgtcggtgtgggcatcggctggtaa

SEQ ID NO: 533731 - DNA, 306 bp, Stenotrophomonas maltophilia
atggactgccgaaaccagcgagccagggtacgacaggcacgtatcgcggctaacgggggcagccacaccgccaaggagtggaatgccctccttggccggagcccaacttgtgccgaatgtggacgctattggtctgaaattccgccacgtcccgatccccgctacaagcacacgtggacaaagggccacaaggtgcctgtttaccatggcgggtcgaattcaatcgaaaacatccgggccgagtgctacgagtgcaacttcgggaagaacgcgggcactctcaaaggcgaagtgttcgcaacctga

SEQ ID NO: 533732 - DNA, 627 bp, Stenotrophomonas maltophilia
atgaacaaaattgatcactttggactattaaatggtcagattgctcgctttgatgcaatctcagggtcggatggtccaataggacttcttggccaagaagttctacgcttccggtccatcgccggtaccctcaaagctaacggaatgctcgacaacagtagcgtagaccagcgctatatcacgcacatcttggcaagatcgttaatcgaaagtttcttctggattacttatatatttgacgacgctgcgcaaagacaggctcgctacaacgaacttgtagactcgttcaagaatgagtacctaaagcttcacaatgagcaattgcccataaattcggcgcttaccccgcctagtcccacatggaaccagctgtcgcgtgctcctgatgttagggccatgcttggacgccttcgaaatgcgtacggagacaaattggactatttgtatccgatttaccgaatagcgagttttgacacgcatgggaaaagcctaaacaacattgtctcctccgcgcttgggggggtgtcaccaaactttccagttctagacctcgagttcggcttcgacattatcgccaatcagtacctttgcacgttgcaggagctggccgatgcgggtgagatctaa

SEQ ID NO: 533733 - DNA, 537 bp, Stenotrophomonas maltophilia
atggactggctgactttcattgtcgagttgctgagggcgatcgcgtggcccgttaccgcgatcgtcattgcctttctgtatcgcaggcagattcgcgatctgttatccagaatgaagaagggaaagatcggtcctgccgagtttgagtttgaacaaaacgtccgcgagctggccgaggagctcccgcccgcagcgcttatagagcaagtcccgccggtagatgtagcgcttgccagccttaacccacgtgccgcgattctggaggtttggatcaagctggaggctgtcatgaatcgactggcggaatcgcgcaatattgactctcgccgtggaagaagctctctctatcaagccaaattgcttcgcaaatcgggcgtgattacggacgaagatatgactatgttcaatgatcttcggttcctacggggtcaagctgcgcatgacgaggacttcagtccttctatcgactccaccatccagtacgtcaggcttgccgagacctttatttcccgcttgaattcgctactgccgtactag

SEQ ID NO: 533734 - DNA, 339 bp, Stenotrophomonas maltophilia
atgatgctgtctcagggggggggcagtaggcggcgcagcctgccccagaactctgcctattggctggttgagaaatatacgggaacgctgatggctctcttttttctggactacgatcttcgcaaggcgcgcaactaccaaccgttgtacgacgagctggccaggttcaaagccgtaagggttcttgaatcatcatggtgcttcaatcgctttaatatttcgtccgctggtcttcgcgatcactttatgaatttcattgactcggacgacgggttgagtgtcgttgaagtgacagattgggcgacctacaaagcacttggcactccaaagggcctttag

SEQ ID NO: 533735 - DNA, 177 bp, Stenotrophomonas maltophilia
atgcaaggggggaaacccctctacgccgccatccgcgaccacggacacagcagcactgccagcttcaacatcctcgccagaaagctggccagaatcgcgtggggcgtcttcaagagtggccgggatttcgacccgagcatgctcaaagcgggtcaggcctgcttccagcaggcttga

SEQ ID NO: 533736 - DNA, 318 bp, Stenotrophomonas maltophilia
atgatggagccctacacgcgcactggaaaatggtccgtcaggctaaaggacggcgccaagccgatgaaactcaggcctgggaaatgcgtctcgtacggttcaacccctgccggctacgaacgcgcggagtcgggggaaaacaaggagacattctcgctgaagccaaacacaatctactactttgaaatgacccgagtaattccaatcctgtggtacatgcccaccgctatctacgaagcaactttctgcctgaaagaggatgcggatggcaccttcagcattcagaaggaatcagcatgcgccgcgtccagcagatga

SEQ ID NO: 533737 - DNA, 810 bp, Stenotrophomonas maltophilia
atgcgccgcgtccagcagatgaagccccgcatcccagcaacgattcttgccctcttgcttctcagcggttgccacctaacccgagatcagatgctttcacccaagccggaagccggcacgatcaaggtgacgatcaaggtccccgaggagcttgtagcgagggacatgaaggtgatctaccgctcgacgaaatgcacgtggacatctcgttcgatgctggacggggaaaagctcactcgggacagctacaccacgctgaattcccgcccggtacacaactccgaaaccggactcagcgaggcaaaattggccgtcgatggcggcggaaagtgcaactggcggctcagttccgcattcctgggggtcgagtacaaggactcctccacgtttggggatggggtggagtttggcgtgggaggagaactcgtcgtagagtttgacgagaccgattcggcatacggaggcccaaacactctcatcatcagcagccccgatgggactctctcgctgagtgagcactactatccatggctgtcagaaggattcgttggagggcaccgaaagaccatccacctgaagcgaaaggggtacagcgtcatcaccctacgcgcaccgaatgtgcacaccatccactttgagccaatccttcattccggacacctcgttcgctccgtcggacccatggtcaagcagaaaggggtccgatccatcttctactaccccgatggcagtcattcaatggaatcacggggagaaccaagtttccagaagcttgaagcaatccggcaggctgctgaaaggcatcaatag

SEQ ID NO: 533738 - DNA, 258 bp, Stenotrophomonas maltophilia
ttgaagcaatccggcaggctgctgaaaggcatcaatagcgacacgccgcccgtcgagcgcagataccgcgaagtggtactggccaacgctgacaagcagccgttcctcgccacgctggaggtctgcttccaatgcaaccagctggaatgggacggcacgaaaaatcccgtgccacaggcgttctaccagggcctgcaccccttcatcgaacgcttggacacgcagccggagcgcgagtggcaggccctggcccggtag

SEQ ID NO: 533739 - DNA, 978 bp, Stenotrophomonas maltophilia
atgacttatgccttgcgcgccgcaatcggcgtagcgatcaccgcgttcgcggcgtcaccgaccagagtgctggccggtgacctggttgaacgctggatggagacctcgcaggaagaggtccttgcctactggacgaatgaaaaactcgccgccgttcccgacaagggagacgcacccatcaaggcgcttggacaagacccgttgcagaccgacggtgatccctggcggggcacaggtcctcaccccgccggtgtcgggcgacttttcctgacccgcccggatggcaaggatgcctcatgcactgccaccgtggtcgacagccgcgatggcgatatcctggtgacagccctgcactgccttgcacaggtggatgagtacggtgccgtccgctggagtcgcaacctgctctatgcgccgttgttccagaatggcaatgcgccgctgggaaagtatccgatacgacgcatcgtcgcaccgcaggcctcgctgtcaggcgcactcgacaccagcttcctgcagacccatgcagatgcgtccggccaaatgccggcgcgccgcgcgggcagccagtccatccgcttcgacgagcgaccagcacgcggtccacgcattgccttcggctaccccgtttccgccaatggcattggcctcatcccaccaacaccctggtatgaattcagcaatgccgagtacaccggccagcaactggcatattgcgcaacaacgcgtgtcgaattgtcaggttgtcgagcctttggctcggagaaaattctccagtggggcgttgcctgcgtgcaaggacccggctccagcggtggaccggtgctggaagagttcgatttcgacagcggacatggaatcattgtgggggtgaacagcatgggcgtagtcaacgacggtcgcgcccatctgtgttctgccgagaccgaggcgctggccgagcgcgcctaccggtacatccagcagccgacgcactga

SEQ ID NO: 533740 - DNA, 2493 bp, Stenotrophomonas maltophilia
atgaacgccgatgcagcgaaagaagcagcgacagcgattctaaaggacgagattgaagagtactccaaggacctaagcgagtcggacacaaggtcaaagctggttgatgcgctgcttatacgcgctctcggttggcaggagaaagccattcaacgtgaacccagtacggatgggggaggatatgttgattatcttctttacacgtctaagctggctttcgtgattgaagccaagaagttgtctgttaagttcaatttgcccaatacggcgaggcagagaaagtacaagattggcggtgtgctttctgaggataaggtgctgagatcagctatagatcagtgcagagcttacggtatttctaagggttgctcgttctgttgcgtgaccaatggaactcaatatgttttctttcgatcccacagtgatctcggtatcgagtttgatcgccatcaggctgtgattttcgcatctcctgaagaccttcttgccaatttctctctgttcttccagttgctttcctttgcctccgtagcagaaggacgccacatttctgtcgtccccgtagtggacgctgacgaagggcagagcggtcttaagattctaagtcgtgatccgcacaaggtgcgctacaagaatagaaacaggcttttcccgttcgtaagggatgtggtgagggaggtctttcaagacctcgcagggcaggatgcagatcctgatcttcttgagcaatgctacgtagaatcggcgtcgcacggaagctatgaccagagtttacgtgggctcgtccgcaacaagcctggtctcggagagatccatccaatcagagtagaacgtcgttcagcaggcgcttttgataaagtggttgcgcaaaagagccgtcgcccggaagttgtaatggttctagggggaataggtgcaggaaaaacaacgttccttagaagattccggcgagttattggcaaggaatccatcgacaaagatgcctattggattgaagttgatttcaatagatactctgatgctccgggaatgctagacgactgggtggcgtccgagatatatagccaggcagaggtggtggattcctctggtcactttggaacttatgctcatttgcggcaggcctacagcgctgagtacgaacgcctaaaaaagggtcggctcgcgcgcctttatgagcaaaattccgatgcgttcgaagataagttcgccgaagagcttgagatactggagaaaaataaggtctcgcatgttactaaactcctgaagtacctgcagtctaatcgggctcgccgcgtcattattgtgtttgataacgctgatcagttcccggcagcggtgcagaatgatgtgtttatgttggctaataggctggccgcggatataggtggaactgcaattatttctttgagggaggagagtttttggaaaaataaaaacttcggttcgcttagcgcgtttcacgtcgttagttactacgtggaagctcccgacctaaagagggttattgctaagcgtatgcgatacgcgtctgaacttctccatggatctgactacgtagtcccaagtggcggacaggcagtgactttggaggaggggatcggtgtctttgagtcaattagatcgactgtggttgatgatccccagtttgttagatttctacgggatctttcgcccggcgaagtgcgtcggccccttgatcagcttgcacgctttctatactcggggcacaccaatgttgactctctgctgagagggttccggtctcgacaaaaaattcaaataggttttcatgaattcttcaagtcgattgcaataagtgatagagagtatttttcagaggaaaattcagacattctgaatatatttgcgagccacggcggttcggatgcttccaatcttaatcgtcttgcagtgcttgggcttattcattcctaccgaaggttgcgtagcgagcggggtgttggttacgtgcagttggcagagattgtagatatctgcgtagccaatggcctgaccgacttgaccgcctattcgatcattcagttgatgaacgagcgaaggattttggagtctgaggagcaggttagggaaaacgtattgccttcggtatatgttagaacaacagacgcgttcgactattatatcgggcatttgtgcagccagttcgcctacattgatctcgtgatcccaggtacggcaatgccgtctggcatggactatgacatgattgagcggctttctggtcagatatatcaggtaggtgcccttgccccgaatcgcgttgacaagctccagctaaggatcgatcgcgcgcgcctgttcgctcaatcaatgcaaagtgcgatgaaggcgcactcgctgtttaggcagggtactttgatatccgatggcgtcagatcttttgtgaatgacctggatgttcaattagatcgtcagtcgactgccattctggagtcggcaaggaaagcattctcaaggcactcgagataa

SEQ ID NO: 533741 - DNA, 180 bp, Stenotrophomonas maltophilia
atgaccaagatggtctgcattctcggccttgtcccgctgctgctgtttggcggttccatgtggaccagcatgtcgatcgtgatgatcggcggccttgcccttggaacgctgatcacgctgggtctcattccagcgctgtatgccgcgctctaccgcattcacccggccgaggaggcatga

SEQ ID NO: 533742 - DNA, 1521 bp, Stenotrophomonas maltophilia
atgtctattggaaatcgagttgcctgcctgtcgattgctgtgcttgtagccctgtcttctggctgcgcctctgtggctcccaggaccgagatccctgacgccgcagcccggcatcatgtgggccaggcccccacgccggcggcgctggatgcggatgtcctgcccgggacgcccaacaggcaatggtggaaggacttctccgaccccagcctggatgcattgatcagcctggccatgcgcgagaatcacgatctgaagtctgcgctcgcagccgtggtggaagcgcgggcgctagcgggtgcagcgcacaaggactaccttccgagcggtgcgctggaggtcaaagccgaggccgtgcagtctgcccagatcgaggcggatccctatcgccaggggcttccccggccgcccaccaacagagtgctgtccgtcgggcagatgttctcttgggagttggatttgtttggtcgcattggaaccgccgcagccatggcggatcgtagggccgatgcggcggcggccgatgcaaggtccgctgctgcagtactccaggctgaggtagcgaggaactacttcctactcaggatggaccagatcagcctgtcctccctcgagcgggaggttgggcttagcgaagcacgggttatgaggatgaaggctcggtacacagccggattggttgatcgccgagaggcttttgccgcagaatccgagcatgccgagctggtggagcaagaggccgcagccgccacacggctgaaggcggatagggctgcactagcggttcttgcgggacgcccaccgaccctgcgggatgacacttgggaggccttgctggcaccggccccacttccggcgccaccggatctcgcatctctcgcacagcctaccgaccttctggcacggcggccggatgttgccaaagccgacgcacttctgcgagcgagcctcggtaatgttgtgctcgcagagcgcgcccatcttccgcggctcacgctgaatatctttggtggcgttctggcgccgttcagctcgctgggcgattcaaacgcaaagcgctttacggctgggcctgagctccagtgggaatggttgagctttggccggaagaaagctagggaagaagccgctcgcgcgggcagcgaacagagctggcacgcgttcgagcagaccgttctgaaagcgcttaaagaatgcgaggattcactacatgcgtgggaaggctcgcgtgtcaagatgcagcaggcggcagctgcggagaagctcgcagacagttcctctgtctttgcgctgtcccgggttgatgcaggaatcgagccaaaggtcgccggaatccagaagcaggcactacaccagcgagcgttgagagcgttgtcggctgcgcatgccgaattgctcatcgctcatgtgcaggtgcagcttgctctaggtgcatggcaaccggagaaggcagacttgggagtcggcgtgggaaggccccttgcatcaaggagccagttgaagctggctcagcggcagtaa

SEQ ID NO: 533743 - DNA, 192 bp, Stenotrophomonas maltophilia
atggaggctggagagagttgggagcgaggacggcggttctcattccagggacggatcggaatcagcgcgggagagcccggaccaacgggcgacctgactctcgtgaagctcaagcagcacttcgtcggcgacggtttcatggagccggcagttggagcaaatgaggacaaccccgccagggtagtgggctag

SEQ ID NO: 533744 - DNA, 879 bp, Stenotrophomonas maltophilia
gtgaagatacccacagcttggtcgttggtgccgggcctagtagtgcttgccatggtcctccctgccatgacaggttgctccggcaacgcagatatcgaaaagaccgaatcctgggctgctcacgtcgcgccggttcggcacaattcaggtgaccgccgttcctacgtgggaaccgtgcgagcaacacgaagggagtacctgtccttccaggcgtccggaaaagtctccgctgtgctggtggaagcgggggatgctgttaagagaggtcaaattctcgctcgcctggaatctcttccggtcaccgccggcaagcagtcgactgctactagggaggccgcacgttcagagacctccttgagttcagcccaatgccttactgagctcctcaacaatgctaaaaggagcgatgcgctcagcctagaggaagtcacatcgacaaacgccgaggtggcaattgtcgcagcgactggagcttcacccccacagcatgaaactgttgatcggcatcagggagagatcagtcttacagccaccttcgacggagtggtagctgttcgtagcgttgaagttggtcaatccattgggccggattctgtcgccattcaagttgacggggccggccgcgagctatcagttcacattccagttgagtcgtcgttgagaccgggccaggtggtcaacctgagcagcgggacgaagactgtaatgagcagggtactgcacgtagagaagccggttgatactggtggcacacgtactgcccacatcgccgcccccgagactgcggccatcggttccacgtgggtagtcaggatcattgaatcggatatcgctccggctgtgcgccaagttccgtttcgctcgcttatgtcgtcctag

SEQ ID NO: 533745 - DNA, 1146 bp, Stenotrophomonas maltophilia
atgactatgaggtctgcgcctcactttcgcgaaccattgatggcccctatttccaagaacctgcccggcgctacgccttggcatgaggctggtcaggattcagcatctctgcaggtagctgagtccccaagctcagcgagcgggtcccagctcgcggaaattgttcctacaggagctagggccatcttgggcttggttgaggagcgggggtactctgctgaggagctgtgccgtggcttgggcttcagttatcgcgatctatcaacgagagacgtgaatctgtcttacagacagatgcgccacttgtacatgcgtgcggaacgtctgcttgacgagcctgcgttgggtctcgctcttggagcaaggcagacacccgtatcgtggggagtgccaggactggcgatgctcacgtgtgagacctatggcgaggcgctcagttacggtctcagccatcagcaggccataggggcacttctcattcacgcgattgaggagacgggtcgagaagtgcgatttgatgctcgcttcaagcgctttgatcttcagttggaatccctcctagtagaagatgccttcgggggattcatcgcagtgagcagatatctagtgggcccctcattcgctccgctgcgggtcgatttttcctttcccaagccgcccgatccagagattcacagacgcttctttcaatgtcccgtgcgctttgatgccggcataaatcgtttgactatagattcgcactggttgagcacacggctccctggctttgatcgagtaaactcaaaaattgtccgagaccagttggaagccctgctgcctgtgacaagtgcgcgccatgagatcgtcgaatccctgtcgagccatcttcgatgtgacattgactcaaccaccaagcaaagtgaattcgcaagccttattaatgttagtgagaggacacttcgaagaagactcaatcggcaggactctagctatcgagagcttcgggatgaggctaggtatgagcgtgcccgtgacctcctactgaattctcgactaagcattgccgaggtagctgatgccgtcggctactcggatgctcgagcattccgacgagccttcaagcgatgggcaggttgtctacccacagagttccgaggatccaaatag

SEQ ID NO: 533746 - DNA, 717 bp, Stenotrophomonas maltophilia
atgcgacgcacaaatttcatattcaccggacgggtagagagaagcgttcgatctattgcccaaaaattcactaaatcaatcgatggcggggtaggtcgaacgcctaggaattttattctgactgccgttatgatcggcgccgtgcatctgctaagcgcttgtagtcctatgcatgtcgtcagatctaatcaagccaagacctattcgggcatacctgacagcgcggagcgtcggactgagattgcgccttcgccccatctacgtgggcactatacaacggtgactgtctcaccgactgaaatcttgcctaaagtcgcagcgggtctgagtccgggggtatgcgagaatttgaaggctaccatctacggtcaactgcagcgccagatcatccggcattttggccaaagccctgcgggaccagccaaagttgagctgttgctagtgaccaggatcacatccgtgaaagaagtttctccaggtctgaacatagccacggcagtactggttgggccagtgagtagaggtcggctggctattgaggtcgaagcgatcgatgcagcaagtggtaagcaggtggccttgctgttgctctcagacgaggctgatatgcgggacattcgaagtagcttcacccgcgacggccacgccaaggcacttgcaaggcgatttgcactcgatgccatagagttcatcgcccccatcatacgtcctcgctga

SEQ ID NO: 533747 - DNA, 258 bp, Stenotrophomonas maltophilia
atgaggtccaacggacggagcctccgtcttaaacacctcagcgatctgacccagtgcttggctacggttgattcgtcccgcctggagttctgccgcaatggttccatattgttgtggccggctacccgtgccggaaacgccaatatctgggccaccacccgcaacgatttcacgctggacctggacattgctgagagtcgcggcggcttctcctcgcaactcgctgtctacataggcttgcttagaagctcggtttga

SEQ ID NO: 533748 - DNA, 348 bp, Stenotrophomonas maltophilia
atgggaaccgtcgtttacaaccttgtaatggctttcttcctcattccactgaccattcgcgcctatctaagcctgaaaaatggtcgtctgcccttgcctcacttccagaacaacatagtggtcaaccgtatcaagctgcagagagcaattgggatcctctctccaatcatcttctgggtcttccatatcgcatgggtgatgtggaatctctcgatcgatgcctggctgggcgctgcgaccaccgtcgtctacatggccttcagcgcagtactctccggccagatcaaggccaagcagatcggtgtgattccagacaacgcgggggctacagatcgcagccaggactga

SEQ ID NO: 533749 - DNA, 309 bp, Stenotrophomonas maltophilia
atgaacaagatccagatgcagtcggcgctttcgccggactgtggcaccgccttggctgctgaagcagcattcgctcacatcttggaaggcctgcgggaccggccggtcctgagcctgaaggagctgctccgggtgatcccggttggccgcagtaaggcctacatgctgatgaaggaggatccgtccttccccaagggcgtaccgctctacgacggcgagaactctcccaagttctactggacccacgaggccatcgcctggttgcagggccgtgccgccaagattggcgccaacaagggagggctgtga

SEQ ID NO: 533750 - DNA, 1410 bp, Stenotrophomonas maltophilia
atgacatcgcctcagcctgcatcgactaacagcaacaggttcgatttctctgccggcggcgcagacgacagcggccgactaagcgagctgatgaagcacctggatgacgagctgctgaaggccaacggcgaacagatcacacggaagacgctcagtcggacactgctccttcttaagaaatcaattggagttgagctcgcgcgcaaggatgagcctgtctcgctggccaccctcaagaccattaggctgatcttcctagccgactacaaaagtaataggaacgtcatcggccttcttatgccgccgccaatagcagccaaagccacgatggagttcgccaccatcaccactttccacagggatgaggctgcctcttccctgatccaagcaatttgcgattcgctcgcacttgagatcgatccggcgagagttcgaatcctatctaacatgctcggaaacttcgatgggcggtctgtagctgagtgcttcgttcttcgaatggagcgcatcaatagcgaggtcctacacatcctcagcttcgcgttcgatcaaaatgatcaagcgctcgcagacgcgctgcactggatggcaggcctcatgaagaaattcgttccagatcgcacgtcgcagggcttagagcctacgcacgaattgatgtacagctacctccaaacgctctcaatccgacacttcacacatcactatccgactcatctggaagagagtagggttcagaaagatatcggcgacatcaggcacgaggtaaagcagcttctcgagcgaatgaatcacagccggccggttcattacagcgccatgacccctatacttccgatcgcccttgttggtcatttcatatctgaatggagcgagcatctatctaagcttgtccataaggccacgggcagctctacctcagcccgaaagctgagaagcattggtgctcgtgccactcgagtgctcattcttcatgccgagcggttccatggctgcacggatcaggcagaaaggattctgtctctgaacgatgtgatagctgcactctcagctgttcgttatcagcaagcaactgggagcaagtacaaaccctactggtacggacagaccgatcagggagacagtccacaggctctgtttgatcttggaatcaatcaaactgatccttaccagcaccagggtgttctacaggtctttctaaatccattctacgactaccgagccgcgttcaatgctactcaagccagccatcacgcctggatgagatatcaagtagccactcttggagcgtatcaatcggtgctggatcttggagacatctttgaggtcacattgggactcagcacgctcaaattccattgtatcaatgctgcgaaggaccttgtcatagctagtcgccgaacgcatacgtaa

SEQ ID NO: 533751 - DNA, 138 bp, Stenotrophomonas maltophilia
atgcgtggccgggtgatccgcgtcggcgccaccttggtgcgcgcgctggaaagtgcgatgtgcggtggcgagcttctactgttcgccggcgaaacgcagatcttcatcacctcgagctaccgcccccacagcgtctag

SEQ ID NO: 533752 - DNA, 1230 bp, Stenotrophomonas maltophilia
atgaacttcggtccccagcatccggcggctcatggggttctgcgcctcgttcttgaaatggacggcgaaaccattgtgcgcgcggatccgcacgtgggtcttctgcatcggggcaccgagaaactggcggaatccaagcccttcaaccagtccatcggctacatggatcggctggactacgtgtccatgatgtgcaacgagcatgcgtacgtacgtgcgatcgaaactcttctgggggtcgaggctcccatccgggcgcaatacatccgcacgatgttcgatgagatcacccggattctcaatcaccttatgaatattggtacgggggcgctggatttaggggccatggccgtgatgctctacgcattccgtgagcgcgaagagctgatggactgctacgaggcagtgtccggtgctcgaatgcacgcgacctattaccgtccaggcggtgtttaccgcgacctgcccgaccagatgccgaagtacaaggaatctcgctggaagaagggtaaagaactccgtcggctgaacgccgcaagagaagggtcgcttctagatttcatcgagaacttcacccgcgaatttccaaagcgggttgatgagtatgaaaccctgctcactgacaacagaatatggaagcagcgtaccgtcggcatcggcgtcgtgagtccgcagcaggcaatggattggggcatgaccggagtgatgctgaggggctctggcgtggcatgggaccttaggaaaaagcgcccctatgcgaagtacgacgccattgacttcgacattccagttggtacagccggagactgctatgaccgctacctttgccgggttgcagaaatgcgacagtcgaacaacatcatcaggcaatgcgttgactggcttcgcgccaatccaggcccagtgatggttgagaacttcaaagtcgccccgccgccccgacaggagatgaagtccgacatggaggcgctaattcatcacttcaagttctttagcgagggctatcaggtgcccgccggcgaaacctacgcagcagtcgaagcacctaaaggagagttcggctgttacttgatttccgatggcgccaacaaaccatttcgagtgcatctgcgagctccaggtttcgcccatctctcttcgctggatgaaatcgtcagggggcacatgctggcggacgtcgtagctatgattggtacctatgacattgtatttggcgaagtagatcgatga

SEQ ID NO: 533753 - DNA, 1089 bp, Stenotrophomonas maltophilia
gtgaagacctcaatgactcggtcgttagtgccttgtattagcgcgctctccattgctttgtctgcgatgacagggtgttctggcaacgaaggcagcgagaaggccgagatgcgcactgcgtacgtggcttcagttcgaccagcctcaggtgatcagcgctcctacattggcacggtacgtgccacgcagcgaggacagttgtccttccctgtgtccggaaaggtctctgcggtactcgttgagcctggtgatgttgtacgaaaaggccaagtgcttgcacgcttggattccgtccccttcgtcgcgcaggaggcttccgctgctggcgatgttgcgcgtgcgcaggcggcgttagatgagatccaacgtcgcgttgagcgactcaatattgcggagaaggccgacgcgctcagcccggcggagatgactgcggcaaaggccgaactggcagctgccgcggccgccgtccgaaatgcccgtgcgcaacatgaactcgccgactggtcgcaaggggaagccaccctgagggcgacgtttgacggggttgtggcttcccgcaacgtcgaggttgggcagtccgtaggtccgggcgccgtcgccatccagattgatggtgctggccgcgagctgtctgtcgcagttccgggcacgtccaccttgaaggtggggcaggtcgtcaatctgattagcggtgcggacaccttggcgagcaaggtcttgcgtgtcgatggtcgtgttgatgctggaggggtacgcacggcctacgtcgctgctcccgaggcggcgactgtgggctccacctggtcggtccagatcaccggggtggatgcgggtccagccaagcttcaagtgccatttcgtgccgttctgccgtcttccgtggacggcaaggcacaggtgcttcggctggcaaaggacggcaagacgaccgagctcgcagaagtgagtcttggccagtatcacggcgactggatcgaggtgagtgggcagatctccgctggtcagcgggtcgtggtcgcgggagccaaagccatccgtccgggcactcagatcaagcctgttgagatgaagatgggatcagaacaatga

SEQ ID NO: 533754 - DNA, 1044 bp, Stenotrophomonas maltophilia
atgtcccccactgcccgcgtacacggtactggtgtcatccaccgtgagcgtgccggtgccggtaacgctgtcgcccagcaccagatcgccatcgaagctcagctcggtgctgttggccaggctgatcgtctcccagttctggtaacggaccacgcctgcggtcttgacgttgctcaggttgagctggtcgatgccactgccaccgtcgaacagcggcaccgcaccgaggttgccctggttgaggttgctgaggttggccacgtcgttgtctgggcccatgtcgatcgcaccgtagacaatgccaccgccgctccagttgaaggtgtcatcgccggtactgaccagtacctgcccgcgcacggtgccatcggtgatggtcacgctgtcgttgccgccactgacactgatgttgccgccgatgtaggccgtgcccgagatgatgatggtatcggtgtcgaagccggtcaccacgttgccgtcaaccgtaccgccagactggtcccacaggttcttgtccagcttcatgttgacgcggccgatgcggccagcggtcatccaggcctggtcgccatcctcgaacgcgccgatgatgcggccaccgctcatgcggaaggtatcgatgttgtcgccctgctgcagcgcgccgatcgtgccaccactcatgatgaaatcatcgcggccactgccctgcgccaccacgccggtgacggcgccgccggtgacggtcatctggtcatcgccgccgccctggtcgacgctgtcgatcgtgccatcgctgagcagcagcacatcattgccatcgccctgcaggacgccgccggcgatgctgccgctctgcatctcgaggcgatcattgcccgcatcgaactgtacgccgctgcgcccgctgatcgttcctcgattgaccagcacgctgtcgcccgcaccgacgaactgcagggcgatggtgttgccggtgctgatgctgccgcggttgtcgacgcggctgccacccccaagctgcacggccacaccgcccaccgaactgatcgtgccctggtttga

SEQ ID NO: 533755 - DNA, 183 bp, Stenotrophomonas maltophilia
atgcccggtagtgccggccgctggccggcatccctgtgtggcgggatcaatgcggttgccggccagcggccggcactaccgttcggcagtttcccaggggaagcgtggcagggcgtccaccgcctgttccagccgctgcagatgcagcaggtcttccgcgccgtggccgaagcgctgggctga

SEQ ID NO: 533756 - DNA, 633 bp, Stenotrophomonas maltophilia
atgcgtgttgctccacgcagacgccccacccagtgccagcccagcgcagaaaccgcgcgaaaccaaggggtccggaacccagcatcggtcaccagaatcggagttaccccttctggaatgagcttgcgcaattgctgcagaaaatgcctctcggcctcggcggagccttgttctttcccgcgaacaatcgtgtccagcagcgtcagcgtgcggccgcccacgggaaccgccgcgcgaagtaagcaccagcttttgtccggcttcaagtcagaccagtcgatgaggatgaccggctgtgggccacgtagcagccagcgagccatgtcggcctcaatggcaccgcgttcgccatgtagatgccgatttcccaacaggcgatcaaacgccttgaggggagctcctacacgctcggccccaggccacgctcgagcgatatcggtcaaggtcaaccgtcgcccaacgatcagcgcttgcaccgcactgagaagggcccgcatgcgcaggacatgcatggccgatagtgagttgggcaagcacttctgcaatacttctctggcgcgcatgaccgcattcttcttttggtttagtcaccttgaaggctgcggcatgcgcgcacttgtttccagagcctga

SEQ ID NO: 533757 - DNA, 666 bp, Stenotrophomonas maltophilia
atgcagaccatcttggtcatgacgatggggcgcaggcgctttgctgcagcctcttcaatggcctggagaggaggcaagccatcgcgctggccttcgtcgatcgcatcgatgagcagaatcgcgttgttgacgatgatgccggcaagtgcgagcagccccagtgttccgatgaaggtcaggctggtgccactcagcttgagtgccaaggtcgcgccgatgaccacgaacggaatgctcgccaggacgatcaggctcttgcggatgctctcgaactgccatacgaacaacaggaacatggcagcaaggcagagcgggagcagcttctcgatgccttcgttggcactcttgctctcttcgatctcgccaccgagttcaacccgcacgccctgcttgcggaattcggaaagaagtggctcgaccttgtccgcgatcccctgggccgtcagctcggagctctttgcaagcacggtgaccgcgcgcgtctggttcactcgctggattgaagacagctgcggagccaaccgaagcttggccacctggcccaggggcacgcttccgctgccatccgccttctggatcgggagtgcctcaagctggccgatatccgtgcgcagtgccgcctctccgcggaggatgaccgggagaacggtgtcgccctcacgataa

SEQ ID NO: 533758 - DNA, 180 bp, Stenotrophomonas maltophilia
atgaccaagatggtctgcattctcggccttgtcccgctgctgctgtttggcggctccatgtggaccagcatgtcgatcgtgatgatcggcggcctcgcccttggaacgctgatcacgctgggcctcattccagcgctgtatgccgcgctctaccgcattcacccgaccgaggaggcatga

SEQ ID NO: 533759 - DNA, 645 bp, Stenotrophomonas maltophilia
atgcgtgagcgtcccatcctgttcaacggtgccatggtgcgcgccatcctggcaggccagaagacgcagacaaggcgcgcgatcaaggacatcccttggcgccctggctgcaatccagatttcagccaggcccgcgccttctccaatgccggcgagttccgcatcgcgggcagccaggaaatgaccaccggcttccggtgccccttcggccagcccagggaccggctgtgggtacgggagacgtggaccaacgcttgggacgaggacaaaggccaatggtcggatcccgagcgctaccactaccgggcagatggggttgaggtcgcccacgtcgatgacatggagcgctcgccttggattccgagcatccacatgccgcgcagggcctgccgcctggttctggagatcaccgacgttcgcgtggagcggctgcaggccatcaacgagaccgatgccgtcgccgagggcgccagcgcggccatgctgccggacatccgactgcgtcgcacccacccgcgcgcggcaaagccaatggtctacgaggacagccgggagatcttcgccgacctctgggacagcaccggcggcgactggaacagcaacccctgggtgtgggtcatcaccttcaagaggatcgacgcatga

SEQ ID NO: 533760 - DNA, 621 bp, Stenotrophomonas maltophilia
atgctgctgatcgaccatcagagcggcctgttccagaccatcggtgacatgccgttcacccgcgtgcgcgcccacgccaccgcgctggccaggatggccacgctggcaaagatgccggtgatcaccactgcctctgttccgcagggcccgaacggcccgctgatcccggagatccacgacgcagccccgcatgcccggtacgtggcgcgcaagggcgagatcaacgcatgggacaatccggaattcgttgccgcagtgaaggccaccggccgcacgcagctgatcattgccggcaccatcaccagcgtgtgcatggccttcccgtccattgccgccgttgccgatggctatcaggtgttcgcggtcatcgatgcctcgggcacctattcgaagatggccgaggagatcaccctggcccgggtggtgcaggccggcgtggtgccgatggacaccgccgcggtggcctcggagatccagcgcagctggaaccgcgacgatgcccagcaatgggccgaggtctacacgaagatcttcccgaactaccagctgctgatcgaaagctacctgaaggcgcaggacgtgcagaagaaccacgagccgctggattcgcagcgcagctga

SEQ ID NO: 533761 - DNA, 225 bp, Stenotrophomonas maltophilia
atgagcacgcaactggttcccgccggccagtaccaggcgcaccgccgcatctggcggcgcctggtgcagaccgcacgactgtgctgtggcattcctgactacgacaactacgtccggcacatgctggataagcacccggaccaggagccgatggactacaagacgttcttccgcgagcgccaggaagcgcgttacggcgggcgcaacggcgggcgctgctgctga

SEQ ID NO: 533762 - DNA, 2082 bp, Stenotrophomonas maltophilia
atgaaagggttttccaaactgggctgggcggcactcgccctgctcggcgcattctgtctgggcaccgtcgccctgcgccgcggcgagcacatcaacgcactgtggatcgtggtggccgcggtctcgctgtacctggtcgcctaccgcttctacagcctgttcatcgccaacaaggtgatgcagctggatccgacccgggccaccccggcggtgatcaacaacgatggcctggactacgtgccgaccaacaagcacgtgctgttcggccaccacttcgccgccattgccggtgccggcccgctggtcggcccggtgctggccgcgcagatgggctacctgcccggcctgctgtggctggtggtgggcgtggtactggccggcgcagtgcaggacttcatggtgctgttcctgtccagccgtcgcaacggccgctcgctgggtgacctggtgcgcgaggagatgggccaggtacccggcaccatcgccctgttcggtgcgttcctgatcatgatcatcatcctggcggtgctggcgatggtggtggtcaaggcgctggccgaaagcccgtggggcatgttcacggtgatcgcgacgatgcccatcgcgatcctgatgggcgtgtacatgcgctacatccgccccggcaggatcggcgagatttcggtggttggcctgatcctgctgctggccgcgatctggtacggcggcaaggtcgccgccgacccggtgtgggggccggcgttcaccttcaccggcacccagatcacctggatgctgatcggctacggcttcgtcgcctcggtgctgccggtgtggctgctgctggccccgcgcgactacctgtcgaccttcctcaagatcggcaccatcatcgcgctggccatcggcatcctggtggtgatgccggaactgaagatgccggcgctgacccagttcgccgccagcggtgatggcccggtgtggaagggcggcatgttccccttcctgttcattaccatcgcctgcggtgcggtctccggtttccacgcactgatctcctccggcaccacgccgaagctgctggccaatgaagcgcacatgcgctacatcggctacggcggcatgctgatggaatcgttcgtggcggtgatggcgctggtggcggcctcgatcatcgatccgggcatctacttcgcgatgaacagcccggccgccgtgatcggtgccgatgcagcctcggcggcgcactacatcaccaacacctggggcttcaccattacccccgagcagttgaccgcgaccgcggccgccattggtgaaccgaccatcctgcaccgcgccggtggtgcaccgacgctggcggtaggcatcgcgcagatcctgcacgaagcgattcccagtggcagcgacgcgatgatggcgttctggtaccacttcgcgatcctgttcgaagccttgttcatcctgaccgcggtggacgccggtacccgcgccgggcgcttcatgctgcaggacctgctgggcaacttcgtgccggccctgaagaagaccgagtcgtggaccgccaacatcatcggtaccgccggctgcgtggcgctgtggggctacctgctctacaccggcgtggtcgatccgttcggcggcatccagacgctgtggccgctgttcggcatctccaaccagatgctggctggcatcgcgctgatgctgggcacggtggtgctgttcaagatgaagcgtgaccgctatgcgtgggtcactgcggtaccggcggtgtggctgctgatctgcaccacctacgccggcttcatcaagatcttcgacagcaacccggcgcagggtttcctggcgcaggcacacaagttccaggccgcgctcgccagcgatacgatcactgcaccggccaagtcggtggcgcagatgaagcagatcgtggtcaacgcctacgtcaacaccggcctgaccgcgctgttcctgctggtggtcggcgcggtgctggtgtattcgatcaagaccatcctggcggcacgccgcaacccgcagcgcagcgaccgcgagaccccgtacgtggcgctgaagccgcatgaaatggtggatctgtga

SEQ ID NO: 533763 - DNA, 852 bp, Stenotrophomonas maltophilia
atgagccttcccgaaccggtccgcgtgctgcgcaccatccgtggcatgcccacctccgacggtgccggcgtgcgcctgacccgcgtcatcggcggcccgacgctgccggacctggacccgttcctgctgctcgatgaattcggcaccgaccgggccgaggactacatcgccggcttcccggaacacccgcaccgcggtttcgagaccgtcacctacatgctcgacggacgcatgcggcatcgcgacaaccatggcaacgaaggcctgttgaccccgggcagcgtgcagtggatgaccgctggccgcggcctggtgcactcggagatgcccgagcaggaaagcgggcagatgcgtggattccagctgtgggtgaacctgccggcgaaggagaagatgaccgagccgaagtaccaggagttcgcgcccgagcgcattcccgtggtgcagccggcagccggcgtggaagtgaaggtgatcgccggctcggtcgacggcacccgcggcccgatcgtgcagccggccaccgagccgctgtatctcgacatcacgttggcgcccgaccgggcctggacttacacgctgccggaaggccacaacgcctttgcctatgtatttgaaggcggactgacggtgggtgaacaggacgccgcccgtgatgttgcgcgccaggagctggcggtgctgggcggcggcgaacagctgcatgtttcggctggcagcgaaggcgcgcggctgatcctggtggccggccgtccgttgcgcgagccggtgatgcggcacggcccgttcgtgatgaacacgcggcaggaactgatgcaggccttcgtcgatttccaggaaggcaggttctga

SEQ ID NO: 533764 - DNA, 1293 bp, Stenotrophomonas maltophilia
atgggtcagtctgtcgtagtgttgggtgcccagtggggcgatgaaggcaagggcaagatcgtcgatctgctcactgaggaaatcggcgccgtcgtgcgcttccagggcggccacaatgccggccacaccctggtcatcaacggtaagaagaccgtcctgcacctgatcccatcgggcatcctgcgtgacgatgcgctgtgcctgatcggcaacggcgtggtgatctcgccggccgcgctgcagaaggaaatcgccgagctggaagcctccggcgtggaagtgcgttcgcgcctgaagatctccccggccgcgccgctgatcatgccgtaccacatcgccctggaccaggcgcgcgagcgcgcagccggtggcaaggcgatcggcaccaccggccgcggcatcggcccggcctacgaagacaaggtggcgcgtcgcggcatccgcatcgccgacctgcattacccgaagcagctggaagaactgctgcgcaccgcgctggattaccacaacttcgtgctgaccaagtatctgaacaccgatgcggtcgacttccagaagaccttcgacgaagcgctggccttcggcgaatacgtgcagccgatgaagtccgacgtggccggcatcctgcacgacctgcgcaagcagggtaagcgcgtgctgttcgaaggtgcgcagggcgcgctgctggacatcgaccacggcacctacccgtacgtcaccagctccaacaccaccgtcggtggtgcgctggccggttccggcgtcggcgctgattcgatcgactacgtgctgggcatcgccaaggcctacgccacccgcgtaggcggtggcccgttcccgaccgagctggacgacgaagtcggccagggcattcgtgaccgcggcgccgagtacggtgcgtcgaccggccgtccgcgtcgttgtggctggatggacatcgtcgcgctgaagcgcgccgtggccatcaacggcatcagcggcctgtgcatcaccaagctggacgtgctggatggcatggaaaagctgaaggtctgcatcgcctacgaatacaacggcaagcgcaccgagtacgcgccgctggacgcgcagggctgggaagaatgcaccccggtgtacctggagttcccgggctggagcgagaacacccacggcatcacccagtgggacgacctgccgccggccgcacgcgcctacctgcgttcgctggaagagctggccggctgcccgatcagcatcgtctccaccggcccggaccgcgaccacaccatggtcctgcaggatccgttcgcctga

SEQ ID NO: 533765 - DNA, 765 bp, Stenotrophomonas maltophilia
atgcccggcgttggtgacaggaaaagccccgcgcacgcggggctttttcgttactgtgtggccaggccagcggggaagcgacgcgatgaccaggatgtcagcgtgaaaggcgggacggtagtgcgggtcaccctgtgggtgtcgtggagcctgtggtgcatggccggcctggtacttgtgttgggtgcagccgccaatgccctggcttcgcgcacgcagacggtgccgctggtgctgcgccctggcgcaaccgcccagatcaccgtctaccgcctcatcgatgaccagcttcggctgcgcctgcgctatgccgcggacggtacagaggctgaccctgaagtgctgctgcgcatcgagactcccaccgatcatggagacttccgcgcaggggagcgttggggagtggccgggcagggcatcgaccgcgcgctggtatcggttgagtccagcggcctcatggcctcctactttggttacggtcgcggcgacgcattgccacgcggccgctcatggctgcgggtaaccgtgctggaggtggatccggcgctggcgggacgcactgcagacatcgagctgcagccgccgctgggtctgctgaagctgaccgacctggactacctctggctgtggccgttctttttctggaagatggcggcgctgttcctgctgattccgggggctgcgttgactgtcttcactgtggcgttgcggcgccagcagcgccgggcatcggtgccgccgacttcagcaagggatagggattga

SEQ ID NO: 533766 - DNA, 2004 bp, Stenotrophomonas maltophilia
atgaggcattatctcagtgcacttccgctcctgcttgcctgcatgacaagcccacagtccgcgcacgcccaggacgcatacaccggaagcaacttcaagttcctctacgcgtacaacatcatcggcaatgctgaccccgcagtccgctcccagctgaccgagctgcacaatgccggcgcgaatgtgattcccgtgacaggatggaatacgggtgaactcagctcccgtttgcaggcgctgcggcaggacccgctgttatccagattcaaagtgctgctccagttcaacggacccgttcacgacgcctggtacgcagatcccggcagtgcctgctctcctggcaacgagcgtctaccagactggcttcaacaggagcttgacgctgttgctgcacttgccctgcagaactcagacatcgtagttggttactacacttttgacgaaccagctctgccacagacaccacagaaccttggtatctgcaagcgcttccaggaactggtctacgaaaggcttcggcaagcggatcccgatgcatccgcgcgcccggtgatcatcgccaatctgatgggcacgttgagcgatgtccagatccagtacgcaatgagcccacacgcacaggatgtcgtcttcgttgaccagtatcagaacaccgtcaacgaacaggtcgctcagtaccagaaatggaaacggcacggattgctgggaggtggaatggttccggtccttcctgctttcaactacaccggctgcaatgaccccggactgcgcaccagcttccgggtgaaactcgaagcttcattgcaagccgtgtatggagcggaccgccctcgcaacctaggcagcgcctactttgcgttctggccgggtgcacgccctgattttcagttcgacgggcagaactgccctgccatcttcaactcaatgatcgatgacctcacgcatcaaccggaccttcaggtcacgcggatcgacacgattccaagccagttccgggcaggggagccagtccgtttccgggcaaccatccgaaatgccggcaatgctccgtctcccatgaatcaccacagtgtcctcgtccatgaggaaggacagtgtttcgagggaggatgccaatggggaatcttgaccatcagtctggcccctggtcaacaggccaccatagatctgaaccagggacccagctggacaccttcggcagggctgcatgcgatgaccgtgttcgctgatgacgcggaccgcatcaaggaactcgacgaacacaacaacgagttgacccgggaaatcatggtgggggatctgcccgatctgcagccatacctgatcgaaacgattccagccagtttcaagccaggcgatgcagtgacattccgcacggcagtaaccaaccgcggatcaatgcccgcacctgcgggttggctcggagcggtctatctggtaaacggcgcgtgcccagccagtggctgcccctggagtggcctgacaacggccttggcgccgggcgaatccgtatggttgagccccgcaggccccgtttggccagccgcgggtggccagcaacagatcacctccattgttgacgaccaagggctgatccaggagtcgaatgagggcaacaaccagctggctcgaatcatccaggtctcggacaagccagaccttcggatcaccagcgcccattcacagccgctgcgtccgaaatccggcgatgcaacctcgttcaccgcaaccatcgagaatgtcggctcggtcgccgccagcgcgccttggattgggctgatggccatgaagaacgggcagtgtttcattgaaggttgcgtatggggcggcctccagaactacaccctggcacccggcgccagcgtcaatgtcaggacttacaacgacgtctggcgcccgaccccaggggtgcactccatccagctgctggttgacgatcagaacaccgtgagcgagtcacgggaggacaacaacagcatcgacatcatggttactgtggattga

SEQ ID NO: 533767 - DNA, 2124 bp, Stenotrophomonas maltophilia
atgaactacttgaggaacgtcagggttgcctggcgtcttgggctgggctttggcctgttgctgctgctggtcgccgccgtggtggccaccggcgccactgccagtgtcgtgcagaagcgcgcgatgcagcaggtggtcgacgtcagcgtggccaaggtgcgcctgctgtcgcagatgctcgatgccaacaaccagatgatggtcgtgcgccgcgaaatgctgatccgtcagggcgaagaccgcggcagcgacgagaagcgcatcgccgacctggtcaagcgctatgaggccagctggaccgcctaccaggcgctgcccagcgatgcccagggcaagaccatcgcggaaaccatcgcggccaagcgtgccgttgcgcgcccgctcaacaagcagaccagcgaactgatggagcagggcgattatcccggcgccgtggcgctgaccctgggcgcggtgcaggaagcggccaacggctggaacaaggcgctgtccgatggcgtggacttcgaggagaaggaaagccgtgaagctgccgccgaagcgatccgcctgggcgaacgcagcctgctgcagctgctggtgctgggcggcgtcgcgctgcttgccggcatcggcgcctcggtgatgatcggccgcagcctgaccggcccgctggcgcgcgcggtgaacctggccgagcggctgtccaaggtccagctggaccaggagttccgcctcggtggccgggatgagctgacccagctgggcgaggcgatggccagcgtgcggcagagcgtgcaggcggcaatcggcgcacagctgcagatggctgagcagcacgaagcgggtgcgatccgctatcgcatggacgacagtgccttccccggtgatttcggccgcatggtgcaggccaccaacagcctggtcgaatcgcacgtgcaggtggagctgctgatggccgaagtgatgcagcgttacgcgatcggcgacctcagccgtgacctgccggactacccgggcgagaagggcacgctgacccgcactctggccgcggtaaagcagagcctgatggcgatcaacgcgcagatcgatgaactggcccgtgcggctcgcgccggcgacttcagcatgcgtggcgatgctgctgcgttccagtatcagttcaaggcgatggtcgaacacctcaacggcatgatggccagttcccaggccagcattgccgatgtttccgacgtgctgcgcgcgatctcgcacggtgacctgaccgcacgcatggacggtgagtacgacggcgtgttcgcgcgcatgcgcgacgacgccaataccaccaccgcgcagctgacgggcattgtgcggggcatccaggtggctgccgacagcatcaacaacgcggcccaggaactggccgccggcaacaacgacctgtcgcgccgcacggagcagcaggcggccaacctggaggaagctgccgcgtcgatggaggagctgacctccaccgtgcgccagaacgccgagctggcgcgtcaggccgacagcgaagcgcatgccgccggtgccgccgtacgcgagaccgagcaggcgatggcgcagatggcctcggtgatgggtgagatcgatcagtcctcggcacgcatctcggaaatctccaccgttatcgacggcatcgcgttccagaccaacatcctggcgctgaacgctgcggtggaagccgcgcgcgcgggcgagcagggccgtggttttgccgtggtcgccagcgaagtacgcacgctcgcgcagcgcgccggcgtcgcggccaaggaaatcaaggagctgatcgaagacgccgctgccaaggtgaagagtggcctggcggtgaccgttgaatcggaagcagcgatcgcacgcgtcgcccaggccagttcgcgcaccacccagctgatgagcgacatcgcagcggccagcaaggaacaggccgccggcatcgagcaggtcaaccaggtggtggtgcagatggaccaggtgacgcagcagaacgcggccctggtggaagaagccactgcggcgagccgcgcgctggaagaacaggcgcatgcgctgaccacgtcggtagcggtattcaaggtggaaggcgcagtggcttcggccgtgccgcgccgtgcagcctga

SEQ ID NO: 533768 - DNA, 288 bp, Stenotrophomonas maltophilia
atgcgcaagccacgctggctcagctggaccggcattgccctatgcgcgctctatctcgcgctgaccacctggctggtgctcgatgcccggtccaacagcgaccccaagagcgcctacatcctcatgcaactgccggtgatgctgcagaccgcagcactcaacgtcatcggcgtgggacgctggctttccggaatgacctggatcaccgtctaccttctggtgattcctcccacgcttggcgtgctgtacgtgcttggggccatgctcggcagcgtcctggagcaatga

SEQ ID NO: 533769 - DNA, 702 bp, Stenotrophomonas maltophilia
atgaacgccgtgatgctcccgatcgtgatgctgcccgggctggatggcagcggcctgctgtcgacatgcttcgtggaagcgatgcaggaccagggggttaccgtgcaggtgctgccgctgcccatgcacgggccacaggactacgttacattggcgtcgatcctgcgcccgcagcttcccatctctccctttgtgctgctggctgaatcgtttgccgggccgctggctatcgaactggcggtggcttcaccgccggggttgcgcggattgatactgagtacgaccttcgcgcggcgaccggtgccgctgccagcggcgagcgcacgcttgcttgcccctgcatggccaccgccgccgctggcgttgctggcccggcttctgctggggcattggcggacacgcatgaaccttcgcgagctgcggcatgcgatcgctgcggtaccgaccgcgatcctgcggcagcgcgctgcggcgacactgcagatcgatgtccgcgcgcagttgccgaagctcatgctgccgacgttatgcctgcatgcacgacaggaccacctgttgtggccgcccagcgtggccgagctgcaggtcttgttgcccgatgcccggcacgtatcgctggaagggccgcatctactgctgcaggcccgtgccgaggcagccgcagccgaagttgccgcatggatgagggcgctcccctcctga

SEQ ID NO: 533770 - DNA, 489 bp, Stenotrophomonas maltophilia
atgccccgtggtgacaaatccgcatacaccgaaaagcagaagcgccaggccgagcacatcgagcaaagcgaacgtgatcgcggcgcgagtgaaggcaccgccgagcgcattgcctgggccaccgtgaacaagcaggacggcggcggcaagcgcgccggcagtgcccgcaagggcgcgaagaaggcgaccagcaagaaggctgccaagaaggcgcctgccaggaaatcggccacaaagaaggccgcaaccaagaggacggcggcgaagaaggcacctgcgaagaaggcagtggcgaagaaggcaccggctcgcaagaccgcgacaaagaaggccgcaaagaagacggcgaagaaggcagcggtaaagaaggcgggtacggccgccgcgcggagcgccgccgcgaagaaggcagccaagacgcgagccgcgaagaagaccgtgcgcaaggcggcggcgaagaaagccgcgcgcacgcgtgcacgcggctga

SEQ ID NO: 533771 - DNA, 2091 bp, Stenotrophomonas maltophilia
atggccgccagcaagccgaccggcaagcgcgcaaccgtccctgccgaaagccaccgccggggcgatggcgatgaactgcaccagcaggccgggggcagccatccggcaatgaccaccgaccagggcattccggtggcggacaaccagaactccctgcggcagggacctcgggggcccacgctgctggaggacttcatcctgcgcgagaagatcacccacttcgatcacgaacgcattcccgagcgcatcgtgcacgcacgtggcagcgcagcacacggctacttcgagctgacccgatcactggcagcccatacccgcgcacgcatcctgaccgaggtcggcgtgaagacgccggtattcacccgcttctcgaccgtggccggtggcgcaggctcggtggataccccgcgcgacgtgcgcggctttgcggtcaagttctacaccaaggagggcaactgggatctggtcggcaacaacatcccggtgttcttcatccaggacgcgatgaagtttccggacctggtgcacgcagtgaagatggagccggaccgcgccttcccgcaggccgcgtcggcccatgacacgttctgggacttcatttcgctgatgcccgaatcgatgcacatgatcatgtgggcgatgagcgaccgcgccatcccgcgttcgctgcggatgatcgaaggcttcggtgtgcacagcttccgcctgctgaacgaggccggcgagtcgacgttcgtcaagttccactggcggcccaagctgggcattcagtccacggtctgggacgaagcgttgaaactgcaatcggccgacaatgacttccatcgccgcgacctgttcgaggccatccagcgcggcgactttcccgaatgggagctggcggtgcagctgttcaccgaagaagacgccgacgcattcccgttcgaccacctggatccaaccaagatcattcccgaatcgctggtgccgttgcaggtgatcgggcgcatggtactggaccgctggcccgacaacttcttcgcagagaccgagcaggtggcgttctgcccggccaacgtgccgcccggcatcgacttcagcaacgacccgctgctgcagggccgcctgttctcctacctggacacccagctgctgcgcctgggcggcccgaacttccaccagatcccggtgaatgcaccgaagtgcccgtttgccaatcatcagcgcgacggccacatgcagatgcaggtgcccaagggccgcgtcgcctacgatcccagctcgctgcaggacgacaccccgcgcgagacgcctcccggattccgcagccatgccagcgccgacgatggccgcaagggccgcacccgcgcggagagtttcgccgaccactacagccaggcccggatgttcttccgcagcctggaaaagccggagcaggcgcacctggcatcggcgctggtgttcgagctgtccaaggtggaaacgctgaaggtgcgggtgcgcaccgtcagccacctgcgcaacatcgatgacgcgctggcgcagcgcgtggccgatggcctggccctgcctgcgctgcccgacccggccccaaccgccacgccggtgcgagacatgccgcccgctcccgaggtgcgcgtgatcgggcgtaacaagccgaccctgcagggtcgctgcatcggcatcctgttcgacgaaggctccgacgcgcgcgtgattgccagcctgagcaaggccgcccggaaggcaggtgcagacgtgaagctggtcgcgccaaaagtgggaggcgccacgctgagcgatggcgcattgcaggcggcagatgggcagctggcgggcaccccgtcagccgtgttcgatgcagtagccgtggtgctcagccttgaagccgcgaaggccttgtcgaaagagagtgcagccgtcgaattcgtcagccaggcgtgggcacacctgaaggccatcgccagcgacgcgggcggccaggtgctgctgaaggcggcgcgcgtcggcaacgaccccggcatcgtcgaagcagaagacgccaaggcattcctggcggcggccgccacccgccagtgggcgcgcgagcccaagctgcgcctgctggcctga

SEQ ID NO: 533772 - DNA, 723 bp, Stenotrophomonas maltophilia
atgcgagtcgagcccgccgacatcgaagccctgttcgacgccatcccggatgtgctgttcttcatcaaggaccgccaggggcgttacacccacgtcaaccagaccatgctgcggcggctgggtctgcgcgcgcgcaaggacgtgatcgggcgtacggcggccgaaatctacccgaccggcctcagtgcggactacgttgaccaggacgcccgcgtgctgtccggtgaggtgatcgagaacctgatggagctgcacctgttcgccaaccgcgaaccgggctggtgcctgacctgcaagcgcccgctggtggtcgacggggccatcgagggcctgatcggcatttcccgcgaccttggccagaaggacagcctcggtacccagtacgagcagctgcggctggcgctggcccacctcaacgcgcactacgccgagaacgtgcgcatgcagaccctgctggacatcaccggcttttcgctgtccaagctggagcgcagcttccgcaaggtgttccagatgaccccgcagcaggtgctgacccggctgcggatccagatggccatgcatctgctgcatggcgacgacagcatcgcctgcatcggccaggcctgcggtttcagcgaccagagtgccttcacccgcaagttcaaggctgaaaccggtttctcgccgcgtgcctatcgtgcccgtatcggtgggaacgtcggcgagccggcgctggcctga

SEQ ID NO: 533773 - DNA, 1368 bp, Stenotrophomonas maltophilia
atgcccaactcgattccgaccgcttcgccgtcccgcctcggacattcgctcaagccccgccagctgatcatgatgggcctgggcagcgccatcggcgccggcctcttcctcggctcgggcgtgggtgtgcaggcggccggtccggcggtcctggtgtcgtatctggtcgccggcgccctggtgatcatcgtgatgaacgcgctgggcgagatggcggcggccaagcccaccagcggcgcgttctcggtgtatgcagccgacgccatgggcgctaccgccggtgccaccgtgggctggctgtggtgggtgcagctggtgatcgtgatcgccgccgaagccgtgggtgcggccgggctgctggccacggtctggccggcgataccggtaccgatggcggcgttggcgttcatgctgttcttcaccgcgatcaacctgctcggagtgaagaacttcggcgagttcgaattctggttcgccatcctcaaagtcgcggcgatcctggcgttcatcgccattggcgtggcgctgctgatgggatggctgccgcaggtgacctccccgggcctgagcaacttcaccgaacacggtggttttgcgccgaagggcctggccgggatcggcgcggcgctgctggtggtggtgttcgccttcggcggcaccgagatcgtggccgtggcggcggccgaaaccgaagaccccgagcgcagcattgcccgtgccatccgcaccgtggcctggcgcatcctggtgttctacatcggctcgctgagcgtgatcatcgccgtggtgccgtggaccagcgaggcgctgaagtcgccgttcgccgccgtgctggacatcgcccgcatcccgggcgctggtaccgccatcacgctgatcgccgtgatcgcgctgctgtcggcgctcaatgccaacctctacggcgcctcgcgcatgatgtattcgctggcgcagcgtcgcgaagcgccggccgtgcttggctggaccgacccgcgccaggtgccggtgatcgccgtgctggccagcgtgctgttcggctttgccgccacggtgatggaactgctgttcccggaccgggtgctgccggtgctgctgaacatcgtcggttccacctgcctgctggtgtggacgctgtcgctggtctcgcagctggtgctgcgtcgtcgcgcggatcgtctgggtacccgactgccgttccgcatggccggtttcccgtggctgacctgctgtgcactggcgatccttgcgctgatcttcggcctgctgctgagtgagtcgcacacccgcctgcagttcctgtcgatggtggcgttgaccgccacgatcgccgccagcagtgccatcgcgcggcgcatgcgccaggcgtga

SEQ ID NO: 533774 - DNA, 411 bp, Stenotrophomonas maltophilia; identical to SEQ ID NO: 495584

SEQ ID NO: 533775 - DNA, 2868 bp, Stenotrophomonas maltophilia
atgtcccagaacaccccttccctgcgtgagctcgagcaccacaatgcgttcgtcgagcgccacatcggccccaacgatgccgagatcgcgcagatgctcgacgtcgtcggccacgcgtcgctggatgcgatgaccgatgccatcgtaccggccaagatcaagtcgccggcgccgctggcactgccggaatcgatgaccgaagtgcaggcactggcgaagatccgtgcgatcgccgacaagaacaccgtgctgcgcagcttcatcggccagggctactacggtacccacacgccgaacgtgatcctgcgcaacatcctggaaaacccggcctggtacaccgcctacaccccgtaccaggccgagatctcgcagggccgcatggaagcgctgatcaacttccagaccctgtgcgccgacctcaccggcatggaaatcgccaacgcctcgctgctggacgaagccaccgccgcagctgaagcgatgaccttggccaagcgttcggccaagtcgaagtcggacaccttcttcgtgcacgacgccgtgcacccgcagaccctggaactgctgcgtacccgcgccgagcccatgggcatcgtgctgcgcgtcggcaccccggccgaggcactggaagcagaagccttcggcctgctgctgcagtacccggacaccttcggccagatcggcgactacaaggcgctggtcgaggccgtgcacgcgcgcggcggcctggtggccgtggccaccgacctgctggcgctgaccctgctggccgccccgggcgaatggggtgcggacatcgtggtcggcaacagccagcgtttcggcgtgccgttcggcttcggcggcccgcacgccgcattcatggcctgccgcgacgcctacaagcgctcgatgccgggccgcctgatcggcgtctcggtcgatgcccagggcaacccggcctaccgcctgaccctgcagacccgcgagcagcacatccgccgcgagaaggccacctccaacatctgtaccgcacaggtgctgctggcggtgatggcctcgatgtatgccgtgtaccacggcccggaaggcctgacccgcatcgcccggcgcacccaccgcctggcctcgatcctggccgccgcgctgcgcgaggccggcgtgcaggtcggtggcgacttcttcgacacgctgcacatcaccggcgtgcacgccgatgagattcacgccaaggcccgcgccgccggttacaacctgcgtgcgatcgacagcgactcggtcggcatcagcctggacgagaccgccacccgcgccgacgtggtcgcactggccgccgtgttcggtgcgcaggccgacgtcgacgcgctggatgccagcaccgccgatgcgctgccggccggcctgctgcgccagtccgcattcctgacccatccggtgttcaacacccaccacagcgagcacgaactgctgcgctacctgcgctcgctggccgacaaggacctggcgatggaccgcacgatgatcccgctgggctcgtgcaccatgaagctcaacgccaccgccgagatgatcccggtgacctggccggagttctcgcagatccacccgctggtgccggccgaccaggcgctgggctacaaggaactcatcgacacgctggaagcgatgctggtggaatgcaccggctatgacgcggtcagcctgcagccgaactccggcgcgcagggcgagtacgccggcctgctggcgatccgcgcctaccaccgctcgcgcggcgaaggccaccgcgacatctgcctgatcccggattcggcgcacggcaccaacccggcctcggcgcagatgtgcggcatgaaggtggtggtgaccaagaccgatgccaacggcaacgtcgacgtcgaggacatccgcctcaacgccgagaagtacagcgaccgcctggccgcgatcatgatgacctacccgtccacgcacggcgtgttcgaggaagaggtggtggagatctgcgagatcatccacaagcacggcggccaggtgtacaccgacggtgccaacatgaatgccctggtcggcgtggccaagccgggcaagtgggggtcggacgtttcgcacctgaatctgcacaagaccttctgcatcccgcacggcggtggcggcccgggcgtcggcccgtgcgcggtcaaggagcacctggccccgttcctgccgggcaagctgggtgacaacggcccggtcggcatggtcagcgcggccagcttcggcagcgcctcgatcctgccgatcagctggatgtacatcgcgatgatgggccgcgacggcctgcgcaaggccacccaggtcgcgcagctcaacgccaactacatcgccaagcgcctggccccgcacttcaagaccctgtacaccggccgcaacggcctggtggcgcacgagtgcatcctggacgtgcgcccgctggagaagaccagcggcatcggtgccgaggacgtggccaagcgcctgatcgacttcggcttccatgccccgaccctgagcttcccggtggccggcacgctgatggtggagccgaccgaaagcgaatcgctgcacgaactggatcgcttcatcaacgcgatgatccagatccgcgaggagatcaccgcgatcgaagacggccgcctggaccgcgaggacaacccgctgaagaacgcgccgcacactgccaccgcagtgaccgccagcgagtggacccacgcctacccgcgtgaactggccgccttcccgctggccagcctgaagcagagcaaatactggccgccggtggcgcgtgtcgacaacgtgtacggcgacaagaacgtgatgtgcgcctgcatcccggtcgatgcctacaaggatgatgaagtcgaggcgtga

SEQ ID NO: 533776 - DNA, 1251 bp, Stenotrophomonas maltophilia
atggccctgccggacgccttctccatgaccgccgctgttgctccttccacccgccgcatggccctgctgctcgccggcctggccatgttcggtccgttctcgatcgacaccatcttccccgcgttcccgcagctggcccagcgcctggcggtggacgaggtggcggtgcagcagaccatcagcgtgtacctgctgttctacggcctgatgagcctggcacacggcccgctgtccgatgcctggggccgcaagcgggtgatcctcggcggcctggtggtgttcgtcggcgcctcggtcggctgtgcgctgtccaccgatctgaccacgctgctggggttccgcgccctgcagggcctgtccgcaggcgtcggcatgatcgtcggccgcgcggtgatccgcgacctgtaccacggtcacgacgcgcagcggctgatgagccaggtgtcgatgctgttcggcatcgccccggcgatcgcgccgatcatcggtggctggatcctgctcagcggtgctggctggccgctgatcttctggttcctggtggtgttcgcactggttctgctggcggccaccgcccgctacctgccggagacccatccgctcgaagcgcgcgttccgttgtcgccgcgggtgctgatgcgtgattacgtgcgcatcggtttcaatccgcgcttcctgcgcctggcgctggccggcagcatcggtttcggtggcatcttcctgtacatctcctcggcaccggtgttcgtgatgcagcacctgcacctgggcgagggcggtttcgcctggctgttcatccccaccatcggcggcatgaccaccggctcgttcctgtccgggcgcatggccgggcacaccacgcccacccgccaggtctccattggtttcggcctgtgcgcgctgtcggtgctgctgaacgtcggctacgtggcgctggcgccgcagttcgtgctgccgtgggcggtgctgccgatcttcctgggtggcatgggcatggcgctgatcttcccgatcctggcgctggcggtgctggacatgtacccgcaccagcgcggcctggcctcgtcgctgcaggccttcgtgcagctgatgatcagcaccgtggtggccggcgtggtgtcgccgctgctcagcgccagcccgctgcacctggcgttgggccaggctgggttcttcggcgccggcttcgtgttctggtactgggaacaccggcgcgaacgcgcggcgcaggcagcctgcacgggtcactga

SEQ ID NO: 533777 - DNA, 894 bp, Stenotrophomonas maltophilia
atggctgcgcagcagacctaccgcctgttcgaggtggcgctgaaggagcgccgcgttctttccccttccctggaccgcatggtgttcaccggtgccgacgtggcgcggatgacgaccggagggccggaccagcgcatcaaggtgttcttccccttgcccggccaggaggtgccgcaggtccccagcggcgaggactggtacccacgctatcgggccctgccggacgatcagcgcccgccgatgcgcacctacaccctccgccagctgcgtgcagagcagggcgaggtcgatgttgatttcgtgctgcatggcgagaccgggccggcctcgcgatgggccatccatgcacggccgggcgaccgcgtggtgctgctggccccggatgctgactgcgccgacagcagcgagggctgggaatggaagccgccggccggcgttggccaggtgctgctggtggctgacgagaccgcgctgccggcagtggccgggattctcgaggaactggcggccagggtggatccgccgcgtacgctggccctgctggaagtggcgcaggccggtgatgcggttcgcctgaaggcgccggccacggccgagctggtctggctgccgcgcgggcgggcggcgtacggggcgcccctgttgcaggcggtgcaggcgcgcctggccgcctcgagcgtggtcgctggcgaagaactggaagagatcgacgttgacgcgcagattctctgggaacaggccgatgccagcgtggccgggccgctgtatgcctgggtggcaggcgaggcgggagcggtgatggcgatccgtcgccatctggtccgcgagtgcgggctggaccgccgcacgatcaccttcatgggttactggcggcacggcaaggtgctggactga

SEQ ID NO: 533778 - DNA, 393 bp, Stenotrophomonas maltophilia
atgtccaccagctccaagacccgccgcgaccagcgccgtcgccgggaaaagcaggccgccaacaaggccgctgcccaggcctcgccggtggagccgcatgcggaactgcgcgacgcgcagcgcaccctgctggccggtgtcgtgcgccgcgatggcgaatgggtgctgggcatggacggccgtatcgccggccacagtgactccgccgcgcaggtactggcgctgatcatgcaggccggtgaactgcacgagcgcaacggcacgccggtgcgcctgatgtactccgatgcgctgcgcgacgccgcacaggccgaagcgcaggagaagggccagaccttcgaggagttcaaggcggacctggccgcggcgatggcggcgaagaaggacagctga

SEQ ID NO: 533779 - DNA, 1965 bp, Stenotrophomonas maltophilia
gtgaaacaccgtcatctcctgctggcctcggcaatcgccgccgccacgctggccctggccgcctgcaagaaggaagctgccccaggcaccgataccgccagcagcagcgccccggccggcgaaaccgccgaccagttcgtggcccgcatcaatgccgagttcaaggccgcctacccggagatgacctcggcgcagtggctgtcctccacctacatcaacagtgattcggaacgcatcgcggccaaggccaacgagcgctcgctgacccagctcaacagctggatcgaacaggctgcgaagttcgacggcaagccgatgagcgaggacagcaagcgcgcgatccacctgctgaagctgatgtcgtcgatgccggcaccgcgcgacccggccaagctggccgagctgacccagatcgccacccgcatggaaggcagctatggcgccggcaagtactgcaccgatgccaacgatccgaactcctgccgccagctgggcgagctggagcaggtgctggcacgcagccgcgactatgacaagcagctcgacgcctggcagggctggcacagcaccaccaagaacatgcgcggcgactaccagaagttcgtcggcctggtgaacgaaggcgccaagggcatgggcttcaccgatgccggccagatgtggcgcagcggctatgacatgccgccggagcagatcggcccggaaaccgaccgcctgtgggaacaggtcaagccgatgtacgagcagctgcactgctacgcacgcggcaagctggacaagacctacggcaaggacaaggccgaagtgggcaacggcctgatcgccgcgcacctgctgggcaacatgtggcagcaggactggtcgaacctgtgggaccagctggaaccgtacccgggcgccggcagcctggacatcaccgcggcgctggagaagcaataccagaccaacctgagcgcggcgctggccaaggccggcaaggatgccaacgtggccgcgcagtacaaggcgcagcgcgaggccgaactgcgcaccgccaagcagatgaccgaacgcgcgcaggacttctacgtatcgctgggcatgccgtcgctgccgcagtcgtactgggaacgcacccagttcatcaagcccgatgaccgcgatgtggtctgccacgccagcgcctgggacatgaacatggaaggcgacgtgcgcaccaagatgtgcatcaagccgaacgaagagaacttcaccaccatctaccacgagctgggccacatctattacgacctggcctacaacccgctgccgccgctgttccagggcggtgccaacgatgggttccatgaagcgatcggcgacaccatcgtgctggcgatgacccccaagtacctcagctcgatcggcctggtcgatgcgccgaccgaaagccgcgaagcggtcatcaacaaccagatgcgcatggcgctgtcgggcgtgtcgttcctgccgttcgggctgatgatcgaccgctggcgctggggtgtgttcgatggttcgatcaccgccgacaactacaacaaggcatggtgggacctgaaggccaagtaccagggcgtggcgcctgccagtacccgtggcgaggagttcttcgatccgggcgcgaagtaccacgtgccaggcaacaccccgtacacccgctacttcctggcgcgcatcctgcagttccagttctacaagggcctgtgcgacgcggccggctacaagggcccgctgcatgagtgcaccttctacggcaacaaggaagccggccagaaatactgggcgatgctgagcaagggtgccagccagccgtggcaggccacgctgaaggagctgaccggcaccgacaagctcgatgccggcccgatgatcgagtacttcacgccggtcaacgagtggctgaagcagcagaacgaaggccagatgtgcggctggcaggccaacgcggcaccggcggcgaaatga

SEQ ID NO: 533780 - DNA, 1650 bp, Stenotrophomonas maltophilia
atgagtgcatcggtccaacgccccgcccgcccttccgcgctggcgggtcttcgccactggcggccacagctgtccaccgaagcactgatcgccttcaccagcctgttcttcgcggtggccggcaacggcctgttctggcacagcgcgatggccagccatccgggcagcctgcgctacgcgctgtcgctgctgctgttgctgctgggtgcgcacggcgtgctgctgggcatcctggtctggcgctggaacgccaaagtggtgatcagcctgctgctgctggtgaccgcattcgccgcacactacatgagccgctaccacatctacctggatgcggacatgctgcgcaacgtgctggcgaccgaccccaaggaaagccgcgagctgatgacggtatcgctgctgtggccggtactgctgctggcagtgctgccgatggtggtgctgtggcgcgtgcagctgcgccgccgcagctggggccgcagcctgctctggcgcgtcggcttcctggtggtggcggcagtgacggctgtcggcggcgcgttgatctcgttccaggatgtctcggcactgatgcgcaaccagcgtgaagtgcgctatctcgcgacaccggccaatgtcctgttgggcatgccgcgtgcattgcgtggcgacaatccggtgcagcgcgcgccgaagctgccgatcggcaccgatgccaaggccaccccgcgcgcgccggccagcaagccgcgcctgctggtgatcgtcatgggcgagaccgtgcgtgcgcagaactgggggctcaacggtggccgcaacaccaccccggaactggcgcaggccagcgtgatcaatttcccggacatgcattcgtgcggcaccagcaccgaggtttcgttgccgtgcctgttctcgccgtggggccgccatgactacgacgagaagaagatccgcgcgcaccagtcgctgctgcacgtattgaaccgtgccggcatcgcaccgttgtggcgtgacaaccagtccggctgcaagggcgtgtgcgaaggcctggacttccagtccctgtccgatgccaccacgccgggcctgtgcgccgatggccgctgcatggacgagatcctgctgcaggacctggccacgcaggtacgcgccaggcccggcgaccgggtggtggtgctgcaccagctgggcaaccacggtccggcctacttcgagcgctatccgcccgcattccgccgtttcaccccgacctgcgatacccgtgacattggccgttgctcgcgcgaagagatcaccaacagctatgacaatgccgtgctgtacaccgatcacttcctgacaaaggccatcggcacgctgcagggcatgcaggattacgacacggcgatgatctacctgtccgaccacggcgagtcgctgggcgagaagggcctgttcctgcacggcgtgccctacgccatcgccccggccgagcagacccgggtaccgatgacgatgtggttctcgccaggcttcgccagcagccgtgggctggacctgcagtgcgtgcgcaagcgttcggcggcgtataccgaccatgacaacctgttcccgtcggtgctgggcctgatgcaggtgaagacctcgctgtacgaacgcgaccgcgacgtgttcgccaactgcgagagttga

SEQ ID NO: 533781 - DNA, 768 bp, Stenotrophomonas maltophilia
atgcccgttcgtcccattgatgcggcagcgccgcttgcgacatcaccactggcgtcaagattcgccgtaactcacttctggctgcctgtcgcaatcggtctgcccgtgtttacgctgctgatgggtttcggcggtgatcaatgggtggccgatcacctgttccgcctcgaaggtggccactgggcgttgcaggacgcctgggtcacccgcacggtggtgcacaaggccggcaagtggctgagcacgtcggcggcgctggtcgcgatcctgttgtgcgtgcaccactggcgcaaggggggcgatcgcaccctgcgatgggcgctgctttatgtcgtaattgccatggcgctgggtacgggcgtgatctccctgctgaagaccctggtgccgatggaatgtccctgggacctgctgcgctacggtggccatcagccctatatcgggcttttcacgcagcgcccggccggcatggccgcacaggcctgcttccctgccggccacgccagcgcaggctatgcgtggctgtgcctgtactatttcgccctgctgtggcgcccgtcatggcgctgggcaggcttgtggatcggcctcggcaccggcctggtgttcggcatcagccagcagctccggggcgcgcatttcctttcgcatgatgttgccaccgcgttgatatgttggctgctgtcactcggcctgtacctgatcgtcaaaggcatcctgatccgccgtcagctggaccgtcccaaccgccaggaggcaaacgcatga

SEQ ID NO: 533782 - DNA, 1704 bp, Stenotrophomonas maltophilia
gtgcccgtagccctgccccgccgttggcgcctgcccctgttgtggctgctgatcatcgccgcgttggccgccggtatcggcctgcgccagccgcagccgccggacgagccgcgcttcgtgctggcggcccgtaccatggtcgaaagtggagaatggctgctgccgcaccggggcgtggagctgtacgcggagaagccgccggtcttcatgtggctgcaggcggccgcttacgaggtggtcggcagctggcaatggtcgttcctgctgccgtcgctgctgggcgccctgctcagcctgtggctggtgtcggacctggcacggcggctgtggtcgccgcggcattccctgtacgccctcgcggcgctgttctgcaccctgcagttcggcctgatggccaagcgcgcgcagatcgacatggtgctggtcggcatgaccacggtggccctgtggggactgatgcgccacctgtgcgagcgccgcaacctgcccgcgctgtggctggccggtttcgccgctggcctcggcacggtgaccaagggcgtggggttcctgccgctgctgatggtgctgccgtggttcggctggtggctgtaccagcgccgccgcggacgcagcgtggacggtccgcacccggcaacgctgctgtggctgatcccggccttcctgctgggcgtggcggtgtggcttgccccgctgggctgggcattgctgcatgagccaagcgcgtccctgcagtcctacgcccacgaactgctgttcaagcagaccggcacccgctacgccaacgcctggcaccaccgccagccggtctggtactacctgcaggtgatcctgaccttgtggctgccgggcagcctgctgctgccgatgctgttcaaaccctggtggcgccgcatccgccgtggtgaccgccggcaatggctgctgctggggtgggcgctgctggtgctggtgttcttcagtgccagccccggcaagcgcgaggtctatgtgctgccaatgctgccggcgatggcgctggcggtggccccgctgttgcctggcctgctgcgacggctgtgcgtgcggcgctacctgttcggctacaccgtggtgctgatgctggccaccggtgtgctcggggtgatgctgatgaccgaacatccgtgggccctggcgcagctggaacggcgggcgatgcccgattcgctgctgccggtgctgggagatggcctgctgacctttgccattgccctggccacgttgatcgtgtggctgcgggtgcgacgtgccgcaacgctggtgttgctgacccacggcatgctgtggatgctctacggcctggtgctgatcccggcgctggatccgtacgcatcagcgtcggcggtgatgcgccgggtgggcgcgcggatcggcccggatgcggagctggcactggtcgcctggcgcgaacagaacctgctgcaggcagatcggccggtgcgcgagttcggcttcaagcgcccgtgggccgaacaatggcatgacgccggcccgtggctggccgaggcgccgggcaagcgctgggtgctggtgctggacgatgcgatgagcccctgcgtggacccggccaaggtgatcgacatcggcattgccaacaggaatcgttggcaactgcttcccggtacggcctgggacccgaagtgccacgccgagcggaccggatcgaccgccgaagaagactga

SEQ ID NO: 533783 - DNA, 1287 bp, Stenotrophomonas maltophilia
atgagggcgcgtaagccggggccgctgtaccggcgggtggtgtggtggttgctcgggtacctggcactgctgtcgattgcagtgttcagtgtcggcaactacgtgcacgaacacgccgagcacgccgcgtggcgcgcgctgctcaattccgaactggacagcatcgtcgagcatgtcgagcacgaacctcactatcgctggcaggactcggacacgctgagcctgtaccgctttgacgcggtcaatctgccagagagcctgcgctccctgcatcctgggttgcatgacggagtgatggtcaagggccgcgagacggcggtgatggtccgtgaaacgcagtcgatgggacgggtggcgctggcgctggacatctccgatttccatgacctggaacagttcgccacgcgctgggtgatgctggccggggtgatcatgatcttcgtcaccgtgctgatggcgtcgttcggcatggagcggatggtgcgtccgttgagcctgctggcacaacacattgccgggctgcggccgggcgtgcagggccagcgtatcgaagtcgatccgcgcggcagcgccgagctgcataccatcgccggtgcgttgaacgactacctggaccgcaacgagcagttcgtcgagcgcgagcgggtcttcatcagcaccgccagccacgaactgcgcacgccgatcgcggtgatgaccggtgctgccgagctcgcgctggagcaaccgggcctgcccgagcgcgcccgccagcagatgcagcgggtgttgcgcacagcgcagagcgtggagcagctgatcgagctgctgctggtgctggcgcgtgatccggcacgcctggccgcgcgtgccgagcgcatcgccctggaccagctgctgccggagatcgtcgacgaccatcgccacctgctcggtgacaaggacctgagcatcggcatccaggcggcgccggtggatatcgttgcgccgatggcagtggtgcaggcggcgatcggcaacctgctgcgcaatgccatcgagaacagcggccgcggccatatcgagctgcagttgagtgcgtcggcggtgctgacgctgcaggacccagggcatggcatgagcccggaggagattgccgccatccacgcgcgcatggcccgtggcggacgcgccgatcgtggcggcggcatcggcctggacctgatcgcgcggttgtgcgagcacctgggctggaccctgcagctgcagccctgcgagccgcgcggaacgcgtgtcacgctcgatttcagtgcctcgcgcccggcctga

SEQ ID NO: 533784 - DNA, 621 bp, Stenotrophomonas maltophilia
atgcccatccaatggctgtgtggccaggagcccctcactctggagttggaaaagcacgtcgtgatcgacatccacaggcgctccgcccggaggcgaaacgaggcaataggcacgatcagcatcaatgagctcgttgccaacatcagccatctcatccaccaaggcggcaatggccttctcgacccgacgcattgcgggattcgaacggatcttcagagtcactttcttgacaacggctcgagtgtagaggccaaagatcgccgagactcctcccagcgaactcttcagtgcatcctgtccatccagattcagcgaatcgcagcagatcttgatgaaaagaggcgactccagctctcgaacagcactcggctcttcggccaaacggatgccgcgacgctgcaggtacaggcgagcctggcgaacggaaaatccccggtgctcaactcttggcaacgcgcgcgcatccaactctgcaggcaccaccatgtccaggtagccggtcctgcaggacataacaagcgccacccattcaaagcgagccacgtcgtgggccagcgcggccaggcgagatggccagattctctgcccgtttccctcattcaatgcgtcgacaatcagtag

SEQ ID NO: 533785 - DNA, 1086 bp, Stenotrophomonas maltophilia
atgcgagggacggtcgattgggagagcggtgtcgtcaaggtgcagttcggcgagctggtgcctgtcgctggcaatgagggaatgccttggttcgaccccgcgttggtggaaggggaccgcgtctggcggccggctctggtcctgcctggctcgatctacatgggagccgtggtctatcggtcaatccccctgtctgaggttgtgatcggcctctcatctgttcgccttcccagcgacggtcgtgttccagcgttcaagcccgggcagacggtcctgattcaccacacggcaaagcacagcgttgcggagccccaggcgaatcaggtgctgagtttcggccggacgcgtatcgcaggggtggaagtcagggacgcggctggaaagcccgtggatagtgcttggtacaccgctgatcttgatgcagggagcttgaccttcagcgatccactcaacctttccgcgtacacgctgccaatcgtagtgagcgagcgtgtcgaggaccgccgtttggtggtccaaccgcagatcacaggagagattgaaatcaacacgggcctcacccacgactacccagctggcgaatccctcatcagcaccgccttgcggcttggcgaggcaaatgggtccttggacctgcaggcgcgcgtcgagagcctgttcgatcaggctgcgtggactggagcctggagcaacattccgattggcagtccggcgcctggcacctacaacgacacggactttcctctcgaagtgaccaacagcgacgccatcacggagcgatgggctgtgcggttcaccagtacgacaaactttgaagttatgggggagacggtgggcgtgatcgccactgggagcaccacaacggaccttgcgcccatcaaccctcgaactaacaaggcgtacttcagcatgcgcgctgctggctggggtggtggttggtcggtgaacaatgtcgtgcgctttaatactgtgggaggcctggcgccggtgtggatggcccggactacgctgcctggtacgccggcgggtgcgaccgactccactcgacttatggtggtgggcaacgtcgcgggaggtgcccagtga

SEQ ID NO: 533786 - DNA, 1035 bp, Stenotrophomonas maltophilia; identical to SEQ ID NO: 502600

SEQ ID NO: 533787 - DNA, 216 bp, Stenotrophomonas maltophilia
gtggtaggtccgctcaccggcgtcagtgacgcggcgaccacgattcgtcacagggaactcgaccggcagcagttagccgacgacctggacgccttcctcgcagcgggcgggcacatcgaggtgctcgggcacaccccacttcgcccgctgatgagccggcacaccgccaaccacggcagctatgcagagcgcatggcagcccatgagatggactga

SEQ ID NO: 533788 - DNA, 636 bp, Stenotrophomonas maltophilia
atggaacagcccgatcaactctggaagttcatccaggtcatcacgcctgccttaattggtttcgctggcgtttgcgtgggtgccggcattgcttggttccgcgaccacctagcgggtaggcataagaagaagagcgacgccgcttatctagcggcaatcgtcgggggggcgctggacacatttgtatcgggctgtagcgaggttgttggcgacagcggtcaggttgacagggacggctacagtcatccgcgcgccacgctaccgagttttgacccttcaaagctggacgtcgagtggcgcactatcccacccgagctgctcttcgacattcaggatctaccctaccagctgttgagcgcggagggcgctattaatgaagctgccgagtatttagcaatgccgcccgactacgaagaagcatttgaggagcgacaataccagttcgcaaagctcggactgcactgcttagatattgccgaacgtcttcgcgcgttcgctaagttgtcacctaggcaaaaggtctaccagtggaaccccaaaatcctctttgagcgaaagatcgaggaaattgaagcgagacgcgctgcgcctcctactctaccggacctggtcactgcgccggctagctccgattag

SEQ ID NO: 533789 - DNA, 1008 bp, Stenotrophomonas maltophilia
atgcgcaactcaaggatcgatgcagccaagttcgttctgatgctcctggtcgtagcgggacatctcatcgagtggctgcccttggactcaggccaggtggtctaccgctggatctacatgttccacatgccggcatttgtgttcctgtcaggcttggtgtgcgcggacgtgcttgatgtgaggcgtgcgcgtacgctcgtctcgttcgtggtcctcccatatctggtgcaccagctggcgacgaacggcatggtttccatcctagggaaggagccgtttgcctatcaggtcagcaacccttactgggcgctttggtacttggtaagcctgttctgctggcgcctgctgcttcctgtcatggtcgccacgggggcaccggttgttgtggctgtgggtataagcctcctgtccggcttggcgcctgagttcaaccattcctggtcgatgggccgaacggcgtctctacttccgttctttgtcctgggctacgtgtttgcccagaaaggcggtcctaggcttccgtccggaaggcccgccgtcgccgtggctatgctggtagccgtcggtgtcgccgcatacctttcccgagaggttccgctgcagtggctgtgggcgcacactccctaccagggcttcggcgtcgggccagttgagggaatatcacttcgtgccacccagcttctgctggggatgatgggggccaccgcaatcttcatgctgatacccgactccgagaagattgcggccttgggccgccagtcgttggccatattcatcgggcacatctacgtcttgaaggcgatgtatgcgttcgggattgttgccttgatggcgagcctgcagctgccagttaaggcggtagccgtttgcttgctcgcagtggtgatcgcgcttgcgtgcgcccttggcggcagattgttcccgtgggcgttcgatttcacctggttgctcaagctgggggagaaggcgggagacctggttggccgcagatccgccaccagagcctga

SEQ ID NO: 533790 - DNA, 2676 bp, Stenotrophomonas maltophilia
atgaccaagtacttcaccggcaacccgctgggctcgagctcgcccctggatctgtacgacaacgcccagaatcttgatgcggcggctaacagcctcgatcaaatggtgtggagggaccgttttggtcgcgagcggaagacgtggattgcggttgaacagtcagctccgctagcagttggcgctgccaacgctgctgcagcatctcaggtggctgcaaagggatctgctgatgccgcggcggcagccgctgcaaccgacttcattgagtcccgttggacgaccctggccggcaggaccggttccgctgttggccgcggcggggtggtcattggcgataccggtacgcacaccgatcccgtcagtggccttgccgtatcgaactctggccagtaccgctggaccggtagcgcgtggcagtggcttcgtggtgacgtcatgctggagaagtccgactactcccaggtcgacctccagctggagatcattggcacgacgctcaatggcggtgcgtcgggtagtgctttcttcaagggctttgttcccgagagcggcggcacggtcaatctctacttttcggcgggtgcgatcggcattcgcgaccggcgcggaggtgcctcggtccatcgtgagatttccatcgcggctgatacctcctatgcagtagcgccaggccagattctgatttgggacttcaccgccaaccagcttgtggtgcagaacaatttcgccaaccggccgagtagctacgcgctcatggcctacaacaagtttgggcagatcgtctcaggtctgcttctggatgtgatgctccgcgtggctgacgacctgcgtgagtgtcagctggttgtttctccctggtatacggatggcatgatcagctctggcgctgttcccatgacagtcgatctcgccacttcgggtctgttcctggtggccgcgagcgggaagcaggttcagacgctggccgcaggttcctataccgaaaagttcagcgtgccggctaactcggtgttgttgtgggatctggttcggaatgttgtggcggtgtattcaaacaacgccgtaaagccgatgccccacattctcctgacgaactgtcgtacgggtggttatggcaccaccggccaccttgtagaggcgcgaaattccttcaacgcgatcggtgatcacgcgacggtgacgcagctcaattcgcgcaccaagatccagtactcacacatcactttctcccgcgactccagcacggcttccccaatcgcggtggacggagccaaggtaactgcgaccggcttaacgatgttcgcaatcgggtggagcggggcgaacgtaaagcagatttcgccagggacgaccggtgctatcaccgcagcttgggaatttggtgacaatgaggtgctgatctgggattgggataccaatacggttcgaaagatcgcaaacaatgcgccgcgtccgctccagttcgccacgcttctgatgaggaaaaacggttctttcatcgcgggcgagatgctgggtctggtgctcgatgccagagttccgaagttcgcgctggatgatagtgaggcggattctacggagagccgctgcatcgttctgcgtgggaagttctctgctcagggcctgaccatcgtccgtgatcgcgtctggtccttcgaggcttctccggcagaccacagcagcgcggcggcggtcgtccgctactggtccgacttggaaggtggctttgccccgacaggcggtctcacgcacaactttggccacgttgcaacggccgactacaacccgcgtaatgacgttcttctgatgggaaacggggagagtgcaacaaccgtcctgccccgcctggaccttctgctcgatgccagtggctatcccgatggagcgttcttggacttcagtaacccggcaggtacgccacgggtttcagtggagttcttcgtgagggacggcgctggcgcggttgtgaaagagatcggcggaagcggtgcggtcgcgtgctggggtgaggccgaccacatcatctacatgatgaccgggcagggcacatacgctcaccgaatcttcaaggtcgtgctgggtatgggagcgaacgacttcagtgacagtacgggaacaaacctgcagcggtggggaaccttcctttctggaaagtccgacgatgagtacaacggcactgctctggtttaccaggtgtataccggcaaggaatacaacgtgtctcaggggatgtgtttccatgatggaaaaattctctatggggtaacgtcaacgtctcaggcattggaagtcattgaagtatcgatgcgagagaatggaacattccgaactgatcggaaattccgctatgacgcgatcaagaaagatggatcgaaaaacgtcatcgagacagaggattgctgcatcttcggcgggcgctatctgctggcgggaggccggcacgaaggtgagttctggtggtgccttttcccgctgtataacgagatgggggggattgcagatgttggcgacgacgtgacgttcccgttcccctgcaatcaggttccccagccggtgatcactgcagtaggcggcgcttcggacctgcgaattgaggcactggaccgcgatggcttcatggtcacctcggaaggtggtggcgccggcaagtaccactggagcgctcggatctcctga

SEQ ID NO: 533791 - DNA, 210 bp, Stenotrophomonas maltophilia
atgagcgcattgttcagcgtaggccagctggtcgtcgtgaaggacgatccggacgttttcccgttctgtggcgagatcgcgcgagtttccgttctcgatgtcccctgcatggacgggatcggaatggaggtgatcagcgaccaccttggccgatttaagggcacgtgcgcgcagtttgagccggttcctgaaatggcagggaggaactga

SEQ ID NO: 533792 - DNA, 513 bp, Stenotrophomonas maltophilia
atgatggatcggaccaacacctacgcgggggctgtccgcgcgctgttccaggcagcgccgcatgcccggttgcgaatgcgtgacctgtgcgcgctggccaaggctcacaccgtggagcatcgctcgcggatccgcagcgcggtgcgtgacttggtcgcggcaggcttcctggacaaggaagggaagggccagcgtgccgagtaccgcaactcgggtaggggaatgcccaggcagttcgtggtgaccgccgagcagcgcgagcgctgccgcgcgaacaaggcgcgcaagcaggctctccgcctgtcggcgaagcgggccgaaaccgcagcaccgcggccagcggacaagatgaccatcaaccggtcgcgcgtggcgctgctggcggacctcgcgccagccaagccttggggaaaggagaaggacggtcagcggccggccgagacggtggagcagttcatggcgcgcggcgggatggtgcagcgcctgacggccagttgggagcaggcagcatga

SEQ ID NO: 533793 - DNA, 408 bp, Stenotrophomonas maltophilia
atggcccgaaccctcagcgtgcatccggcgctcgtgtcccaatgggctactggccgtcggccagtggctgcacggcacatcctggctatcgaggcggcggccggagtgtcgcggcacgtgcttcggccggatgtgtttggtgaaggagaggcagctgaggagcgccaagtagccggcagcggtgccaccaaacgcgcgctgcgcgcaaagctgggccttagcaccgacaggcagctggccaaggtgctgcagctgccggccgagcaggtcgccagctggccggaagagggcgtcctgcccgcgctgccgcatatccagcgtctgctcggtgttgagccaaaggccgccgccgaacctgcgaacgaggatcccgacgccgaccgcattgggcccgtcgataccgcctga

SEQ ID NO: 533794 - DNA, 300 bp, Stenotrophomonas maltophilia
atgagcccgcgagtcgaattcactggtcgttgtttcggcgcaaacctgagcctcgttcgagagactcacggcgactggagcatgtcgctctacaccttcgtcggcaaggacaggaagcaccgcggaattgccttcgcaaccgcggtccccggccagctgccgcgagtggatccggctgacggcgatacctttccctctgcagccctgtgggtcgggtcggcatccttcgacatacccgatgccctggtgccgaagctgcaggccttcctcgccgaacacacccaaggcggtgccgcatga

SEQ ID NO: 533795 - DNA, 267 bp, Stenotrophomonas maltophilia
atgagcgcgcccgttgatgttgtggcgttgctgcgcgccctgcagtcgcagattggccccggccgccctgacgaagatgacgatgaggtcgacgccgcagcatgggatcgcatcgacgccgcgatctccggcctcggcaagctgatcaatgcagcgcagaaagcgcgcgcatcgatgcaacacatgcgtggaccggagtcgatcattcacgcccgcactgcggaacttgatgccgctctcgcccgcgtcaacggcggtgtcgcatga

SEQ ID NO: 533796 - DNA, 210 bp, Stenotrophomonas maltophilia
gtgcgtaaccagctcgacatcttcgaccacgacccagcccgcatggcagcggccaaccgcgccgccgccgaacacgcgctgcacgacgtgcagttcaccgaggcagagcgggaggagcgcgccgctcactacatcggcgaggccgaacgctgggaacacctcgccgcgcacagcgtgcgctccaccaacagcaaggacatgcaggcatga

SEQ ID NO: 533797 - DNA, 903 bp, Stenotrophomonas maltophilia
atgagcaacgacaacaagaccctggcggacgtgcagcccggtgggtgggtgaggctgggggatcaggcgaagcgggcgcggttcgaggcgtggcactgcgagaagttcaagacttgctggctcaaaggcgctccgacgcgcgacatgcataacggcgcgtacgcggaaaactacggtccagcagagcaacaggcacgatgggaactgtggcaagccgcatgggaatccgccctctccgcccagccctccccgggtggtcagggggatgcgcgcgaaatcattgccgagttcgtgcagtgcgcggacgctggccgcccgccgggcaagctgctggcgcaggcccgagacttcctcgccgcccgccagccggtgggggagccggtggatgactatgattctgcattccaggaggcggaccgcccgccgtatctggtggatgccgctggcatctatgcgatggaatcattcctgaccgtggccgaggagttccgccgcagtgctgaaccttacattgaggcgataaacgaaggcgcctgcggtggggaggatgaagtatctgaggctttcgacactcgactggcccgagcgaaagaagcgatttcacgatctgcgatctacgccgccccgcccgcgcaggccgtggacctggcgcctgcctcgatccccaacacgccggaagtgcgtgacattctcggacgccccaacttctggtgcagcccctgggccaacgtcctgcgcatgcgcggcgacgagattccgaacaaggccgaggaagaacaggccgcagtgatccgcttcatgctgaatcactacctcgccaacggcacggcatgggctgaaaccgctggggccgagttggacgcgattcggaaggtcgacggcaaggcggtgggcaatggctga

SEQ ID NO: 533798 - DNA, 804 bp, Stenotrophomonas maltophilia
atggctgagaaccagcattgcccccaatcaatccttgacagagctgggggcgttatggcgctggaaccgatccatctcaccatctgcatcgatccttacggactccgcagtatcagtcaccgcgcccaggacgtcatcctcctccgcgccagtccagtcacaaagcttggtcctcaggtcagctatgcaagctgctacgccctcaaaccatgcgcagtccccaagaacgtaacgcacctcgtaagggatggtctttgttctagtcgcaaccgtccgctcgcaggattgcagcattccaatgcactttaccagggcgtccgccaagtcgctggggagaacctttatgtatggcgcaagctgcatcgcctcactggcattcacctgcgccagcaatgcagccattgccttgtccacccagtggttgaccatgtggccatctcgctcgccgagtcgtgcgaccactctcaggttcagctcctgcagtgccaagccgcccgcgacaatcttgccggcgaactttgcttggtgatccagctcggtgcgcgctttgagggctggcagaaccccaacaccgagggccaccaccgccgcgagaaaagtagccaaagccgacgcccacgcggccgcggattcggtctggagggaaggcactccgagaaggagcacaacgactccggcacctacagacgtgcatgtagcgcccaaaacgattttgcttttccaaacgctcattacccgagccccctgtggattgggcggcattctgccacgccgatgcagcggcccgagatcccccatggctga

SEQ ID NO: 533799 - DNA, 504 bp, Stenotrophomonas maltophilia
atggctgaccggctgctcgtcgctgcaatggaggaccgcgagatcggccggcagctggccagcatgtccgggttcgatctcgactcgatcgcttcccaggatgctcgtctgtgggaggcccgcggccaggcacttcaggcgctcgctgccggcgacatggacgccgcgctgcgcaccatgggcatggtgtcctcggggatcatggaccgagacgaagcatgggagatcgcatcgaacgcggtagccgtccgcattgccgccggctggtcgcgcgacatgctggacagcagcaccgagagcggccgcgcgccgtgtggtcgcggctactacctgttctgctccgggctcatcgcggtctgctacttcccgatggtctgcatcaccgacatgaacggccgcggctaccacttccacatcgcccaggacctgctcaacgagcgagatcccagcccctacgtagtttgtcgtccgagcgtgccacagcaattggagatgttccgatga

SEQ ID NO: 533800 - DNA, 309 bp, Stenotrophomonas maltophilia
atgatcgccctgcacgctgcacacgtgcctgaccccgatgaggacgagtacgaccgccggcgcctgcccggtgcctactcccaaacgatccatcacatccgggagctacgcaaagagcgagatgcgctgttactgcgcggccaccccggagacagattcagggccgcccagctctcatggttcatccggaacagcgagaaatatgccgcccgccttctggctcaaatggagcaactcggggccagggctgcgcacgcgctcccaactctgccgccggcgctgccggcccaactggacctgttcgcatga

SEQ ID NO: 533801 - DNA, 270 bp, Stenotrophomonas maltophilia
atgaaaatcaaccttgcacatctccgcgaacgctccacctctggtggttggattgatttcgtcgtctttgatgccaagtcgaccaacggtgacaacgaaggcctcctggcacaccttacagatgaagcgatacgctcagggttgagcgtagatcagtctgcgcttgcctaccgtcaaaatggtcgcatccagttctttggcagcaaaaatcttgttgcttatttgtcgaagtccggcgttcctcgctggactcacagtatcaccgtttaa

SEQ ID NO: 533802 - DNA, 252 bp, Stenotrophomonas maltophilia
atgcataacgagagcccgctgcagacctgtagagccgagccatgctcggctgacgccttgggtagagtcgagccatgcccgactgacgaaaagcagccgagcatggctcggctctacaacagcccgggcgacgccccggaaaacggcatcgaactgcaacgccagcgtgccaggcgcacggcgatgtgggtcggcgtcatcgccgtgctggtctacgtcggcttcatcctcagtggggtgatcggccgatga

SEQ ID NO: 533803 - DNA, 1257 bp, Stenotrophomonas maltophilia
atgagccccaagctgtcggtccatgtgatgcaagacggcgagcgagttccgatgctccacgacgaatcgggccttccgctgttctatcccacgttgtacgcgacctcgcagctgcgaaatgctggcgtggccgtcaacaccatccgcaacgagcttgccgatctgatcgtgttgttgcgatgggaggttgcgaactgtcgcaatttgatttcggagttccaggatgggcgctttctgaccatcgccgatgtggtttcgctacgcgatttcgccaagcttgatatgcggaactggaaatccgatgggcactgcacagagaagccaagtatccgtgtcctgggctttctggaggcgagggttgccccaagccgagctcgggccgcaattggctcgcaacaacatttcaatcgtctaagtacgattgccgactatctggagttcacggcaagcgtcgtcacgcagcacaacggttctcaccaaatgggacaagaaattgctcgtatggggactaccatccgaaagcaccgtccgcgcggtttgacgaagcattttgaggaagagccagaacgtcgctcccctccgaccgacgtcgtgaatcacttcatggcagtcggatctgaacgtgattcaagaaatccgttcaagcacccggatatcagactccgcaacgcgatcattttcggcctgttgagacataccggcatgcgacgcggagaactcttaagtcttcgactggatcagtttgacttgggccacgagccccttgtttgggttaggcgcaaccaggatgacaagcacgattctcgacgttatcagcctgtcgctaagaccaaagaaagacctctcccgctaccggctgagctcgctgagcagctcagccgatacatgctgcaggtccgcgctggcatccgtcctgcgcggcggcacccgtatcttctgatttcgcatcgaaagggcgctggctggggacagccactctccatttctgctctcaacagccagatcttcggtcgaatgcgggctgtggacagggactttgagctgatccatccccatgcgttccgacaccatttcaactatgaactgtccagaagcattgatgagcgcaacgcagagattcaatcggacgccactgctgaacacgctgtaccaatcagcgagcatagagagcaggatgtaagggctttcctcaatggtcaccgacatagagcctctggcgcggcatacaaccgccgccatatccgcgaagtcagctaa

SEQ ID NO: 533804 - DNA, 1542 bp, Stenotrophomonas maltophilia
atgaagactgagcgaaggcctcttggaagagtcaagcaagccgcgctcagcgcattgtcaaaggatggctatcctttcgatccatccagcaaccagtggcggttaaacaaggacgtccagctctctctggtacttccgcacaatattgacccttccgtcgaatctggcttccgcgccacgttgcttcgttacgctgaggaagcttcgggccaccatgcatacaacatggagaaaggattcaagaagtacctccgggacacgggggcgtcgcacgtgtcggtggctgaactcatcaattggagggccaccttgggcacccacgatcaatggaagctcggtggattgaaggggtttttgctcgcatggcatgactatgggtttgatggcgtctccacggaggtcgtcgatctcctgcaggggtggcggattcagggcaacgagaagggggcggcggttgctagcggctgtcccgacagcgggccgtacaccgacctcgagatggcggccctgctggactgggcaaatctggcaattacacgtaggaacatttctctagaggactacgcgtacttattggcgttggcgatgacggcaagacgccctgtccagctcgcggcacttcgaggtcgggacctgatccgtgatagcacaagaggcgtgcagaccttcagacttcgaattcctcgtgcgaagcagcgtgggatcaagttccgcggcgcgtttcgcacgctagctgtcatcgaagacctttacctggtgcttcaacagctgcaccagcgttccgtcgccttggccagcgagacagtagagcaagccatcgagccagaattggcgggcgaacttccagtcttcatcaatcgagggcgcctgatgcaggtgcgcagcgttcatgaaatgaaagggcttctaatgggggacgcaccagatcggttgcatgcgactacttcctcactctcatcggccctgcagcgctgcgcgagagcgtcgaccgctcgctcagagcggaccggtgagttcattcggctgtccgcgactcgcttccgacacacccggggaacaaagctgcgtcgtgaggggttcggcgcctttgtgatcgcagaacttctcgatcactctgatgttcagaatgtcagcatctataccaagaacacagcgcaggaggccgttatgattaacgagctggttggtgcccagctggctccttttgcgcaagcgtgcctgggcaagcttgtcgcatcggagagggaggcgatccgcggcggcgatccacggagccgtgtagccaacgagcgtcagaacgccgttggaacctgtggcaactatgggttctgcgctagtgggtatcgcgcctgctatacgtgcagccactttcagccatgggttgatggacctcacgaggaagttctgactgatctatatgctgagaaggaccgaactcgagctgcaggctgtgccgatgcggttgtgaatgcgaatgatcaactgatactgtcggttgagcactgtgtggcaatgtgcagaaccgcaaggtcaatcgagtag

SEQ ID NO: 533805 - DNA, 387 bp, Stenotrophomonas maltophilia
atggagatccggcccgcccgtgcaggcgatttcgacccgatgtggggcatgttcaagacggccattgcggcgcaggaagcgctgccctttgctggctcttttgaagtcgaaatgtttcgcgcgcattggttcctgtcgcagacaccttatgtggctgtgctggagggccgggtggtgggcatgtacaagatgggcccgaattaccctgatcttggggcgcatgtggccagcgccacgtatgtggtggatgcgccggcacaagggcaaggtgtgggccgggcgctggtggagcacagcctggagcgggcgagggcggaaggattcctggccatccggcatgggacgctgggcttggtggatgtctttgtgatgcacaggttcctgtga

SEQ ID NO: 533806 - DNA, 1035 bp, Stenotrophomonas maltophilia
atgcgatttctcttttccgaactctgtaatctcctgggacaacgaatcgatagcgatccggtcctctccatcgccgaacgtattggcgcgaagacaccgaaaccaacctccttcgcatactccaactctattggcgaaatgtctcaccgccccacggatctggaaatcagctggaatcacgagattctcgcacccgcgtactacccaccccggaaatcaggccgcaacttcgtctgctgggtggattcaatctggtttgacccgtcaacagtagacaacctgccattgcagttgtctccgacctccgtcgctgaggatctggttgaagtggctcctcaactcattgtcgaggatatgcccaagagaacggcggcgatgctcacatctcgtccagactgcatgcttgttctcccaagcactccccggcggtggcagatcaagcttgcacagatgcaccgctactccttgccaagccatgctgccgtcggaaatgatcgtccagagcagaatgacaattcagacaggtggaagtactgggatcaagctactgcgttttttctctactggtgcattctcagaggcttcgcaagcgaacgccacactcgtgatcacagtgaagaaatccaggacttaaatcaacaccgcatgtccgtggtggattacatccgtgaaaactgttttgaaggcgaactgtggagctgggatatccgcgaacccgtgcgccatttttcctacatctactttcgtgccctctgcaatcgcaactcagcacatcctggaattggaagaccggacaggtgccatcccaacgatgacctgagcgcagtgatggactacctgtccaagtgcgggggccccaacgtagacgacgaatggcagctgtttcaccagttctcagagatgttggacgcacgctggaatgactaccttctgacagggcttcagacagaagtaagccgccgccgggccgtccagctcacagcaatgtatagaaagatggtggacaacctctccgcgagttctgaactgtcgtag

SEQ ID NO: 533807 - DNA, 720 bp, Stenotrophomonas maltophilia
atggtccgctccagaatgccccgtggcatctctttggtgtgcgaccttgagcgtgtaaagcagacggccggatccttggatccggccgtctgggtaatgcaggtggtcgcagtagagcgagctcgactctacttggctgccagctggcgcagcacgtactgcagcaggccgccgtggtgggcgaggaggcgcgcttgcgaaccactggttcgcgcgtctccgcagcgcccccgcgctggcgcgggggccgggcttccgcccgttggtaccgggggaaggctcagcgacctgccagctggcgcagcacgtactgcagcaggccgccgtggtgggcgaggaggcgcgcttgcgaaccactggttcgcgcgtctccgcagcgcccccgcgctggcgcggggggccgggcttccgcccgttggtaccgggggaaggctcagcgacctgccagctggcgcagcacgtactgcagcaggccgccgtggtgggcgaggaggcgcgcttgcgaaccactggttcgcgcgtctccgcagcgcccccgcgctggcgcggggggccgggcttccgcccgttggtaccgggggaaggctcagcgacctgccagctggcgcagcacgtactgcagcaggccgccgtggcggaagtattcgacttccttcggggtcagcagcatcaccgacacctcgaaggtcttcttcgtgccgtcggccttggtggcggtga

SEQ ID NO: 533808 - DNA, 1710 bp, Stenotrophomonas maltophilia
atgagcaaacaaaaactagaacttacctggatcgggaaagagaagcggcctaagctggagccgcgcatcctgctcgaagaccccgaaaagtcctatcacgccaagcatcgcgtctccgacaacgacatcttcgacaatcggctgatcttcggggacaacctacttgcgctgaaagcactggagcaagagttctccagcaaggtgaagtgcgtattcatcgatccaccgtacaacaccggcagtgctttcactcattatgaggatggtctggagcactcaatctggctggggctgatgcgtgatcgattggaaatcattcggcgattgttatcggacgatggctccttgtggattacgattgacgacaacgaggcgcactacctcaaggtgctgtgcgatgaggtgttcggccgcacgaattttgtcgcttctgtaatttggcaaaaactcttcacggtcaagaactcagccaaatatttctcggatatgcacgagtatgtgctcgtgtacgccaaggatctgtcgaaatggaatcgaaacttgctcccgcggagcgctgatctcgatgattcttactccaatttagacaatgatccgcgcggcccatggactaccaatgctattcaggcgcgaaattattacagccaagggacttatgagatcgtttctccaaccggaaaattgttcacgcctcctccagggacatactggcgtgtctcaaaggcaacgttcgacgaactcgcaagagacggtcgagtttggtggggccgagatggaaccgccactcctcgcatcaagaaatttctcagtgaagcaaagcagggcgtagttcccgccaccctttggtttcatggcgacgtcggcaccaacgctgaggcgaaggttgaagtacggaagttgtttgaggggatcaacgatgacgatgtcttcatgaccccaaagccggaaaggctgatcaagcgaattctggagcttgcaaccaataagggcgatctagttctcgattcatttgctggctctggaaccactggcgctgtcgcgcacaagatgggtcgccgttggatcatggtggagctgggccagcactgccacactcacatcattccgcgcctgaagaaggttatcgacggcgaggacaagggcagcatcaccgaaagtgtcggctgggaaggtggcggcgggttccgctattaccacctagcgcctagcctgatcgtcaacgaccgctggggcaaccaggtaattaatcccgtatataacgctgcgcaactggctgaggcgctggccaagctggagggcttcacctacgcgccgtcggaaacgcactggtggcagcacggccactccagcgagcgcgatttcatctatgtcaccacccagaacctgtccgctgagcaactgcaagccctgtccgatgaagtcggcccggagcagagcctgctggcgtgctgcgccgctttccacggagtcacggcggccaaagcggtagagcgctggccgaacctgacgctgaagaagatcccgaagatggtgctggcccgctgccattggggccgtgacgactacagcctgaatgtgaccaatctgccaatggcggagattgatgaggccgagcctgcggcctctggcaatggcgccaggaacatcaagagcagaaatgcggccctcgctaacgcgggacatagcggcctgtttggggagaaggaataa

SEQ ID NO: 533809 - DNA, 3087 bp, Stenotrophomonas maltophilia
atgacgaccaagagagaactcgcgagaggagcactttggcgggaatgggacctgcatatccacacgccagcctcattccactggcaaggacagaagtttgacggcgatctgtcatctgcccaaaccacggagctggtcgatcaaatgatcgaagccatgaacaaggccgaacccgctgtgttcgccatcatggactactggaccttcgatggctggcttgcgctgcgaaagcgcctcaaggatgaaggtgctccggtcctaaagaagctggtccttccaggtattgagctaagactcgcagccccgatgaaaggacgactgaacgcccacgtgttgttctcgaacgaagttgaagaccaagtgcttctggacttcaagtctgccttgcgcattgagttggtagacaggccgctttcagagtcggcattgagggaccttgccaggagggtcggtggggacaagctgaagcatcacgggttcaagaaggccgacgtggacgcatccgacgagaaggctttgcttgcgggcgccgtgatcgccgagatcaacgccgactcatacagggaagcgatccggaaggttccctatgaacacgcaatcggcttcatgccgtttgatacaaacgatggcttggccgaagtcgaatggaaagagcactatgcctatgccatgaatctctttcagacttcaccgatcttcgagacgcgtgacgttgacctacgcggcgcgcttgttggcgagcagacacacggcaacaccaagtatttcaagaactttcaggcaggcctgaagaacatcccgcgtctggcagtctcagggagcgatgctcactgcttcgttgggacaccgggtagtaacgacaagcggggctatggcgacttcccctctggcaagaagacgtggatcaaggccgacccaacgttccgtggcctcaaacaagccattcgtgaaccggcgaagcgctcctacattggcgacaaaccacccaaggtgcaggaagtcgagtccaacaagacctactacatcgaatccattgaaatcaccaagacaggagacaaggccggcgtagggcaatggctccacggctgcgacatcccgttgaatcccgaccttgttgccatcatcgggaacaagggaagcgggaagagcgcgttggcggatgtcatcgcgacgcttggcaactctaaacagtccaaacacttcagctttctcaggcgagatcgcttcctggggaagaccggggaacccgcacgacacttcaccggaacgctgacttggtgcgacgagagcaccgaagcccgacctcttaacgagcctccatccgaagagaaggcagagcttgttcgctacatcccacagggctacttcgaggagctgtgcaacgagcacgtgtccggtaagtcggatgctttcgagaaggaacttcggtctgtgatcttctctcacgcgagtgaagacatgaggttgggcgcactggacttcgatcaactcacggagcagcaggagcagtcgctcaggaaccgattgggtgagtaccgcaaggaattggcctcggtcaacgcatcaatcgtgcgtatcgaggagcagcttcagccaatagagctgaagaagctcaccgacctgcttctgctgaagggcaagcagattgaagaacacgacaagctaaagccagtggaggttgctgcgcccacagaagcgttgagccccgagcaaaagcaggctgcggagggcttggcagcggctagtcagcagatagaagctgcgaaaaagcgcacgctaaagatcgccggcgagaccaccgaactagccaagcggcagaaggcgatagctaatattcgtgagcagttaaggttgctccagcgggcttttggccaagcacagcatgcagtgtccgatgacctcaagttgcttgggttcgcctggtccgatctggcagccatcgacatcaagacaggtgctctcgacaagagatcagctgaactcacgacgaagcagggcgacttgaagaccgagtccgagcagctggctgaaaacctggagacctacacggagacccagcaagggttcaccgcgaagctgaacgcgcctcagcaacagttcgagtcttaccagcgtcagcttgccgaatggaacaggaagcggaatgaactgctcggctcacccaccgagccggagtcgagggttggcttggaaactcgtgctgagcagatcaaggcgctgcctgaacagctcaaggagttggaagcaatgcgattgcaattgtcgggtgaaatattcgacaccctcgatgcccagcgcacggcgcgtgcggaactgttcaaacctgtccaggacttgatccagaagaacggcctgatacgggaagactacaggttgcagttccaggcgactcttgcggcatctgcggatgccatcgcggatcagttgttcgccttgataaagcagacctggggtgatttccgtgggcaggacgaggctctttcgacaatccgaaagctgttcgacagtcatgacctgaacaccagaggcggggcgttggccttcgttggcaccttgcaggagaaggtcttggaagccgccagagcttccgggtcgcctgctggcatcttcaacttggtgaaaaagggacaatccgcagcggcagtgtatgacctgatcttcgggctgaacttccttgagccgcgatactctttgctgttccaagacgcgcagatcgagcaactctctcccgggcagcgtggtgcactattgttgatcttctacttgctggtggacaagggaaagacgcccatcatcctagaccagccggaagagaaccttgacaacgagacggtgttccgcctgctcgtgcccgttctgtcggaagccaagaagcagcggcagatcatcatggtcacacacaaccccaatttggcggttgtgtgtgatgcagagcagatcatccatgcgaggttcgatcgagcatcggactccaccatcgactatgactcgggggcgatcgagaacacggggctcaacgacgccgtcgtgactgtacttgaaggcacgaagcccgcattcgaaaaccgatccgggaagtaccattga

SEQ ID NO: 533810 - DNA, 330 bp, Stenotrophomonas maltophilia
atggctgcccgagggctcggtcagtcggttccgctggcggaaaacctgagcgtggatcccggttggctggtctacgggttcgagcgcgatggcatggattatttccaggtgaatgatctcgcggggcgcgtgcacattgtgatcggcaatgctgctggaacgttctgggtactgcctgcaggtgatccatccgcaaaggtatcgttgccggaacagcgcctgcctgttcccagtaagggcaccagaacggttatctatcgggctgcttcattcacgcttgtcagatatgcgagcggagctgatacgttgtgggcggtagaggcaccttaa

SEQ ID NO: 533811 - DNA, 489 bp, Stenotrophomonas maltophilia
atgagcgaaaaagcactggaacacctgcgacgtgactggcccaaacggtatgccttgaacccggaagaggtggctgtagtcctcggtcgcgactccagttcgcgcggtgtgttgcagaagatccgtgaaggcatgcaacgcggtcgttatccaggggcgcgcaagattgacgggcactggcaacttcctttggaagatctggctgaaatactcgacccaacacctgaaaccgtgatggtgccggtggtcgccaaagccggtcgccgccgctcccaggttggcccacgaattcgctttgtgatcaatgcacggtttttcgcccaggtgtgcgagttcattggatacgcgcagggcgcgcaggctctccggaatgatgcttggaccgtgcgtgaggaactccgtcaagaagactatgcccgccgcgcagaacgctcgaagttgagtttgcttgcggcgctcacagggcagggacataccaaggatgaataa

SEQ ID NO: 533812 - DNA, 177 bp, Stenotrophomonas maltophilia
atggaacgaagtaaaaccaaaatggaagaatttgcattggcctttctccgggccacgaaagagaaaaagaccttgaagattgacggtggatcaatatcgattgatattgccgacgtagaacacaaaatccggaagttgagggccgcttcaaaagtgaaggcggatcggccgggttga

SEQ ID NO: 533813 - DNA, 1002 bp, Stenotrophomonas maltophilia
atgaaaactaaggcggtgcatgatgttctaaaaaccagcgaaattgacgctgttttggaccgtgaagaaattagagagtattttcgagcaaatgatatcaatgactcttttgttgtaaccggagttgcgagccagagcctagtgacgccgcttgcgttcgttgcaacaaaaagcttgcatccagatagacgggggcacgtcattgaagttatgagagatttgattgcgctgggggcggatgtcaatgctcctgtccagagattggggtacttcgcagacggctattctggcggtgaaggccatgatttggcggacgttgtatacggcgcagatcgcattgagctgttggtcaaaaatggtgcaagtgccaaagagaagcacattcactgtttatttcaggaaggggagaatggagctttcattgctggcaactattttgacttgataaagcccaggcactttgctcaattgaataacagacatggaagctcatcaattatcgatgagctggctctttccgggttcaatttcaatgcgcaagatcgtaacggtgacacagcgcttgcttttgtgcgtgacattcagaacgtgaagcgccttgttgacgcaggcgcgtcattaacaatcccgaacgtcagtggtgaaacgtttctggatcactgcaacggtgattttgtgcaccgaaattcgtcgcacgaaggcgttaaaatcatgaaagacctcggcattgatttaaatgcgaaagacgcattctctaaaaacacagcacttcatagattgatgatccttggcaacaatgtggcagcaataagtgatctattggacgcaggagcagatccgacggttaggaacggagaaaacaaacttccaacagaaatgggtttccctggggcggatcgccgtgaagctttaatgctgatggagagcgtaatcagcaagaaaaacttgctgaacgagttgggtgagacatgccaacagcccatcatgcggcgaaagatgtaa

SEQ ID NO: 533814 - DNA, 678 bp, Stenotrophomonas maltophilia
atggatccacgaaagctgttctttgacactcgctgcctttcaggatgcgcctactgtggcgcacctcccgaaacacgagatcatgtacctgctcgcgtgtttctggatcaaccttatccagacgaccttggcgttgttggctgctgtctctcctgtaatgcgggcgcgtctcaagctgagcagtacctcgcctgcctattggagtgcatcgttcatggaagcgcggaaccagattcgcgctttcgcgaggtggttaggcgcacctcattggcacgacctgggcttcttgcgaagatcgcagatgaaaggacctctgatcacctatggcagcctgattacgatctgctgaacccgctaatagtcaagttggctagagggcatatagcgcacgaactcgccttggcgctgtatgaagatcctcagtacttcttagttaagccattgcccttgatggatagcgaagagcgcgaagagttcttcaggattcgccactctggtctttggccggagattggatcgtatgcatttgtgtcttccagttacggcagacctagcggtttcgagcaatggcgatcagtgcagcctgatcgctatgcgtactcactcggccaggctgaaggcacctgggtcaagctgatcattcgcgattacttggcatgcctggtggtgtgggattga

SEQ ID NO: 533815 - DNA, 264 bp, Stenotrophomonas maltophilia; identical to SEQ ID NO: 499456

SEQ ID NO: 533816 - DNA, 228 bp, Stenotrophomonas maltophilia; identical to SEQ ID NO: 498940

SEQ ID NO: 533817 - DNA, 264 bp, Stenotrophomonas maltophilia; identical to SEQ ID NO: 499456

SEQ ID NO: 533818 - DNA, 762 bp, Stenotrophomonas maltophilia; identical to SEQ ID NO: 499167

SEQ ID NO: 533819 - DNA, 267 bp, Stenotrophomonas maltophilia
atgtactacgtgttgctgccatcgctggaggttcgcagccgtttcattgcagagatgaagcagcgcggtgtccagacggtgttccactacattcctctgcactcatcaccggcgggtctggagcggggccgcactggttcagacatgacggtcaccgacgatatcagcgtccgcctggttcgcctgcccctgtgggtcggcgtggagggagagatggacaccctgctccagcatgctgacgcggcgctggacgtcgccctgggctga

SEQ ID NO: 533820 - DNA, 264 bp, Stenotrophomonas maltophilia; identical to SEQ ID NO: 499456

SEQ ID NO: 533821 - DNA, 594 bp, Stenotrophomonas maltophilia
atgcctactcagcaaagcagctcagaacggatacaccatcccagaccaatggtctcccaagacgcggtagccgaattcgtggagttccttcggcaatcgcttccagagaccactgtgtctgtggacgcaccttcgcacgccgctggcgaatggttcatcgacatcatccacaacgactttgagactcaggtttcttggcagcccttgcatggcttcgggcttttcactgcgccggtgggctatggggaccgaccaaatgagatcttcgcctcaccaagccatgctgcaacacgcgtcacacaggtctacctggagtggcagcacactcacagaattagagccatccatttgtccgaactccggaacattcttggagttcagcaagcagctttggcgagcgcgatgctcctcagccagccagccatatcgagatttgaaagccgcgacgacgtaaagataagtacgttgtcctcttatgtcgaagctattggcggccggctggatatacgcgccaattttgatggtctcggaatatcagtggatttatacagaagccaagacgcacatcatgatcaagaggaggagctcgcatga

SEQ ID NO: 533822 - DNA, 264 bp, Stenotrophomonas maltophilia; identical to SEQ ID NO: 499456

SEQ ID NO: 533823 - DNA, 132 bp, Stenotrophomonas maltophilia
atgcgtaagaagaacggtcggaagcacgacaggcgtcagcagttgattggccgctttaaggatcttttgaggcagccttggttcatgcgtttggtaatcggcgtgatctggaagttgatggatcgcgattag

SEQ ID NO: 533824 - DNA, 321 bp, Stenotrophomonas maltophilia
atgttgaataaggccctaaggattgtccgggaagtgcaccggatgaaacagggcgaattagctgacgcactaggaatatcgaaatcctatttgtcagaacttgagagaggcgaaaagaaagtaagcctcgacgtcttaaataaatacgcgaatacatttgatgtaccagcctctactttcctcagcttcatggaggcactagaaggcgagtcggatgcacggcgcgctcgcgcccgcaaactgctgagcgttctctcatggactgtcgggaatgaacacaccgaggacgaagaagacgacatccacgcgaaagcgaactga

SEQ ID NO: 533825 - DNA, 960 bp, Stenotrophomonas maltophilia
atgaacacaccgaggacgaagaagacgacatccacgcgaaagcgaactgagcgctacgcgatcgattcgtccccgctgtacggaatgacgagccatacccggctcgccgcgattttgcggtgggccgggacaaccggccagctgagagagttctgccgcagacccaccaacttcagccgttacatcgacaggtcgaagcctggcaaggagcggctgatcgaagctcctgcgaaaagtgccaaggcgttccagactcgcttcctggagctcctccgtcgcattgagcttccggactacctgcattccgcgcgatctggccgttcctacctgagcaactctgcgactcattgcgaggcggatggatgcacgatcacgatggacatcgactcgttctatcagtcggcgacccgcgagcgcgtcatccatttcttcgaggtccacttgaagcagccgagggacgtagctgagacgttggccagcctactctgctgcgatgggcacctagccactggcagccccgcaagtcctctcgtgtccttctgggcgtaccgcaaggtattcgacaccattgatgagcgcgtccgctctcgcgacggggtgtttacgctctacatcgacgacatggggataaccgggaaaggattcgggcataccgacgtccgctggattagtcgactattgcgcaaagcgggtctgaccgtgaaggaaaccaagacccgcgtgttccatgcagatgcacccaagctcgtgacaggcagggcgtgcaggaatggagtgagccgcgccccgaacaagcagcaccgaaagatgcgggctgcgcagacgcagcttgagctgaatccccacgaccccagcctcagggccagcgtcgcggggcaaaagcgccatctcgcactgttggacgacgcgaagcgtgacaggcaccgcgccgaagccgcgcggttgtcgaaagggaactag

SEQ ID NO: 533826 - DNA, 246 bp, Stenotrophomonas maltophilia
atgagtgagaacctgacggtggccgaggcgctccagcaggccgcgcagatagagggcatgctcgacgccatcgaggggaccgcgcccgagaccgtggcatccctaggcggtcgcgacgcactgaccgtgagctgcgagatgacatgcatcggcccggtccctcggctcgacgccgccacctgggagcgcatgagcgccgagtacgagggcgcccgtgagcatggcagcaccaaccgcggcgagtag

SEQ ID NO: 533827 - DNA, 732 bp, Stenotrophomonas maltophilia
atggcagcaccaaccgcggcgagtagcggcctcaacgggcgcgcagtccccgtccgcatcgacgggcaggtttacccctccgccaggcaggcggcgcttgccgtcggcctcagctccaacaccgtcgtcggccgctgccacagcccaaggcgaccgcgaagcgcgcagagccgaaggccgaggccgccgagtcgcccgaagccaccgagaagaagccgcgcggtctcggcgtcggccgactcgcccgcgagctgctcctctacgagaccggctacccgcacgccgtcatcgcggacgtcatcaacgaccggatacccggcgcgagggcgacggccaagtctgtgcgctggtatgccaacgccatgcgcaagagcggcgtccacgtcccggaacgccggaagcaccacccggcgtacatggacgaggagcagtcggccgaggcgctgtccacggtccgggtggtcgagcccgcgccatccgacgactgacgccgttctcccgtcgtgtacgaaaaagggccaccgtcgcggtggccctttcttttcatgcgcttgtgcgcgatcgcgtcccgaccgtggattaggcggctaccaatcgtctgaggtcgcggccttgcccatgctcgcttggattcgctcgccgagcttcaggagttctggcctgatcttctccatgtccgaccgctggttcacggggccatcgtgcgctggcgtcactatgcctgacccgtag

SEQ ID NO: 533828 - DNA, 528 bp, Stenotrophomonas maltophilia
atgaagtggtttggggcgttaatagcggcgttgctcttgacgaccacatcggggctggcgtcggcgaagagggtgccgctcacggaggaggaccgcacgatcgtgcaggtgttcgaggtgcccggctacacgaaggatcaggtgtatagctcggcgaggatgtggatcgcggagaacttcaagtccgcgaaggccgtcatcgagtacgagaacagggacgaggggacgatcatcggaaacggaatcatcaactacccctgcggaggcgcgttctcctgcatggccaaggcggactggaccgttcccttcaccatgcgcgtggagtcgaaggacggcaggttccggctgacgttcaccaacgtccatctcgcgtggcccgcgagctacgggtcaggcatagtgacgccagcgcacgatggccccgtgaaccagcggtcggacatggagaagatcaggccagaactcctgaagctcggcgagcgaatccaagcgagcatgggcaaggccgcgacctcagacgattggtag

SEQ ID NO: 533829 - DNA, 483 bp, Stenotrophomonas maltophilia
atgaataccaacaacgagacggacaccacgaagatcccggtcgtccacgaaatggtccgcccaatgctgttcgccgcgatgttcgacctgctggactggcgtggttcgcccgagcgcatcgtgtcggcgtggcagacgctgggcgagagcctggacgattacgagccaggggagcgcgagttcgccgacaacctgggcagctcggtgtggagcgacctggaccacgcgactgcagtgcatggactggaggatcgcagcgaaatcgagtggtacgaccgctacatccggctggcttacgcatacggcgccgaggagtggcccgcggctgcactcgtggattacctgcggctctttgagggactcgaccgcgaaagtgccgaaacgatggcaaggcgttcgtgggagagcgcacgactccgctacgcgacgttcaagtcttcgcagttcgcgaaggctgcctgcaccaccgaaaccaacatctag

SEQ ID NO: 533830 - DNA, 513 bp, Stenotrophomonas maltophilia
atggccaacgccaacaacatcaccaagctggtttacgagaacgtcatcaagtcacacctgggccagatcgagctggtcggactggagctggagcacgcatccggcgtccgtgcgatcgcggccgacacggccatgcgggagcgcggcggccgcgagcacttcgacgctgacctcctgttcgacgccgtcgacaagctggtgggcaacgaccgcttgttcgagtcgtacaacgacccgtgcaacccgaacgccgagaaagaggaactcgaactgggccagggctgcccgttcacatcgctcgacgcctacctcgacctgcgcgagctgttcggcgcggagtggctcacgctgacgatgttcgagtacgccaagcggctggcggagggagagctgcgcggcgccggaatggtgcaggcgacggagccggtgaggcgcgcccgcgaggagtacgccaaggcgagcgccgccgacttcgagcgcttcttcggacatacgaaaaagcgggcggcataa

SEQ ID NO: 533831 - DNA, 771 bp, Stenotrophomonas maltophilia
atgcggactgacccggccgttgccggtgccgcgttcgcgccactggtggtgattcccgtctacgaccacgagcacgccatcgtggcggtggtcgacggtgtgcaggccgctggcctgccttgcctgttggtcgacgatggttcgcatgaggcgtgcgcggcggtgctgcgcacgctggcacagcgccagggcgtcgacctgctgcgcctggacgccaaccagggcaagggtggggcgatgctggccggttttgctgaagccggcgcgcgtggctacagccacgtgctgcagatcgacgcagacggccagcacgataccgctgacctgccacgcttcatcgaggccgcgcgtgtgcatcccgacgcggtgatctgcggcattccggcctacgacgccagtgttcccaaggcacgcctgtatggccgttacgccacccacgtctgggtctggatcaacacgctgtcgctgcacctgcgcgacaccatgtgcggattccgggtgtatcccctgccaccggtgctgcgcctgatcggtgaagagaccatcggccggcgcatggatttcgatactgaagtgatggtgcgcctgtactggcgccagctgccggtcgagcacctggccacgcgcgtgacctatcccgccgatggcgtgtcgcacttcgatgtgtggcgcgacaacgtgcgcatcagccgcatgcacacccgcctgttcttcggcatgctctggcgcgcaccgcggctgctgtggcgccgcctgcaggggcagcgctga

SEQ ID NO: 533832 - DNA, 390 bp, Stenotrophomonas maltophilia
atgttggctacgatctggctgggcgccgcacatcgcggcggactccttcttccccttttcctcgtgactgtcctcctggtgggccagtcgccgatagcgttggccgagccccccgcgcagcgccaggaactggtcgcggcgctgcgccagctcgatgcgctggagcgcaccgtcgccgacagcgccgcgcatgctcccgtccagccgggcgagcgctaccacgtcgattacccgcggctgctggctgacctggcgcgcgtgcgcgccggtatccaggcccacctctcaccttcgcgtgcccagccgcgcgacccctccgaactggccggcgactaccgcactgagcaggccgtcgagccatcgccgacgaccgcggaggtcaagccatga

SEQ ID NO: 533833 - DNA, 2811 bp, Stenotrophomonas maltophilia
gtggaatcgcttgcatcgacactggttgattcgcaggtcgatctcaacccgcatcaggtcgatgctgcccttttcgcttgccgcaatccgctctcgcgcggtgtgatcctcgctgacgaagtaggactcggaaaaaccattgaagcgggtttggtcatatcgcagcgctgggctgagcgacgtcgcaagattcttatcatcgtgccggcaaacctccgcaagcagtggcatcaggaattgcaggacaagttcggcctgcaggggctgattctcgaagccaagagctacaacacggttcgcaagcagaagcagcggaacccttttctgtcggaatccggcccgatcatctgctcttaccagttcgccaagtccaaagccaatgacatcaaggacaccgcctgggatctggtcgtactcgacgaagcgcatcgcctgcgcaacgtctacaagaccagtaacgttatcgccaaaacactgaaggaggcgatggcgcacgtccattccaaggtgttgctcactgccacgcccctgcagaactctctgctagaactgtatggcctggtcagtatcattgatgaccgcgttttcggcgacctagacagcttccgctcacagttcaccggtagagggcagtcgttcgaaagtctgcgcgagcggctttccgccgtttgcaagcgcaccttgcgcaaacaggtgcaaccctacgtttcttacacggcacgtaaggccatcgtggaggaatttacgccgtccgccgaagagcaggaactgtccaggctcgtcgctgattacctgcggcgccctaatcttcaggcgctaccgcaaagccaacgccagctgatctcgctcgtgctatggaagttgctggcttccagcacacacgccattgctggcgcattggagacgatggcgaagcgcctgcagggcgtactcgatgagtcgccggtggtcgatttgaccgaggagctggacgaagattacgagtcgcttgacgaaactgcagaagaattccccgatggcgacaacagccgagcgtctgacacagcggcgcagaaccaaagcgagcgccacgccatctccagtgagattgaagagttgcgccacttcaagacgctagccaccaatattcgggacaacgccaaggggaaggctctgctcactgcccttgaccgcgccttcgccgaattggatcgactgggtgcggccaggaaagccatcatcttcaccgagtccaggcgcacgcaggactacctgctcagcctgctggctgaaacagcctatggggatggcatcgtcctcttcaacggcaccaacagcgacactcgcgcgcaggccatctacaagagctggctgaaacgccacgaaggcacggatcacatcaccggctccaggaccgcggatacccgtgcggccttggtcgagcatttcagggaacgcggcacggtaatgatcgccaccgaggccggagccgaaggcatcaacctccagttctgctcgctggtcatcaactatgacctgccgtggaacccgcagcgcatcgagcagcgcatcggccgctgccaccgctatgggcagaagcatgacgtagtggtggtcaactttgtggatcgcagcaatgaagctgacgcgcgcgtgtatgagcttctggcacagaagttccagcttttcgagggcgtattcggggcgagcgatgaagtgctcggtgctatcggctccggtgtcgattttgagcgccgcatagctgaaatctatcagaactgccgcaatccgaacgagatcaagaccagcttcgagcagcttcagcttgacctctccggagagatcagcgaggcgatggtcaaaacgcgccagattctcctggagaacttcgacgaggaagtccaggaaaagctccgtgtccgcgccgaagacagccgcagcgcccgcagccgcttcgagcggatgcttatggatctgagccggtcggaactgggtcactttgccagcttcgatgacgatggcttcaacctgcgagccataccggacggcatcggcagcagcgaattctctggcctcgaacttggccgctatgaattaccacgtcgttccggtgatgcgcacctgtatcggatcaatcacccgctggcactgtggatcacccagcaggccaaggctcgcacctttgacgagggaaggctcgtatttaactacgacgcctacggcacgaaggtcagcacgctggagtcgtatcgcggcaaaactgggtggctcacgctaaaactgattgaggttgaggccctgggcaatcaggagcagcacctgctagtcgcggcaaccaccttggatggcattgcgctgatagaggacgacccggagaaactccttcgcctgcctgcgactacacaggccgcaagcctattcaacagcgcgggggacacggcgctgttgtctgacgtggaggcccgcaagaccaaactgctgcgcgagatcaatcagcgcaacctcggctacttcgagcaggaagtacagaaactggatgcgtgggccgatgacctgaagctgggtcttgagcaggagatcaaagagattgaccggcaaatcaaggatgtgcgcagcacggccgccaccgcgccgacattggaagaaaagctgtcgtggcagaagagacagcgggagcttgagggcaagcgaggcaagctgcgccgcgatctgttctcccgacaggacgaagtagaagctcagcggaacgacctcatcagtaagttggaattgcagcttcagcagcaagtggaggagcacatgctgttcaccattgagtgggaactgaaatga

SEQ ID NO: 533834 - DNA, 1800 bp, Stenotrophomonas maltophilia
atgggggcccttgaaccacagcacatgaccgtcctgaagaaggttctggcggaacgcttcgtgccgttccttccgcccctcttgggcgcggcgaagccggacgatcagtcagccaaacagctctcgcgcgccttcagcgcgttcgcgctgcacaagctgctcaacatcacaccgaaggacgccgcggcttccgtggtggacgatttcaacgacaaggggctggatgcaatccactattacgcccctacggaaacgctctacctgctgcaaaccaagctgaaggaatccgagcagttcaagcaggacgaagcgcagtcgttctgcacgggtattcggttgcttctgaagcaggatttcaatgggttcaacgagaacgtccagaaccgcaaggccgagatcgagggcgcgctcgatgcgtgcagccgcatcaaactggtcgtgccctacacgggtaatggcgtgtcgcagtcggccatcgatgcgctgcaagtgctgctggacgacgatgaccttgatgaagagcggctcgacaagcaggtggactactacgcggcagctgacatcacccgcgatctgctggcggagcaggcctaccctccggttaataccgacatcgcgttgcagaagcacgcgaaggtcgagagcccgcgcacaacgtactacggcatcgcccgcttgaccgatctggtcgcgctgcacaagaacaagggcaaggcgctgtacgagcgcaacatccgctactttctcggcagcagccgatccgacgtcaacaaggccatcaaggcgactctgcacgacgatccgggcagcttcttctacctcaataacggtgtgacggcggtctgcgacgagattgaattgaaggggaagaatcccagcagtggttttcggaagttcaaggttcgcggcctatccatcatcaacggcgcgcagacggtcgcgtccgcagctgaattcgtggcccagcatccaggcagcaacatcaacgatgccaaggtgatgctcaccttgatcaaggccccggcggatggcccgttcggcaagcgcgtcaccaaggcgcgcaaccaccagaacccagtgcaaacggcgaactttgcttcgctggacgagaaccaggagcggctgcggcaggagatcgcgcatctcggcttcgcctaccactaccgcccggaagcggcggcgactggtcccgaggctatttcgctcgacgaggcgctgcgcgtgctcgcttcgcggcaagacgatccacgctacgctgtctggctcaaaagcgaaccggcgcggctggccaatccagaatcccccgaataccaggccttgtttcctaccaccctgaccggcgtagccctggtcaatgcggtgctttgccaccgggccatccgcacgctagtggtggactacgagcaaaaggcggccgcgcgcagccaggaaaagctgatctaccgccacgccattcacgtcatcacggcagtgatgatgaagcgcctgcgccaacacatcggcgcggccgcagtcatcgacgcctcaacgatttccggcttgatcagccagccgctcgatcagctgcggcagcaaacctccgacctcgggcagcaacgcctgctgggcgaggggccactggcctacttccgcaatcagggcagcgtcgcctcgtttatggccgatctaatggaagcgcacttcgcgctaagcgccgatccgacgctacccactctgcgcaatatcaacactgcagcggacgggtatccgcgcaagcgcgtcctcgactacttgtcgaacctagcaccacaacttcaatag

SEQ ID NO: 533835 - DNA, 771 bp, Stenotrophomonas maltophilia
gtgaagttcgaaaagctagacataggaaatcacatcatccttcgggcaatgctcgaaatggatgacgatgctgacgcgcttgcgcagacccaatctgccagaaaggcagaaaaggttcaccgagatgcaccatcaggaagacgaagaagcatcgatgaggtgaatagccaaaactacctcggaacactcgccgacatcgtttgcgcccgcttgctagagggctacttcaagaaacacagcctcaaaatcgatgtcgtccgatatgacgacatcaggacggacgattttcaggatcacgatcagtacgacataaaactatctacacaaggtcgcgaataccttgtagaaatcagatcatcggtttgcatatatttatcgctagcagcgatgataggcaggtggcaaatcctcggaccatacatttcttcagctaaaggctcaacagaaacagctaagcctttttaccttagaccgatttttcacctatccagcttcgaagaaaataagagaacaaacaggtatcagagaacaaccgctcccgagttaatcagaagcggcgatcttaaactctattttgttggcggggcaacaagcgaaatactggagaagaagggaagaaatgaagcgggccaggaattaaagcagggaaaggccgaatttcgggtgcttgacattactgacggcctagatgcgaaagaaatgcttgagaccatcgggcaattggtagccaaagaacttacggataacgggtatgacaaaacagaagcttga

SEQ ID NO: 533836 - DNA, 1701 bp, Stenotrophomonas maltophilia
atgacaaaacagaagcttgagctcacttggattggcaaggagcaaagaccaaaattagagccacgcatccttcttgaagatccgcagaagtcgtatcacgcccagcatcgcgtgacagagaacgatatcttcgataacaggctgatcttcggagataacctgctggcgctgaaggctctcgagcaggagttctcgggaaaggtgaagtgcgtcttcatcgatccgccgtacaacacgggcagcgcgttcgagcactacgacgatggcctcgaacactcaatctggctgggcttgatgcgggaccgactcgaaatcatccgacgcttgatgtccgatgacggctcgttgtggatcacgattgacgacaacgaggcccattacctgaaggtgctatgcgacgaggtttttggcaggtctaacttcgttcgtcatgttacttggcaaaaaaagtacagcgtaagtaacaactttaagggggtcgcatcaattaccgaccacgtgcttgtttatcggaagtccccttcctttagcaatcgactgctaccacgctccaccgaggctgccgcacgttactccaacccagacaacgaccctcgcggcccgtggaaggctgttgattatctgaatcaggcgtccgtaactcagcgaaagaatctagtctatgacatacgcaaccccattacaggtgaaatagtcaagaacaaagtgaaggcgtggaaatacgaacgggagacgcacgaaattcacgttaaggaaaaaaggctttggtggggcttgcacggggaaaactcagttccggcactgaagctattcctaagtgaagtccgggatgggatgaccccccacaactggtggccgcacaccgaggctggccatacagacgaagcaaagaaggagagtattgcgttgttcggcgccgatatggtgttttccacgcccaagcccgagcgactgctaaaccgaatcattactttggcgaccgatcctggggatcttgtcctcgactcctttgctggttccggtacgaccggagccgtggcacacaagatgggccgccgctggatcatggtggaactgggcgagcactgccgcacgcacatcattccccgcttgaagaaggtcatcgatggcgaagacaagggcggagtcaccgaaagcgttggatggtcaggtggcggtggctttcgctattacagcctcgcacccagcctgatcgttaacgaccgctggggcaatccggtcatcaatcctgcatacaacgctgcccagttggcggaagcactcgccaagctggaagggttcatttacgcgccctcagagatgcagtggtggcaacacggccactccagcgagcgtgacttcatttatgtcaccacgcagagcctatcctccgaccagttgcaggcgctgtccgaggaagtgggagccgaccgtagcctgcttgtgtgctgctctgccttccgtggtgtgacagcagcgcaagctgcggaacgctggccgaacctgacgctgaagaagattccgaggatggtgctggcgcgctgcgaatggggtcatgacgactacagcctcaacgtggcgaacctgccgatggcgaagcccgatcccgttgagtcttcggcagccaccgaggtcaacaagaaaaccaatagcaggaaagtgcccgctggacaaggcggtctgtttggggagaacgaataa

SEQ ID NO: 533837 - DNA, 1755 bp, Stenotrophomonas maltophilia
atgagcagtgctcatcttcgcttccaggtggattcccgtctcgcgaccttgctgagccaggaatattcgtcttccgagcgagcgttgaaggaactcgtggacaacgcatgggatgctgatgctgagcaggtgaccgttgtcctgccgaagcctttgagcggcgagcccatcattatccaggatgacggtaccggcatgacggaggaagagctgcgtcggcactacctttcgattgcatcggatcggcgttctcggcgaggtgaacgaaccagcggaaagaatcgccttgttaaagggagaaaaggcattggaaaatttgcgggactaatggcagccgcttcaatgtcgcttgaaacccgtgcgcggggccaagtttgccgtatcacgttaagacttgacgatctttctcaggttgaggacatcgagcatctgaatatcgacttgcaaagcgaagcgtgcgggccggaacagagaggaactacgattacgttgagcgatttgaaccaaggccttgcatatccagacgccggccgttttcgccagatcctgttgcaggattatggccgacaggatgactttgccatcatgatcgacggtaagcggctagatgtcgatgacgttctgggcagctactcggagcaggaacaggagctgccgcatgcgggcaaggtaaaattgcgcttcgccatcagcgatggcaagtctggtttgcgccagcccggcatcaccttgcgtgtggatggaaagtccgttggacgtccaggattttttggcttggatcagcgtgatgactttccacccaagctcttgcgcaagctatacggcgagattgaggcggatgggctgcgcgaccatatcacggcaggatgggacgctgcggttgagaatagtgaacttctgaaagaggtggaaggctatgtccagccaatactccgggatgcctatgaacagcagtaccgaaaagaaattcaattggcgcaggctcggttgcaaagggccattctcgcacgtctgtcagccctgcctgagcataagcgccgattcgcagaccgtgcgataaagaaaattctcgacaggtactacggagagcctgagagcaaggtcgagccgatggtcaatgtgctgctggaggcgatggaacgatccgattaccgtattcttctggagcacattgcggaagcgactccgggcgacgtcgcaggggtggcggagcggctggacgagtttggcttggcagagatggcattcctggtacagcaggctgcggcgcgccaagtttttcttgatcaactggaggcgcttgttcgtgacgcggcaactaccgaagccgtcttgcacaaagccctggaacgcaacttgtgggtgtttggtccggagtattcccttttcagctcaaacagcacattgcggcgacaagtggaagatgttcttgggaaggtctatacgggagacaaggccgacaaacgtcctgacctgcttctcaacgagaatctgagtggcaagtacctattgatcgagttcaaacggccaagccacgcgcttaatcacggtgactacgtacaggcaattggctatagacatgaactgacaaagtacgttggccctgctgttcaggttttgttggtcggtggaggcaggtctgccgactttccgaccggaaatcgcgagccggatgttgaagaccgcatctttggacaggtcatctcgacagcgcgacggcaaattgagtggctgcttcgaacggagcactcatga

SEQ ID NO: 533838 - DNA, 1215 bp, Stenotrophomonas maltophilia
atggccgtggacgaccccgcaccacgcgcaccgcgccaaggccccgtcgccctcgccgatctgttcgcgggcgccctgaaggaactcgcgccccgttccagcgcacccgcgaccgcacccagcgacggcttcctcttcagcggcaaccggcacgagagcgtgcccaggcgactgttcctcgatcgtcggctgacgccgctggaacgcaatgcctggcaggtgttccggctgatgctcaaccaggacggggtgaccgcgttccccacctatgagcagctacgcccctggctggcgtcgatgccctgcgcaggatcggcttcgcatgaaaccgtggcacgggcgctgacgctgctgcgcctgacgcgctggcttagcctggtgcgccggcgacgcgaccccaagaccggccgcatcctcggcaacctctacgtgctgcatgacgagcccctgaccccgttcgaggcgatgcagttggacgccgactacctggagttggtcagccaggccctcggccactcggccaaggccgtgcaggtcgtgggcctgaacaccttgaaggagatcgcggacgacccgctgctgtccggccgcaccttgccgtcgcggctgcaggtgcttgccgagcgcctggcgcgccagggcatcggagccaccgaaagttatccacaggggggagcctcccacgattccgaagaagggcccgcgagccttcttcggaatggcgaacgcccctcttcggattccgaagcagggccgaaacccgcgtcagacgcctctcttcggaatccgaagcaggaccgtacagtacgtagtagtcgtattgatgaagtacgtactaccgcgcgtgagcgtgagcaggcgcgcgcgatgcagggcattcgcctgcccgagcgcttcctcgatttgaaagaagagcagcaggccggcgccatggtggccttgcagcaggtcgatgcctcgctgcgacaagccgtgctggacgaatgggcggagcgctgtcgtggcagcgccatccgcaacccggccggctacctgttcggcatcatccagcgggccatccgtggcgagttcaatgcgtgggccaagcaggctgggtcggcaccgccaccagccgccacgcgagatgcgccacctgagcccccacgcaacgtggttccgcccgaggtggccaagcagcacatcgaccggctacgcgagcttctgcgcaagagttga

SEQ ID NO: 533839 - DNA, 1647 bp, Stenotrophomonas maltophilia
atggctgagatgacctcccaggacatggccggcaagctgcttgccgccgggttcgagcgcagcggtccatcggccacggccttgagcgatccgatcgccgacacgccgatggtcgtgacgctggaccagttgcgcccttacgaccacgacccgcgcaagaagcgcaatcccgcctacgaggagatcaaggcatccattcgcgaacggggcctggatgcggcgccggccatcacccgccgaccaggcgaagatcactacatcatccgcaacggcggcaacacgcgcctggcgatcctgcgtgaactctggtcggaaacgcgggacgagcgcttcttccgcatatcgtgcctgtttcggccctggcccgcgcggggcgaaatcgtcgcgttgaccggccaccttgcggagaacgagttgcgcggcggcctcacgttcatcgaacgcgccttgggcgtcgagaaagctcgcgagttctatgaagcggaaagcggcgccacgctaagccagtccgaactggcccgccgtctgggcgccgatggctaccccgtgcagcagtcacacatcagccgcatggccgatgcggtgcgccacctgctgcccgcgatcccgaccgtgctctatggagggctcggccgccaccaggtcgagcggctgtcggtcatgcgcaaggcctgcgagcgcacctgggagcagtacgccaaagccaagtcgcttcctttggacttcgaggggttctttcaggaagtgctgtcgcagttcgacacgcaggccgacgagttctcgccgcagcgcgtgcaggacgagctgatcggccagatgtccgagttgctgggcatcgactacgacgtgctggcgctggacctgaccgaatcggaaagccgtcaccgtgcattggtcagcgacccgacgccgtccccggcacaaccgaccttgcccgatcccgtgcccctggcgcggccgccacgtgatgcgtcaacgcccgcgccgaccgtggcatcccctgtgggacggccaggcgccgtgcccccacgccaggacaacgcggctggcgaggcgtcttcgggcaacccagtggcagcgtcgggcgatctgctgcaggggcacatcgtctcgccggcaccgacgacggagcgactccaatccatccagcgcatggtcgccgaccagttgggggatgcgctcccgcccgatttctcggccaacgtgctgcagtccatcccggtgcaggccggtggcctctatcccatctcggacgtctggtacatcgatcccggcttggacacaccggaccggctgcgcattcacattgctcagttcgcgcgcgagatcgcggccgaagcggacctggacgggtgcatcgatgaccgtcccgatggcatcggcttcgcatgccgtggccaggccccatcaccggcgggccgcgccgtgctggcgctgctggcgtgccttgcgggccagagcctcgccgagcttggcctggacaacgggcaactcgcccttgatctgccggcactgctgcacggccagggtcaaagccacgacgccacgtgcttgagcgacaccgcagtggtcaagctctttcggctgctgcgtctggctcggcgcctgctggatttggaagccagcaccacggcttccgggacctga

SEQ ID NO: 533840 - DNA, 330 bp, Stenotrophomonas maltophilia; identical to SEQ ID NO: 495239

SEQ ID NO: 533841 - DNA, 600 bp, Stenotrophomonas maltophilia
atgctgccgggtacggtcgatgtcgctgcgctggccgactatggtgcgccgttgctgcaggcgctggcgcggcgcgaaacgccgttgccaccggatgcgggcgagcgcctggtggctgcgcttgcgcgcgatgtcgctcgcgaagcagaagggcacgcgctgcagtcgcagctgggcgtactggccctgcaggcgcgtgagcaggcccagcacctgcagcagcacatgcagctgcgggccatggccatcgttgagcattccgcggcggccgcggcgctggacggctgggccgaactggctgcgtcgcggctgacgacgctggatatcgccggtcaggccgcgctgtcgcaccggctggaccatcttcgccggctggcctcgctgcgccgcctggaagccggccaatggcagctgctgcaggaccaggacaacatgctgctgcaacgcttcgcgcgcatccatgacgtgctgctgccagcctggcggcaggctgcactggcgggccaggccgctgcgggcgctgcgttggccggcaaggctgccacgttgcacgcacagatcgatgacgaggtggccgcggctcaggctagactgccttga

SEQ ID NO: 533842 - DNA, 429 bp, Stenotrophomonas maltophilia
atgcatccgggtgggagaaacggattcgacatcatcttctttgtatcaccgttcgtgctcgtcatcttctcgacttccaagcgtcggtccacgccaggcactgtgatcttgctgctcagcaggagatcgggcacgttcttgaagagcttcctgaagttgctcaagcgaagagctcgtcaggatcttgaggctgtcaccgcttttggccacggccagtcacgttgcatcctttccgcccccgccctgctttcggtaagaagccagcttgtgcaggtacgcctcaagttccttcggcggcaagccaatcttcttcttgccttctggagattggtcgccgaccagatgcacgagaccctgaatcaggcgatggcactcaatctcaccctgatcctcgtgctcctctctggctttcgcgggggcgcagcatag

SEQ ID NO: 533843 - DNA, 342 bp, Stenotrophomonas maltophilia
atgaagcctgtgtcgggtctgcgaagggcagtgcagaggggactgctgagcctggtcatgatcctgctggccgggacggtgcatgcagcaccggacccggtgctggtgctgggccggatcagcgatgatcccaaggcccattacgagcagctgcaaccgttgctggactatgtagtggcacgcatgcacgacgtcggcatcaccgaagggaggatcctgatggcacgcgacccgcagcagatggccagctatctgcggcgggggcggtcgactgggtcacggaaacgtcgggtacggcggtggcactgggccagcgcagtggcgcgcggccgctgctgctga

SEQ ID NO: 533844 - DNA, 873 bp, Stenotrophomonas maltophilia
atgcctttcaaccagcttctactgccgctgataggcggctaccttcttatcaacttcacgcatatcacgtcgcactggacttctcgccagagcaaggaacagcttttgctcgcagctgcattcgcgggcttcgtggcgctcgtcctagctaggataggtgtagttctgctaatgatgaccgatgcgggtccgcagctgtatcaagcgctgcatcgcgcggttccttacgatgggatcggcaccgctctactcgcctgcctcatctgcctacttcttcggcaatggatcaacaaagtttggtcaaaagaagatgctgcactctggctatacggtacaggcgcttacaacagcctggagaggctgttcttctttagcttcttacgcgttgaggggatccagacgcgcccattctttcgcgagctcacgctgcgcatgttctggttcccaatcactcgacagtatgagcggctcaagcagctcctcactcgtgacgaaatcgattgccccacatcagactatgacaacggctacgacagcgaggttggcgacgatgccaagactgagccagtcctagtgatgctgtccatgaaagacaggaaggtatacgtaggttggctagagtgggttcctcctctccgggcggatacatcaccttacataaagattgtcccggcatggagtggctatcgtgatgctcagacaatgcgaatagtcaccacagaagaatacgaagacgccctattcgataatcccgatgcaccacgaggaaagatcttggccatcggggatatatcaaatgcaagtctctacgataaagatgtctacgctagcttcttgagcaacgctcctcagaacgaccaaaacgtcacttag

SEQ ID NO: 533845 - DNA, 237 bp, Stenotrophomonas maltophilia
atgggagtcgatgactcgaacacgactgcgcctcgcatcagtagatatgaacgaggaatgcacaagccggacttggagaccatcgagaagctcgcagagcttctagaccttcctgcggcttactttcttgctgcgtcggatgtagtggctgaggccatcctgctgctttctcagcttgatgctaggaggcagaaggaagcacttgggctgatcaagagattgatggacgcctcatag

SEQ ID NO: 533846 - DNA, 390 bp, Stenotrophomonas maltophilia
atggatacgctaaccatgggacttggcgacggggagacagttcgcgagcatgcctctgtaggcatgcagtttcaggacaggatggacatctggtcgttcgtccggatgctggccaagattgcacacggctaccaggtcgcggtgcacggcgcttttcctattgagcaaagcccactggtgcccatcattcttggcaagcgatgggatgcgcgaaattggattggttgcacagagcaggatccgcttccatctaatcgtcagtgcttgcaccttctccaagacgttccccttaccgccgatgatggctccagcgcgacaatggtacgcatcaaacttttcgccaacgcaccaagccccagctacgtattggcgaccaagattgccagatga

SEQ ID NO: 533847 - DNA, 954 bp, Stenotrophomonas maltophilia
atgagagttccccatcacttgatcaagacgccagcggggttttcgttccgtcagcgcgtgcccgtcgacctccagccccttctgggttgccgaattctcaagcgaagccttcgaacgcgcgaaatgcgcagcgcccaggcttgcgccctggtgctggccgcccgctatgctgaggtcttcagcgccatcaggaagaacggcatgggcgagaagacggcagagcaatggctccgggagcttcggggacaacggctccaggactacaccctggaacgagacgccaatggcgccctgcgtatccaggcggagccaggcgaagacaccgaggcgctgactcgcgctatcgagagcatcggtcgggtcaaccctgcgttcttcggcgcggcagccgccccggcagttccctccaagccccagcccagcaaggtcctgtcgctgatggaagcgcgtgatctttggctcaaagccattgccccagacaccatccccaagacctacagcatcaagaagtcggccattgacgggttcgtgcgcgtcaccggccctgactatcccctgccgagcatcaaccgaatcgacctgtcgaacttctatcagtcactcgccgacgctggcatctcaaccccgacccgagtgaacaagcagtcctatctgggcggcttcttcgattggttgattgccgctggctattacacagacagcaatccggcccgaagccatgtctcatacggcaatagcgccaagcgaaagcggcgcaagctgggcttcaaggccttcgacctgaagcagatcagcctcctctttgctccatcggcctttgccaccttgtcacctgccgcgcgctgggcagcgttgttgggcctgtatacgggcgcccgtgcctctgaagttgggcagctgctggtgagcgatgtgcaaacggagggaggggtggcctacatccatccatattaa

SEQ ID NO: 533848 - DNA, 516 bp, Stenotrophomonas maltophilia
atgtgcaaacggagggaggggtggcctacatccatccatattaatgacgacggggagcaccagcgcctcaagagcgaggccagtatccggactgtcccgatccatgctgacctgatggccctgggcttcggcgactatgttgccagcctgcccacctcaagccgtctcttcccccaagcgaaggccaatgccgtcaatggcgctgggaactggatctccaaggcctttacccgccacctcgctgagcacgggagaacgtggcccaaggccaagcgcggtttccattccctgcgtaagacggttatccagcagatgcagggcttcggtgtcacctcagaaatgcgcgcccagatcgtcggccacgagcttgatgatgagcaccatcccgtctacagccgggaattcaccccggcagaaaagctcaatgggctggtcacccctgaattcaagacagcagggctctcatccttgagcttcaatcttgagctcgctgcactgaagaagttgctggggtag

SEQ ID NO: 533849 - DNA, 1410 bp, Stenotrophomonas maltophilia
atgttggaaaaagattattacgaagtactgggaatccgtcccagtgcgtcaatcgatgaaatcgatctcgcgtacaaggggcggcggagccagtatcacccggatcgttacgccagttccgattccgaaaccctcgcttgggccacggaaaaaatgaaggaattaaacgcggcatacgccatcctgaaggataagggtgagcgagcccggtttgatcaacagcgtgggaagcaatccgccagaccggcagcttcgccaccacccattcctgagccggaagagcgcagcccgttgctggattttcttcaaaggtatgtaccggacaatgagttcttccagaagatacatgtcgctccccacatcccgcagaaaaagctgggtggcgccctggaaagctatggccgtgggctgaaaccgcgaaatgtcatcgcgctgatcgacgacaccgtgttcggcagtgccaaagagggtgtgcttatcacggagcaagagctcaggttcaaggcggtcttcgaatccccccgctcggtccaggtggaaaaaatcgggagcatcgaggcttataagagcaggatcacggtcaacgggcaggagttgggcaaactgaacgtgccggactcagatgaagtccatcaattctttgacttcttcaatgccttttgtcagcagcgccgcgccgatgcgccgcgcgagaccaagcacaagcgcccggcttctgccgggacagggcaccaagccttcacgctgctggaaaagggctactacaagagctttgagcaaagcatagacaggaggatcaaggctactcaaggaagggagcaagcggtcttgcagctcgccagcctgcttctgccgatatccttgtcgcttgcagaatggattgaatcggagagcgatattcctcgggaactgcgctcactctggatgagcgacgccgttcgctttgagctccttatctactcgacggccgccgctgagcatctgatcagagcaaatatcccggatgggcgtgagtatgcggatgagattgcagcagctaccgcgaccaccctgctgatcgaatgcatcatcgagctcagtggtttcaataaaatcagaggtctccacaagatggagaccatccagcaggagctgaggaagtcgggattcttcaacgagttcatgcgcagatggggccgatacaagctcctgatatcagagagggatgcctccggcctgattgatgagttcgagcattccatccgctcacccgcacttatggagctctacccagtgaccgccttcggcaacgagttcctgggtttcatgcaagaggcaacagatagatatctgcccacgaatgccattcccgggtttttggatgacatcgatgacgatatcgagagcgcgcttcttgagtggattgcctag

SEQ ID NO: 533850 - DNA, 216 bp, Stenotrophomonas maltophilia
atgaccgtgaagaatctggccgtactttatttcatcattgcaatcatcttcgctttctacgggaactggtggggcgacgacgcttacaggggctttgcatacaacctgggcaagtcaatcatctggcctgcaattatcttcccgtcgctggggaagatactcggcggcattgttctgcttggcgtactcggtatggtcttggcatcgaagaggtga

SEQ ID NO: 533851 - DNA, 876 bp, Stenotrophomonas maltophilia
atggcgaagaacgcaacaatcatcctcatggcgatgatcgtctcgatgctgcttgtggcatgcgacggaaagtcgcgaagcagatatgtggccagttgtaccgctcagggcatcgcgaaggaaatgtgctcatgcacgtacaaggagctgaaaggcaagttcaacagcagccagatcgacgactatgttcgagtcgagaagcttcccgaccgggaatggaatggggcaatggtcgacgcgcttgagagctgcggggtcggtaaagaagccgccttcctagtgaggcgcgcgtttggacttgaccagccggcaggccttcccgagccggaacttgctcagccccctgcaacgcctcagcaggagtctcagcctcccctgcaagagccggcgttctcgcaatgcggaaaggacactgactgcaagggtgaccggatatgtgagtctggccagtgcatggcaccttccaatgccggttccattcagtcacctgcggagcctgcacactcgtcgctatcaactggcgcaacgacatgcacaaacgctgagcgattgatcttcagctgcaccaccacgaatcaaaaggaggtggcgctgtgcgattccggctcggcactgcgttacatcttcgcacggcatacggggaagtccgaaatgaacctctctgtccccaacagcatggtgtcagtggcgcgaacctcgtcgatggatacggtcagaattcctacgggaaatacggtctatagcatcttcgaccagaccaatgagagtggcgccagggaggcgggcgtcaatgtcgagatcaatggccgtcacgccgcaacagttcagtgcgagccagcgtccgtcgaaagcctgatcgacaaccttcgtccatag

SEQ ID NO: 533852 - DNA, 312 bp, Stenotrophomonas maltophilia
atgtactacggcaaggagttctgcggcaaggccatggtgagttgggcgtatgcgcgcggcgtcgcgctgcgcctgatcgagcccggcaagccgaaccagaatgcgtacatcgagtccttcaacggccgcctgcacgacgaatgcctcaatgagcactggttcatcggcctgctgcaggcccgcaccgtcatcgaaacctggcggggtgaatacaacgaggagcggccgaagaaggcactcggcgggctgacgcccgccgcctatgcacgacaactcgcggccaataccgctacgatgagcaccggactctaa

SEQ ID NO: 533853 - DNA, 1572 bp, Stenotrophomonas maltophilia
atggccatttatcacaccagagtaaagaccttcagccgtgcccaggggcacgcatccaccgctgcagcggcctatcgcgcaggcctgctgatcctcgatgagcgaacggggcttcggcacgactatcgaaggcgagggggcgttgtcgaaacccggtgtctggcgccagatgaggcgcctgactgggcttttgatcctcggcagctctggcccgcagccgaggcctcagagcgccgaaaagacgctaccgttgcccgcgagttcgaggtggcgctgccacacgaactgagcaaagagcagcgttcaaacctggcagccgagatatcgcgctgtctggtccagcgttacaggttcgctgtccaatccagcatccatgagccgcaaacggcagatggcctcaactatcacgtccacatcttggctacgaccaggcgggtggacgcagaggggctgaaggacaagaccagagaactagatggcggcccttcaggccgaggggaagtggaatggattcgccagatggtaggagaggctatcaatgctcacctggccgctgccggtgtctcggcacgcgtcgatcaccgcagcttgaagaatcaggccgccgaggccgcagagcaaggcgacgagcttacagcggcggagctttcacgcatcccagggcttcatttgggcaaagatgcgacggcgcttcatcgccgaggcgccgatacagtccttaagcagggcaatgacgggatccaccaggccaacagcgccgcttgggatcgcgccgtggccgagatggcaggagagggcaggttgatggagcccgcatccgatcaagccacgccggtcggcccgcgcgaagttgcttcgcatcctcccgtcctaccaatgctgtcacctggtggagcgactcgtctggttaacgggggtagggaagccatgccggttggggcggttgccgacgacggggcgcggcagctgcaggccaccgcatccaagcaggcgttgaaggccgtgctagaaatttgggccgaggcgtggattgaggcgctgcgagatcggcttagatttacgcgcaggttgctgcgcaacagtgccaccttgatatccgctcatgtcgcagcgcccaagcttcgtggcgacttggaagagttgctcgtaagactgaagaagttgaagcgggatgcgctgcgtttcaagcgtaggctgagagctgaagaccgtgctcagcatgggctagcacaggcggaatttgctctggagagcttcgaaagccagaacccaaagccgggcctcttgaatcgctcagactggtcgcggcgtcgggcgcgccgggttcgggctttcgaactggggcgcctggagtatcaacgcgctcacgaggccactggtcccgccgctcagaaggactacaaccgtcagacggatgagtccctctcgcagctggagaattggagtgaagtgttgcttcggagatatccggtgttggaggatgcgcccattgacgctcctgaagcccctattccagcggaccccttgctcgtaatgaatcctgtcagaaatcctggagcacggttgcactga

SEQ ID NO: 533854 - DNA, 633 bp, Stenotrophomonas maltophilia
atgcgtggatggcggccgtgccgaccaacggtcggcacccaccggggcagctggcgctgtgccgaccaacggtcggcacctaccggggcagctggcgctgtgccgaccaacggtcggcacctaccggggcaggtggcgctgtgccgaccaagctcggcacccaccggggcaggtggcgctgtgccgaccaacggtcggcacccacccgggcagctggcgctgtgccgaccaacggtcggcacctaccggggcaggtggcgctgtgccgaccaagctcggcacccaccggggcaggtggcgctgtgccgaccaacggtcggcacccaccggggcagctggcgctgtgccgaccaacggtcggcacctaccggggcaggtggcgctgtgccgaccaagctcggcacccaccggggcaggtggcgctgtgccgaccaacggtcggcacccacccgggcagctggcgctgtgccgaccaacggtcggcacctaccggggcaggtggcgctgtgccgaccagggtcggcacccaccgggggcgcaaacaaaaaagccgctgcagggcagcggcttttcgtctctcaggcggcgcggtggcgccagcgggtcagaggtcgacccggcgggcctgcatga

SEQ ID NO: 533855 - DNA, 2046 bp, Stenotrophomonas maltophilia
atgaagaacatcgtctccgccagcgcactgatgttgaccctcgcgctggccgtcgtggcaccggtatcggcagcgccgaccgtccccaccatcgagcagctggctgcttttccgcagctgtccagcctctccatctcgcccgacggcaggcacatcgccggcctgcaggcccagggcgaagatcgtgtgatcctggtctggaacaccgacaacctcggcgctgcaccgaccgtcatcggatccggccgcatgaagttccagggcgtgtccttcatcaagaacgggctgctcgccgtcagcctctggcagccctacgatctgcgcaccgaccgggtgaccaagaccttcatcagcaagttcttcatcaccgatattgaaggcaagaactggaaggagccgatcacccctgctcgtgccagcagccatgcgcaggaactggagcaggcgctttccagttcaagtgtgctcgatacgctacccaacgatccggaccacatcctggtcatcaatggttcgggcagcaatgccggcgacgtatacaaggtgaacgtacgtgacttcaccacccagcgcatccagaagaccgaagaacgggtggccggttacattaccgacctcaacagtgaactgcgtgcccgcctgcgccaggacgtggacggtaccggcgcctatgtggcgaccgagttccgcaatccctcaaccaatgcgtgggaagagcatttccgttcctatgtgaagaaccgtgacatcaaccaggtggtcggtttcgccgacgatgccaacattgccttcatccagagcaatgtcggacgcgacaagaccgtcatctatgaatatgacatcgccgcgcgcaagcagaaggaagtgctgttcgagcacaagttcttcaacgccggcgatgtgcgggtcaaccattaccagggcgtggacaacatcccgttcggcgcgctgctcggcgtgggctacagcggcccgcgcggcaacgaggtggaatggaccaacggatccttcaaggcattgatggccggcctgcgccaggccttggcgatcaacgccagtgaggtgacgctggtcgacccggccaccagccagagcgccactgtggagctggacaacggccaggcggtgcgggtcgtcgattacagcgccgatatgaagaccgtcatcgtggtcacctccgggccgtccaatccgcccgaataccacctgctgcacaacggcaagctgaccctgctggccaagacctacccgcagatccagcctgccgcactgggccagacccggctggtctattacaaggcacgcgacgggctggatattcctgccttcctcaccacgcccagcaccgagctgtgcggtgctggcccctggaaggcggtcgtgcatccgcacggcgggccatgggcgcgcgatggcatggacttcgatggctcgatgtgggttccgctgatggcgtcgcgctgcatggcggtgctgcgtccgcagttccgcggctcggccgactggggccgcaagctgtggatggccggtgacgccgagtggggccagaagatgcaggatgacaaggacgacggcgcgcagtggatgatcgaccagaagatcgcccgccccggccacatcgccatgttcggcttctcctatggcggctactcggcgtttgctgcctcggtgcgccccaacggcctgtacaaatgtgccattgccggtgccggcgtctcggacatcaagaagatctggtcgcgcttctataccaacccgttcttccgccaggcccaggcccccaccgtggccggcctgaacccggtggacaaggccggcgagatgaagatcccgttgatggtctaccacggcgatcgcgaccgcacggtgccgatcgaacagtccgagtggttcgtgaacaaggcgaagggttccggccagccggtcgagttccacgccatcgccgactatgcccacgggccggcctggacgcgccggatcatggccgaccagttgcagctgatcgacgactacctgggcaagggctgcggcggcggcggcctgtaa

SEQ ID NO: 533856 - DNA, 2958 bp, Stenotrophomonas maltophilia
atgatcaatcgcaagtcgctcagcaagcatccgctgagcttcgccctcgcctctgccgtgctgctcgccgcagccgccccggcggtcgcacagaacaccaccagcaccaccacccagaccgcggaagagaccgccaagtccagggccaccaacctggacacggtgaccgtcaccggctcgcgcatcggccgcgacgtgttcaattcggtttcgccggtgcaggtgatcacccgtgaggaaaccaccctggccggcttccagtcgaccgcgggcgtcctgcagagcacggcgattaccgccggtgccgctcagatcaacaatgcgtacggtggctatgtcaccaacggcggcccgggcgccaacaccgtcggcctgcgcggcctcggcccgacccgcaccctgatcctgatgaatggccgccgcgtcgctccggccggctcgcgcggctcggtcggcgctgccgacctgaacgtgctgcccaatgccatggtcgatcgcgttgaagtgctgaaggacggcgcatcgtcgatctacggctccgacgccgtcgccggcgtgatcaacatcatcacccgcaacaaggttgacggcgtgaccgtcgaagcccgccacacggcgaccgaaggcggcggcggcgaagagcgccgttactccgttgtgttcggcagcaccggcgagcgcggccacttctccggttcgtacgagtactacaaccgcgacgaactgaccctcggcgaccgcgactggtccagctgcaacaccgactaccgcaagcgcgcgggtggccagggcgcctggggggatggcgactacgtcgacccgctgaccggcaagccgaagtgctatccgatcaccggtaccggctccaacggcgtgaccatcaacaccatcggcaccaacgtcctggccggtgttccggcgcagggcgcgacgggcaccaccttcgaccgctggcgcccgaactcctcggtcacctccggcctggtcggcttcgagggcgttggccgcggctccgcgctgaacaacaacatccgcgacaccttcgatccgcgcacgctgaaccgctcgatgatctccggcgccaagacccacaccctgttcctgcagggcggcctggacgtcaatgccctgggcaatgccgaagcctacttcgaactgctcggcagccgccgtgagtcggagcagaccggctaccgccagctgtcgctggactacctgcgcggcagcccgttgatcccgtccaacctgcaggcctccaacttcggcggcggcgtcggcgtgcgtgccttcatcggttacggcaacgacaagagcagccagaccgtcgacttcttcaagggcaccgccggcctgcgcggcgagctgagctcgacctggaactatgacttctacctcagccacgcccgttcggacgcggactacacccagcagtcgttcctgaccgaccgcctgcgccagagcctgaacgtggtctccgacggtgccggcggcttccgctgcgtcgaccccagcaatggctgcgttgccgccccggccctgaccagcgcagtggtcgccggcaagttgccgcaggcatggaaggactacgtgttcgtgccggtgaccggcaacacgctgtacaccgaaaccaccgccaacttctccgttgacggtccgctgtttaccctgccgcatggcgatgtgcgcgccgcgttcggtgccgaatggcgtcgtgccaagatcgatgacaccccgtcgatccattcgatcaacaacaacctgtacaacctgacctcgtccaccccgacccgcggtacggactcggtgcgtgaagtgttcggcgaaatcgaagtaccggtcctgtcgggcgtcaccgcagccgaagagctgaccttcaatgcctcggcccgctggaccgattaccgctcctacggttcggacgaaacctacaagctgggtggcctgtggaccccggtcaagtggctgtcggtgcgtgcctcctacggtacgtcctaccgcgcaccggcgctgttcgaacagttcctgggtgccaccagcggcttcctcagcaaccagatcgacccctgcaacaactggggcgctgatccgggcaccccgctggcggccaactgcgcatccgaaggcctgtctccggaccactacgccacccagtccgtggcggtcatcaacggcggcggtgcggcagcgggcctgaaggcggaaacctcgaagaacttcaccgccggcatcgtgctgcaaccggaactgccgggctggttcggtgacatctccttcgccgccgactacttcaacatcgaagtggaaaatggcgtgtcgcgcgccggtggcgccaacatcctggacctgtgctacaacaacccgagcttccgtgcaggtggtggcttctgccgcctggtcgacccgcgcaacccggtcaacaaggcactgaccgtgtatgacagctatgtcaacctggcagtggacaaggtccgtggctacgacttcaccctgcgctacacccgcgacgtgggcccgggcaccctgcgtgccaacgtccaggtaacccacttcaccgaacagtccaacaagctgttcgctgatgacgcgctgcaggactacaacggcatgctgaacaccccggcttacaccggcacgctggacctggtctacagctggaacaagtggcgcgcccgttacggcctggagtgggtcgactcgatggatagctacgactactacaacctggatccggccacctcggtgtacaagttcgccgtgccgagctacttcacccactcgctgtcggccgaatacaccggtgacaagtggtcggtgacggccggcgtccgcaacctgcgcaacgaagagccgccgatgatctcctccggtgcctacaaccgtgtcggtaacgctccgctgtacagtggctacgactatgtcggccgcacgtacttcgtgaacgtctccaagagcttctga

SEQ ID NO: 533857 - DNA, 783 bp, Stenotrophomonas maltophilia
atgggagatgacatcgaggcggcggtacaggcgcaaggcggcaaagcccctgaagcgctggcgcgggggaatgcctacttcaagtccacgcaggatcagctgaagcagctggagcgcgtggtgaacaaggctggcggccccgagaaggtctacaacgcggtgatggccggctctggcgaaggcggcaccacgctgaagcgcgtgatggaagctctgccggatgatgggaagaagtccctgacggccgcggtgctgaaccggatgggccgaccgacgccgggccaggccgggctgcctgccgagcagttcagccccggcacgttcatgaccaactggagcaagctgtccgacgaggcgaggcgggagctgttcggacactatgggccgggcttcgccaaggatatggaccagatcgcccgggtggccgacaacatcaagagcgggtcgcaggtgttcgccaacccgagcggcacaggaaatcgcgctgcagcgtatacctatggtgccgcgctggtggcgtcgctgatggacgtcaccgggaccactaccgctcaacctatcggggcagggctgggcgcaaatggtggagcgagactgttgaccaacccgcgcttcgtgaaatggttgtctcgggccactaccgcgccagtgggatccgtcactggttcgctggcttcgctccgaaacatcgcgtcgagcactggagacgcagagctacaggaaattgctgagcagcttgggaaggccgagcaggaatccgccggcgcaaacgacgatcagtag

SEQ ID NO: 533858 - DNA, 318 bp, Stenotrophomonas maltophilia
atgaagctaaacggaagaccgttggctcttatctctgtagtggttcttgccgcctgttccagcgacgactgccgttcgtattcgaagttcacctgcgaccagctccaggaccagcagtacaacgtctactactacgaggaagtgccccaaggcagcgaaatgaaggaaacattcctgggtgaggtgcacggactcaatagctgcggcacaaccgcgcgaacagccgcattggccagggaagaacaccgccaaggcgattggtcctatatatgctgcctgaagaccgacaccgactcctgcatggagaagcacagatga

SEQ ID NO: 533859 - DNA, 447 bp, Stenotrophomonas maltophilia
atgaacgagaaggatgacgtccaacaggatcatgtgcaattcgatgatcagcctcagatagaaatcgataccttcctgcgcaatctggtcatgttttccatgaacggtgtaagcgtcgacgtatcgctcaccgtgaacggcatcatcgtctgtggccaaattgcttcgggcagagagtacttcgaaagcgtcatgtcagattttgacagagcattggaatcggaagacctgaagcttgcgatgtggccgctgtttgaatcgtaccgagatcggtacctgcctgagaaccgaacggatgacttcgatgtcacgtatatccatctgaaggatgcgacgttccattctccttctggagctgtcggaattcccaacggaaacgccccaaagaagatgtggcgcggcaagctctcccaagtatctggctttactctcggcagattcaagtaa

SEQ ID NO: 533860 - DNA, 381 bp, Stenotrophomonas maltophilia
atgcaaatccctgatccgatccggccgtatgcagacctgatccgcttggggctggtggtgctgctcgccagtggcctgtacgtagccggctgccagcgtggcgaggaccgccagggcgcggccgaccgggcgcagatcgatacggtgcagcgccagctcgacggcgcgcgcgctgaggctgcggagaacctgcgcgcggccaatgccgccgggcagctgctgcaggaggtcaaccggcagtgcgggaaactcggactacgagatcgcactgctcgtcgggcacgaaaccaacacggcaaccatgacgaggggctacggctcctcccgccagatgcttctgtcccagaggcgtgtcgttctagaaaccttgtattatgctga

SEQ ID NO: 533861 - DNA, 1752 bp, Stenotrophomonas maltophilia
atggtggacgagcaacacgtcgttgaatgtcttcgtatcaaggcgcttgcctactacgaccctgaggaagacgagttcaaagctcggctccttttctgcagcgggccgacgaaggaaggtggacagcctaaggaggttccccgaaacgtccggcaactattcggattcatttacctccgtgcactgcgcactggcagtcgtgcgttgagccttgagcgaggatcgctgctggacattattctccagcggagcaacattcgaaccgggatctgggaaacagcgatcgatcgattacgtggattgacgccccccatcgacgagggggcagtcaacctggcacccattctggagaatatcgaagagcgacttgcgaactacgtcgccatggaaggggatggtcgcgctacacagcttttcgtcagccagctcacgagagagcaccttagaaagacgatctccttctttctgaaggtcgacaatgagcaggctccggtcccgttccaagaagttgggacagggacgcttggtgctttggttctggcgctcttgtctttcatcgcagagatgaagactggcagcgtcatatttgccatggaagagccggagattgctgtatctccccacacccagcgcagaatcgcacagtacctcatatcaagtgccgatcagtgcttcgtaacctcgcactcgccctatgtcatcgagcagtttgagccggagcaaatcagaattctccgcagaggggcggggggatccgtctcggctaaggggctgcgggtcggcgaaaccgttaagtcgaaaacatataagaggcacgctcgtcgtgctttctcggaagcgatacttgcgaggggcgtgatcgtaggggaaggaataacggagaaggacatcttgctcgctgcggctgcgaagctagaggaggctgaaccggatacgcactacccgcttgatctagcgggcgtgagcgttctatctgtcgatggtgagggcagtctcgcggagttcggcgagttcttcgcagatctcgggatctctacctacgcgctgtttgattccaagccgctgacccctgatatgcaggcgcgcgtagacaaggcatacgcatgtgtctgtcagaccaagtacaagggggccgagctattactggtggaggaatgccccgtcgagcgtctgtggtccctgctggttgaggtccgagatggctccgggaagcccgccatccaagttcccccagcaaagcctagtgacgctgacattaagaagctggccctttcgctgctcggtaacaacaagggcgacggctatgcagggcggctaatagaactgtgcgctgtgagcgagttgccaccgaccgtcaggggatttcttgaggtggtttacggcgcgttcaagcgccccaaagcggtaaccccgatagcaaatcttgccgggctggcaggggttacattcggagctagccccccctcgctggtgaacgggctgacgcctgctgcggcaccgacgcctctcgcgccacagtggcctcaagttccgcctccgcccgtctccgtggcttcagcgccaccagcgccaccagcaccgcagtggcctcacgctgctccgcctccgcccgtctccgtggcttcagcgcctccagcaccaccggcgcctccagcaccaccggcaccaccgattggcgcatcagaaacttctcagatcacttctctgccaccgctgccacctgcgccatgggtgccgagcaaaaaggactga

SEQ ID NO: 533862 - DNA, 1746 bp, Stenotrophomonas maltophilia
atgacggaggactcaccttggaaaccatgtcagaagcgtcaagagattcttgatgcttccggccattgcctagttcttggcggcccgggcagcgggaaaacgactctggcccttaagaaggcactcaggcacgtgtccagcgggctgctgccgggcaggtctgtcctcttcttgagcttttcccgggcggctgtggcgcgagtcaccgatgccgcgaaggccgaactggcaggcgttgactcgaaagctttcgcgatccagacgttccattccttcttctggcaaatcctgcagtcgcacggttacttgctgggatgtcccagggatgtatccatcattccctcgcatgaagaggcggcgatgcggggagggatcaaagagggggagcaggggtgggatgagtggacggagcgaagagctcacctcttccgatcagaaggcaaggtttgcttcgacctttttgccccccttaccgcagacttgctgtgccaatgccaccgaatcagggcgagatactctcagcggtatccgctcatcattgtggacgaggcacaagatacaagtgatgcgcaatgggaggtggtccaactcctctcgcagggttctcaagtcgtttgcctggctgacccagatcagatgatctatggacacctcaagggcgtaagacctgagcgggtgcgattgattcgcaaggcactcgcgccctgtgaggtcgacctaggtagtgagaacaatcgaagtccgggaacggacattgctcgccttgcccgcgatatctatagccggaacgttggggcccgaccttacgctggggtgaccgtcgccccgttcaagttcgacaaggactcccgggacaaggccattaggtctagcacagctcgcttgcgaagcattatccagaaggagaccggagcgcagccagaaagtatcgcgatcttgacgtcatacggctcaggagttgcgaccgtgtccgcggccctacagcaggagaagccgatcactcatcaggtactttttgatgagtcatttgtacttctctgtgcgcgcgcacttgcctatctgctcgagccaaaggagggtgtttcagaggccaaacaggtcgccgatctcctggatctatgcgcaaccgcctacagtgccaaaggcaaggagacgcatcgaaagaccgccgcaaagcttcggtcctatgcgatccaactgcgggcagggaagagtcctgcctataagtgcgtcggtgcggccaggtctttgttggctaagttggctggcgatccatggtccggagtgccccggaaagactgggtagccgcaaagaatgcgctccgctcaagcggggactctctactccagaacatggcaagcggacttgactacgtcgttgcgtttgcgcggggtcagaggatcaacgacgcgctctcggacatctggatgtcgaatggctcatacgttggcgcgagagcggcactggacttggccttggcacaggatcaattgatcgcgggggacgagactctgagcggcctgcatgtcatgaacattcacaaggcgaaggggaaacaattcgacggggtcatcctgttgcggcttcaatatgagtccccattcgtttggcgtgatgaggatgcgccccatgagcaggggcggcgtctgcttcatatggcactcacgagggcgcgaaagcacgtgctgatcgtcaaccaaatcttccctgcctgtccgatcctgaaaatgcataagctcgtttaa

SEQ ID NO: 533863 - DNA, 1200 bp, Stenotrophomonas maltophilia
atgccgatatccgacaagagctacagagtgatatggggccagttcgcggggcgctgtttcatgtgccgcgaacagcttattgaacgaaccgacggagggacggagtcactaaccggcgaagttgcccatattgttggcgagaagaagggtgcggctcgcgggagcagctcgttgagcgaggcggaacgaaaccatcccgacaacttggttctcgcatgccggaagcatcacaagatgattgatgatgacccgagtacctattcggtggcgtggctggaagggaagaagcaggagcatattgagtgggttgaatctggtttggcggaagctaggccttgggcatccaatctcgatcacatgatctacatcaatgtgcctcgtttgagtgagcaggcagtgcttcgcggcttccgggtcgatctgagtaaataccgcgatggggcgagtttgagtagcctcgggtgggacctcaatcacgtaatggctgcgtttgatcgtgtgctagctcatcttccactagaggcggtgtcatcgaaggaattgagtctgcacgaaggccatataggcgccctaatttcgttcgatcgagtgcgattccgcaccaagaatgtcgaagtggaccgtagtcgaccgatctcgggaaatctggacgtcgatccgcacgtttactatcgagatcgaggattcaaggttgtcgcaaacatcgatgggcgttggataacgacttctacagcgttctcgctgtttcgatctgggcagtgcgtcctgtccgggcttgcgcgagtcacaaacgttgactatgagagcggtgttgtgaccgtaacgcctctggtgcttgggctctctcagccgcggagttcatcgagtctccagccggaatccgccagcgctactgaagctaatgcgaacagctcgaagctggatgcgattgctgacatcgaggaggggcgacgcaggggcgtctatttttcgccgtccccagaggtttgtgacctgtgctgtcgtcttatgagcgccgagacctacatgatcgatggcgcaatctcgcgaggtggcccgtgggcgtgcatgtgcccggcgtgcttcttcgagcgagatgggattatcggatggggtaaggggcagttgtacaaacaggatgggcgtggctggctgcaggttggtggttttcagccaactacgacgctcgttaacgaatga

SEQ ID NO: 533864 - DNA, 849 bp, Stenotrophomonas maltophilia
gtgagcgttgagtcggaagcggcgaggatttttgatcacatcgacaaggcgtgcaacgtggacaagcgcgcctttactccgctgttcaaagttggctgtgatgaagttccgtaccatgcgggtacagctttcgggatcgaactgtccggggtgaagtatctggtcaccgcagcgcatgttttcgataaggacgagagcaacgattgcgactcgaagaacgagattttttgctttagcgaaggcaagttgaagcagatcgccaggtttgatctgttgcatgcaaggaagaatggaggactggtcgatatggcggtcgtgacgcctcgggatgtcgagatcgagtcaattttcgaagagttctttgccgagagtgacttcgaactcggcgacgttcgaaccgatcagtatgtggcagcctgcggctttccggcgactaagaacaaggtccgatggggtacaacgcagctcactcaggccccatatgcttactgtgggagagcttctgctcccagcgtctgcgtgcgagccgggtttgatgccgctacacatttttgcttcgatatcttcctcaagaagacattcactgcgaggcagaaggagattagggctccggatccacacggcatcagtggtggccctgtcttcgtgattcacgatttctcagatgcagcgacgctgatgaagccgaagctgagagggatcgtcgtagagcagaagccttacgacagagttgtcgcctgtgtgaagatcgaagtggttgttgaggccatccgacaggcgacccgacctccgaccggggtagaaatggtggagaggagccagagctgggattggggattggagccttga

SEQ ID NO: 533865 - DNA, 207 bp, Stenotrophomonas maltophilia
atggtgattactgtccaatgcaaggcacggcactggtccgtactgcatccgcaggcgcacgacgccattggctatgcacgcggcgccgacgcgttcgacgccgctgcagcgctggccctggaacatcaccggcgcaccggccagcccagcacggtacgggtggaggcgctcggcaacgccgtggacgccctgcacatcggggactga

SEQ ID NO: 533866 - DNA, 453 bp, Stenotrophomonas maltophilia
atgtcccgcttgttgctgttgacattcctgctgcttaccaccggctgcgcccatcgcatgggcgaccggtcagcccccgcacccggctacatcggcaacgaccaggcagtgcgcgcagcgcaggatgatcccgcaagcggcatctcaggcaccttcgcactggcggtacaggcgtacggcacggagaacggccacatctacctgaacagtgagcgcgactaccggcatccgctcaacattaccctcgacatcaatgctgccctgcgcccgcagctggaagaacatcttggcctggagctggaacagctgctgggccggcacctgctggtaagcggaacggcgaggcgggtgcgcatcgccttcttcgattcggccggccgccagagcaggaagtattactaccagacccacatcgcagtgagcgatgtcgaccagctgcggttggctccctga

SEQ ID NO: 533867 - DNA, 180 bp, Stenotrophomonas maltophilia
atgaacgacaagaggaacaccccatcccagggcgagatccggcagggcagcgaggaaagccgccaggacagaaagcaggacgatgtggccagacagcggccggggcagcgcgatcaacaggtgcgcgatgcgcattcgcgcagcccgcagcgcaaggacggcggccaggaacctgcctga

SEQ ID NO: 533868 - DNA, 1134 bp, Stenotrophomonas maltophilia
atgctcgacgcgctgtaccagacctattccgaatccagcgccggtgcagcgctgcaggcacgctgccgggagcaggtgatgtcctggcgttgggcgagccactcgatggccttcgtggtgccgttcatgcgcgaagagcacggcgggccggtgccgcgctggatcgccgatgccaaggccgatcccgcccggcatgtccaccatgggttcgatgcgcaaggacggatcatccttgagtgcgagcccaatggaagcgtgtcggtctggctgcatctgccggacgttcgacaacagttctcgttccacaactccggcagcctcggctcgatcatgcagttccacgaacccggtggacgcctgcagcaactgcagctggccgccgacggtcgtggcttcaccgaacactacgagtggaaaggcgagcgcctgctgcgcgtgctgatcgagaaccgcggtgagggccggcgcacctggtggtgtcagcgcctgcatgactatgacgatgacggccagttgcagcagatgacgctggaatatctggacagccggaagcgccgcaagggcgacgcgcagctgctctatctgcggcccaggaagggagaaacgctggcgacggtcagcgccgaggtgcagcgcctgctgcaggaggcactcgccgatgccttgccacgcatcccgcaggaagagccgctgtactgcctgttgctgtgcttcaccgaggaagacctgctggcggcctggccgccgttcctggtctggggccgccagtcctaccgcgagcaggtgttggagcagggtgaggaggtggcctattacctgtgggcaccggatgagatccgccaagcgcaggtcgggtcctgcgagcactggttcgatgcgcccgcgctggttcaagcgtgcacccgccacacccagtacatggcgctgcggcagagttcggcgtcggcgatgcaggtgctgaagaacgtggccgcctggctggatgcgccggaacagcgggggctgctgcggaccaccgatgatttcgtggtggcggtggccgacaacaccggcagtgtcgatccgttgccgggcctgcgacgggcactggcgcccgaacgctgggcgctgctgaagtcgcgcggctacgtgtga

SEQ ID NO: 533869 - DNA, 711 bp, Stenotrophomonas maltophilia
atgcagggccggcatcggtctacgccgacgcggcagggtgggggaggcgtcattgtacgtggctggcggggtgaggtcctgtcggcgcgatttgtcgcgatctgcatcgctggggggcggcggctgatgtgcgtcacgtattcgccgcaattcaggcaaacccttgcggtgcgcagcctgcgcccatgctgctgcgggaggcgcgctgtgctcgacgccgcgttgaagtgcgcgcggtgtcggggcgttgctaggttcgggccacctccagggcggaaggattacagggtggcaaggacgttgattgtggtcggtgatgcgaccaccggcggtggcagggtcatcaccggctcccccgcgaccgacatcgagggcatacccgttgcgcgggtgggcgacaaggccacctgccccaggcaccagtgcgtggcatccatcgtcagcggcgacatcacgctgacgtttgaaggccagcccgcggcgcgccacggcgaccggctctcgtgcggctgctcgctgatgtccggcaagcaatcccgcgtccatgcggacatgggcggcgaaggtggcggggcggacagtgccaggcctgccgctgccgcatcggagctggccccattgcccgcactgccgcaggccggcaagccgcctgtgtgcgaggcgtgcctgctggccgcttcgcgctccggcgcgaccttcctggggcgctga

SEQ ID NO: 533870 - DNA, 567 bp, Stenotrophomonas maltophilia
atgctgtacatgatggagcgggatatcgagaagatgcggaggagattcgacggtttcgaggggtttggcgcttcattgttgctggccaacgtagacaatgaccgtgactggcgcaagcccggggtggttgtgctcggcgtgcgtcctggtcttgggagacatagtttgagcattgatgggctggagcccttcggagatgaaatctcttcagtcacgcttggcgcaatgatcgaatcggtcaaggtcatccagcctgatttcgcatgtgccgatgtcaaggcgcgatcgcctgaaagcgaattgatctactaccagatacacagacgccaatatgggcatcgggatttcctcggctggatggggtatgtcccgactcgggttgagcatgcgttactcccggacgcgcacgctgtccatgccgtggacggcttgggcacggtgatcgtctcggttcccggcgtgtttgatccctgtgatgacacgcaggtggagcgcgttcaccgcgtcgaaagggatctggccaacctcgacctgttgccggtgaccgatccgcacttcaagggctga

SEQ ID NO: 533871 - DNA, 297 bp, Stenotrophomonas maltophilia
atgatcgacatcacgccggaacaggcccgtgccaacgcagccaccgccagccatccggtagagcagtactacgccgacctcaacaactccatccgcgtttgctcaacggaaggaaagcacgagatcacgttcggcttcagtcgcgcacttgccagcgaagcgctcgttgatggtgtcgtgaaccagcttctgcgcaccggctacagcgtcgagcgcctctccagcaacgacgaacaacacttcatccgcatcagctggaaacaaacctcggaaccggtaaggctcagcggcggctga

SEQ ID NO: 533872 - DNA, 333 bp, Stenotrophomonas maltophilia
atggcgcagtcgagccagctcgactctacagttccggccgatcccgccgataccgcgcagcgagtcctgacgcagggtggttggcgggtggttcgcgtatttctgatcggggcgatactgttcgccagcacgcccgcatgggctgaaccgggcaccacgccgctgcagatccggctcaccgtggtggacgcctgcagcggcgaggccggcagccgccattgcccggttccgcagcaacgcagtgacgcgccgcagctgcccgcccaggtccgcgatctggcaccaccgcccgccaacgaagacccggtgcctgccgtgaccgtcatctactga

SEQ ID NO: 533873 - DNA, 348 bp, Stenotrophomonas maltophilia
atgcgcatggaagcgatcctgaatgtgaagttctaccgctcatccgcggccgatgagccggtccgggcctggctgaaggaggaggtttccgccgacgctcgcaaagctatcggcggagacatcaagaccgttcagctgggttggcccttgggtatgccactggtgcgaaagatggatgaccggttgtgggagattcgaagttcgatccctgagggcatcgcacgcgtcatgttcactaccgtacagcgggacatggtgctgttgcacgggttcgtgaagaagtcacagaagacgcccacgtcagacctggaactggccaggaagcgccggaatgaggtaatcagatga

SEQ ID NO: 533874 - DNA, 351 bp, Stenotrophomonas maltophilia
atgagcaagaacaaacacgttggatcaagctttgatgacttccttgagtctgaaggcctgctgcaggagtcggcatcattggcggtcaagcgcgtgattgcctggcaggttgccgaggcgatgaaggccgtcaacatcagcaaggcaacattggccaagcgcatgcataccagtcgctcgcaggtggatcgagtattggatgaagccgataccggtctcacgctcgatacgctcagccggacggctacggcgttgggttatcgaatcaaagtggatctggtggcgcccaaggccgcagggccctcgacgcgaaagaagaagagcgccgggccaaagaaccacgaggcgtga

SEQ ID NO: 533875 - DNA, 366 bp, Stenotrophomonas maltophilia
atgggtcgtactgtgttactggccttgctgacatgggctgtgatgcccaacgcccaggcggagatgccgagcgcggaagcggaagaagccgttcataaggctgcgtatgttgaggcaatccgcgcgcagctcctggctcagtgggtgaagccttatacggtccatcgaggtcagctgtgcccggtaatgatccatcaagcgccgggagggcatgtcattcaattcaaggtggaggccccttgcgagttcgaagcggaaggcatgaactcgttggagagagctgtgctggcctcaagcccacttccctactacggattcgagcaggtgttttcgcctcggatccggctgcggttcctggccgagtag

SEQ ID NO: 533876 - DNA, 1041 bp, Stenotrophomonas maltophilia
atgaccgacgaccgcatcatcggcgccggcgccacccgcgaggatgacgccgccgacgccagcatccgccccaaacgcctggccgactaccttggtcaggccccggtgcgcgagcagctggagatctacatcgaagcggccaaggcccgcagcgatgcgctcgaccatgtgctgatcttcggcccgccgggcctgggcaagaccaccctcagccacgtcatcgccaacgagctgggcgtggcgctgcgggtcacctccggcccggtgatcgagaaggccggcgatctggccgcgctgctgaccaacctgcagccgcacgatgtgctgttcatcgacgagatccatcgcctgtcgccggtggtggaagaagtgctgtacccggcgatggaagacttccagatcgacatcatgatcggcgagggcccggcggcgcgctcgatcaagatcgacctgccgccgttcaccctgatcggtgccaccacccgcgccggcctgctgaccgcgccgctgcgcgaccgcttcggcatcgtccagcgcctggagttctacagcgtcgaggagctgacccggatcgtgcgccgctcggccgccatcctcggcatcgactgcaccgccgatggcgccggcgagatcgcgcgccgcgcgcggggtaccccgcgtatcgccaaccgcctgctgcgccgcgtgcgcgactacgcccaggtcaaggccggtggccacatcgacgagccggtggcccaggccgccatgaagatgctcaaggtcgacccggaaggcttcgacgagctcgaccggcgcctgctgaaaacgatggtggactacttcgatggtggcccggtcggcatcgaatcgctggccgccgcgctgtccgaagagcgcggcacgctcgaagacgtggtcgaaccctacctgatccagcagggcttcctggtgcgcaccgcgcgcggccgcatggccacccacaaggcctaccggcacatgggcctgaagccgaagaacccgccgcaggacctgttcgcggaggttcccgatgtcggttga

SEQ ID NO: 533877 - DNA, 1557 bp, Stenotrophomonas maltophilia
gtgacccaggaaacccatccagaccgccgcctgttgccgggcaggatcctgttgtggttctcggccttcgcgctgttgatcctgctggcctgcagctggtcgatgccgccggtcgatgcctctggcttccggcagacgcagaccgcgctgtcgatcgactggctgctgcgcggtggcccctggctggattacatgaccccggtgctgggcgcaccctggtcgattccctttgaattcccgttctaccagtggctggcagcactgctttccagtctcaccggcatgagcgcggacaacagcgggcggctggtctccacgctcttccacgccggctgcatctggctggtctaccgtgcgctgctggcgtggcgtcctgatcgcacgctggcggtgtgtgtcgccggtgcgttcgccgtatcaccgtatgccctgttctgggggcgctcggtgatgatggaatccagcgcggtgttcttcggcctgctctttgtctgggcgatggcactcctgcgcagccagccgcgcgtgtgggtgggggtggtcgccgttgtcgcggcggtgctgtcggcggcgatcaaggtcacctcattcttcggttttgccgtgttcgttgcgctggcgttcgtgtggctggccgtgcgtgagcatggctggcgcccgcagtggctgcagcagcactggcggctgatgttctggggtggcctgtccgcgcttgccgtgctggccacgctcagcctgtggctgcagcatgccgatgccctgaaggcacagtcggcgctggggcggcagatcacctccgatgcgctgtctacctggaactacggcaccctgcagcagcgtctggatccggccacctggtggggcaccgtgttcaagaagcgcttcgccggtgccatcggctcccactggatcttcctcgtcttcgtcatcgccgggctgtggcaggcacgcacgcgcacggcggtggtggtgctgctgctggcctacctggcgccgttcctggtcttcaccaacctgcacatcgcccatccgtactaccaggcggccaacatcgtgttcgccacctcgatcatcggcctggtgctgtggtcgacggtgctggcggcggaggcggcgggcaagccgcgccgcggcgtcgtgctggcgatcgtcctgtgcgtgctgtcgctggggctgggcctggtgaagtcgctgaaggacatcaaggaggcgcgcgcgcccacgccggtgtcgcagattgccgaggtcgtccgcaacggcacgttggagcagggcgtggtggtggcattcggccaggactggtcctccgaactggcctacttctccggccgccgcgccttgatgattccggattggacatccgacgaggtgcttgcatcgctggcggccgacgatgccgccttgggtgggttgccgctggctgcgctggtcaactgccccaaccacgtgggcagcaccgcgcaacgcctgcagtggcaggcggtgatcacagcgcgctacgccgccgggggcgagaagcaggatgtggcgggctgcgaggtctggctgcagcgctga

SEQ ID NO: 533878 - DNA, 387 bp, Stenotrophomonas maltophilia
atgtctgcacgtcccgtgtttccccatctgtccgccctgatcggcgaggccgtcaaccggctgcctgccgacgccgccgagcggctcgaagccctgctcgacgatcccaacgatctgttgcccgccctgctggcgcgcatggatggccgcgacggtgccgatggccgccggtttgaagcagagggcctcagcccggcgcaggctgcaacccaagccggggtggcccgcacgctggcgggtctggaggtggtggtgcaggtgctgcacgccgccgccgctgcgcgtgaacagggcggcgcccatcagcagctcagcccggatgtggtggatggcctgctgctgggcgcccgagagctggtccgccacgcgcggcaacaggtggagtag

SEQ ID NO: 533879 - DNA, 228 bp, Stenotrophomonas maltophilia
atgtccgtaggggaaatcgcggccctgacgattcgtgcagcgacgcacgtccgtggcgcggcgcgcatcacacaggtgtcgcgatgcgcctcggcgttgatacgcacgagtaacgctgagcacgccggttacgacaacccgcgcgagcgctacgcggccgccccctccgcacgcgaccacctgcgcgccgatgcctcggccaccgtcacaccgggcgggttgaggtag

SEQ ID NO: 533880 - DNA, 243 bp, Stenotrophomonas maltophilia
atgtttctgaaagatccgaacagctacgtggaaagggacgttcctgtgccgcgctatgcccccttcctggatggcttcatctatttcatgtacttcccggatgaccaggtgcggatcgtggccactccctactccccaggctatccgggcttcgcttacgacgttgacttcggcgatggacacagtgatctagcgaaggtcaaggaatttctggaagcaaccgcaggcgaggaggtggaatag

SEQ ID NO: 533881 - DNA, 606 bp, Stenotrophomonas maltophilia
atgcaggtccaggaccacctcttgacccatttcgcagacaccaccgtcaccaccgccatgggcttcgattccagcgtccccgttgcgcgcaagatgagcgccgatcttcgcctgcatctgcaagacgttgagcggctggcgcaggcggcgcggatgtcgttgtcgaactacctggcggttaatcaagggcaggaggaaatcgatcttcgcaactcgctcagcggcggcttctggaacatggtgggcgcgttgcaacgggtgcgcggcacgcacctggcgcgtgccgatcatgcctcgcgtcgtgcggttctacaggaacgtcgcgcctttctggcaaagaagttagcgccgttccagaagcagaatccttgggtagatcgatcggtgttcggcttctcgcgcggcgccaccgaggcacgcgtgttctgcaactggctcggcgatgcctgcgatcccggccccgggccgctgcgcttgtgtggcattccggtgcagatcgatttcattgggttgttcgataccgtcgcttcagtaggcgcggcgcagagctactttgattcggtattcgatggccacggcgtgccaactaatcgaaggtgcaattga

SEQ ID NO: 533882 - DNA, 600 bp, Stenotrophomonas maltophilia
atgaagcggtttctgacggtggcgattctcagcggacttggcgtgcttgccgtggccggagtggtgctcaagttcatggatttcaggggcgggccgccgccgcctgccccgccgaagccacgcatcattgactctgtctctggtaacgacatcactgatgcctccccacaaatgcatctgatgattggcatcgccaactattctgacgaagggctgggaaaggtcttcatcaatgatacttgggggggagggatgcagccacgggccagcggtaacggacgcatctgctgcgtgactctccctcggctctggcatccgggcctgacggttgcggtggcctatcgcaccagcagcatgttcctgaaggacccgcatagctatgtggagaaggaagtgttggtgcctcgctatgagcccttcctaggggggcttatctactttatgtattttcccgatgatcaggtgcgggttgttgcgacgccttacgagccggggtactcaaaattcgcgtatgacattgactttgcaaattccgaacgtaacccggaaaaggtccgggaattccttgaagtgacagcaggcgatagggtgggcgaatga

SEQ ID NO: 533883 - DNA, 816 bp, Stenotrophomonas maltophilia
atggttgatgtgccatggatcgatccgtggcggcatgcccggttgccgtggcaaagcgttggcgatcaggccgcggacgttctgcccgcctgcgcgctgctggatatggcgttcgcaccggatggctggaagcgcctgcgcgcgttgcctgcgcagatggatccgctgttcacccatcgctatgcgggcaaaggcctggaccggttgtcgccgtgcctggttgtcctgccaggcgaagccgcagcacgcgcgcattgctggcagatgctgctggagctgagtcatggcgcaccgatgctgtcggcgctgcgcactaccgctgacctgcgtgacctggccgggcacctgcggcggatatgggaaggttgttccagcaccggacagccgtggttgctgcgctggggcgatgggcgtgccgccgccggtctgctggatgtgctggacgatgcacaacggacacgcgtgctgaccggtctgcacgactggcatctgcctgcgcgcaccggtgcgtggacgcgggtggccgggaagggcggcgcgcagttcgatgtcgacgcaaggccactgacattcactgccggccaggaagccgcactgcgtagcgggagtcaggccgatgccatcacgcgcttcgttctgcaaagaccagcgctacgcccggacggcatgccgccctcgcaggtgcatcgctgtgcggaacacgctttggctcgcctggcacaccggggcattgagcatcccgcgctggcgcaccggatgacgatcaaggcggttgctgcctggaatgctcgccgtggcgatgaaggggagccatga

SEQ ID NO: 533884 - DNA, 2610 bp, Stenotrophomonas maltophilia
atggatcaccgagcatcattcgttgctgcctgcgaggcgtcatcgcgcgtccatcgtttctgcggtccaaccgacctgcggttgatcgtggagcgctggcacggcagcgaatcgttgtccgaaggcctgcactgccagatcgatctgctcggcgaggcatgcgggcacagcctggatgactggctgacccggccggcaagcattaccacgcgtctgcccgatggggccgagattgtccgggtggggttgatccgcagtgtcgagcaactggactgcgcaggcccacttatgcggtaccgcattcacctgaacgactggacggcctggttgcatgacagccgtcagagccgcgtgttccaggatgagagtgtggccagcatcatcagcacggtgctgtcggtccacgcgccgctggcgcattggtcctggcatatcggaagcgctgctgcgctcgagcgcaggtgccggggctaccgcgtgcagtaccggcaatcggatatggcgttcctgcagcagttgatggccgatgaaggcttgggctggtgcatccgcacgctgcccgaggcccccggcgggcacacgctgatgatcttcggcgacagcacgcgatgctcgctgctgccacggccgcggcgcctgcaccagagccagcgcgtgtccgacggggcggggatcgccgcgctgcacgaggtgtaccgggtggtaccgacccagatgacccgcgtggcggacctggacgatccgttgcgcgtggtttcggccagcctgcctgtccgcgcggtggccactggacccttggaggactattcgccggccggccacgcggcatgggagacctcgcgcgaggccttggccgaggtgatgcgtgataccgaagcggcgctttgcgagcagcgacgctggagcggcgaaagtaccgagccggactttcagcccggctacgcgttcgaggtgctggcagagccgggccagcgcgcggtgccggcattgctgctgacaacggtgcatcatgcggcggtcaatcaactgcctgcggttgtcgagttgcagcaggagctgccgttgcccgcaccgtccgacaccgtgcccaccgagcgcgtgcaacggctgggctatgccaaccgattcgaggcgatgccgtttgaccgccgctggcgacgttcgccggcccgtacggcagcgcggccgacggcgctggggccgcaactggccacggtgctcggcggcgatgacggtgcgccgctgcagatgaatgcaggcggatgcatccgcgtgcggttcggctttgccaccgacagcagggctgacagcggctggctgcgcgtcgcccagacctacgccgggccgggtgtcggcagccagttcctgccccgcgtgggccaggaagtggtggtggacttcatccacggcgacctctgccgccccatcgtgatcggcgcgctctatagcggccgtggcgaagcgcgcgctgaagcgttggtgcagtccagcgatgtcgccagcagcgcccagaacaacctgaccggtggcaatgccccgcgctggcatgccgccggcgcgggcgaagcggcccagcgtaatgccggcgcggtatggggcatcagttcgcagagctgggatggccagggcggcaacagcctggagttcgacgacagcgatgaccaactgcaggtgaggctggccaccacgcagtgccacagcgcactcagcatgggccatctgcgttacctgcagcacaacttccgtggcagcctgcgcggaagcgggtacgaactgcgcagcgacgcgtggggcgccgtgcgtgccaccgcagggctctggctggacgccatgcaacgcagcgcctccgcgccggccggtctgcgtgctgcgccggtggccctgctgcggcagaccctcgtgctggcgcagtcctttgacgaagcggcgcggcagcagcgtacggtgcggctgcgcggttatgccatcgacgccgtcggtgcgagtgcactgcagtcgctggccgacagcgtggcagcgtcgcaatgcatcgcgggcagtgacgagcgcgttcccgccaccggctcggcggtgctcggcttgtcggcgccggcaggcatctgccaggtagccggccaggcgatccagctggcggcggggcacagcacgctgctggccagtggcgccagctcgggcgtgatcgttgccgggcatgcgcgctggcagggccgccaggcgatcggtgttctggccggcgcaacccgcaaccccggaaatgcaggactgagcgtggtggccggtgcgcagtcgctcgatgtccaggcgcaggcaaacgccgtgagcctgcaggctcgcgccaatgtggtggcggccagccaacagggggaagtgcagctggcggcgggtggcatcctgcatatcgcgacggcggagggcgcggccatcaccctggtggacggaaacctgcacgttacctgccccggcacgctgaccttcgagaccggtgaccggcacttcaccggcccggtgcaggagctgtatccgctgccacagttcgtgcagacggtctgcgtggagtgcctgctgaaggcgatgcaggccggcctgccgtgggctgccaagaatggttga

SEQ ID NO: 533885 - DNA, 987 bp, Stenotrophomonas maltophilia
atgcatcatcctcgtcgtaccctcgtcgcatcgctggtgctggccagcgtcctcgccagcgcccacgcagcggccaacgaacacagcctggaaggcgtcaacttcaccggcccgctgatcacccccaaccccgccggcatggcggccgggcactggtacatcgaaccctacctggtgcgcgtggacagcagcgcgtccttcgacgaccgcggcgatcgccggcgcagcgatgaacgcagcggcgcctgggcggtggtggtgcccattgcctacggtttcagtgaacgggtcaccggccaggtcaacctgagcgcctcacgtgccgaatcgggcagtacccacagcagcggtttccgcgccggcgataccaccgcgcggttgcagtacctgctgcaggcgcccagtgccgatggcaccaccccggcggtgtcggtggccctggtacagcgcttcagcaccggcagccacgatcgcatcaccggcaacgcgctggacgcccagggcgacggcgtgcagcgcaccaccgctgcgctgggcgtgcagcaggtggtgtggctgggcaatgatcggccgctgcgctggcgtgcccagctcagtgccgggccggcaccctcgcgcacggccatttccggggccagtgtgtatggcaccgacaacagcttccagggacacatcgcgcgcggctcggtgctgggcctgtcgctcggcgccgagtacagcttcagttcgcgctgggtcggggtgatggaagtggccgccagccgcgaaaccggccagcgcctgagtggcttcgcgcgcggcgccagcggtgccatcgagcgcatcgacgaacatcgcccggccagccgcagcgtgaccgtggcgccggcggtggagtatcacttcagcccctcgctgggcgtgattgccggtgtggagttcaccgtggccgggcgcaacagcggccgtatcgtcagcccccaggtcgccctgggcatgttcttctaa

SEQ ID NO: 533886 - DNA, 3864 bp, Stenotrophomonas maltophilia
atgaccacgcttttccgcattgttctcggagccctgctgttgattgcagcggttggaagtgcctccgccgagggatggatcaggctggacggccctcccaccatgagctaccaggcacccgcagttttcgaattgaaggtgaattggggagtcaccaccacaggtcccaaggcggagtacatcgacgggctgaggctgttgcgcaatggcactgtggtgacaatccaggccggcggtgtatatcgcgaggcaggtctcagtccggggacctattactacgaactgcgtgccgatgcggtgcgcaatcttcctgatggcgatcagactcgccggtcgttggtatcggcggtcggtccgattacggtcaatgcacctccggcacctttcgatggcgctgagttcgtcggttcgacaatccctggtcccctgcagcatcgcacgccttatacgttcaccgcgacggtgcgcaacagcggaaataccacttggccggcaggctatgaatatcagcttggaggggcgcatgacagctacgccagcacgtggtcattctccaatgttcccgtgccgcagccggtcgctccagggcagacggtcactttcaatataaatgtgaccgctcctccacctggcgaatatggattccagttgcagatgatgcggaacggcgtcgggcgcttcggtgcttcgtcaggtctggcgacactctgggtgaatggtccgatcaacaaggcgcattttattgatcagaacgtgccttcgcagatggaagcaggaaagacatacaacgtctccctgcgcatgaacaacgccggaaacaccacgtggagtccggccgcgggctacgcgctgggcgcgctgaacgacagcaccgtatggggcagtcatcgccttgcgttacccggtgatattggtccaggcgccacggcggttatcaatgcccagttgcgtgccccaaccacgccaggcgtgtacaacttccagtggcagatggtgcaagacggggtggagtggttcggtgtccacacctccaacgtggctgtcacagtgaccgcgcctccttcggtggtcaccggcaacatcgatggactttcaagtgatggcacgacattgcgtggctgggcttgcagcacaagccgcaatgatcccatcgacgttcatctgtatgtccgcggtgcggcagggcagggaggagtatttctcgccagtgcccgcgccgatcaggccagtgaacccgccgtagccacggcatgcagggcatccggcacaaattaccgtttcaccattccgctgagctatgcccagcgtcgtgagcaggttgggcaacccctgtatgtccacggtatctcgcctgttggaggagcgaacagcctgatcggttcgtcgggcacgtatcgcgtccagccggcaccggtaggcagcatctctgcgagcccgagcccgtgcacgattccatggggacagtcgacctgttccacgacggtccagtggcttgtctccgaaggcgatgcgcagctttggggggctgttggcaatggagcgggcactcacttggcgtctgggccgagcggcagtgtcgctttgaccaatatcactgccgccggtatgcgcctgtggctgatgagtcggggtgagaacattgcggagacggccgtgtcgacggtggccggtgtccagccaggggaggtgctctcgcggatcacctacagctacgacgagctcggccggatgatcgcacgtgctgaaggtgatggaacaattcaccgtcaacgatttgatggcaacggcaacgttgttgagcggatcaacgggaagggtgaaagcgaggtctacacttacgatgcactcgggcggcgcgcgaactcgaggaacggtgccggagagacgacccgctatcaatacaacgcgctggacagactgactgcaataacggatccaagggaattggtgacccgctacacccgcgacggcttcggcagactgtggaaacaggagagtcccgatacggggacgaccgtattctcctattcattgcccactcgcgttaccagctcaacccgtgcggacggcaagatcacgtcggtttcgtatgacgtgcttggccggattcgttcactttcgaccaatgaggatgaccgtcttcttgactatgacgcttgtcccaatggaattggcaagctgtgcacggtgacaacgaccagcggtacagtgaaggtgggctacgctcaggatggtcaggttgccgtgagggaagaggtgccttcgcttccggcatttgcagccactcgcgttgcaatccgccacgacaatgctggccgggtcgctgaggtgacttatcctgatggcatggttgccacctacggatacagcggcgcgtggttggcgtcgctggacattcgcggcactggatggtcgcgccaggtggtttcaggggcgacctatatggcaaacggtaagttggcttcggcccggctgggcagtggcatccgataccagcagcatttcgatggagccgggcgagtggatcgtcgtacgacttcgttggaagcgaccggcgtcttcctcgcagatctggcgtatggctatgacggcgccgggaatctttcgtcaatcgcggatcaactcgatgctgcaatgagtcaggccatcagctatgacgctgctggcaggctgggaacgctgcagcgcgctgcaacgacccacgcgatgggctatgacggcagtggcaattggcaatcctattccgatggggcatcgctgcggacatcccagttcgatgcttccagcaatcgcctgctgggctacgtgaccaaccgtgctggagatgctgataggcagtacacctatgacggggttggaaatcgccttggcgaatccacttccggggagcagcgtgtattccagtacgatacgttcaatcgcctgcgaagggttgagatcaatggcaccggaacccagtaccagctgaacggtatgggacagcgcagcggtaagttgcgagcggatggcagcaccgtgagctatgtgtacgctggtcagaaccaaatggtggctgagcgcgagggtgcttctggctggagcaactacctctggtttggcggtcagctggtggggctggtccgcgccggccagatgtactccgtgagtaccgatcatctggggcgcccatcacttggaatcaacgacgctggtcaggtggtatggcgcggctataactacgcttacgggcgtacggttatcctggatcaggtgggaggcatcaatctcggtttcccaggccagtacttcgatgtggaaaccgggctttggtataacggattccgggactacgatccgggtgtgggtcggtatctgcagagtgatccaatcggattggcaggtggcgggaatacgtacgcctatgtgggatccaatccggtaaatcgtgttgatccgctggggttggagtggcagtacaatcagcggaccggggagctgagtcgcgatggggcctatgtggctagcggatatgctggacgtggctccggaatcaataatcccgcaatgcagaatgctccaaataccggtccaattccggttgggaactacacgattggtccgatgcgggacaatgtcaccggatctggtaccactttgaggaactccatgcgacttgttccctcgccatcgaacaatatgcaggggcgcgccgggttcttgatccatggcgataaccggagaagaaatcagacggcgtccgaagggtgcatcattcttgacccagaggtgcgaagcttgattgatctcagtggggaccgcgacttgaaggttgaggatcccataccggccattgttccgttcttctcaccttgggatctcagatga

SEQ ID NO: 533887 - DNA, 1848 bp, Stenotrophomonas maltophilia
atggcgctctggggcgttccttcgaatcttttccctaggccaaatcaatgggatgacttcgtcgaacccagtaaaggagagccggaccagtcggggagagacgctgccgacgagtgtcccaaaagtggcaacccggtggttcttcgcactggtgcaaaagtggaaaccgaactggatttcactggcggtggcgagatgccattgacgctcgagcgcaccttcaactcggctgtgatggaccgcttcaacatcttcgacacgtggtacagcaaccttgatcggcagctggtcgtctacacggactcgaacgaggcgcgcatgcgccgccccgatggacgctatctggtgttcaagcgaggaggtgacggtatttaccgggaggatggtgcacagcagggcgggcagttgaagtcagttgcgggtggaaagtggatctacctgagccccgacctgactacggagacctacgaaggcaccaagatggtggagatccgaaacgccaatggcgtgcgctggaccttgagttacggtggtcctgaaggagcgcagctgcagcgtgtcacccatagcaatggccgctatatggagttcacgtggatccagaagaatgcacagactggcgttgatccgcgtgtgatcaaggtgcgggacccgcagggaaacaccattgattacgcctacacccaggacgtgtacgggttcttggagtcggttacctacaacggcactcctgccaccacgatcaagtatcactacctgtacaaggagttggggcagacctacggactaccgttgctcacggggaagtcgatcaatggtcgccgctactcgatgttcacctacgacgagaagaaccgtgcgacttcgacggcgcatacggagggcgtcgagaggtttggtttcgcgtatgagccgggagccaatggagagagcgttactgtggagaccaacccgctgggaaaggtcgcccgctatcgtttcaaggacaggagactggttgccatcgaaggacttccgtcggccaattgtgccgcaggggttagcgagacacattacgacgacaatgggaataaatcgctcacgtccgatttcgaggggaacctgacccgctaccaatatgatgcccatgggcatcttcttcgtcgcgaggaggcgagtggaacccccgtggcgcgagtagcgacctaccagtgggacgagcagaacaatcggatctcctccgagactctgcagggcgtgctggagaccagctacgcgtatgacggcaataatcgattgacctccaggtctgagaaaaacctggtacccggcaatgcacagggggaggttcagacaactaccttcagctatcagctgcatcccaatggcctggtaagcaggatggtcgaggatgggccgggtcctggggcaggtgatgcggtgatatcgacctattcgagcatgggcgatctggtacggatcgagaacagccttgggcacgccgttgtcatgggcgactacacgggctacggatatcccgggtattcgattgacgagaatggcgtgcgtacgaattttacgtatgactcacgaggacgacctgccgaggtgcggcttgaactggccgctggaacgcggactacccggtatgagtacgatgcctttggcaagcttgcctcagtaactggcccggatggtgtccgcatttccaatctctacgacgtggccgggcgcctgctctccacgtcaatgccggagcctggtgggagttttgccgagacccgatacacgtataacgcgctgtcacttcctgtcagcgagactatacagcgcgtgttcgccgatccgggtcgagggactcagccatga

SEQ ID NO: 533888 - DNA, 4431 bp, Stenotrophomonas maltophilia
atgaacaagatctaccgtcgcatctggtgcactgcgcgacagtgctgggttgtcggcagtgagttggccacggcacgcggcaagagctccacctcatcccgcgcgatcgttctaccggtcattgcatcgaccctgatcgcattctcggctgcagccgagagtatgcccgccgaagaccatgacagcaccgagcaggcggcctacgtatccccgaccggattcgaaaggttcagtgcaatgccatttgggttcggagtaggaaggcgtgacgccgtgggaatcgcggctgcgccgatctacgcgcaagtggcgctgacatcagactactcctacaggaattccaccatcaatggggacctgttgttgatgctggggtctcgctcctccatgaccgggaatcgatcagttgcatacggcagcgtcattaccgccaatggtgacagcaatacggctattggctacggtgtacagatcacgcgaggcggctatgcaaccgccgtcggggggcatactgttgccagtggtgttggggccactgtggtcggcaatgacgcaagagcctattcggagaattccatcgccattggcagtggctcccgaacggtggagagctactcgggggtctcgcggatagcgatcggtgggaatgcctttgcaggtactgccggatactcgggtgcggtggccctcggcgggagcgctcgcgctgagtacaacggcgttgccattggccatcacgccaaggcgttggcagtcgggagtgttgcactggggctgaattcggaggcaaccgaatccaactcggtttctgtcggtagcagcagcacgaagcgccgggtcgtcaacgtggcagacgcccgtctgtcgaccacgagtaccgatgcagtaaccggcaagcagctccatgccaccaaccagaacgtcagtaccgcgaccaatacggccaatgccgcgaagaccgctgccgaccaggcactggtcaacacgcgactggtcacccagacctcggtcagcagtgccgtgcgcgtgggcggtgacaacaccggcagccaactggacatccgcaacaaatctgacgccaaccgaaagctgaccggcgtggccgatgccaccctcggtaccaccagcaccgaagcggtaaccggcaagcagctgcatgcgaccaatgcttccgtggctgcagcaaatgcgaccgccgttaccgccaagatcaccgccgagggcgtgggcatgagcatcagtgcggcgtcgttggcgctgggtgagagcgcatcagtcgcaggcctgaattcaacagccgtgggaagcagaagcgttgcaagtgcagatcatgcaacggcggtgggtaacgagtcggttgccagtggtcgtgtatccaccgctgttggctacaaatctgaggccagtgctgagtacgccttggcacttggtgatcgcgcaaaggcctcccatacgagttccgttgcgattggaaagggcgctgaaacatctgcagagaatcaggtctctgttggcaattccagtaccaagcgcaaggttgtgaatgtagccaacgccacgctcagtgcctccagcaccgatgccgtgactggtcaacagctgtatgccaccaacacggcggtgaccaccgcgcagtccacggcaacgacggcgaagacggcggccgatggtgctgtcagtcaggtgggtgccgtggcgggtctggttgggcaggtgtcggccagcgggcaggttcgcctgggtgccgagaacaccggcaccgtactggacgtgtccaacaagaacggcgcgcgccgccgcatccagaacatcgccaacggcatcctgggcgcatcgagcaccgatgcggtgaccggtcagcagctgtttgccaccaacgagcgcgtaggctcggcagaggcgcggaacgaggcccaggatctgcagttggtggatcacgctgatcgtctggctgatcatcgcgcggatctggaccgcctgcgcgccgactttgatggcttcgatccggatctggaaggcgtggtgaagttcaatgctgaccggaccctggttgacctcgaaggtgcagtggtgaagggtgttggtccgggagatatcagctcggctgccagtacggatgcggtgaacggtgggcagttgtttgccaccaatgcccggatcgagcagatggagcaggggagtcgtttccttcaggttggctacgacgagttcagcgaggatgcgtctgccgggtggctgggtgtctccatcggtgattccgcagagtcgtcaccgactggtgaaggtggcactgccttggggagcttctcgaaggcctttgggacaaactcagtggcattggggcgcgccgcgtttgtcgaggcggcggctatggaaggctttgccttgggtgcaagttcacatgtccaaaccagtggtggcgtcgcacttggcgctcgatctgtcgtccatgaggatgcgaccaatagcatcgcgctcggatactcttcgtatgcagacgaggcggacagcgtttccattggtcgtgcgggctacgagcggcgtatcgtcaatgttgcacgtggcttggggagtaatgatgccgtaagcgtggtgcagttgagggagtccatcaccggccttggcggaggcgcgggactcgattccaacggcaacatcatcgcgcccacctacgcgattcagggaggcaaccacaacaccgtcggcgatgcgttgactgcgctggatggtgcggtggttgtgacagacgcacgcgtcggctcgctggaaggcaagctgcgctcggcattccaggaccccgggatccgcgctgatggtttgaaccaactcacgctgtccggcgcacagggtgcggtgctgaccaacctggctgatggccgaatcgccgccggcagtcgcgatgcggtgacgggtagccagttgcacgacgccaagcaggagatcgcccgcaatcgcagcgatctggatgcgctgcgcgactctcaggtaacgggcaacgatcttgcaagcttgtctgcggctgagacggggagcgtaattgactacggcggcgcgacactgactggtgtggcggatggcgagctgtccgcagagagcaaggatgttgtgaatggccggcagttgtacgccaccaaccagcgcatggagggtcttgagcagggaagccgcttcgtgaaggtcggctacgacgatctgagcgttgatgcatcggcgggctggctgggtgtggctatcggcgattccgccgaatcttcgccgactggcgaaggtggcactgctgtggggagtttctccaaggcgtttggaacgaattcagtggcattggggcgtgcggcctatgtcactgcgacggcgatggatggctttgctttgggtgctagttcgcatgttcgggctaacggaggcatcgcacttggtggcaggtctgtggtggaagcgggggcggagggagccattgcgttgggtcacgcttccattgcggatgaggccaatactgtgtccgtagggaccaagggacggcagcgtcgcatcgtgaacgtcgccaacggccgcaacgcccaggacgccacgaccgtcgcccagctcaacgccaccctcgccactctcggcggcggcgcccacatcgacagcaacggcaacatcatcggcccgcacttcaccgtccagggccagcagcggtccaccctcaacgatgcactgcagtcgcttgatggcgctgtcaccacccagggctcgcgcgtggacaaggtggaagcccagctccgctcggtcttccaggaaaccaccatccgcagcgacggtctgaaccagctcaccctggccggtgcacagggcatggtcatttccaacgtggccaacggtctggtggctgccggtagccgcgatgcagtcaacggcggccagctgcacgacgtacagcaacagctcaacgggcgcatggatggcctggaacagcgcatcgaaggtcagccgcaggcacgcgttgccagtacgccggaagccccgcagccgccagccgagacgccgaccgtggccgacaccggcaaggcccccaacgccaccccggaaacgccgaaggagccgaccccgcaggttgataccgccgatctggaaaagatgctggcccgcgccaacgagtacagcgacggcatctcccgcgaggtggatgcgcgcctggacaagatggacaagcgcttcaaccgcatggcggcgatgagcagcgcgcagagcgcaatggccatgaacactgccggcctgaacacctacaaccgcctgggcgcaggcgtgggttacagcgatggcgaatcggccatggcggtgggctaccagcgcgtgctcaacgaaaagggctcggccaccttcagcctcaatggcgcgttcaccaacagtggcgaacgcaccgtgggcctgggtgtgggcatcggctggtaa

SEQ ID NO: 533889 - DNA, 1134 bp, Stenotrophomonas maltophilia
atgagccggcggctgtggtggtggctggtgttgttctgcgcgctggtgttgatggtgccgcgtgcgatggcgcaacggccgccggaaacccacccgactgatgagcatcgggacatcgtgatgacgtgggaccggtctgcgatgccgggggacattgtgttgatgccgccgcgcacgctgctggcgtatgaccatgttgatctggggaaacgctacggcgaactgcacctgacgtgtgtttcggatagcagcgcggagagggggcggtgcccggtggaagggatcgaggatggcgtcgtcgggttgcgtgaaatcccactggagttcgttgagcaacggtccggaatgagagtcgaactcagcatcagcggtgggctggagagagggctcagcagtcgcgcctgtatgggtgatttctggcaaccaggaatcattgcgccgtggtcgacctatgccccagtctgtggaattgatgccgcagtcggcacagcggggcagctgaaactgtcagcggttgaactcgacaagctggtcgctggcatctgggccggaacgctcgaactccgcgcgaacacccccgacacccgcaatctcgccacgtacacctatcgcttcacgctcaccatcaccgactacgacgcggtctccatctacctgcctgaattccaggaagccgcccccaccgtaggcctcaacctcagctacgaccccatcgcccgaacggtcggtggtcgcgcgcgcctggacatgtgcctgtacgacggcctcggttcgcagagcgagtacctgggggtcaccgtgcgcgacagcggcacgcgccctcccggtcccaccggctattcggtctggcacaccgacggtgccagcggtgacagccaacgcatggactacaccgtcaccctcgatcacaacggcgcgcgcattccattgcgcaacggagtggaagagcagctgcgcaacatcgataccgcgcgcctgcgcctggtgatgttgccgggcatgacccagccggtgttctgcgtgcccacgccgctcaccctcgataccccgcgcgtccctatcgatgagaagcgctcgggtgcctaccagggtgatctgaaggtcgaactgcgcctgcccacttcccgtccttga

SEQ ID NO: 533890 - DNA, 429 bp, Stenotrophomonas maltophilia
atggcaaggccgtttgttgttgagcgcatcgaccacgtggtgttccgggttcgcgacctggcgcgcagcgtggtgttctacggacaggtgctgggctgtgaggtggtgcggcggcgcgatcacctgggtctggtgcatctgcgtgcgggggcatcgatggtcgacctggtgagcctggacggcccgctgggcctgcgcggcgggcgcgggcccgaggcagaggggcgcaacaccgatcacctgtgcctgcgcatcacccccttcgacgagcctgccctggtcgcgcacctgcaggaacttggggtgcaggtggccgggccggccgacgtcaatttcggcgccgaaggtgatgggctgtcgctttacttcaccgacccggatggcaacaccatcgaactgaaaggccccgccgacggagccacggcatga

SEQ ID NO: 533891 - DNA, 381 bp, Stenotrophomonas maltophilia
atgagcagggatgccccgggtgcggtgatcggcaggcatggcctcgatgctgtgcggcgctggctggcctcgcccctcgcgcagcgcgtgaccgccctgctcggcgccgggctgctgatcgtgctggcctgcaatccggatctgctgccattgctgccgctggtcgatgcgctggggctggatgtgctggctttgctgctgggcgcgcaactgctgggcaccctgccctggctgcggatccgcgcggcccgatgggcggacatggcaggtcggctggcgtgcggtgcggttgcgggagcggccggcggctacctgcgggcgctgggatgcttccatcgtgaacaactggcgtggaagccggcttcgcatcggccggggtga

SEQ ID NO: 533892 - DNA, 369 bp, Stenotrophomonas maltophilia
gtgtccagaagcacagaaaccagaatcgtgatcaatccccttgaagcgctggaatcccgcctggcggacggcgccggtgtcttcgtgaaccccggtgttgaccctgcggactatttcaacgaaattgcagaggatattcggcgcaatcaatgcctgccgttcctggtctctgcggtcgtcatggcgccaggtattcccggttttgagccgggagagaaagtagccggcgtgtgcgttgccagggccaaggggcgctggttggtatatcgggaacaagacgacctgtttctcgctttctggggaggcagcgccgaagacctcggcgcgcacggaatctttggcagcccgttgtactgctggtcggcctga

SEQ ID NO: 533893 - DNA, 222 bp, Stenotrophomonas maltophilia
atgccaaagcatcacttgagcttggtacgatggctgtttgagaatggcgatgttgatcggctcgatctattgagcctgctggcgttgctttcacttgggccgctggatcaagccggattggagatcgccttgctctccagggaagcactggacgaagggcggctggaggaaggcctgaatttgatagagccaatgctgctggcctatagcccctcgctgtga

SEQ ID NO: 533894 - DNA, 1392 bp, Stenotrophomonas maltophilia
atgcctgcttcgatccgcgatgaccgttcgtttccggcggtgcagcttcccgcgcaggccggtagcagcccgaccgaagtgaccctcatcgcgcagctcggcatcggtgcaggtgacatgcttgtggccgacgccagccaacgccagcgtcaccacccggccttcatcgacgcgctggacgagccttcggcccggctgggcggcatgcatctgcaacacggcgatgcctcttcgctgtacagcttcgcggtgggagcgggtggccacccgttccatcgccatgcgggaccacggatgttcacggccatcgccggcagctcgggcgccgagctgcgcttcgccgtcgcctcggacgcccagctggcaggcgatcccggcgccttcgcacgttcactgcggcgtatccgcataccgccggactgcctgttcaccgtgcgcttcggcggcggcacctggcaccagttcacctccaaccatccggcccatcccgcgctgttcgcattgtcgtgccacagcaacgaactggccggggcgatgaccgaacagacgcacgcgctgataagccgcaatgccgccgacattcccagcctgaccgatgtactgccggacgcgtatgtgccgacgcctgaagccttggcagcggcgcctctgctgcggctgtcgctgcaggcgccggcgccgagcctgtgcgcccgcctgtgcacgcaggcccgcgccctgctcggcccgctacggcggatttcgctgcgaccgctgcggggcttcgtcgaacgcgcgacgccgggctacccgatccagtctggggtcgccgccagcgaaggcctgctggctgccgcactgccacacagccactaccaggacctgaccacgctgcgtctggaccacacgcaggtctcacatcgttccacatctgcgctgctggctgatgtcctggaaggatttctgcgcaatccgcctgccggcgtgggccacctgatggcgcttcgcaaccgtctggtcgcgccgcttcggttgcggacgtcgccgctggggtgcccagtatcatcgctgctgtcggccgatcgcagccggttgttcgccagccgctatccggtgctggattcgcacatcgacgcagaagacaactacgccgaagtgctgctcggtgctgatgatcggcacctgcgtttccgcagccgcgtacgggttcaacggtgtgccgaaggccacatcgaaatcagcctgggcacgcgcgtgcagacccacaatgccttcggtcgcctctacatggcgctgatcgacggcacgcaccggcactacgtggcccctgcaatgctgcgccgtgcggtggagcatgcgctggcaccggaactggccgatctcgatgagtttgcaaccggcccggtgcgttga

SEQ ID NO: 533895 - DNA, 534 bp, Stenotrophomonas maltophilia
atgtgcaccttcatcaccctgttcctgccgacgtcgtttccgcacgatgaggccgccgcgatcatgcagcgcagcggccgacgtctgttcgcccaggcatcgtccagcctgcaggcggcggccggaccccgatggcaaccgtggctgagtgccacgcactgcgattgcgggacggcgctggcatcggcaggtgcggccccggaatggaagggcgatgccgaacgctggcggaagaagggctggagtgaggccaagatcgcccgcgcgcaggccgagcagacggcgcggcacgcgcaggaactacaggtgcgtcgcgatgaagcgctgggcgatgccgaccagtggctgcagcgcatcgacgcgctgctgcggtccggcgccacgcgcattggcctgctggtgcgtgactacgacggcgcggtgggggcgcggcaggccaaaccgccggaacgttgttggtcgtggacgcagatgacggcggcggatctgctggcgttcgagccgggcacgttgcattggatcgaacgcgggtag

SEQ ID NO: 533896 - DNA, 879 bp, Stenotrophomonas maltophilia
atggccgccttccgttacctgcagctggatgtcttcgcctcccaccccggcagcggcaatccgctgggcgtggtgctgggcgctgacgcgctgtccagcgcccgcatgcaggcgctcgctgcctggctgaacctgtccgagacagtgttcttcctgcaccccagcgccccgggcgccgactatcacatccgcatcttcacccccggcagcgagctgccgtttgccggccaccccagcgtgggtgcggcctgggcagcggtcacctgcggcctggccaccccgcgcgcggacggcgcgctggtccagcagtgcgccgccggcctgttgccggtacgtgtgaggggtaacgccgatgcgccgaccatcgaactggccagcccaccggcgcgccagctgccgaccgcgcccggcgcggtgccggaaccgctgttggccctggtcgccgccggccatcggccggaactgtgggacaacggcccgcgctggtggctgctgccgctgcgcgatgccgccgccgtacgcggcctggccccggacatggcagcgctgcgtgactggaccaatgctaccggcgcgaccggcgttgccgtgttcgccgatgaagccgccgccgaccacagccgcgtggtacgcgcattctgcccgggcgacgcggtgaacgtacctgaggacccggtgaccggcagcgccaatgcgctgatcggcgcctggctgcggcagcgccatgcgctgcccggccacgagggccgctacgtggccagccagggccgcgaggtcggccgcgatggccgcgtgcaggtgcagattgatgcgcagggcacggtgtggatcggcggccaggtgcagccggtcatcgacggccacatccgctggctgtag

SEQ ID NO: 533897 - DNA, 150 bp, Stenotrophomonas maltophilia
atgcccgctctgctgcaccgtcacccacaggatgtggccacggtgtcccgtctccgcgtcgctgtccgcgccgcattccctgaattcccggtccatgtcctgcacgcgcacatcttcgtgcgctgcggcgtggccgttgtcgtctgctga

SEQ ID NO: 533898 - DNA, 711 bp, Stenotrophomonas maltophilia
atgatgaccaaagatgatctgttgcaggagttcggcgaagtccatgacgcccacggctgttgcttcgcggagtatgccgtcgccacgtacagcatctactgctgcctgcgccttgccaccgaccagacgattgccgtcgtttcccgcaacatcaacgatccggccttcgccgccgacgttgcgctgcgggcgcccgccggcctgccccatgaccggccaacggtcttcgagattccgcccaacgcccacggtttcacccatgcgatggcggtgcccagcacgtatcacgggttcctgaaccagatcgagaagcgcgccggcctgttcctgtgcgtgccgatctaccggtgtgagttcagtggcgacgaatcagccgatgaattccgccaggctgcggcacgcctcgttcctgtttacgaatgggaccgggccatgcagcccaggatcagcctctacttcgacaatccccggaccggtggcggcaccgatgacgtcggcgcgaccgtgcccttgcgcgtgttgctggcggaactcgacaacctcaacggagtgagcgatggcttcatcgagatcaccaactaccgcggcgaagtgatcgaggtgttgtcgccgcaggaaggccgctatgtgctgatccgcaaccggcaggatgaaacgctgatggatcgcgcaagcgtgatctcggcagtggagacattcaccaccgcgtga

SEQ ID NO: 533899 - DNA, 972 bp, Stenotrophomonas maltophilia
atgcgcccgctgaccctgctccccgcactgctgttgttggccgcgctgcctgccactgccgccaccgatgcactgcgctgcggcgagtaccgcagcaccgatggcggcgtggccctggtgttcgaatcatccaccaccggttatcaggcgctgcacggccaggaacgcactccgctgcgcatcgatcgcagcgccggcgatctgcgcctggtgtttctcgacgacggcgtatccaccgccatccacgtggctgctgacgggacgcatatcgacgacggtgtggccgactacacgttgcatcgagcccaggcctgccaacgcgcccctgcaccccgcgccgacggctgcctggcccaccctgcgctgtgcattgcgcggctcgctgaggcgcctccggaacaggcccagcgcgcgtgcgaggaaggcgttggcgccggctgctcagcgctgctgcgccactttctcgctgcacccaccaccggggccgggcagcaggacgcgcccttgccggccgcgcagcgcgccaccctgcagcggctctgcctgcaacagcgcggtggccgcttctgcaccggggtggccgaacagcagttgatcgcacgggaaccggcgctggcggtgcaggccctgcaggtggtctgcgacgcaggccgcgtcagtgcctgcgagcgcatcgcaccgctgcgcgatctcggcgcggacctgcgcctcgtcccggcccagcgggtgccgtgcggccgctatcaggccgacggtggcgtgatcaacaggctcgacttcggtgatggcgcgcgtggccgtctgcaagacggcgacatccacatgcagcagaacggcgaaacccttgtgctgcgtcagctcggcaatggcgacctgcttggtatggatgcgcagacgggatatcagcgttaccagcccgtgcccggcacggcacaatgctcgcccccgcgcgagggccatggctcgccgtag

SEQ ID NO: 533900 - DNA, 789 bp, Stenotrophomonas maltophilia
atggggtgcaccgtgttggtcctcaccattcttcttctgctgatctgcgggaccttggtcgccacccggcgtctgcgtagcgcggcgctgctgtccctgcttcctttggccatgctgaccagcgcaacggcgcctgcgacgcagtggatgctggaccgcgcccacatgcctgcttcacccgagccgagcgatgacctacaggacaccgtgatcgtgctgctggccggtggcgtcgataatgacgagcacggtgtgcggccgggcctggcggggtacagccgcctgctgacaacggcacagcaatctcttctctgccagcaacagcggcgaacctgcaccgtgatcgtcagcggcggggcgccacgtgcgggacaatccagcgaagcgggcgtctacgcgcgtgaactggccgcactgggcgtgccgatggatcacatcctgctggagggggcgagcgcgaacacctggcagaacgcccgcaataccagtgcaatcctgcgcgcaggggtgtcccgcgtggtgctggtgacctcaggcctccacctcaaacgcagcctgctctacttccggcatttcggcgtgatcgcagaaggtgtttccagcgatcagctccgcgccgcacctggttggcttccgtcggcattgaatcttctactggtggaggtgatgctgcatgagcgcatcggcgtgctccgctaccatgtctacaacacgctgggttggaacgagccgcccattcccccggccggtctcacgccgggcacaaccacccacgcatcgccgcgctga

SEQ ID NO: 533901 - DNA, 375 bp, Stenotrophomonas maltophilia
atgcgcgtaatcaaacgaactgcgccatccacggagaggcctgtgctcggcgagggttccgtgctccggatgatggcatcgacctcacattccgagctgccacgcttcgtggcagcggtgaacctcgctatttcccagtgggccctggcggctgcggacgagccgtgctgcgatctggattcagagctggcacgcctgcatgccctgaagagcatcacctcggtcctgggcagcggcatggtggccagcgcgtgcgacgacctcagtggttaccttcaatcaggcatgccaatcgaggtggtgcggaagcggtcatgcgccgtcgctgcggcggcccaacgtcttctgcagcgctccttcgtcccataccggtga

SEQ ID NO: 533902 - DNA, 1737 bp, Stenotrophomonas maltophilia
atgggagccgatacgactcatgcaatcccctcaggtcccaccgcccttcttcaggccgcgcacactctggagatggatcggctggcagtgttgctgtcctgtctacaggagccgcgtgccagtctgttcagggtcctgctgcaggcgttgacggtactctggtgctggatctggattgagggaccgcaaccagtgctggccaacgaggctgcgcgggtgctgcccctgtccgtcgcgcttctgtgcgtgtcagcggcatgggcgttctgggtcaatcatttccagcatcggggtgcagcgtggcgcgatgcggcaggcctactgctcagtctggccatggtgacgatgcaggtcgatgcggcgttcatcctcctgatgaccctcaacgcaacgctgcccttcctggtgatcgcggcgactgcggtgtatgggcgaggcgcgatcgtgccggcgatcgcagcttcggcgctggggttgctgtgggccgcgccggcgggctactggtattcgcgcccggcctacctggcgtacgccctggcgctgactgtcctgttgcccgccgtggtggccactctggtcgctgccatgcgcgatatcgcactgcgtgccatcgcctctcgccaggcccaggggcggtttgtgggaacgatgagccacgagctgcgaactcccttgaacgccatcatcaacggcatccagttgcttgaagtggatacggccacgctggcccagcgaagttcactggcagtggtggcccggcaggcgcgggcgctgcggcaccgcatcgatgatgtgctggacgtcgccagcatggacggtggaaagctgcggttgcggcgcgagccttgttcgttggcatccattgtcgaagcgatgcgggcgagctgcgcacctgctgcagaagagcggggagtgctgttgaacatagggcgttgcgatcctgccgtatggatgttggccgacgcaggacgggtcgaacaggtgctgaccaatctcgtctgcaacggcatcaagttcagcccgatggctggcgaaacacgcgtgtctgttgaggccaagagcagtgctggagcgtggcgggtacgggtggtggtcgccgattccggttgcggcgtcgacgagggtgatcgacaggcgatcttctcgcccttcgtacaggtgagcgagggcgatgcccgctgcgagcagtgcgtgggcctggggctctacatcgtgcgactgatttccgatgccatgggcgctacgatcgaggtgggctgcagcgagtggggaggcgccgcgtttgaatggagtttcagcgcgcctgctgtcgccgcaggcgatgattcaccctcgcttgtggaactgttcgcggcgcacgccgcctcggtgcggccgctgcattgcctgctgttcgaagatgtagacaccaaccgtcaggtggtcgagcgcctgatggcgtgtgcaggtcaccgactcagctgtcggcgcgatggacgtgaggcgaaggaggtaatggcggcgctggctcccgatgtggtgttacttgacctgcacatgcccgggtgcagtggctgggaagtgctcgaggacgcaacacgcacggcaggcgcaccgcccattctggtgatgagtgccgacactcgcccgcaggtgatcgaaagggcgcgttccctgggggcggctggtttcctgtgcaagccgttggacgtgcaggaggtgttggaccacctgcacagggtttcgtcccctgcctga

SEQ ID NO: 533903 - DNA, 891 bp, Stenotrophomonas maltophilia
gtgagcgtcgcgctgcaggcgggcgtgctgccggcgcgggtgctgatcctcggcctgggctggagtggccgcgtgctggccgcgcaactgcaggcacgcggcgtgcaggtggcggggacggtgcgcgatccggcagcggcgcccgatgatggcctgcgtcggcaccggttgcaggccggcgcctcgccttcacctgccctgctcgatgagatcgcgcacgccgatgccgtgctgtgcagcgtgccgcccgatgccgagggcgatcctgccttgcgcgtgctgctgcccgcgctgcaggccagcccggccctgcgttggatcggctatctgtcatcgacctcggtgtatgccgaccgcgccggcggttggatcgacgaaaccagcgtggccgacgccagcgtggccgccggcgtgcaacgcaggctggcggaagcccagtggcgagcgctggccggacaacgcggcctcgcctcggcggtgttgcgcctgcccgggctgtacgggccgggtcgcaatgcgctggtgcagttggcgcaggggcgtgcacgccacgtggtgaggcccgggctggtgttcaaccgcctgcatgtgcaggatcttgccgcggtgatcatcgccgcgatgcagcgaccggcgcagcaggcgctgtacctgcccagtgatgacgaaccggcgccgccgcaggaggtgctggccttcgccgcgcaattgggtggctttgcgatgccgcctgcgatggcgtgggacgacccggggctgagcccggccctgcggcgcttctacgaaagcagcaagcgcatcgacagccgtggcacacgtgcggcgctggggtgggaaccgcgcttccggagttaccgtgaaggcctgcgcgacctgctggaatcgctttga

SEQ ID NO: 533904 - DNA, 849 bp, Stenotrophomonas maltophilia
atggacctggactcacctcacgccgcccccatcgacatggggcaccgcaccttcctcgcgcagacgcatggcatcgtcgatcaggcgtgggtcgctgccgcgcagttcgccgatcttccggtcgaaccgttgaacccaccgttgctgggcaggcgcctgcacctaccgccgcttcttgtgccactgcacgcactctcatggcaagcgcggcttgaactgcttgagcgcgccgatgcccacctgcgcgatcgcggtcggccgctgttctgcaccctgcttgcgagtgacgcacccgatagggtgcgaaaccacctgatgagccggatggcgcccttgcgcccgcgaaccggcagggtgctgttccgcgtacacgacgcacgggtattccgtcatctccgctggatgctggcaccctcccagatggcacagttgatggggccgatttcggcctggacctggcatgagcccttgggcaatacgtggcgcacccagcagcgcccgcccaccgagggtccgcccggtccgttgatccatcctgaccaatgggacgacctggctcaggtcgcctgcatcaacggttgcctgagagacctcgccgaggccggtgccggccacgccagctccctgctgcccgccttgcggcaggcgattggcgaagccaggagcgtggggctgcaggatctggacgatctgcagatgtacgcgtgccagcgtctgcgcgatggcgggggggcggcccagcaagtggcactgaaccagcggctcaagcgtgtccagcagcagggaatgtcctatcgcatggcctgccagctggagcgacagcacggtctgcagacggaggcggcatga

SEQ ID NO: 533905 - DNA, 2706 bp, Stenotrophomonas maltophilia
atgactgggcccgagacccaccccgactattgcccgaactgcatcacatcggggttgccgctgctgcttacgcgctacgcagtggcgcgggcagacgacgaggtgcgcgaagcagcgcccgtgctgcaggcaccgttcgacggcatcagcaacgcacagcctctgccagcggatgcagcgcactacacgcttcgcctgctgcggggtggctatgtctacagctaccatcaggcgcgtgacgagtggaaagcatggcagttgaacgaatacggagacctgagtgcgttcgacatccgtgatctgaccccgccgccccagaacgacacgcagccggcgaggtgctcgcgccacggcgaaacgttgctgtccaagtgcatcatcgtgcccgacgcctcccaggcaaccctgctgtggctggcctacagcagcgcaccgtggacgcgcagagtgtggcaaagacacaaggacgaggcctatcggcagcagcgtatgcggtgcgttgatatcgccgcgtggcgcaaaggagcttccgcgcaagcgcacatggccggtcttcagcatgccctgagccaagtggccgagctccacctggccaagccatccacgacattgacagtctcacgcgatgacaggggtgtgcagggcattccggcgatcaatgcggttcccggtgtgcatgcattcgagttcagcctggatcaatgggcaaactactccattgcgcaagtcgacctgttgattgcacaggcaaacatcgctgccggtcatccgcaggtatcgccgcctgcgctggtggcgctggacgacccgatcggcatcatttccgatctcaaccagctcgccaccgaacgcattctggaatgggaggccgagcccgagcgccaggagaggctgcagtcggcttcctccatttcgatgatcgagggtgctgttcgtcaaggcgcattcgaagatgtcgcgtaccgccgtagagacgccgccctgttcggccgtggcgtggtcagcatcctgggcgggagaaccaacgcggaacagctggccagacccttgcaggcatggaatcacgacatatttgcagtcgaggatgaggaggaggtgctggtcaaggccgagaagtcctggcgcaagtacagccgccacctgcgccagcgcgatgcacatacgcactggctggagcaggtgtacgcccccgcgcaggcgcggttctatgaagacgccgtggccgatctggacagggcatgcattgcatggtggaaggcgccggccttcatgcagcacatgcagagcaactacgacagcagggacagcaccagcggggtgctctaccaggaagtggtgaccaacctgctgcgtgactcaagctcgcgcggcctgatcatgggctacctgctcgagcggatgcagcgggatgacgtgcaggacccgggagccatccttctgcgagcgcagatgtggaaccaggatgcgttgctgaagacatggaaggacaccatggagaacgccagtgtcgcaccgggcacgcgggactggctgacagcggccaacggcctgtcaaacgcgctcaaggcgctgctggatgcagaatcggccggtaagctgggcgcgatgttccagggtacggccaagctggtggagcagctttccgcacccctgacacagatgatcggccgaggaatgggacgggtattcgagggcggcgccatgctgctgcccacccggatgcaggtggggatgctgaccgcactcgcacagtcggcatcacccggcagcgagctggtggatctgagtgggcacacgacgcccaagcgcgcccgcaatgccctggcgatggtggtcagcgagcgtgccgggttgaacgcggccagtcaggcgcgcgccgtggctgcccatgccgttgccgcagccgacgcggatatgcagggcaagcgcttcagaattggcctcgttgccttggtggacagcgatcagttgcgactgttcaaggcgctcaatgccaaggcggtgatcaccggcacgtcgcgtcatgctgaactggcgcgaacgctgacaaccgtggatatgtacgacgccatgcgcggcagcttcgccaagcttggcaacacctccttcgcctatggcacggccagcctggtatttgcctccgccagcctttccgaactgagcaggcagtacagcaaggcactgcctcgtgaacgctcacttctgggcgccaactttgctgccggcgtgggtgcactggtgggcgactcggcgatgctgctgggcgagatcggatcgaagttgccgtggttctcgcagaagcttgccgagccattggggcgttggacgtcctatgcgcagacgcgcgcggcggtcgtctactctgccgggcgttggctgagcggaattgctggcatggtgctgggtgggctgacggtctacgaaggcgcaagggacgtcagaatggcacctgcgtatgggacaggcatgattctcggagggtcaatggccatcgcttcaagtatccttctactggcaggagctgcgcttccagttgcgattattcttctcctcattgcgtcggtcattacagtggtcgtcggttggatgaagcccgacgaggtccagcgatggatggacagggcgctgcatttcgggatcaatcgggcaggttcatttgtagacatcgatgagcagtgcagtgagctagcaaggttgagaatctag

SEQ ID NO: 533906 - DNA, 882 bp, Stenotrophomonas maltophilia
atgaactcgacgttcgttgagttcattgaaaggacgttcaagcttaaaggaatggccgtcaccgctatgtgctcggtattcattctctttgagatgattatcatggccttctctcttcatagcctttacagccatccagctatatctctggaagagaaggtggctctcagtattgctatgaccgctgtgcttggcgggctgggtgccatgatgtggatgttgctgctccgcaacgacctcttccagtacacccactacccggttcgcttcaatcgcattacccgcaagatctacttcttcaggcacaacgggccagacggtgtgactgtcgttccctggggttctccctgcgccttcttccacatcggccgtggcgcgcagaatcctgagctacgtgaccttaggtgccatctgctcgatcgcaatcggcagatacaacagaccttcaccgtcggacacttctggcatcacgacgatcacattctcgagcaatgggcattgatctgccgctacatgcaggagggcccggaatgctgctatgacgacccgttggaccgggtcatcacgctctcgccggatccaacgatccgcaactgctggctgatggtcatcctgatgatgggcaccgcgctgatgccgttgcgtaccaatctgatgttcccgatctacggcgcgctgacgctctgccggtggctgaccttcaagacctgccgcaggccggtgttcccgccggagatcgaggcggcgtgccagatcgatccggaagatccttatcgacttccagagccgcggttcatggcggagttcgcgagtgacccggcgatctatgcgcgcgcgttggaacgccacaaggaacggatgatgtggcgtccggagaactag

SEQ ID NO: 533907 - DNA, 5256 bp, Stenotrophomonas maltophilia
atgaagaatgatcagcgtcatctgcttcagtggatcgtattgattgcagcgcttggaagtgggccgatctgggccgctgagccgtatcaggaatacaacaagcgaatagaagcggcacagtcgttgacggcgcttaaagatggtctgatgggggatagcatcagtctctacaacggggtgacggaattttccgtaaccgacgtcgagcttgcgggatctggtctcccgatccgtctgacccgacgtctcacgattgacgtacagccctatgggcctggcgagccgttgacgacaccgaaattgacgggacttggcaactgggacgtcgacgttccctacatatccggcaccttcgacgcagccaatctctggcgaggactcaactccagcggcggaattacggatcagcgctgctccgtcatcgcagcgccggcaatttcgttcagcggccccatgagcatattcgatatatggcagggcaatacggtccacctgccgggaggcggcgatcgcgccatgcttctcgcagaggccggcgtaccacagcctgccgatggtgtctcacgccgatggaccagcagggagcgcgatgcgttcaactgcattccgatgctgggtggcatgagtggcgagggcttttccatgttgaccacggagggcatcagatacgatttcaatcttgcggtgacccggtttgccggcaccatgcggcaatcccgaggcccgatgcatcctccggtatcgctgactcggacaaaggtctatctccttgccacgaaggtgacggatcgattcgggaatcggttggactacagctacaacggccaggggagtccgacgtcgatcatcgccaccgacgctaccggtgagattcgtcgcgtggacatggcgtatgcgggcgaccgccttgcttccgcgacggccaacggccgtacctggaattatgaatacgatggtgcgggtcttctgtccggtgtaacccttcctgacggaagccgctggcagtacgcatacgcaggtaatctgaggccgagcttcgactactgggacggcgagacgggcatcaactgcgccagtggtcccggcacattgcccgcgaactatcaggtgacatcggtccacccttcgggtgctacggcggtgttctccttcgagaacatgcggcattaccgctcaggggtgcagagaagcgagtgcgtcgcaaatgtcagcgggtcggaccgttactacgttctgcgcacgcccaacagattcgacgtgatgtcgctgactgagaaacagatcagtggtcccggcctgtccgctcccctgaagtggacctacaactacacgcggaccaatcagcctttggtgggtcagggccagcccgtgccgtatccctgcacgacatgtcccaaggtgaaggacacgacggtgatggagcctgatggctccaggaccgttcatcgatatggcttcctgtaccaccacaatgatggccagctggtgggcacggatgtctacaacgcggcgggcacgctgatctcatcgcgtaccaccgagacaatgagcgatgctcaggctgccggccaaccgttcagggcgacctatggcctgcacgtgggtggcgatgatccgggccagctgcaggttcgacctgtaacgggcacgatcgtccagcaggacggcgcgacctaccggtccgtggtgaacagctttgatgatctcgcacgtcctgtcagcgtcacccgcagcagtccttggcacagcaggacggacgtcacggagtatcgcgatgaccgggccgggtggattctcggagcggtcgccaagaggaccaacctcgataccgggctggtcgaatcccaggtcagcttcgatccgaaaatcatgccgctacagacctggtcgttcggtaagctgacgcaatcgctctcctattacggtgacggaacggtcgcaaccttggcagatggtgccggcaacaccacgacgctcagcagctggaagcgtgggacaccccagtcgatccggtatgccgacggaaccagtatcgcggcaaccgttgacgatagcggttggattacctcgactgtcgatgagaatggcttcaccaccagctatggctatgaccgcatggggcgagtggccagcattgcctacccgtcaaacgatacggttgcgtggaacgcgttgaaccagtccttcgcaccgagcgcaggggcggcatacggtttggcggccgggcactggaagcagacggtcgccactggaaatcttcgaaaggagacgtacttcgatgctttctggcgtccggtgctctcgcgggagtacgacgcgtcgaatgtagatggcacgcagcgcttccggcgctttgcatacgatgagttcggcagggaggcattcgcctcctatccaggggcgtcggatgccctgagtgcagggctttggacggaatacgacgttcttgggcgaacgacatcgacgtcgcaggacagcgagcaggggctgctcaccacgaccacgcagtacatcggtgacaaccagacccgtgttaccaatccgcgcggccaggtcaccatatcgcggttccaggcattcgacactccagagtactcatccgtcacggcgattcagcatcccgagggggcttttaccgatatcgtgcgcaacgtgttcggcaagccaacgacgatccggcgacggaatgccgatggctcacagggcataacacgatcctacgtgtatgacgcgcagcaacagctctgcaagtccatcgaacccgaaacaggggcgacggccttcggctacgacgctgcgggaaatctggcgtggagtgcgtcaggacttgcattgccgtcagccagcagttgcgacgctgaggccgcatacgcatcgggacggcgcgccgatcgcagctttgacgcgcgcaatcgcctgaagacgctggtgttcccggatggcaaaggcaatcaagcgtggagctacaccaacgatgggaagccaacccagattgtctcccgcaatgatgccggtgcggaggccaccaccacgtacacctacaaccgccggagactgctgactgcggaaacgctggcccagaccgatgcggcgcccttgagtctcggctatggctacgatgccaacgctgccctcagcgcgatcatctatcccagtggcatggccgtggactacgcgcccaatgcacttggtcaggctacaagggcgggaagctacgccactggcgtgggctactacccgaatggaggaatgagtcgattcacctacggaaatggcgtggtgcattcaatgagccagaacgcgcgtcagctgccccaggtggcggccgacggcagttccgttgtgaatcacacctacagctatgacgcggtgggcaacgtaaccctgatcgccgacggtatcgattccgcgcgcagccgctcgatgcagtacgacggccttgatcgtctggtgcaggcatcgtcaccgtcctttggtggggacggtgtcatgaagtacacctatgacgttctggacaacatccgcagcgcgaagctgggcggcggcaagcaacacagctatttctacgacagcagcaatcggctcaccaacgttcaggacaatcaaggcgctacgacaatcggcctgagcttcgacatgcagggcaacctggccaggatgaacggaaaggacttcatcttcgatttcggcaatcgcctccgttctgccgcaggcaaagagcagtatcgctatgacgggcatggcaggcgcaccttctccatcgacaccaccagcggcgggaagatactgtcgatgtacggcaacgatggcgcacttcgatggcagtccaaccagcgcaccggtgagacatatgagtatgtgcatctcaatggcagtctgattgccaagacaacggcgttcacagcgcccatcgcaccgacagtcaccacacccgcgttcagcagcaacggtgcgtactccgtgacctggagcgcggcgatcaatgcatcccggtatgagttgcaggagcgggtaggcggtggtgcttgggctggggtctatagcggcgcggcgcgttcctggtcggcagccggcaagcaaggaggaacctacgagtatcgtgttcaagcctgtcatggcacggcttgcagcaactggagcgtggtcgccagcaccgtcgttcaacagcccccttcgggaacatccagtcttgcgctgccttcagaagcacccaacggcagttactctgtctcctggaccgcggtggccggcgcggcaagctatcgacttgaagaacaggtggacgctggagcctggcagcaggcgcagaacagtggcgcgctcatggccacgttctccgggaaagcagctgggacgtacagctatcgtgtaagtggatgcaacacagcgggttgcggtccggcatcggcagtgatgagcacccggtcgtactttccccccacggctgtcgcaaacgtcagtgcgccttccctggccctcaatggcagctactccgtcacttggccggctgtagccggtgcgacgcgctacaaagtggaagagagcatcgagggggccggctggaccgttgttgccgagcagagcacggaagccgtgagcttctcgggcaagtccacgggaagctatcgctatcgggtgctggccggtaatggggctggctggggagcgaactactccaacgtggtgaccgtgagttcgctgcaacctccgcaagggaccagcgtctcggtgcctgccagcagcaacagcggaagctatcaggtcagctggaacgccgtgccgatggcgtccgagtaccgtcttgagcagagtgcaaacggcggaggctggcaggagatccagcgggaaggatcgacattgaggaacgtgtcgggggccgataccggcacctatgcataccgcgttctggcctgcaaccaggcaggttgcagcggatactccaataccgtgtccattacggtttccctcccgcctgccacccccagcatggtcagcaccaagcggatccagacagcacggcctccgatccggatcacgtgcaacgcgcagtggaccgctgtcccgaacgccactacctatgagctgctgcgggatggcaacaacatcgcgtacaccggtccggagacccgcgtgaccgctgccaacaccaactactgcgccaccacgtaccaagtgcgcgcgtgcaatgcgggtggatgctcgccgtggtccacccctccgatgacccaggtactggagatcagagatggcgtctga

SEQ ID NO: 533908 - DNA, 297 bp, Stenotrophomonas maltophilia
atgatacttcagattgtttttgcagtaggatttgtgtcggtcatctgctatgtggcagcgttctttcgctttgcgaagcgctttcctcggctttatccggagttgtggaaggctctgggctgtccagaggtattcgggttgcgtggtcagtccacctatctcgccgttgtgcttggattggaaagcaaagcaccgcgccaagcattgcgacaggtgcgacgcgagatgacggtcataagaattcttcttggattgactctggttgccttcatcttggccgctttcatgaccggttga

SEQ ID NO: 533909 - DNA, 183 bp, Stenotrophomonas maltophilia
atgagtatcgaccggccacgctactacacctacccaggattcaaggccggcggcctcgatctcctatggagcttccagcgtcatgatgagccggagcgtccactcctcaaccgaaaaggtgaatgtgtagccttctgcacgcacctgcccgcccctaccgctccaccggcgcagacccggtga

SEQ ID NO: 533910 - DNA, 888 bp, Stenotrophomonas maltophilia
atgtcagctgcggcgggcatgccagaccgtgactgccaacggcggatcgcctggcgacgcattgcatcgctggtggcggcgctgtcggcgttggctttcatggccgcggtctgcagcctgcgcccgaggtggcaacaggaaatcggtccgccgctggtcaacctgggaaccgcacagatgcaggccgaggtgatggcactggcgatccggcagttgcccccaccacgcattccggccctaccgatcccgcttatgccattgtcggccaccgcaaatccggaagcgtcgccgttgcgcggcgtggccaccgcagcgccgacgccgtctacgcccgtcgatcgatggcgccggttgcagccgccgcagttggccgacccggtgtgggaggacatctacgtgatggagcagaccttgccctattgctggccgggcagccgcgcctccacctgccaggaagtggaggcactggtccagccgctggacgaccggtggccgccgcagatccgcgcgctgcggttgcgcctggaggcggctctgattcccaccaatcgtcgtcccacgtcagtaccaaacgccgcattggcgggtgcgcagcggatgaatgctgcggggcttagagcgctgcgtgagcgcgggtgcgcatcaacggtgcagcagccgtctcatccgtctgatcagttcgtccatctgacccggcccgttttcagcggcgacgggcagtgggccatgatcgccgtcgcctgggattcgtgcgtctacgatttcgtctaccgcgagcttgtcgtactgcatcgggaaacgggacgctggatgaccgaagacgcggaacgaggtctgggtgccgaatggaatggccgcgtactgcggccttggcaatacaaccactaa

SEQ ID NO: 533911 - DNA, 846 bp, Stenotrophomonas maltophilia
atgcgacaacgcattgcagtcaaacgcatcctgaccatggccgtggtgctgttcgcgattgccggcatggcactggtgctcagcatgccctcctggtggcgacaggatgccggcccgccgccgatcaatctgggaacagcgcagatgcaggctgaagtgatggcagcgctgatcgacctgcgaccactgccgcctgcaaagctgggaccgcctgtgtatccaacgaagggcatctcttccccggtaggggacgacaagggcacaacggcgactgcggaggtggggctggaagacatcgccccgacacgcttcgagccgggcggttgggaacccgacatacccttcgctgtgatggaatggaccgtgccttcctgccatgaaggaaaacccgcccaggtctgccaggttcgccacagcgtcgtcgaatggcgcgatggtgacagcgcagcgtcctttcaacttcagcagcatctggaggcgatgctgcaggttgcgaaccgtcgggcggtacgcgtacctgaccttgcttttgagcttgcacacgtgcgggcgcaaaggatgacctgggacgaacttcagcaacggcgcgcgcgcggcgtcgagggatgcaccggcggccctggcaatccagatctgggcgttgtctatctgcagcgtcctgtattcagccaggaggggaactgggcaatggcatcgatcgcctcggatctgtgcagtggaggaatggcgatgcacgcgctctatcttctgcaccacagggagagcggatgggagcgcattcgagtgcagcccgtccgctatatgggctttggacacggcctctggcccgcgttgccggagtcgtga

SEQ ID NO: 533912 - DNA, 780 bp, Stenotrophomonas maltophilia
atgaagaacccgcgccatttttccaccagtacattgaagctgcgcaggagccgtggcagcgaagtcgtgcgtgcgcggcggcacctgcagcaacgtggctggccgcggctgcagatggcgctgatcgttgcgctgaccggagctgccgggttccttgtctcgcatctgctgcggctggccggtgtcgaggccctgctgctgcgctacccgctggcggtactgctggcctacggtgtgttcctgctgctgatgtggatctggatccgttggcgctgggacaacgtgctcgatgcgctgtcgtcggaggtgggcggaggcaccccatcggcacacggcagcgttgcgcaatcgccgtggagtagtgtcggcggccgttccggtggtggcggtgcgtctgcctcgtggaatgagccggcagcgcagagcgaggttgaggtgagcgaggtgccgctggccggactggccgaagacgaagccgggctgccattgctggccgtcctcggcatcgtcgcgctggtggccgccgtgctgctggccagcgtgtgggtggtgtggtcggcaccgctgctgatggccgaactgctggtggatgcggccatcgccggtggcctgtaccggcgcatgcagggcatgcaggagcagggctggtggcgggtatgcgtgacgcacacgctctggccgctgctgggcctgctgttgttctttactgggctggggtggcttgcgcagcagctggcaccgggggcgacccatctggtgcaggtcatccaggcactgtag

SEQ ID NO: 533913 - DNA, 543 bp, Stenotrophomonas maltophilia
atggaacgcccggttttcacctatcaccccaatgcctacgcgaccgccttcgaagcagtcgatggggtctgtgacggctgcggccagccgcggacgctgcgctactgcgggccgttctacaccgccctgaaacccgattacctgtgcccgtggtgcattgccgatggcagtgcgtctgcacgcttcgagggcgaatttaccggctggagtgatatcgagggggtgtcgccggacccggccgacccgccgccgaccatcccccgtgagatgctgctggagatctgcgagcgcacgccgggctatcggtcctggcagcagtcggtctggctcagccattgtgaacgaccctgcgcgttcctcggattcgccggtggcgaggacctgctgcccatccgggatcaggtccggccggacgtggcggaggtcaacccgggcgacgccgactgggtgctggaacacctgacccgtgacggtgagatggtcggttgcctgttccagtgcctggagtgtggccagcaccgccttcacgtcgatctgggctga

SEQ ID NO: 533914 - DNA, 912 bp, Stenotrophomonas maltophilia
atgtcacctctccggaacacgcgcctgctcggcgcctgcctgttcctgtcgtcgagcctcgggctgtacgcgaccgcgcatgccggcggtgtcataccctgcaacaactgcgccaatccacgctcggccgcgctccagtcaggaacgggattgactgtcgtggttgacctggagcgcaaacggctcagtggttatgaggtggagtatgaccgtgaactacggaagtaccgcgcagttcccgcggccgtccccgcagaggtcaccgcgatgttcaatcgcatcctcgcactgccacaggccggcatcgggtcaggaacgcagttcgtgccacagtcattcggccgtggaacggttgttccggtccatcctgatgacccgcagatggccaatggcatcaccttcccagccgagctgaagggtctcaatgcctacgatgtggtgcagtcggccacctaccgcacccaactggaacttggcatgggacgcgccttcagtggcgccaccacgtcgcagcccgcatggaattccctggctaccacgatctcttctgttgtgctgagctgggtgagcaaactgtttggcgtggacaccgtgacctatgtgattacctggcgcgatggctcgcgaaccaggctggtgatctctccagactcggtcgacagggcaaagtacgttacgggtgagagcgttgacgcagcaggaaatcggataccggacggcgcggcgtcaaacagcgatacgggccaagactattcgggcacgtatcatttcagcaacgagggcgactatcagagctggatcgataccgcacatctgtatggcgtaagaatcgagatcaatcccggatcggccccgacaggtcccatctgcaggtgggatggccgccaacttcattgccaggtgccccgttag

SEQ ID NO: 533915 - DNA, 1194 bp, Stenotrophomonas maltophilia
atggccaagcccgccgccctgcccttggtgctcctgctcgctgtgaccacgccctgggccctccacgcggcgcccgccctgcccctgccccagggctgcaccactgcagatgcggcgggcgcaccggctcccctaggcaccggcgcgaactcagcatttccgccgccgcagctggaggtgcgcacgccggtggcaccttccgtgttcgatgcaggcggcctgcactacctggtctacgagctccagctgttgaacgcctctgagagtccgatgctgatccaggcgctggacatcaccggcgacagcgcgggcggccctcgcctgctgcgctcgctgtccggcgcggacttgtctggcgcactgcgcatgatcggcggtggaacgctggacgcggcacagccactgcctgccgggcgctcggccaccgcctacctctgccttgcctttgcgcgcacgcagccggttcccacgcagttggggcatcgcctgcggctggacagcggcatcgccgacggcccagccgtgccgacccggggcacccgggtgaacgtgcttgtcagccccgtacgtggcgagcactggctggccgacaatgccctggcgctggaccgccatcatcggcccggcctgttcgtggccggcggccgcgcgcagatctcgcggcgatacgccatcgactggaaacagcgcgtcgatgaggccgtcctgcacggcgatccactcgacgtgcgcagctaccatgcctatgcgcaaccggtattcgcggtggccgacgcggtggtggtgcaggcacgcgacggactgcccgacaacgtcccgcgcaccgccgccggctttaccccggcgctgccgctgagcatggacaccctggcgggcaacaccgtggttctggatctgggcgatgggcagtacgcccactatgcccacctgcaacccggcagcgtggcggtcaaggccggccaacgggtgagcgctggccagcgcctcgcacgcatcggcaattcgggcgacgctcgctggccgcatctgcatttccaggtgtcttccggcgccgacatcatgaacagcgaagggctgcccttcgtgatccggcagttccgtgcccgcgatgcgcagggacactggaccgagcgcgcgaacgagttcccgctgggtgatggcgagctggccttcggcgatccatggatccggtga

SEQ ID NO: 533916 - DNA, 1164 bp, Stenotrophomonas maltophilia
atggcctgccgcaccctgtccgccaccgtcctgatgctgctggcggccccgctgcttgccgcccccgccaccacgcccgctgcggccccggtcgaggcgcgggtaccgttcgcgccgtcagtgttcactggcagtgacggtgcccgccacctcgcctatgaactgcatgtcagcaatttctatggcgataccggctccctgttcccggaggatctacaggtattcgctgacggcgacgcgcaaccactgttgaatctggatgccaaggggctatcggcgtggacccgccccgcccctgccgacggaaccccggtcaccgtcgccgccggcaaacgcgcggtcatctatctgtggctgacactgccgccaggcgctgcggtgccgaccacacttcgccaccacatcgatttccgcaacgatcatcagcaacggtttgccctcgaaggcgctgtgatcgcgacgcagccaaccgttccacccgtactcggcccacccttgcgcggagggcgctggctcgcccacgaaggccccggggcggcgcagtcgcatcactggggcagcctggtggcggtgaacggcgcgctgaccatcccgcagcggttcgcgctcgacctggtgggggtggatgcacagggccgcgcggtgcatgccacccccgagcgcctgcagcacacgcgccaccaggactgggtcggctacgccgcaccggtcatcgcggtggccgacggcgtggtgcgcgatgcccgcgatggcgaaccggagcacgcgccgctcactgcgcagccggagcccgcatcgcttaccgcagccggcctgttcggcaactacgtggtgctggagatcgcgcccggcgtgttcgccagctacgcccatctgcgcaagggcagcgtcaaggtcaggcccgggcagacggtgcagcgtgggcaggccctggccgagctcggccaatcgggcaactcggcggcaccgcacctgcatttccagctgagcaacagcgtgcacttcgagggttctgaggggattccctatgtcttcgaccgtttccagtattacggtccggaatcggaggcgcagctgttcggccaaggccctgcctggaacagcccgtcgccgcagccacgccggcagcaactgccgctcaacgatgtggtgatcggcttctga

SEQ ID NO: 533917 - DNA, 303 bp, Stenotrophomonas maltophilia
atgaccggtttccgtttccttcctgcggcactcgtggttgtcaccgtcctgctgcttggcgcctgctccaagccgcaggaagctggcgcaccaaaagccgcagacgacgtcaccgaagtgaagctgattccgccgtatgaatcgctggacaaggacaaggatggcatcgtcaccctggccgaggtcgatgcggtcgcaccggactggaccaagcaactgcgtgcctgtgataccgaccgcgacgagaagctgacccgcggcgagtacgacgtgtgcaagcagaccacacctgcggctcattag

SEQ ID NO: 533918 - DNA, 1386 bp, Stenotrophomonas maltophilia
atggacgaagctgaagtggtaactgttgcccgtcctgtcccggacgcgctgcgtatagcacttgtgagggaactggcgcatgttcgtgcatgccaggctgtggactttcctgttccgccacggcgagtggtgtggcagtaccagagcctgacgatcgagggccacgcattcgaccgtcatgctctggtggaactgatcggatgcctcggtatagaggactacctgaagaaacgcattttcgtgctgtgcgcgcgggacttcggcgaatggctgcttgcacagccaggaagatcctacagtgctgagtgttccggcgagatcctggaatttgcaacgtcgtgcgtgactcatgggagtgtgcacattgcagcaggcatccgggcggccgttgaactgctggtccttttccactcactgcttgcagacctgcgaggtgatctgcctggtgatgacgaagacgcccgtcttgaacaagcgctgcccgcgctgattcacgacattgcctttgagccgctttcccgattgatctcgcgcggacttctggaagaggtagaaggactcattgtcgatgggcaacgatgcgatggttgggtgattgatctctcgctcgaaggagacccgttcattgccgctttctggaaaacccggagccagcccttggcctgggcggccagtgcggaggagcagctgttcctgctgacaggacacgaagtcgggcactggatcgtggcgtacagcctgtggatcggggtgtcaggggtctgccttgagtcccagcaggatcgctccgggttctcggttgttcatctgggacgcgcgagtatcgaacttgggttctgcggctatctcaaggccaggatttcgtctatcgcagccggtgccttcgcagaatgtcgggtaagaacccgggagccgatgcccatgaatctgtcgtttgaggcagcgaaactcatgaaccttggcacgtctctggatgactacgcgaaggtggctgaactgttggttgtataccacgcgtttgagttcttgccagaacgcgtaaaggctcgggcagacatgccggcccggatcgggcgaatctgttctggagtgcctgtcgatgcgatgattgggttgatgcggcatcaggggatatgggatctgcttcgttccgaaggcttcctgcgcttcattgaagatctggattccaggcacatatccgcgatttcctcggtggtggaggcgcgggggtgcaatgtattcatttcacacccgtcgctggtccaggcgttggcgcagcacgacgcgttgctcggcacagtccagagcgtcaggaggcgcaatgcaccggccgtcagcgactgcgacgaagatgccgcagtcgcgggtgaatcagttgtgggatag

SEQ ID NO: 533919 - DNA, 324 bp, Stenotrophomonas maltophilia
atgaatacttccaccgcgctgccacccttcgccggctgcggcttccgcgtcagctatgacggcctggctgccgacaacgtctacagcgccgatggccgccacgtgcactacgccatcgtctccggcgcccattccggtgcgcgcggtgaagccgcctgcgagtggcagcagctcagcgagggggtctatgccatttcgtggcgggaagccgatggcgctacggtcgtgcatgtcgatgacttcgtgggcgggcgttcgctggcctggttcaccgccgccgatggccgcttccatcgcatgcaggggtcgctgcgcgtgctgtga

SEQ ID NO: 533920 - DNA, 957 bp, Stenotrophomonas maltophilia
atgaccacgtccgaaccctcgccgcgtcaggccaggcaggcgttgcgctgggtgatccggtgcagtgcaggcccgctgcccgatcgccagcaacaagccctgcagcgctggctgcaggctgatccgcagcatgcacaggcctggcgccagcaacaggcgttctggcagcggctcgatgccgccggccccgaggtgctggcggcgctgccggcgctgaccgccgatgaccggggcctgcgcccgatcgcgccgcgccgtcggctgccctggctgctggccagcgcggctgcggtggtactgatggtcgcagcggcaccgcacgcgttgttgctggcacgcagcgacctgcgcagcagtgacgccccgcgtgtggtgcagctggacgacggcagtaccgccgtgctggatgcgggcaccgcgctggcgctggacttcgacgatgggcagcgccgcctgcgcctgctgcgcggccaggcctggttccaggtggtccacgagtcgcggccgttccgggtcgaggccggtggcggccagatccacgatatcggcacggcgttcagcgtctccctgcacgaccacagcgtcagcaccgaggtcagcgaaggcgtggtcgaggtgcgtccgggcgacggcagcgttcagcgcctgcacgctgggcaggcgcgggtgtacggtgacggccgttggctgctgccggtgcagcagcgtatgccggaggacatcgcgccctggcgccgtggcgaagtggccatcgatgatcgccctgccgcgctggccatcgccgatctggcgcgctatcgccgtgcaccggtgtgggtgttgggcgggcagggtgcgcaggtgcgggtcagcggcctgttccacgtacagcagccggaaaccgccatcgatgccgtggccgcgcaggcgggcctgcatgtgcagcgcctgccaggcggtgccatggtgctgtggtga

SEQ ID NO: 533921 - DNA, 612 bp, Stenotrophomonas maltophilia
atgcgtggatggggcgtttccggcgcacccggccgatgcagccacgcatggcgtggcgctaccgtgagcgggaccatcgacggcatcgtgctggccggcggcctgtccacccgcatggggcgcgacaaggcgttgctgcaatggcagggacgcaccctgctggaacacatgcaggccctgctgctgcaggccggcgctcgacgggtctggatcagtggcgattacccggcattcgacggcgtgcctgaccgggtcgcgcgctgtggcccgctgggcgggctctacagcgtggcgatgcagatgccggatgggcccgcctgggttgtgccggtggatacgccgcggatgacgccagcgttgttgcagcgcttgcacgtggccaacgacacaacctgcacggtgtttgccgatgaaccgttgccgatgcggttgcagatcgatgatcattgccgtcgcgtgctgcaggaactgattgacgatccaacggcgcgccgttcactgcgcacgttgcaggaacgcctgggcgtgacccggctgccccttgcggcggaggatcgcgccttgctgctcaactgcaataccccgtcggagtgggagtccatcgcaccatga

SEQ ID NO: 533922 - DNA, 1011 bp, Stenotrophomonas maltophilia
atgcggatgattctggcagtagtcctggcggcgctgggaagcccggcgatggcgctggaggcggcgacgccggcgcagttcgacagccatgtggtgcaggacccggcgctgggagaagtcggctggcacctcgacaatgtcaacgcgcaggcggtgggaccgctggtggtctggctgcccggctcgggcgcgttcccgcatttccagcgcttcagcgatggcagccgggggaccagcttcccgcgtgacctgttcgcattccgcgaccgcgcgcatttcctgctggtggacaagcccggcatcccgttctcggcggagctgcgccttgaccaggccaagggacgaccgctcccgctggatgggccgatctatcgtgccggcctcacgcgcgagaatctgatcgcgcgcacggtgctggccctcgctgcggcccgccgcagcctgggggaccgggtctcgcaggtggtgatcatcggtggctccgaaggcgcgcagtacgtctttgcggtggccgcgctcgcccacgccgacaaggccgtgggctggggcgggctggcactgccgcagtatcacgacttcatcatcgagcaacggctgcgcgccgaacggggcgagatcacccgtgcccaggcgcaggcgtcggtcgaggagatcttcgcggccatcaaggcgatcaacgccgacccgctcggtctgcaacaggccttcatgggtgagaccaaccggcgctggtccgggtttggcccgcatgcggtggtggacgacatgctggcgctggatatcccgttgctgctggtgcagggcggcgacgacgacaaggcaccgatcatcaacaccgacttggcgatggtggccttcctgtcccgtggccgcagcaatctggactattgggtgtatccggaggccgaccacggctatcgggtgcctgatccggcgaatcagggcaagcgcgtttccattgcgccggacatctggacgcgtgtctgggcgtggctgatgaagcagccctga

SEQ ID NO: 533923 - DNA, 906 bp, Stenotrophomonas maltophilia
atggacagtacacgcccccactcacggctggccgcgctggtcgcactggcagcgctttgccaacccgccatcgccgcaccggcatgcaaagctgcacgcgacctggcccccgcgcgcttcgacgttccgttcgacatcgttgacggccgcatctatgtgcaggcccaggtcaacgatatgggccccttccgctttgccgtagacaccggcgccagcggcgttgcccgcgccgacagcaggctggtgcgcaggctggcgctgcctccggttggcagcgcattgaactcggacggcctgcataccgctgaaaccgacactgtccacatcgattcggtgagcctcggtgcattgcgccatagcgacgttgcggtcatcgcccgggactacaatgcccggcaatccgccccggcccagttcgacggcatcctggcgcgcggattcttcagcgaaggtcttctggtcatcgattacccgcgccggcgcctgcggttccagcacgaacgcgggctgtccccggaccagcccgataccctgccctatgcacgtgccttccgcattccggtcacgatcggcgcgctgcagaccgaggcacagctggataccggcgcgaatgtcaccctggtgttgccgaccgcgcagtacgcgcaggcctccgctgccgcccttccagcccagcacgaccgtctgacactgggtcatggcgaactcagcagcggtcgcgtgcgctttgagggatcgctgaaggtcggggcgttgacgctgcaggatttcgaggtgcgtgtcgccgaccgctatcccgaagccgtggtcggcgcgcatgcactgcaggacagcgtggtgctgatcgaccagcgctcgcaacgggttgcgatctgtccggccacagcactgcgcgcaacgccctga

SEQ ID NO: 533924 - DNA, 453 bp, Stenotrophomonas maltophilia
atgccgaggatccgccccgcccacgtcgatgatctgcccgcgatcagcgcgctgtgcctgtccgccttcaacgtggccgtcgctccgtccctcggcgaggtcggcatcgcgaccttcggcagcgtcgcggccgccgatgcgttcgctgcgcgcctgcacggcgacaaccacatcctggtggccgagcacgaacaccgcatcatcggcgtggtcgaactgaaggaaggccggcatctggccatgctgttcgtcgatcctggctgccagggccggggcatcggccacgccctgttccgggccgtgctgccacagctgcgcacgccgaagatgagcgtgcgcgcgtcgttgaatgccgtggccacctaccagcgctacggcttcgtgctggacggcgaggcaggcgagttcaacgggctggtctaccagcccctcaccttcaccccgccacgttga

SEQ ID NO: 533925 - DNA, 639 bp, Stenotrophomonas maltophilia
gtgaaaggcgagaccgtggtgcgcatcatcctgtgggtgctgtggagcctgtggggcattgcctgcgtagtgttggcgctgggcgccgctgccaatgccctggcctcgcgtacgcagacggtaccgttggcactgaatccgggcgccacggccgagctcacggtctaccgcttcatggacgaccgtctgcgtctgcgcttgcgctatgccgacgacgggagcctggaggaccccgaggtgctgctgcgcatcgaaacccccaccgatcgtgcggacttccgcgccggtacgcgttcgggcgtggccgggcagggcatcgatcgcgcgctggcatcggttgagtccagcggccttaccgcgttctactttggctatggccgcggcgatgcattgccgcgcggacgatcctcattgcaggtgaccgtgctcgaggtggccccggcgctggcgggtcgtgcggccaccatcgagttgcagccaccgctggatctgctgaagctgaccgacctggattatgtctggctgtggccgttcttcttctggcagccggtggcgatgttgcttctggtattcggtgtcgggctggcggtggccagcatcgccctgcgccgttggcagcgccgtgtccccgccgggtag

SEQ ID NO: 533926 - DNA, 654 bp, Stenotrophomonas maltophilia
atgcccaatatgggtatccatgttgccaattcatcttccacacgtgccatcggcctggccgacgcgctgttcacccagacccagcagcgggtgctggcactgctgttcggccaggaccgtcgagatttcagcatctccgagctgatcagtggcagcagtgtcggctctggcgccgtgcagcgggaagtggccaagctggtcgcaagtggcctggtggagcaacgaaaagtcggtaaccagaagcgctatcgggcatttgccggttcccccatccatgccgaactggtggcgctggtgcacaagaccatcggcctggcccagccgctgcgcgaggcgttgcagcccttgcgggacaagatcagcttcgccttcgtctacggctcggtggccaagcgcaccgacagcgcacatagcgacatcgatctgatgctggtgtccgatacgctgggctatgctgagttgatggccgcgctggatcctcttgagggtcagctggggcggccggtgaatccgacgctgtacacgcatgacgaactgaaggatcgcctgcgcaagggcaatgctttcctgcggcgagtactggaacagcccaaggtatgggtgattggaggaatggatgacctcaccgttgcagaacctggtcgggccgggtaa

SEQ ID NO: 533927 - DNA, 486 bp, Stenotrophomonas maltophilia
atgcgctggccgtggtccgcagcgccgtcgccccggcttgaggacgctcaggccgatgtcctgttgcaggacctgctgtcacgcgatggcaagcgcatcaccgacgctgcacgcacggtcgcacggctgttcaccacgtcctcgctggatgcattggccgcgcatgcagacctggtcgaacagcgctgccagggcatcgcgctcggcggcatgctgatcagcaaccaggcacacctgcgggcggcgctacgacgattgcgctattggcaggcgcgcgagggttgcctgtgcgcgctcaaccccgcctacccattcttcgatccgcgtcgtctgatcgaacgagggcagatgcagctgctctcgttgcaggaggccgaggatggctggggcgattgccacacggtcgcctgtgcacactgcggccaacgctggcaggcaatcgaccgcgaataccattatccgtggtgggaatggaaaaccgcctga

SEQ ID NO: 533928 - DNA, 1344 bp, Stenotrophomonas maltophilia
atgagcgaccaggacacacttctccgcgttcttgaccaggcacaacggcagggcgggagtctctggaagggactgagttcacgagaactgtcagtccagaccggcattccctggacaaccaccaagcgactgcttctggaaatgcagaatgcgggcatggtgattcgcgaggggcaggcacgaagcacgcgctacaagcctctgatcctccctccggatcaagggaatgccgatcaaaccgatgcatttccccgcttcgacgcgggcaaagcacttctggccgagctcaagcgtcctttggggcagcgtgcgccagtggcctatcaacgcgtgtttgttgacggttacgcgccgaatcaaagtcagcttctgccgagctcgctcctcaccgatctggaagctgcggcccgcatgagcgggcagcagcccgcgggcacctacgcgcgtaacgtcatggcacctttgctgatcgatctgtcctggtcgtcctcacgactggagggcaatcggtactcgctgctggaaaccaaggagttgtttgaaagtggtaccaggagcggagatctggacgcggtcatgctgctcaatcacaaggccgccattgaattcctgatcaatgaagttccgatcgccggcctgaccgagccggtggtgcgcaacctgcatgccaccctgatgagggatctgctggctgatcccagcgggttggggaacatccgttcgaaaatggtccagatcaaggatacgagctacattcccgagcaggcccctggtgttctgcaggagatgttcagccggatcatcgccaagggaaaacagatcaacaacccgatcgaagccgccttcttcctgtgggtcaatatcgcttacctgcagccgtttgaagatggcaacaagcgaaccagcaggcttgcagccaacgtaccactgttgatgtacaactttgcgccgctttccttcctggatgtggaagccaacgactacgcttacgccatgatgggggtctacgagcaatgcgacgttgcccttgccgtggatatcttcgaggcggcctacacacgttcgatccagaagtatcgtatccagcttgctgcagcctccgctcctgatctggtccgccttcgccttcgaggcgcaatgaatgatgtcatcgggctgatcgtccgcgatggctggtcgttgccacaggctttggaggcgctggatctggaggctggtgatatcgccgcactcagacgctatgtcgagcaggagctcatgcacctgggtgaacacaactgctcgcgcttctacgtcaccatgcgacaggttcaacagtggattgctgctggccgtccctactga

SEQ ID NO: 533929 - DNA, 2394 bp, Stenotrophomonas maltophilia
atgaccccccacacccctggtgtgccgctgcgcatgcgccccctcgcctgtggcctgctgctggcaatgctggcacttccgctgtctgccgttgccggcaacctggataacgaatccgcagaagtcgttcatggcgaagccgccgaagagtggttcctgcgcaatggttcagccctggacatcaacagaggtgcggggttccgtatcagggcgctggacgactccaaggtgagactggtcgatgcggttatcggcgtccccctggatggcaggaatttcccctatggtgtctctctgtccgagactgcctcgctgaccacactgaacagcatcatctacggcggcggcattcagatccaggacagtgcctctgtggagctgcgcggcagccgtatcctgatgacgcccagcgatggactgccgatgggctcgcagaacatcggcatcgacatgttcgactccaactcgcacaccacaccgcttgatggtcgcgcatacgtcgatgccagtctgatccgcgtgagcgacgtctcgcccaccggaagtttcagcggcatcggcatgcgtctgggtcatggcgaagtgaatctggtgaatggctcgcgggtggaagcagacaacaacgccgcgcttttgatcggccgccacagcgtcatcggcaccacccggctgaacctcgatgcgtcatccctgcactccaatcggggggccgccatccgtgcgtttgcattccgtgatgcctccttcgacgtcaccgtcgccaacggctcgcagatctccggcggcgacggcaacctgctgctggtcaacagccttggtgcaacaccgaccaccgcgcggaacatcatcaatttcactgtggatgactcgcgcctgacaggcaatatcacgttggataaggtggccgcaccgggcagcgccatcaacctggcactgcgcaacaaggcccagatcgacggccgcttcatcaacgtcaccaccgccagcatcgacagcgatgccacctggctgatgaccggcgacagcaacgtcggccatctcaccttgggcgcgggcggtacggtggcgctgggcaatggcagcagcttcaacaccctcagcctggatgagttcaccagcaacggtggcacgctgctgttcaacacccagctgggtgacgacacctcggccaccgacaaactggtgattgccggcgatgccaatggccaggccaatgtacgcgtgctcaatgccggcggtgcccgtgccaagaccgaccgcggcatcgagctgatcgacatcggtggcgcgtccaatgcgcagttcgatctggtcggccgcgccgtgggtggccagtacgagtacttcctggtgaaggatgccaacggcaactggtacctgcgttcggacctggcaaccacgccggacccgtgcgtggtcgaccccaacctgccggagtgcaggccgatcgacccggtggacccggtcgatccgcccacgccggtgctgcgcccggaggccggcgcctacctggccaaccagttcgcgctgcgcgaggtactgcgtcattcggcgaccgaacgtcagcacaccgacgccgccgccgagggcgtgagcagctgggccagcatcggcagcacgcagagccggtggtcggcagcagacgatcagctgggcctgcgcgtgcagcgcgcgcgcctgcagctgggggcagacctgggcgtattcgatgatggccgcggtcgcgtgggggtgatgggaacggccgcacgcagccgcaccacctcacagtcaaagatgaccggctaccgcgcacgcggcgaactggaaggtggcgcactgggcgtgtatggcaactgggccaacgacgccatgtacgtggatgccagcgtgcagcgcggccagttccgcaaccgcgtgcagggcgacggcctggccgaggagcgttacgactcggatatctggcagtcgtcggtggaagccggttaccgcctcggcatcggccagatcggcaactccgcgctgagcctgcagccggaactgcagctggtctacactgacgccaagaccgacgtgcataccgaaaccaacggcaccgtggtgcgtgcagcgggcaacagcggcctgtccagccgtgctggcctgcgcctgcagggtgaatcgcgctcggccgcgggtgcctcggtcagcccgtatctggcggccaactggtaccgcgatggtgccggtaatggcatcgccttcgacgatgaagtgttgaaggctggtattccgcgtaaccgctatgagctgagtgccggtgcgcgcgtggagttccgttccggcttcagtgcctggggtgggtttggtgtgatgcgcggtgacagcgggtaccgtgaagcgaccggcaatctgtctgtggcgtaccgctggtaa

SEQ ID NO: 533930 - DNA, 411 bp, Stenotrophomonas maltophilia
atgaccaagtcaaagtatccgcacctgttcgccaccctcggcgaagccgccgcgcgcctgcccaacgatctggcacgcacgctggaagacaccttcgtttcgctgcaggatggcgacgacagcaacccggtcaccttgcaggcctgcctgcagcacatccgccagggcgatgctgccgatggccagccgtggccgggcaaaggccgcacgcccggacagcggctggcgctggcgcgcatccaccgcgccaatgctggcctgaccttcctgctggaactgctgcacgccaccgagcgtgtacgcgtggacggcgaggtcagccagtcgatgggcgatggcgagcgcgaaggcctgctgctggcctgccggggcttgtccgagtatgtggatgtgcagctgcaggcagcgtga

SEQ ID NO: 533931 - DNA, 1215 bp, Stenotrophomonas maltophilia
atgagcgatgtcacacggcgcagtcttttgcagcacacggtggctgcgacggcctgcgcgcttctgctgcttgcgctgggcgcaggcgaggctgctgcggtggatctgcagatcatggccgagttccgcccgtctgcgctcgatcccacccacaaccagttcgtgaacatgacgccgcagtcggggttctgcagtcagcatgccaccctgtgcagacccggcgatttcactatcgacaccggcatcaacgtggcccagcggcgcttgtttggtggaggggaggatccacgggaacggtggtatctggcggtggatggcaactggcgcgacgtgacggtacgcaacgagcgaagtggccatgagctgaatgtgcgcatccggttgtttctgatcggcatgaactggggattgccgaatgatggcagcggtcctggtgcgaacgggtcggccacaggaggatgccgcggccgacttggagtcggaagtggctcgttctatcgctacgcgtgggaggtgccgctgggcaacgcggtgtgtgttcggtcgcccagagcggagactgatcgcatcgccaactacctcaacttctcgatcggctatcacctggagacccccaaccccctgcaggcgcaggatggcctgtacagcggtggggtgagctacaccgtcggcaatggccaacagatcgatctgggccagggagactactcagacccggaactgaatctgcagctggcgctgaacgtcatgcatgatttccaggtgcgcttccctgccgagacgccgcgcgtgcagctggcgccagacggtggatggtcacaatggatcgaccacggcgtggtgccggcccggttgtggcaggagcttccgttccacctgaccacctcgatggatttcagcatgcggttgcggtgcgagcatgaggtggcaggccgctgtggtatccgcaacgagaacagcagcgaggtggtaccggtggatgtggacgtgacgttgcccggcatgagcaacgtgcacgatggccgtcctgcacaacacaccgcgttgccaccggaaggcctgccgtcgccacgcttcaccccggatggctacctgatgggacgccgctccacactgcgcttcaccgccgggcgtgaagcggcgaccgagatgctgaagcagccggggtcgcgctgggcaggggatgtcactatcgtgttcgacgccaatccctag

SEQ ID NO: 533932 - DNA, 2511 bp, Stenotrophomonas maltophilia
atgacccagtgctcccttcctgcccgcgtgcggctgctgccgctggccatcgccgtcagcacggcgctgtgggccggctctctgcatgccgccggcctcgcaccgggtgaactgcccagcctgctcgagcagcgcgagcgcatgcctgtcgagttccgcgaacatctgttcggcagcccgctgacaatacgggtggagctggatgggcgctatctgggcgatgccgaggtggtgctgcacgaagacaatcgcgtgcaggtgattgcctttggcgagcaccctgacagcccctggccggaaacagagcgggcacgctgggccgcgcagttggccgagccgatgccgctgggcatctgcgcggcgtcgtgcggcggtctggcggcattgcacttcagtctgtccaactccctgctgaccctgcgtaccccgggtggcacacggccacagcagcgccacatcgtgctgccagaggcgggtagccatggcttgatcgtacgcaacagcctggctgtgcatgacggccagggccaggcacgtgccgcgcgctacagcgctgaactgcgcggcagcgttggccactggagcacggttggcagctatcagtactatgcgcaggccggcacggccgagcactatctcagtgcactctatgcacagcgcgaactgggcgatcacttcctgcgtgccggctatttcctgcccaccttcgagggcatcatccgccagccacgcgcgccgggcacccagaatgacaccgcgttcggggtcatggcaggttcgtcggatgtgctgctggccgacagccgtgcgcccagcgtctatccggtgtatgtcaccgccagccgtgagggtgttgtcgagatctaccgcgacggcaggctgctggcgacccaggccgttgttccgggaatccaggaagtcgacacccggcgcctgccggggggcatctacgatgtggaactacgggtgatcgaggacggccgcgaggccagccgcgaaaccgccggcatccacaaacccacccgttggcgcgatcccacccggcgctggcgctacagtgcgttcgccgggcagcaacgtgggttgctggacagcggcggtggcagcgaccggcagcagggccgagttgcggccggcgccgtggtcaactacctgctgcacccgcgtgcagtggccggtgccacgatgcagcaggtcggcgaacgtcgcgccgcaggcgtctccctggattggcaggccagcgagcggctcagcacctacaccaatttctacacctccagtgatgccggccgcggcgtcgacctgcagggtctgtaccgttacagggccggctcgatcgtcgccaaccatgcacgggtctgggctgagcagcgccagcgcgtggcgcccgggtatggccaggcgccgtactggcaaacgcagggaggctggcaggatacttcgtcgctgtcgatcaatcatcgtttcagccatcgcgacaacgccagcgtgcgcgtggcgcgcagctccgggttcacccgaggcaccggtatcgatgtgtcctacggccgccgcgagaccttgttcggccggcacgatgtgaactggcgggtgtctgcctacgaccggcccggcagccgtctggcccggtatcgccgtgaacgcggcatcgatctgacgctcagcctgtcgatgggcagcgaacggcgcagctacagcggcagcctgggcagtcgcggggggacggccggcgggcgcgacacctatgtgaccgctgccgccagccagcagatgcatgacggccccctgcgcagcgtcaatggcgcagtgagtgccgaacgcggcggcatcagtgccagcgccggtgcccatctgcagggcgcgctgctggaaggcgacgtgcagctgatgcgctcggcaggctccggcaacgtcagcggcagcgccaacctggacagcaccgtggtgctgggcgccggccgcgccgccgtgctggggcagggccgcagcggtggtgtggataccggaatgatcgtggacgtccacagtgactaccctgggttgcggctgcgtgccgacgacagcgcaggcggcagcgtgaggctgcgcccgggtcgcaacttcgttcccgtcaatgcctatcgcgccggccacgtgcagttcgacttcgaagggcgcggcgcgccggccgccaccgtgcagcctgccagcgttcgctatcacttgaacaagggcggcgtgatgcatgcccgtgtggatgtgctgcgcaccttcaccgtgatggggcaggtgctggatgccgaaggcaacggcgtgcgcggtgtgcaggtgatcaaccacgccgggcgcagcctcagccaggaggcgggcttcttcaccctggaactgagtgcgcgcgcaccggtggtcgagctgcgctacccgaacctggtcagctgcacgttgaccatggaagaaggccaatacccacgcgagggcgacgtgctgatggtgggcggtatcgcttgcccgccaccgctggccgcacagtga

SEQ ID NO: 533933 - DNA, 501 bp, Stenotrophomonas maltophilia
atgcaccgcaagaacatcgttctggccgccgccgcggccctgttgattgcaccggccatcagcatggccgccgttgaaaccaagagcattaccgtgaacgtccaggccgacgtgccgaacatcgctggcctgcaggtgtccacgcccgacggttgggaaggcctgccgcagactctgccgtgggacaccgcgcgcgagaccctgggtgagctgaccggccgtgtgatcaacgtgaagtcgccggccgcgatcagcgcctacctcaccgcgccggcacagatgtcctccgccgccgacgtggtggatctggcggtcaagctggacaacgtggaggttccggccaccgccgcatccaagatcatcgtcgccacggccgcacaggccgccgctggcaagtccctggccttcgcgatctcgcccagcgaacctgccggcggctacaagcagggcagctacggcggccagttccacatgatcttcgaaagcgacatcaccccctga

SEQ ID NO: 533934 - DNA, 732 bp, Stenotrophomonas maltophilia
atgcgtatcgccatcttcgtggccctgcttgccgcttcaggcattgcttcggccagcccgcccagcatcagtgttggaccactgttcgactatctgcagccgggcagcagcaacctgctcaagcgcatccgcaataccggtgatgttacggcctacgtgcgcgttgaagtcacccggatgcacttcgacgcagatggcacggtcaatgaatcgccggtggataccacggcactggtccgcaatgccgatggcgtgcagggcctgatcgccagcccaagccgtctgatcattgccgccaacggtcagcaggcaacgcggctggtgcatcgcggcagccgcgacgaagagcactactatcgattgcgcttcattccggtggcaccgtcggccgatgaattctcgctcagcgaagaggaagcccgcgcagcggtcgaactcacctcatccatcaaggtcttcaccggctttggcaccatcctgttcgtcgccccggacaacgtgcgctacgacacgcgcatcgaaggcaatcgaatccacaacgacggtaacgccacggtcgtgctggacaacgtgcggcagtgtgatcgcactgcgcctgatacctgcgacgccggtgtgctggtccacgtgcggcctggccgcagtcatgtccttgcagaagacccggcacgtttccaccgctttgaactgatggagggcggcagccggcgcagcatcgactcccgccgctga

SEQ ID NO: 533935 - DNA, 372 bp, Stenotrophomonas maltophilia
gtgcacaagatgatgatcccgctgaagcgctttgcgcagttcgacgggcgcgccagccgcagtgagtattggtggttccagttgttcatcgtgatcgtttcgatcccgctgtacatcctgagtttcgttgccggttacagtggttcgcagagcctggcaatggcagcaaccggcctgagcgtggtgatgtggctggcattgatcgtgccgctgattgcggtgacggtgcgtcggctgcacgacaccgatcgtacgggctggtggtatctgctgatgctggtgccgttcgccggcctggcggtattggtgttcatgctgctgcccggcacaccgggtgacaaccggttcggctcgccggtgccgcacgtataa

SEQ ID NO: 533936 - DNA, 393 bp, Stenotrophomonas maltophilia
atgagaagacactggatcgtcgtaggcgacagcacccgcagcagcggacgtgtcattaccggatcgccgtataccgatatcgaaggcaaagcggtggcacgcgaaggcgaccgagcgacctgcccactgcaccaggggatcttcccgatcgtacagggtgaccccaccctgctcatcgacggacatcctgttgcactgcacgggcaccatctcgcctgcggctgccagctgatctcgacccagcagcgactggtgtatgtcaccgatgccactaccgatgatgaacacccccagacggtgccggtgcaggtgtctgcgtccagacctccggtctgcctggaatgcctgcgcgctgcggccgccaatgccaccccgctgctggtgcgcgcatga

SEQ ID NO: 533937 - DNA, 507 bp, Stenotrophomonas maltophilia
atgatcggccactacgcttatgcactgctggactgtgcgccagacgaaggtcgggaagcggagcttcatcaccatgcgacccacagcgcactgatgcaccgctcgctgttcgcagggcaacccgaggaagacctcctgcgcgcgtcaccgtatctgctcgaactgccgctgggcgccattggacaacccatccaccattggttgaggcagctcggccgcgagcctgcggggaccaccgctctcttctcggacgctccgttcgaggaggtgttccaccatctgcgtgcacagctcgacatcgcccttcccgatggatcgctggcgctgatgcgctactacgatccgcgcgcgtggctgcgctaccgcgacatactgacgatgcagcaacaccggcacctgctcgggccgatcagcacgtggcagatcacagtgtgcggccagacctgggcactgaccggcagcgaactggcacagcaggaggcggacgatgctgacactcagcgctga

SEQ ID NO: 533938 - DNA, 597 bp, Stenotrophomonas maltophilia
ttgtcacgcctgctgcttgccctgctgttcgtcgcgacctccgttgccgcgcaaccatcgccgctgaccccggagcagagtttcgacctgctcgcccgcttcatgctggaaggtgatgccgatgccgcggcgcaggtcgctgcactgaccggcgcaccggtgcagggcgaacgctgggaggatgccgtggacaggatcgtgatcggcgatgcgcccgccgacagcgcgcgcgtccaggccggccgcgagctttcgcgtcaggtggccattgcgctgcgacagacccactgccgcagcaccggcagtgaacgccatgatggcgatggactgcagatcgccatcgtggcgtacacctgccaaatgcccgactacgcgagcgcaggggacggagcagcggccggcaaccaggacgacgcgcacgacgacggcgacctgggccgggttcgccaggtgatcgctgcgctgcatgcggccccctggcgtgcccatgccgaccgtgtgatcctggcccgcctcggcgacgacgatgcctgggtcgcgcaggacctgccaccgatgcaccagtggatccaacggctgctgatgttgccggaatga

SEQ ID NO: 533939 - DNA, 672 bp, Stenotrophomonas maltophilia
atgtacacgcctgccctcaccctgttgttgtgcgcgccctttgcctgcgcggcggcaacgcctgccgcactgtcactggaagccaccttcgatgcccatgcgcgcatcatcacccagaacgatgaggccgccagagcggcacttcgtggcagcctgcatggcgcagatccggaggagtatccggagatcgccggcatcgtcgattcgctgtacgccttcgagcacctggcgacggggttcgatgacgccgctgccacggccatccgcacgcggcagcaatccatccagtgccgggccgaccgcatcaccgaagatgcaacgtccacgcacggcagcgtcgactaccactgcgtgtttcccgatgtttccatcgccttcgaggcctatcgcgaccatctggcgcggtcccgcgaccgcgcacggagagccggagcgctcagatcgttcctggcgatctacgccgccaccgtgcgcgatgcaccggatgcgcggttcaccgcacgcgcggaattttcccgtgtcggcggcaacggcccctgggccagtgccgatatgttgcaggttggcgtgaagctgctggaggcgctgatgccgttttccgactgggacgaacgcatcaaagcagacgcgcgtaacgccgatgagggcggccgcgcaggtgacgacccatga

SEQ ID NO: 533940 - DNA, 540 bp, Stenotrophomonas maltophilia
atgagcctgcgcacagcaacacttctgttggccacgctgggtctgggtgcgtgcgctcccaccaccgtacccgatgcggcaccggcatcgaccgccagccgcctgcagccgcaggaaacgcgctgcaacgacgatgatgatgtggtgacctgcctgcggcgcttcgcatcgccgataccgaagaccttcaccgcgcgcttcgactgcagcgcgttcaccgagcgcagcgacaaggtgatgatcgagcgcagcacgcacgccgcgcgcaaggtgcgctttccggcgcgggcgcgcgagagcggcagcgtgcgcctgcggatgcaggtcgatgacagcgggcgcctgatcaatacgcgcgtgcttgaatccagcggcaacgtcctgctggaggcggccgcaatggaggccgcgcaggactggtgctatctgccggcgcgcaaggacggccgtgatgtgggcggcgaggtcgacgcgtcgttcaacttcgaggtgatcggctggtccgcgcgcgacggagcgccacgacgggcagcgccatga

SEQ ID NO: 533941 - DNA, 450 bp, Stenotrophomonas maltophilia
atggatgagcgtcaccacaaacgttggatggccattgccggcctgctggtgggcctgcccaccgcggcggcaggcggcaccgtggcggtgctgggcctgatcttcgtaaaggatggcaagtacctgtccggcaacgagcccacggcgatcgcgctgtggtcgctggccgggcttcttggtctgttgtcctggatgtggctgaccgggctctttctgtggcgcggccgcgatggccttcgccactctccggtcgtcgcatgggtggggctgatgctggggaccctcgccgcgttgggcgtggtcgccgccacgctgtacttcaccttcaagcagggtgagatatcgacgctgggcttcctcgggcttgggccgccgttgctggtcatggcggggcacctggcgtggctgcgctgggggcagaccgtccctgacgtcggcaggactggctga

SEQ ID NO: 533942 - DNA, 417 bp, Stenotrophomonas maltophilia
atggatgagcgccgcctcaagtatctgtacgccgccctggccgtggtcttcggcctgcccagcctggtgatgggcggcgcggtcgccgcgatgttcctggtcgctggcctgcactccttcggcggtaaccgcgcgccggacatcgcgccactgctgtggggcctggcgggcattgccggctgcctggcctggctgtggctcagcgcgggctatctgctgcaggggcggactggtctgcaggtgcgtgcggtatggtggtggctgctgctggccggtgggctggctgcgctgccggttatctggatgaccgcatggttcggcttccagcaagggggcgcggcgttggaggtgttgttgctgggcccgtcgatgctggtgccggcggcgatgctggtctggctcaagcgccgagcctga

SEQ ID NO: 533943 - DNA, 807 bp, Stenotrophomonas maltophilia
atgatccgcatgcttccgcttgccttggccatcctgctgccgctggccgcacagggccagtccacaacaccatcggccggcgagcgcatcgcgcccgccccgcactgcctggacgcgcgcgacgtgcatcaggtcgagcagcagactccgaccgccatcgccgtccgcgatggccggggccaggcctaccgcattgatttcagcgccgcgtgcccgggtatcaacgaagccagcgcgctgcgcctggaagcaccgtcaggctgggcctgcgggcggcccagcgagcaggtggtggtggatggccgccgttgcggcgtcggcagcgtcacgccaatcgacaaccgggagttcgccatcaccgcgcgcgcgagcagccgcctgtatgcgtccaccctgccgcgcgtggatgtgaccgccaagggcacaccgacccgcggcggcaacagcccgcggcacaccttccagacctcgccggcgttctgcttcgccagccgccatgtacgcagctggagcgaagattcgcagggtgtggtggtggaaaccaacccacgccgcaatggcggcattcgctactaccgggtcgaactggccggcagctgctcgatcctggccggtgcacaggaagtgaacttcgaatccggtttcggcaacgggctgatctgcggcaatcccggcgatcgcatggtcatgctgccctctccattcggcggtgaagaccttcgcgccagcacaccgcgcttcgcccgcccaagctgtggcgtactggctgtctatccgaaggacctgcccgaccaggcctcgcgctag

SEQ ID NO: 533944 - DNA, 429 bp, Stenotrophomonas maltophilia
atgcttgaattcccttttcgttgcccgcatcgcgccgttggcgtggaagctgcccggcacccggcggccgttgccttgtggtcgatcttcttcgccgtcgtcgcgtgtggcaacacgctgtttggcgtgttggcgttgagggtatcggccgtgctcggcgagctgtcctatggcatctacctcctgcacggcttcgttctgttcattgcctacaagagtctcggcgcggcactgttcgccggtttgagtcccgcttcgcactgggcgttgaccgccgcgctgctgctgccgctgcttgcactgtgtgtcctgagctatcgcaccgtcgagttgcctgcaatgctggcccgccgggaggttctggcgaaagtgcagtgggtgcgcggcaggatcgatctgtggcgcggcacgcaacgggttgcggaatga

SEQ ID NO: 533945 - DNA, 591 bp, Stenotrophomonas maltophilia
atgcaggacgtctggcgagcgctctccaccctcggcgacagccgctggctgctgcccttggctgcggtgctgctgctgaccctgccgcgtgcgcagggcggtttccgatggcgctggctgatcgccatcggcgccacggcagcgatcaccctcggttcgaaactcgccttcatgggatggggatggggcatccagagcctgcacttcaccggcttctccgggcacgccgccatgtccagcgtggtctaccctgtcgtgggtgccctgttggccggtgtggatcggcgcgcacgcgtggtcggcgtcacctcaggctgcctgctcgcggcagccattgcttggtcgcgcattccgttgcaggcccacagcctgtccgaggtcatcgcagggctggtactgggcctgggaagcgccacctgggcgttgcgcgcgtgccatccgacgcggcggccagcggccaccaccctgctctttgcggtactggccggaatggccttgccgctcagcctgccagacctgcatacgcacaaggccgtgatcgcgcttgcgaaaacactgtcgggacgtgcggaaatcttcccgcactactga

SEQ ID NO: 533946 - DNA, 564 bp, Stenotrophomonas maltophilia
atggcgcgaaccaaatccatttccgacgaacgcgtggtcgacctggccgtggacctgctggttcaggtgggcccgcagggcttcaccctggctgcgttgggtgcgcaggtgggtctgtccgcagcgacgctggtgcagcgctttggtacccgtgcggcgctgctggatcgggcggtcgcccggtccggcgagcggctggcggcttctgcgccggcgccggaagaggttactgtggacggactggtgagctggctggtcgcgcaatcgcggggcatggagacgcggcaacggatggccgggcacatggcgttgctgatggaagatctacggtcgggcgatggaagacgcgaggcattggccaatgcgcacatgcgggagatgcgccggcagatatcagaccagctgcgggcattgcagttcgatgatcccgacgccgcagcgcgaatgctggaggcgcattggcatggtctgctgatccagtgggggctgggcggcaagggcagtctgcgcgcatgggtggcgaccgggttgcggcagatgatcgatctgctgccgaagctctga

SEQ ID NO: 533947 - DNA, 585 bp, Stenotrophomonas maltophilia
atgactcagcttcgatcacgcatccgcgcctatctgggaagttctttggatggctacattgctggaccggacaacgatctggactggctcagcgcagaccacgcatgccaaggtgatctgcccgcgtcaccggactatctggattacccacgcttcatcgccgacatcggttgcctgctgatggggcgcaccacctacgatgtggtggccgccatgccggagtggccgtaccgcgaccttccagtgctcgtcgccagccatcgcgcactgcgtgacgcccctgccaacgtgcaggttgcacagggcagcatcggcagtctggtcgaacgggcaggcgccctcgccgctggcaaggacgtctatgtcgatggtggcgcgatggtccgccaagtggtgcaggcacaaatgctggacgaactggttttgacatggctgcccgtgctgctcggcggcggtgtacgcctgttcgacctactacccgagcccgtggctctgcagttcacttcggcagcgtcggccggcaacggccttctgcaggtcagcgcccgcctgttgcctcagaagaactcgtcgagcaatcgatag

SEQ ID NO: 533948 - DNA, 228 bp, Stenotrophomonas maltophilia
atgggcatcagcaagatcgagaacttccgtggcgaggatgagcgtgccaccaccccgacgctcaagccttgctgcggcaggaacctgttcttgggtcagcggggcgtctacgtagcccatccagccgaggaattcccgatgtgggaagggcgcgcgatcaacgctgtagagcagcaactccccttccacaagctgctgaacatttgtctttgcaaatgtgatgggtag

SEQ ID NO: 533949 - DNA, 1077 bp, Stenotrophomonas maltophilia
atgaagatcgtcgatacggtactcagctatgctggcgactaccatccgaaatccaaaggcatgtgccgcctccgcgtcttttccagtagtgaaggcccccgagtactcattacagatcttggcccgtgcaacaacgggcggtccgtcaccaatgccattgaaacgatcgttgagcggatcgaggacagcgggctggcggtcgatgcaacgatttatatcgaacactacgagaaacctgacccggagcgcgacagctttgatcaagttcgcgtctcaccaggcatcaactggcagcccatctcgaaagacacggcgattgccttgctaggctgcaatcctggcgagcttgaagaccgtaccgagaacaacaagcgaatcatcggcagggccgaaacactcagactctcctcaaggccatttgatggctcaccgtggcccgagcctcccgaggtcatcaaacgcaagctggagatcgctgacgggatgatctctcgctcctctgtgcgcgcactcgtcgaggccggaagcggtgaacgcgagctccaacgcctgctcaagagcgatctttccatcattgccgaggcgttcacctcgtcagatgacgagtacatctgcttctcggagttgcccttcggcgacggctatgtggatttcgctgtgttcaccggccgatcgcgcatggatgtcatcctgatcgaggtcaaaggagccgagttcaacctcgtcaacaacaaccactatcaggagttcaatcacaaggtactggaagccgcaggccagctccgcaaccgtctgggattgttctaccgcgacccggaggcgactcgccgtgagctgcaccggatccgcgcagaggccgagcgtggaagtccgctccacaacgcatttctcggtccggaagcccctcttgaggtcgatccccagaaggacatcaatatccgcccggtcatcatcggcggacgtacccagaatgatctggaagaaagccgaaaacgtcacgactacgagcgaggtacttcaccacaagtgcggcttgaatcgtgggacacgtggctgcgcagaatccggcgggactga

SEQ ID NO: 533950 - DNA, 696 bp, Stenotrophomonas maltophilia
gtgcgacttgggcggcgcaggtttccacatcacattgccattgatttagagacggagctcaggatggaactccaaagaattgcagcaattgacgaccagcctcgaagcatcgagatcatgtcagatagcattaccaactttcttgatgcggagccggtttgctacaaggcgatggccgccgatcaatataagattgagcaatgggtgaaagatgaggacattgacggtgttcttattgactacaatctaaagaagggaaatttctcgacacagaacggagctgtaatcgcggcccacctgttccgaatggggaagccaactgtattaacaactgctggtcgactctccggagtagctgaggcaatttggcttggcagagagatacctgcattcgtagacaagaagcagctagacctcattgggccagcattcaatcgcgctcaacaggaaattcaaggaaagataaagcccgaaagaagggcatacagaaccgtggtgcgcatagagaatgcagattccaggcattgcaacctagtgatacttgcctatgaccctcatgaaatcatcaccgtcactacggccgatttgcgacatcggctgggctcggaaccgatcgaaggcatgcggttcaaagctgaggtgaacataggcgcagaatcagtcgacgaactttttatttcggagatcagcttgtga

SEQ ID NO: 533951 - DNA, 957 bp, Stenotrophomonas maltophilia
gtgaaatctcagccgaactgctacttgctcgatgtcggccatgggaatgcgacgctgattgaaggtagaaatggagcggcgcttgtcgatgccggaaaatccaagatcgctcttataaatttcttagagtcaatgaagatccaaactcttgacgcgatctttatttcgcacgcggacgcagatcatatcggcgggcttctggcagttctctcaaaagcgaataccgatgctgacttcaagatcggccacatatatgcgaatccggactcgcgagacagcaaggcttgggaagatctaactgcactcctcgaagatatggaagagcgtaaccttctgcgtcttactccggacttgggcgcggggtcgccagagaagcccctagacctgggtggctgcagcgtagagcttattgccccaagcaagtacatgagaataaaggctgtcggtggaaagtacagaagtacgaaaatccaagacgcaaactcactaagtgctgtaattcatgtaaagcatggggattcgggatggttgttgctaccaggtgatctagatcatctgggtctaaccgatgctgtatgccgcacagcttggaagaccgctcccgtcgtagtcttccctcatcatggcgggagcgccgggacaccagctcaaacaaaagagctcacgtccgcgatagttcagcacacccaatcgacgtgggtgctgttctccggcagaagtcatagcgaactattcccttcagaactggtaatagacacccttatgggcctcgctcctcagcccgtcattattagcatcggcgactcgcccgccctaaagagcaggattctcccgctgaaggaatgcaagcatctcaacggccaaggaacactggaagtttcaccaccagattccactggctcagtcagaatcaccccttaccctcatgatctacctggaactaaaattctccattga

SEQ ID NO: 533952 - DNA, 198 bp, Stenotrophomonas maltophilia
atgttcgtcaatctggacgatcttgaggaattgcactcgcagcctaaagaatggcagcagcgtgagccgattacgctcaaagagatcgacgagcagaaatttcagcgaatggaattcgatgaaaaagaactggcagattttgggtattacatcttggcgaggcttcatgctttcaggtcgatgggtgaagccccgtag

SEQ ID NO: 533953 - DNA, 309 bp, Stenotrophomonas maltophilia
atgccgatgcttgccctgatgctgctgttcaccggcctgttcggcgaccacggcgggcctgccgaagtggcagtgcgtcaacagatccaactcaacgagacggccagcgcgacgccacagcgtgatggcaccgcgtccgcgctgcagctcttcccgctgcgcgaggaccgggtgctgcgacttggatgccagggccgcacgaacggaccggccgagcgcgcctatgtggcgcagctgtggcaacgtgtggatggccaatggcgggtgcagcgtacggtcagcgtggatgccacgatctggtggctatga

SEQ ID NO: 533954 - DNA, 315 bp, Stenotrophomonas maltophilia
ttgatcacgacactgattgtcgccgcactcgcggtcgcgttgagcaccccactggcctcgaacgccgttctgctcctgatggagcgcagcaacttcattcccggtgaatcttcgatcttcacgttcgagccgtacgcgatcaacgacggctcatcgaactactggctgtatgggaaggatcgaaactactactaccacttcacctacgaggaagacgtcccctacgtctacatcccgctggagaacagctgccccggcttcgacccccaggacgccagcacctggtgcagcgcccaggccgtcaaggcacgctga

SEQ ID NO: 533955 - DNA, 444 bp, Stenotrophomonas maltophilia
atgcctccatcccaccaccgcgccggtgcctccaggaccttctggcagctggccacgctcatctggctgctgcttgtctgcgcgcttgtccatgcaggatttcaacccgatcattggcagttgcaccacaccggttccggcacagggccctaccccaccggctcagtcatcaccttcgcactgatcatcgctgtagagatcgtcgcgctgggcctgatgctgcaaccgtggcgattccaccgcttgtggctgcgcatgctgatcagcatcctgccgtggctgggctggaccctgctgtggggcgcgtcggccatgcatcaatcgcccgtgcgcggcgtgcacatgctctggttgctggccgccagcgtcattctgctgctggcgctgcttgtgatcgtgccggtctccgcctgccctcggctacggcgttggctcaaccgctga

SEQ ID NO: 533956 - DNA, 2265 bp, Stenotrophomonas maltophilia
atgcagctgcccagcaagccgactttccagccccccggcgatgtagatgccaaagcacgcgaacgtgaaagcgggctgcccaccgcactgcacgacctgctggtccgccgtgggcgaacggtgttcaggggtggccggattcagctatgccatccgcaggacctcgcaggcgtgatggaacttgtgctcgcgcatgatccagatttcatgcctgccgacaccctcgcttacgcatattctgcgtttggcaccctctacttcatccatgcgaggtacggcccaggtcaaatcgatcccctgagcggttcaatcgtctgcaggcagttgactgaaggcacatcctttcccggctgtccgagccagggcgcaacgtcggctttccggcttcccgacgaagcgttggacctgatcggcgatgacggcgcaccactgttcgatgcggccgtgctgaagcatggcgccttgcgtgcaggacagtgttttggattcttcccggcactcggcctgggaggcgtcgcgcagctggactcattgcaggtggtcgatgcatcggtgcacttcgcgatcctggcccagctcatcgagttccagcttttccaggagacatcgaacggcgaacgggtcgcgataacccgacaagcgcccgcaccgacacctgaggacatcgttgctcgactttccccggaatgccccttccaggtggtccgctaccaggacatcaaggacgaaattccagaggactcagagtaccgaggggaacggtacgccacggacaacccgaacgagctggctctgctcgcccccggtgacctccagctcgacacactggatctggacgacccgctggctccctggcgggaaggagaagcagacgagtacatacagttcatcctggtccgcggcgatctgcaggtcacccgccacatccactgcctggaaaccgacggcgcgtgcggactgattgtctcgggcaacctgacctcaaccaacgtcatcgtcggagggcaggagatccgggtgggcggcgatctccgtgtcagcgagatgtactggggcgactacaaccatggccacctccacgttgcaggacgcaccgaggcagcgctgctcatccagaccgactatcccatggagcttgagggtccgatccagtgcctgcgcaggattgacgatatcggggccatggagggagatgagctcgcccagctcatcgagccggactgtcttttcagggaggactcgcatccggacagcgcctggtcgctgagcgcagaaacgattgttgaacgactggacgccgggagaagcgtcatacgcttggaaggcctgacagcggcggatccgctgttgtgtgtactcaacctgttcagcgatgccaatgtcagcccagagaacttcctgcggatctgtggcaaggacatgctccccaaagacacgtgtgagtatcagttcagccgcagcggaatctcacttcgcgtgcaagcggacatcgagcatccggaaacgccggcatacatcatccagatggaacgtccttcagagcggacgggcgcccgcttggtgatggaacacgtggagacaacggtgggtgtgattgatcgccttctgggccgccaacctgagaggggctggggcctttggaagtacgtatgcaacgatacgacgctggaccagccggaatggattcaggtcgaggcaaacgagatcaaaccacccttcatcgccttgatcctcgagggctggcggttcctccaggagggtgcatccagtcgccattggaccacgcagatcatttctccgtcagacatccatacccttctttcattggcgatctgccaaccgtacgacgactacgacgatgaagatcggtgcgggctctgggtcggccactgtcatgcggcgttccgccaacagaagagtgccccggtcattgaagagcccatacttcgcttgtccagggaactgcatcaacctgatggaaccagcgtcatcgaaagctactactacgatgtcgagacatgcctggacggtgaggagcgtgtccgcatccgccacaaggcagaccaggatctggatgagccccccgctcagatcgatccggtcggaggagctggactcgctgatgcgctacgcctgttcaagctcggcgctcgggaaatgcgtttcaccaacgccggtcttctggacggcgaagtacccttcttcgcggacgaagatgctttcgcactggaattctggaccgagcaaggttacctggccagctag

SEQ ID NO: 533957 - DNA, 570 bp, Stenotrophomonas maltophilia
atgaccaccctcaacccggacggcagcagcaacatcagcccgctgtcgtcgttctgggcactggccgaccgggtggtgctggggcttggcacgcagggccagggctatcgcaacctgcagctgcgcaacgaatgcgtgctgaacttcgcctccgccacgcaggccgcacaggtcgaggcgatcgcacggacgacggggtgtgatccggtccccgccgccaagcaggcgatgggctatgtgcacgtgcgtgacaagttcgccctggctggtttcacccaggtaccttccgcgcgggtagcgcctgcggcgattgccgagtgcccgttgcaggtggaagtcacggtgatggcaatgcactcacccagcggcgagggtgaccccggttttgtaatggtggatggccgcgttcgctgcgtgcatgcgcatgaggacatcaccatcgccggcacccagcacatcgacgtgacgcgctggaagccactgatctatctgttccgccactatctgggcgtgagcgatccggtggggcgcaactttcgggccgaacccgttctgcccgccggggtgtag

SEQ ID NO: 533958 - DNA, 819 bp, Stenotrophomonas maltophilia
atgaataaggtcttcgatcgtggcgaggaagtgatccgcgccgaagcgctgggcaagacctatgccgaagggcgcatgcagaccccggtgttcgacaacctcgacctgacggtcgctgccggtgaaacggtggcgatcattggtgcgtccggtgcgggcaagagcaccttgctgcacctgctcggcgggttggatgttcccagtgctggcgaagtctatgtggccggccagcgcatgtcggcgctctccgataccgcgcgcgggctgctgcgcaaccaggcgctggggtttgtctaccagttccatcacctgctgccggaattcactgcgctggaaaacgtgatgatgccgctgctgttgtccaagtcgcattcggtgctgtcgcagcgtctggcgtacgcggggctgggcgtggtggggtcagcgctggccagcatcgtcaacggcgcgacttcgttcgtccgcggtcgtccggaggtggaagaggcggttgcgcgcgccaccgctctgctggagtcggtcgggctgggccatcgtctggatcacaagccgggcgagctgtccggtggcgagcgccagcgtgccgccgtggcgcgcgcgctggtcaaccatccggcctgtgtgctcggcgatgagccgaccggcaatctggatgaccgcaccgccggcaccgtgttcgacctgatgctggaactcaatcgcgcccgccacaccagcctggtgctggtgacccacgaccgcagcctggcacgtcgcctggaccgggtgctggaactgcgcgaggggcgcctgcacgcgctggctcacgccgacgtctga

SEQ ID NO: 533959 - DNA, 3261 bp, Stenotrophomonas maltophilia
atgaagctccgttcgacaagcatgtccgccgccgcccttctgctgatcccactgacgatcaccacggcctgctgggttcctgatgcctctgcgaggaaggcgccttgggtgtactaccggaacaaggatggcaactccgatatccaggatatggacagggtccacgccatccgtccgcccagcgttgccgcaatcggatcagggggtgtgatctcaatcggcaagggcgtgtcctaccattccgacatctccaagcgtgccaaaacggcgctggagcaggaaacggacgatcgccgtgacgactgcaacgagcgcaagggtaaccctgtggtgctctacaccggcaacaaggtggagatcgagcgcgacttcactgtcaacggggaaatgggcctgtacctcgaacggacctacaaccatcactggagcgccgcaggcctgttcggcaatcactggatcagcaacttcgactacagcctggcgttctccaacgcgcagaagacggcgtgggcacaacgcccggatggccgacgcatcaaactgatctggaatgaggcgcaggcacgatggaacgaggaccgcgccaagccgattgcgtacctggtaaagaacagtgatggaagcttcacgctgaacaatgaagagcttggaagcgagcgctacaacgcagacggctacataactgaactccgcaacgagcaaggggtctactggagcttcgcgtacaccaacaagtacctgcagtcggtcactcactcctcgggccgcagcatccagttcacgtggagcaatggtcttctcacccaggtcaaggacccggccggcaatgtctatcagtacggctataccgccgatgtcttcggggcgggccgtgcccgtcttgccagtgcaacgctgccgggcgcgccacagacgaccattacctatcactatgaagatgcccgctatccggggggattcaccgggaagtcttacaacggcgtgcggtattccacctttgcctacgatgcctacaagcgtgcgatcctgtccgagcacgccggtgggatcgagcgacacaccttcagctatgccgtcgagagcagcgcccccgtggctgcgcctcccgcacctgtccggccgggcggtgtgcgtggcaatgaagagaccggatggtgtgagtacaacccacgccagggccagatctgcatccagccccgttcgctgccgggtggttcgattcagctcgccgcacgcaacggggcgcaggacaccttcgagcttgcagcggcagacgaccggacgcgacctgtcaagttgaaagtcagcgagaccaatccgctggggcgcaccaccacgtatgcctacgaggacgggcgccaggtctcggtgaccggaacccgatcatcaacctgccctgcaagctacaaggagcaaacgtacgatgccaacggaaatccggacatcgttcacgacttcgtcgacaacatcactgacttcgattacagccccgaaggcaatctgctgaagaaggtggaagctgctggaagttccgccgaacaggccacgctctatcaatgggacgcggcaggacgtcacctgctgaaggaaacacgcgtcggcgacagcgaaaccacgttcacctatgacggcaggggcaacgtcagttcggcgaccaagcgcaacctcacatcggtgggtgtcaacggacaggccagaactacccagttcacccacacctaccatgccaacggactgacggcttctgtgaaggaagatgggccgttggcacaggacgacgtcacctccaccttcgatgcgaagggagacctcacaagcatcaccaacgcgttgggacacaaagtcacgtactcggcctacaacgagctggggttgccgggccgcattaccggtgccaatggtgatgtccgcgaaaccacctacgacgcccgtggccgcgtgctgacggatcgcatcaatacgggttcagggtgggccacgaccacgaccacctacactgtggccggcgacgttgccagcgtcaccacgcctgtgggaatccggacgcagtacagctacgacgcggggcgtcggttgctgagcgaggtgtacccactcggaaacggcaactggtcatggacgcgctacagctatgacgtggcgtcaaaccgcacccgcagcgaaacggccgttgccgactactccgttgacagcgtggtcaaaggcgtcgttgacgagatcaatcatgacgcacagtggaactggttcgtcagaggctgggcgtgcgcaacgggctcgcgcagctcgattcctgtggatgcgtacgtgcacggcggcgccttcattgcgggcgctcaggcaaacctggcgagcgagccgggtgtagccacggaatgcggtacgaacggggcaagctatcggttccagatccccttgaccgtggccaaccggcagcagctcggcggacgcacggttgcggtctacggcatctcaccgctgggaagcgcccacaaccgcctgctgtccaattccggtgtgcacgcaataccgagtgccaacgtcataggggacatcgccggcgtcatgcaggacgccggatggaactacacggtcgaaggttgggcctgctcggtcggcgtggacgcatcgatcgacgtgcatctctacgcgggtggagcggcgggtggtggcggtacctttgtggcggcggctcgcgcgaatcgcgcttctgatgcgaacgtggccaacgcctgccaggcgaaaggccgcgcgtactatttcagtatccccctggatgcgggcatgcgcgctgcccacggaggaaaaagcatccacatccatggcatctcgcctgcgggtggtcccaatctgaccatcaaccgctccggtgccttctccattccagccattgcaaggaccgcagatctcgtcaatgcatctgcgtcgccctcccacatcttcaatggtcagtcatcgactgtgacgttccagttccgcaacaccggcaatgtcatctggatgccaggcgagactcacatggtgctcaggacggtgaggaccagcgaagcgatcggtctttccaccgcggtcgcgccgggttcggtggctacgttcaccgtgaacgtagcaccggtcaacagcggcagcggcgtggctgggttcgagtacttggggcagatggcctccggcccgaatgcctgggggccccagggccaggtcatcgtgagggcagagaacgacaagggcagttgcaacccgaaattctgtgaagaaccgcgctaa

SEQ ID NO: 533960 - DNA, 330 bp, Stenotrophomonas maltophilia
atgtctaccctggtggaagaaggcgctgattctatgctgaagctggaaattgaatctttgaggttctattcaagactggacgaggacgcgttcttctccaggttgaaccagattccgggcgtgatgtctgttgaagggtttctcagaacgatcaatgtctctattgatccgtcggccgtggatgaggacggcatgagggagctgatctcgctgttccaacgttatggaatagccatgcgccagctgcgagaactggagacggaagcgttcagctcatggatgcggaacagatccgcctattggttcaagtccatgtatccggaccagtga

SEQ ID NO: 533961 - DNA, 450 bp, Stenotrophomonas maltophilia
atgaagaacatcagcgtgtttctcgcctccctgctggccctgtccagcgccgcctgtgcgtcaccgaaggtcgtcctggacaacgcccctgtatccctgccagccgacaagctgcaatggaaggacgtgcccggcacccagggcgcggtcagctacgccaacacccagggcgacatcctcagcaatggcgaagggttctactcggcgttcgtgcgcttcaaggcaggcatcgacaatggcttgcacacccatacccggacgctgccgacggtggtcctgtccggaacgttctacgcacgcatcaatggggtggaaaccctgtacccggccggttcgttctacaacctgccagccaacctggtacatgaaagtggttgcaaggccggcgaggattgcctgctgttccagtaccaggccaacaacttcgacctgaacccgaccaagaactga

SEQ ID NO: 533962 - DNA, 822 bp, Stenotrophomonas maltophilia
atgtatcgcatcacctctttgttgttcggcagtgttctggccatcgccctcgcatcgccggccacggccgcaccaccgccgcgccaggccccgcgcatcatcggcggtgccgccgccgaagccggccagtacccgttcatggtcagcctgcaggggctgttctacggcgagaccgaccatgaccgccatttctgcggcggcacgctgatctcaccttcgtgggtactcaccgcggcccattgcgtacagtccgcgcagccgatctcgctggcggtgctgggtggcgtcaccggattgtcgacggatgcggcgcgccgcccctccaacgtcaaggcgatccacgtgcacccggcgttcaacagcggcaattcgctggagcatgacgtggcgctgatccagctcagcgcaccgcttgccgacgcgcagccggtggcactgcggttgcgtccggatgccagctacctcaagccggggcgcgcgttcaccgtgatcggctgggggacgacggaaagcgggaccaacgactaccccacccagctgcagacggtgcaggtgccgtttgtgccctttgccgaatgccagcaggcctacgccggcgatctggcgcgcggcaaggtgatctgtgccgggcgtgagggcatggacagctgccagggcgactcgggtggccccttgctgctgcgcctgcgcgatggctggacccagttcggcatcgtcagctggggcgagggatgtgcgctggccggctatcccggcgtttatgcccgaatcgccgaaaaacatgccgtagatttcatcgaggcggtctggcagcgtgattga

SEQ ID NO: 533963 - DNA, 267 bp, Stenotrophomonas maltophilia
atgaacactccgacgacacagcccccgaatgaccccaaacgcctcgcatgggcctcgcttctgctgggcaactggctgctggggatcgttgcgatcgtgtacgcgaacaaggccgaagtgctccgcctgtctggccagattgatctcagcgtggccgccgcgcgcagatcccgtgcctgggcgtacgcctcatttgccctgctgtggatcccgttcgccatcatcgttgttgctggcgtgtacctgcactacacgggcgcgatgtag

SEQ ID NO: 533964 - DNA, 711 bp, Stenotrophomonas maltophilia
atgctcgtctcgacggccgccgcccatgcggcctccacctctaaggtttcgctgacccacgcggccgagaacgcctcgctgatcgagacccgacatgccactggcgagggcgctgccgtcacctcgatcaggacgcagtacttcgccaacgaggaaatgtcggtgagctgggacgaccagcaggtgctggtgctgtgcaaggaggcggcgtacctgaagattcctgctgccaaactggagggcagtgcgctgaccaccgagcagcggcagatgatcgtctatcaggcgctgatgtcgggcctgggggctgtggcaggcgtgatcgggccggcgggcgaggaggtggccgtggcagatgatggcagcgagacccgcagcgtcggtgaaagcagctgggcgtacggtgtcgagcgccatgaagtgaccacccagcgcttgccggatggcacgctgcgggtgcgcgcgcgcaagacggaaaccgtgaacaccacgccgccggccagccccgatgacatgttcagcaccgaggacgaccaggccgcgcggttgtccgaactggcgccggtgggcagctggaccgaggtgctgatccagggtggcccacgccaggcacaggtggacccggcgatgtcgttgaagggctggctgccgatggcggacgatcaggcggcgacggtggccgaggcgcgcaagctgcaccgctgcaagtaa

SEQ ID NO: 533965 - DNA, 1050 bp, Stenotrophomonas maltophilia
atgccacagaaaacaaagctggaaattctcgcagagatggtcacgggctactcggctgcccggcatgataagcagatgctgccgttcggtcatcccaagtttgcgtggcacgcacgcttccggaggctgaacccggcgtcatgggtggcccctgcggccattccgtacgttgctgccaccagtcttctggatgcctattggcaactgccgcgaaggccggatcttgccttcaactcgctctggtcggccaccaacaattcgtacaacgatctgtacctggccagcccgcagaacgctgcttcaaaaaaaatgacggacaagatgtccatcgacttctccctgaaggagatcgcggcgcggctgcacatgatggtgccgacctcatcgcctgcaggggcgcctgcgcaaggcatctcgatccgggatctgatcaagcggtacctggaaaacgcgcacgacagaaacttccacttcgttgcgcagtacatccttcgcggcatcgcggttgatgaccacaatacgaacaaggtgccgcccaaggcggctatcagggagatcttcgttcccgcgtcgtacgcgtcgttcaagaaggagttcggcagcatccacacccagatcaagaactcgctgggtgggaagtttgccaatctgtgcacgatcacggagtcggcctgtggcacggaactcaacttcggaatccaggacagcaagaaggcaagggggatcgtccatcagaccagtattctgctccggcaggaggcgttgaatcccagcatcaccaatggcggcgtggcaggaaccttcaaaagcgagcagcactggctgtcgttccttgtccggccgcttctctacgccagccgcaacaatgcggcacacggaaacgtcgcgtctcgactgaacagcctttcggcctctgccgactcggtcacggccgctacctggacgttcctgttctgctatctgtacttctcgttgattcttctttgtcagggaaagatcacgctggctgaccttgagcccttgtacgagaacgctgatctcatccaatga

SEQ ID NO: 533966 - DNA, 387 bp, Stenotrophomonas maltophilia
atggaaatccgtgttgccaggcagagcgacttcgaggccatgtgggccatcttcaaggccgcgatagccaccggggatacgctgccatttgcggagaccttcgaggctgagacgtttcggggccactggttcgagtcacagactccgtacgtggctgtgcaggacggccggatcgtcgggctgtacaagatcggggccaattttcccgatctgggcgcccacgtggccagcgcgacctatgtggtggacccgttggcacagggtcgcggagttggccgtggattggttgagcacagtctggcgcgcgccaggtcggatggatttctgttgcacgcttggagtttgaagaatcctatctcgttgattcgtaatggcagtgctctctaa

SEQ ID NO: 533967 - DNA, 1878 bp, Stenotrophomonas maltophilia
atgaccagtcgaatcggaagtcctgacacaccggccgacatcgaagttcgggcatgcctcagtatcgcccctccccggtcattcgtgatggttgccggcgcgggatcaggcaagaccacttcactcatcaaagccctagcccatctcggccagacccgtggtcccgccctccgtcgtgcgggacagcggattgcctgcattacatacaccgaagtcgctgtaggtgagatatccgaggatctgggtacctcgcgcctcttccacatctccactatccacagcttcctttggtccatcgccagtccattccaatcggatatcaatgcatgggtacgggatcgaatcaacgagaagattgcagagcgacgtgagcgtttcaacaagccaggaacgcgcgcaactaccaagatccgccttgagcaagagatggctgatctccgagcagagctcgagaaggttcacaacgtggagaagttcgactacgcgaccggaagcaagtacgccgaaggcctacttggccacgatgacgtactgaagttggcgcccgcacttattggctcttaccccctattgcgacgggtggtcgcagcgcaattccccttcatctttgttgatgaaagtcaggacaccaatccggaagtcgtcaaagcactgcagaccattgcggcgggaaatccctggctatgtctcggcttctttggggatccaatgcaacagatctacccagctggagctggggcaatcgccgaaatcgaaggctgggcggagattgaaaagccagagaatttccggtgccccagagcggttctcgacgtcatcaatgcagttcgagccgagggtgatggcttggaacagactcgaggaaggatgagagtcatcgatggggtagagcaaccggtcgtcgggacgtgcagtgttttcgttcttccttctgatggagatcgtacagctcaccttgcagccgtaagaaagtggatttcagagatgacaggcgacgctttgtggctgaacgatatgcgagagagcgatgtgcgcctacttgtgttggtgcaccgcatggcggcgacccgactcggcttcgcagagttgtatgcggcactccatgacagagcgccgctgaacctcagcgaaggcctgaacgatggaacggcttggccacttcgcccattcgtccaacacatccttccactggtcgcctccgaggtcgcagggaaacgctttgaagtcatttccattctccgcgagatcagcccgaagctcgaaccggccaagctgagcgggcagaacgcttcggaagtcttaggagaattgcaactggcagtccaaacgctcgtggaattgcttgccgaaggttcccaggcaacgattctccaggtgctaaggcatatacgggacagtgaattgatacgacttgatgatcgcttcgatgtccatctcggtgatgagccgggggacaatgaaagcagcgggtaccggaacgtccaagcgttcatttcctgcggagtacagaacctatggaactaccgacggtacctggcggaagagtcgccctttgcaactcatcatggtgtcaagggcgcgcagttcgaacgcgttctggttgtcattgacgacgaggaagctagctatcggcaatactcttacgggaagtatcttggatacacgaaattgtcgcaaactgacgatgagaacatcgccgccgggagcgaatctgtccttgatcgaacccgcagactcttctacgtctgctgctcacgcgcaacgaaagacctcgcggtggttgtcttcgcttcagatgttgaagccgcaaagcaagcgatcgaggccagggggctgtttccccgagaggtgattcgaggtagcgacgctctcgaatag

SEQ ID NO: 533968 - DNA, 2349 bp, Stenotrophomonas maltophilia
atgtacctaaagaagctggctgtgcgcaatttccggcggcttaagaacgttgtcattgacctcgcctcggatatctcgatcttcgtgggctccaacaatagcggtaagacgtccgtaggccatgctttggagctattcgctggccgcggccgcttcagtgttcatgacttcagctctgacctttggccgggcattgttgagtatggcgagggtgatggcctcgccgtagaaaatctgcctataatggagttggacatctggtttgaaatcggaaacgacgatgttcatcgcgtcatcgatttactgccaagtcttgtctgggaaggaagtctggtggggcttcgcgtcacttacgggcctatagatccggcggctacacatgcacgatatgcggcagcaaggcagcaggccctcgcggcagttccagatggggagaagtatgacccatctccacgcgaccttagagacttccttcgcaacaacctggccgaggagtatgagcttcggtactttgtactagatcatgccaagttcgatcttgcgatggtggctgtacctggatatgcaccttcaccgcttggcgggaaaggcggaagcggccgggaagtcctcaaaggccttctcaggatcgacttcctgaacgcccagcggcatctctctgatggccctggcagctctcgatctgaagaactctcaaaggtgctgagtcgcttctacggacgcaatcttgagaagaaaggagacgacatagaggcgctgacggcactcgctgcctccgagatttctctgaacaagcaccttgagcgcgtgttcgaacccacgctcaacagcctctccaagctgggatatccaggcctgacaaacccgcgaatgatgatccgctccgcgctggacccagcgcagatcatgagtggacgtgatggtgcactagtgcactatgcgcttggggctgatgacggaaatcctaatccgcccacactgccggatagatacaacggattgggcttcaagaatcttatcttcatggtcgtcgagcttctcgatctccatgcccaatggctcgcagtcgaagacgaacgacctccagtccatctaattttcatcgaagaacccgaggcgcatctccacgctcaactgcagcaggcctttattcgaaaggtgatggagatcctcgagctaagtaaggaagacaggaagcaccacaccagtcagattgtggttaccactcactctacgcatatcttgtatgaaagaggcttccgcccaatacgctacttccgtcgaagccgtgatcaacatgcggctacttctgaagtcctcaatctttccgtgttctatgaaggcgccgaaccggaagatcgcagtttcctagagcgctacctcaagcttgcgcattgcgatctcttctttgccgacggcgcagtacttgtagagggcaatgtggaaaggttgctcttgccacagatgattgagaaatctgcacctcggctgcagtcgacctacctcacggtactggagattggcggagcattcggccatcgattcaaatcactcattgacttccttggcctaaccactctcatcatcactgatcttgacagcgtctttgggccgattgttccggcagatgccgggattcctgccgctgcgccgccagcacgggatcccgatgttccagatggggccgttgcgcaggcgatggcagaagaggaagaggaagaggaagaggaagaggaagaggaagaggaagaggaagaggagcctcgaccggcagggaagccgggaaaagcttgtatcgccggccaggcagatgcgacaacctccaatcagactctgcttaagtggcttcccaaagcaaatacggtagcagacctttgggaagcaacgcccgagcaaaagacccaagagagaaacgcccacagcgatgctctggtacgggtggcttatcagtgcctggttgatgtcaactggggcgaggacgtgcagaagcttgcgggtcgcacgcttgaggaagctttcgctcttgagaacctcgagtggtctcaaagcaaggaccgcaagcctcttggccttcgcattgcaaggggctctgaaaaggatctaagtacacttgctggcctcattcacagacgcgttcagagcaagagctttagcaagacggacttcgcgcttggcttgttggcagaggagcctgctggctggtcagtaccggcgtacatcgctgaagggctggcctggctcgaacttgagcttgcacccccgccaggaccaggaccaaatgatgaggccccagttgagaatgaagtccaggcagcccccattcctgccgaagtggaggtgcagcaatga

SEQ ID NO: 533969 - DNA, 738 bp, Stenotrophomonas maltophilia
atgtggacgcggggacggaggcgcaggcctccgtccctttttcatgccgggggttttccacacaggccgtggagagcgatgggaatcaggtgtggacaagtggctgtgagtgttgccaggcaagtgcttggaagcgtggcgaatatttatccacgctgcgcggacaagccctgtagagccgagcccatgctcggatccggccggcatcagccgagcgtgggctcggctctacagcggcacacggggttttccacacaggccgtggaaagcggtgggggtttggtgtggacaagtcgctgcgaaccacgcattgcaatggtttcaaaggatggtgtttttttgtccaggcagaatccgggttttccacatgcgccgtggaaagcgatgggaaccaggtgtggacaagtggttgtgagtgttgccaggcaagtgtttgaacgcgtggcgaatatttatccacgctgcgcggacaagccctgtagagccgagcccatgctcggctccggccggcatcagccaagcatgggctcggttctacagcggcacacggggttttccacaccgggcgtggaaagtggtgggggtttggtgtggacaagtacctgcgagccttgcgccgcaggcgtttcagggcatggtcaatttttgaccacgcatgcagctgatgccggaaacgcgaacgccccgcgcaaggcggggcgtccggggccgatccgttgccgctggatcagacgttga

SEQ ID NO: 533970 - DNA, 231 bp, Stenotrophomonas maltophilia
atgtggttccagattgtgatgatggtggtgtcgctggtaatcagcttcgtgtttcgttcgaagcccgcgatacccaagccggccgcgctggaggacttcaacgttccgacggtcgaggatggccgcgagtgcgccatgatcttcggcacggtgtggattgatgaccccaatgtgctgttctacggcgatctgcgcaccacgccgatcaaggtcaagggtggcaagaagtga

SEQ ID NO: 533971 - DNA, 213 bp, Stenotrophomonas maltophilia
atgaccacccagaaatacgccatcaagaagccgggcctgacgctgtcgcgcaagcccattgccgccggcgaaacggtcgagattcccgccgacctggtgccctgggcagtcgagcgcggcttcatcgatgcccccgaggccgattccacccccaacacatcgcgcagggccggtggccaggcgcctactgccagcgcccaggaggcgaagtaa

SEQ ID NO: 533972 - DNA, 492 bp, Stenotrophomonas maltophilia
gtggccaagccccgcactgcgccgcccagcgcatccaagaccgtccaggacgacacgccggccgacgcgccagtcgtcacggaagagaagactacggacgcgccgcgggcgccggacggctcggtaccggagcaaggccgaggtgagctggagtccaccgcgtcggttgtctctgcagccgatggcgctgccgtcgaccagtcgcaggccgaccgtccggcagcggaccagagcgcggacgccgaagcgggtgtttcttcgcctgatgctgcgtctctcgacgctgccgcaacgaacgaccattcgaacgaatccgagctctccaacggcctctggctctccgcgtgtttcgaagtactcagcccgttcaagcacaacggcgtggtcgtcaagccgccggcgtggatccagatgacctgggaagaggcgcaggactatcaggatgccggcgtcctcggtgacgaaccggccaccccggaagagctggagtaa

SEQ ID NO: 533973 - DNA, 891 bp, Stenotrophomonas maltophilia
atgatgcgctcccccctgtttctcgctctcgcgttggccgttggtgccggcgcccccctgcttgctggcgatgccaatgcgcagaccgcgcgcgccgtgcgtgccactgcagagatgagcatggtcctttccggccgcatcgaggttacagcggagggcgcggtcagctcgctggtgctggatcagaaatcgatactggcgccgggcatcgcctccttcgtcgagggcaccattggcagctggcgcttcgagcccacgctgcgggatggcaacgcggtggcggtgcgtgcgccattgcgggtgcgcctgcggggcacgtcgaaggccgacggcggctacgaagtcagcatgaccagcgtcgacttcagtgagtacgatcccaaggccaccgattcggtgacccgggtgcagatgacgccgccgcgctatcccgaggaggtctatcggagtggtgggcagggtgaagtgctgctggtggtcaagatcgcgcgtgacggcacggtggccgatgtcgttgccgagcaggtgaacatgaccgtggtcgcacgcgagcgtacccttgccaagatgcgcgagatgctggccaaggccgccgtcagcagtgcccgcacgtggacgttcaacccacccaccaccggcgaagccagcacgcgcgacagctggacggtacacattccagtgaatttcgccctgggcgacgaccgcaatgccgggcgggagcgctatggccgctggcgcaccttcattccgggcccgcggcaggccgtgccgtggcgcaaggcggacccgatcgagcaggccggcagcgatctgctgcccgagggcggcatctacatggtcgacggcgccaagcgcggcctgcgcctgctgacttcgctggagcagggctga

SEQ ID NO: 533974 - DNA, 1539 bp, Stenotrophomonas maltophilia
atgatgaaaccccagttgctgtgttcactgctggtcgccctggcaccgttccacgcgatggccattgaggccaccggcgaggacacggcgcgttttgcccaagcgatggcccatggcctgcgaccaagcaccgccgtgctgggcgcagtgccaccacggtggtcgatcaccgagcgcctggcccactacaaggtgccgggggcggcggttgcagtggtccgcaacggccaggtggtgtatgccgcgggattcggcgttcgccaggccggcacgcacgacgcggtggatgccgacaccgtgttctcggtgggttcggtcagcaagatgggaacggcagccaccgccctgaaactggtggctgccggcaaggtctcactggaagaagacatcgatcctcggctgcgtcgctggcatctgcctgctgatgcgcagtggcagcaggcgccgatcaatctgcgcatgctgctctcgcacaccgccggcttgaatgtgcacggcttccaggactatcagcccgccgagcgtctgccgacgctgctgcagaccctggaaggacaaccgcccgcaaagaatgaagcgatccggctgatccacgcgccaggccagcaggtcgactactctggtggcggctacaccgtggtgcagctggcgatcgaagacctgaccggcgcccccttcgccgacgtcgcccgccgcgaggtgttcgcgccgctgggcatgtcgcgcagcacttaccagaaccccctgccagcccgctacggcaacgtcgcccatgcgcacgacagcaagggccaggcggaggccctgccgcgcggttggcagagttttcccgaacaggcggcgtcgggcctgtggaccagcgccaacgatatgggcttgttcgtcgcggccctgctgcgcagcatccgcacccagcaaggttggctaccgcaaccgctggccctgcagatggtcagcgaagtggcgccggccggccgcggcctgggcccggagctggccggtgccggcgccagccgccgcttcttccacaacggcagcaacgacagctatcacgccggcatcgaaggctatccggagagcggcgacgggttcgtcatcctgaccaacggcgacaacggctccgcattgcgcggggaaatccgcaacgccttgtccgatgcactcggccataacgccaagccgctcatccgcacgctggatccggcactgctggtggacagctacgcgcgcttcagcggccgcttcgtgctcgatgacactctgccgatggatgtgcgcagcagcctggccgactggttcgaggccaccaccctggacgtgcaggcggtcgacgctggcttgcagttgcgcctgcccgggcgtgacgcgccggtcgcgctgctgccgctgacgccggtccgcttcctggccggcagtgtaggggcggagctgctgttccaccgcggcggcgatggccgcgtccaggcgctgagcgtgatcgccgaaggcgcgcgtgcctactaccggcgcgtggacaccgcgccggcagcgggacactga

SEQ ID NO: 533975 - DNA, 1530 bp, Stenotrophomonas maltophilia
atgaacctcatcgacctggcgatggcgctgggcgttcgacagttgctgttgtccgcggttgtgctgctgccagcgctgtggctcgcacggcggccaaccctgagcaccgaacaacgctcctggctgctgaccgccgcgatggcgatcgccctgctgttgccgctcagtgccttcctgccagactggtcgaccacgctgcccacgcctgcgccgacggctccggcgcttcaccccatgcctggcgaaggggcaacgatggccgaggccgtctacgaagccggacgacaacccgacatctattacgtcgaactgccgaagacattgccgaccgtattggcggcgctttggctgctgggcacgctgtggctgggcatgcgcctgctcgatgcggtgctgcaggcacgccggttgctgcggttggcacaaccggcaaccgacgaactgcgcgcggcactggccggggtcgtacccgaccatgtgccgatcgccacctgcgccatcgatgggccgatggtcgtcggtctgtggcgcccaacgatcctgctgccgcgcccgctgctggcgcggctgggcaacagcgtgctgcgcgacatcgtccgccatgaggtcgcacacctgcaacgccgcgacctgtgggcaagcacagtgctgcgcgcaggggttgcactgttctggtggaatccgctcctgcacgttgcccaggcacgcctggcggtactgcgcgaaatggcctgcgatgcacgtgccgcgctgcaggcacgcgaaccgctggactatgcgggttcgctgctggccagtgtcgaacagctgcaggccctgcgcgaagaggcgccgacgctggcgctgggcatgttcggcgcgcgcagccagctggcgcagcgcatcgatcagctcgtcgagactgcaccaccggcaccgcggcggcgcagcctgctgatgctggggctgacgcttctgctgggctgcacggccaccgcggtggccgtctcaccacggctggcgccaccgtcggcgcccgcgtcctccgatacgcgcaccaacgatcttctgcgcgccgccagcacccatgacatcgcccaggtccacgcgttggctgcggcaggcatcgatctcgatgcgcgcgtgctcggcgatggcacggcactgatccaggccatccgcgctcgcgacctggcgatggtcgacgccctgctgcggctgggagccgaccccgatcgcgccgccctgggcgaaggcaacccgctgatcgtcgcctccgcgctgggtctgcaacccatcgtcgagcggctggtgcaggccggggccgacgtcaaccgggtggtgacctatgacgagacacccctgatcaatgcctcgcgcgaaggccacctggtcaccgtgcagtacctgctcgcgcagggcgccgacatcaatctgggcgtggaagccgacggctggctcggacgctggcgaacaccgctgaaccaggccggcaccaccgccgtgcgcgactacctgctggcgcagggcgcccgccgcgaacgacgctga

SEQ ID NO: 533976 - DNA, 438 bp, Stenotrophomonas maltophilia
atgaacacgattcccgatattgccgccatgcagctgctgctgcggcaaggacgttggcctgcggtactgtcgctggggctgctgctggtgggcgtgctgctgctcggcctcgagccgggtctggcgatgatcgccgctggcctggtgctgctcagtgtcggggcaggactcgcccaggcctaccacgcatggcgggtggcgctggacgccagcctgctgcagctgctgtgcgatgaagggctggacggtgaagccgctgcgcgccggatcgatcaactgctgcacgacagtggcctgcgccgcgcaccgcccgatgcgccgctgcgcggctgggacgcccgctgggccggcatgcgccggctgctgctgcgccagtatctgttgaccgccgtgcaggtcgcactgctgatgctggcggttgtgtggccgcagacgtga

SEQ ID NO: 533977 - DNA, 534 bp, Stenotrophomonas maltophilia
atgcgccgacgcctgtttgccccgatgctggccgtgttgctggccatggtcgtgtttcccgccgcagccggagaattgagtcccggcgattcggccgcattgcgccaggatgtgcaggcaatgctggcggcgttcgccaagggcgatgccgaactgatcatcgagcgcacccatcccagcctgaagcggctcgcaggtggcgatgaggtctatgccagttccacccgcgacaccatcaaggcgttgcgcgaagcgggcgtcgtcatcatcagcgacgaagcgggagtaccgggccgcacctatgcggccgatgacgaggaagtctgcttcgtaccgcggcagtcactgctgcgcgtgcgcgaaaccgctatccgcagcacctcgttcatggttgccgtgcgccaggtcggcacttcgcagtggcgctaccttgatggcgccgggctgatcgacaatcccgcgatgctccggcagctgttgccggcactggaaccgggcgtgatcctgcccaagggcggagtggaaacgctgtag

SEQ ID NO: 533978 - DNA, 183 bp, Stenotrophomonas maltophilia
atgaacatcttcggcagcctgttgttcctgcagggccacatcgccagcgccgagctggcgcggcagctggccgctctgcctgcaacgccggccacctgcactcccggtagtgccggccgccggccggcaacctccgaatgccgggaccacaaggctgccggccagcggccggcactcccctag

SEQ ID NO: 533979 - DNA, 168 bp, Stenotrophomonas maltophilia
atggagctggccccggacctttcaaggccggccccggaaaaaatttcgtcgcagcaaggcctgcacggcgcggccctgcatgaagacgttcagcccggtgaaacgcgtcgaatcgcgcgcctgcaccctcgacttttggtgatcagcgtcgcactgtcagatatctga

SEQ ID NO: 533980 - DNA, 243 bp, Stenotrophomonas maltophilia
atgtcccacacgctcatcgagctctacaccgccactcccgcctggaccgcactgccgcccgggcaacgcaccgctttcttcgaccgcatcggtgccggcatgcagcaattcgatccggcccgcatcgcggcggtggcaatgggccgcgctgccatcggctggcatcggtacttcaccaccacccacgcactgggtgcggacgatggcatggcgcagcacctgaccgatctggccgcgttgtag

SEQ ID NO: 533981 - DNA, 327 bp, Stenotrophomonas maltophilia
atgcgcgcagaagaggttgagcgcggctacgacggcatcgagtcgcgcgctagctactacgacaacagcggtgtggcccgatatcgcgcggaggcgcgggcggtggtggcctggcgcgatgctgtgagccagacgctggagctgcaggtgctggcgccgccggatggcatcgagacttgggagcaggtgcgcgctgttgctgcagtcggagacgttcgcctggccggagaaggcggagctgccgctggagacgggaagcccaaccgttgttctcttaggcggctgacgcagcagattctgtcgagtggtgtgcgttcggtttactag

SEQ ID NO: 533982 - DNA, 918 bp, Stenotrophomonas maltophilia
atgattttgcgacgagtacgtggaaagcgggcactggttcgatgcagcaggacgctgctggcactgacgctgggattggcggcgtcggcatgcacgaacgacaagcgcccctctgaagccacggatgcagccgctgccccccaggcaacggccatctcagccacagaaatcgcaggcaccaacaccgaaggcgggcgctctgtccccgccagttatgcaaagtactacagcgcaccacaggtgcagccgctgatcgccgaccttgagttcctgtccaagggcggcgacgcggatgcgagcttcatgctgagccggatctacgatgactgtgctgtgattcctgattccggatcgctggcgcagctcgatatcccgcaggccaggaagcgtgccatcgagcgtagcggtgcgtggttcaagcgccgttgcgagggcatgtccaccgacgtggttgccgccatccgcaacgtcaagcactaccaggcgctggcggtgaagcagggcaatcttgctgcgcagatcgaagcggccgcgcctggccttcatcgtgccgaccagaacctttccatcgacgatcacaagacgttcgtcgaagcggtgctgacccaggacgatggcgaggcctacatggcgctggcggccatgatgggagaaggcgcctccctgcgcatcgagcagatgaagccgtacaaggtgggaacggccgtagaagaagccgcatggatgctggcaggttgccgcaagggcgtgccctgtgatgcgcagtcgccgatgttgaatcgcctgtgccgttcgggcatgtgcggttacgactcggtcgaggcgctgtacagcaacgaagtgctggcgccggagcagatgcagcgggcccgcgagcgggccgacgagatcattgcgcaatcaagggcgatgaaatga

SEQ ID NO: 533983 - DNA, 387 bp, Stenotrophomonas maltophilia
atgaagggaaggaccctgcggaaggtgttgctggtggcggtgctggttccaggcgtcgccctggcattgaagggcaccaagatcatcaacggcggtgatgcgctttatcgcaatctcaacaacgtcaagaacgtcaatgtgtcggagatggtcgagatccggcaggcgggcatgttcgagatgatcggccagcaccggctcgcgcacggcctgggctcgatcaaggccggcgataccgtcaccttcatgtggcccgatgggtccattgaaaaggcggtcatcaacgatccgcgttcaaccgtgggtgcggtcatcattgccggcagccagatgaccaagaagcaggtcacgctgcgctgcggttcgtgccatacgcagtaccggtag

SEQ ID NO: 533984 - DNA, 234 bp, Stenotrophomonas maltophilia
atggctgacgaaccgctcgtcttcattcggatgccggaggtccggcgccgcactggcatgagcaagacgaccatctacaagcggatccatgagcgaacattcccggctgcggaccccctcggcgagggtatggtcgcgtgggtcgaagcggaggtagacgcctggcaggcccagcgcctggcagaacgagccccaccggacccggaggaatcgaaccggcaaaaggccgcgtag

SEQ ID NO: 533985 - DNA, 309 bp, Stenotrophomonas maltophilia
atgacccaggaacatatcagccacccggaggggtttccgaactgtgccgccggccaccgcgcgcaccacatccacgacaagcgctgcgtatccgccggcggcggccacctggtcgagtgcgcctgcaggtcgaccagcaagcatgccgatcccgaaaaggccatcgcggcgtgggcccgactcaaccggccggcccgcagcgcgcggtcgaccacagcgccggcagcggctgacaacatgctgccgttccaactgggcctggccgagcgcaaacccaagaccgatcgcgcggcgctggctgcaaactga

SEQ ID NO: 533986 - DNA, 585 bp, Stenotrophomonas maltophilia
atgacggcgccactgcccgtatgcccgaccaccgttgtcgaggccaccaaggcttcatctcccgtcgccgcggccatctccgccatgcggcgcgtcgatcccgccggcggcggcgtggccctcggccaggtgcgcgcgtgggccgacaccctgatggccgcgctctactcggcgcagcccgtgcgctgggagaatcgccacaaggatgaccacacatccgggtgctggatgcaggccgatgccggccatgtctacggtggccacgagggcggcctcgttgtccgcgccctgttcgaaaccccgcgcgtgatccagcccgagaagatccacagcctccagcgccgagtttgcgtccgctgcggagaaagtggggactgggccggcccggactgctccccgccggacaagaaggccgacccgcgcaccttactgccattcgaccccagctggctcatccagccacttcagtggctcagggacgcgcgggccaatctcaatgcctacgacaggcgccatcgcaccgagcaagccgcctaccttctggagaagctcgaagcccatatcgaggagtgcaagaagccatga

SEQ ID NO: 533987 - DNA, 975 bp, Stenotrophomonas maltophilia
atggaaggtggtggcggcaatgacgcggcatccctggcacgcatccgcgcgcgctgggcgcctcggaacgcaaaccagaagccgtgcccttgcctacgtgcacggcactccctgatgaagactcgcgcggtgcgcttggcttgggcggcggccggcagttggtcagccatggcagttccccgcacgccgtggcatggcagaatgccggcgagtccacagggggatcaaggaatgagctggtggaatgcctttagtacttgctggccaccgggccaggaagactgcgtcgtgtggtgggacgcttgggctgtcggaatcgcagttctggcattggtggtcaccattctttccatcgttgttgctttctggggagtcctggcaacggtcgtgtctagcatcgcggtgtggcgactgggacagagggccaacagccttgcggagagcggcgcagagcaggtgcggcaggagcgtgaggtcctggccgaagtacaagcagccgaggctgaaaggcaatcgcagatcgtgctgtcctatatagccgccgaactcacggcgatttacccgtctgtcgccgccctctcggataagttgaacagcgacaaagcaatggaactgtttgtcttccagcaaatttggagaaagatctgggctgaggatcttgtacagatcaagacgggcaggatggaaagcacgctgcagtcgctccaccgtcttccggccaatttgggtgttcggataggtcgaatactgggcgatgtgcagacgctcagggatatcttcgtggggacggcgtcgaagagccttgacgaggaaacggatccggatttcagagcgacgagggaaagctggctgcgcacgatgtacttgactgcgaaggtgacggccaccagggcggcagcggacatcatgcacagctcgcttgaggcgagccttgtggccgccaggattccggacgcgccccccagaacgggatag

SEQ ID NO: 533988 - DNA, 960 bp, Stenotrophomonas maltophilia
atgcgagccagctccagcattgccagcagcatgtatgtcgaggcctgccacccagcagtagccggccagggtgaccatgacgccaccgacctcctgggccggctcggcgaccgcgtgagcgaacacgtattcgacccgggtggacgcgcgcgcgctgtcgtagccgtgggcctgctgcagctccagcacctcttccagcaggcggtcgccacgctcggtcatgttgctgtagagcgacggcagaaagcactggcccatccgttccgccacaccggcctggaaggccccccaccggttggcgagcggccagggcggtgccagcgcattccctcatctgctcgacggtgtacatcggctcgcttccatcgctgtaggtgttgtagtccgtgcggggcatcggcggaggcacagctgcggccggagagtgctcagcggaggcgcgagcagctgcgccaggcggttgtctccctggtcgcgcccgagttcacccgccagatgcacgcgcttgccgatgcccggactgattacgggatcgccaaagccagcatgggctggtgcggcgggaccgttacggaggcgcagcgtcgggagctgcgccgtacagagaaggccctggaggatgcgcgcgctaccgcttggccgaacaaaacgatggagcagctgggagtattggccggggcagtgatcgatgaaatggtcagctcgcgcgagtgctttcactgtggcgggaagaagattctgttggacccacgggtagcgggtgttgtgacctgcgcggagtgcggtggaagcggccatgagccactgagcggccgcaagcacgctgccgcgatcggagccgactggtctgcatacagccgattctggcgcccagtgtacaaatggatgctgtgcggctttcgtgccgccgaatcgcgcgctgcaaggaggttcaacagggcacttcccaaggctgcatag

SEQ ID NO: 533989 - DNA, 744 bp, Stenotrophomonas maltophilia
atggtccaaaagtcctttgatgtgcgaggcgaggtgcccaagcagtccaagaccgccactagggtcggggttgttcttactattgcgtatgtgtgctgcatgggggcctacgtatggtgtgagtgggatcatctactgatgatgaagcccagcgagttcggtgattttatggcgggagcatttggcccgttggcattgttctggcttgtgtgcggctacttccagcagggtgcggaactccgtcagaataccgacgcgcttaagctccaatcggaggctctagagaggcaggtggaggagctggaaatgtcagtccagcatcaagccgagcttgcggcagcatctcgagatgctctggaattctcgcttagggagagcgccgttcgcgccgagcaagagatggaaatgcacactccccattttgccgcgcacagcttcgaatcctatggcgagagcgcgccagggctcctccacgtccatctgaagaatgacggcgcaaatgcctccattgttagtatcgaatccaatgagtgctatctaacgttgggaaaacagaacttccttggtacgggcgattcaatgagtatgctggccatgaagccaattgggtttggttggccgccagaggtgaagatcactgtaacctttagaaatgcactcaatcgtagagggcaagcggtgatgacattccagcgggacggggagcggcggcagtacttgagtccagttctaactgtgaattga

SEQ ID NO: 533990 - DNA, 129 bp, Stenotrophomonas maltophilia
atgactgcgaccgggcgcgcgtcgatacgcatgcggtggtggctgcgttgctacctcgcagcagtgatgtggttcgcccgggtgggcaacgggatcgaagtgatggtggtggacgtgaccggcctgtag

SEQ ID NO: 533991 - DNA, 492 bp, Stenotrophomonas maltophilia
gtgagtatggatgacactgttgcaccaaattctggagcatcgaagaggaaacgcacccgtttgctgctggctggaatcgtggtggcagtggcggggcttgcgatcgcggccagcgctgggaagtactactgtcccgagtgcacgttcaatgagcctgctgcatttggcgacaccgaggtgtacatacgcagcgaagtcaacaagcatgtcaactcctgggttgacagcaagggaaaccccctggatgtaaccatctgcaatggatcgcagtgcgccacctatgtatacgtaaaacttggctcagtgtggcttctcaagaagatagagaacagcaactggaagggcgatggagttggtggtggtggcggtggtgggggggattttgccggaatcggtggaggtggcggctggtgggatggtggcactggcggtggcgatcccttcagtggcagcggaaccgttgtcgtctcagatcccaccatggtcccgtag

SEQ ID NO: 533992 - DNA, 780 bp, Stenotrophomonas maltophilia
atggggcgcaagactattgcgatcgtctctatcactacggttgcaatgttgggggctgcttgctttttcatggcgcagcatcaccccgaaccgcacccagctacggctaacgaattagccaactcttcccagccaaatgagcacgttgctcggggaaactctggcaggccagccaccattcgcccctcgacgagtgctactccaaaaggtagcgacttcaatccttccaacgcagatgccgcggcagcgtacgagctggtcgaaatcaacctgcgttgtcagattgatcgcgaggcctcggcagtgggagggcatgttcggagcacaactgacgagctttgcaaggatctgtcgcttgagccactgagtcgtgaagaggtgttcaaggcgatcacgtatgccgctgaacatggaaacacccgcgctcagctcgattactcgctttacgcttcaagaatttttgaagacgagcaattctccttggatccagatctaatccgtgaatacaaggaaaacacagttaggttcctggagtccgcaggaagggccggtgaatcacaggcctatgcccgactgagtgacatatacaagaacggtgcactggcctcgaaagatcaggtgatggcctatgcatacgcggaagcatactttcgcacagcgtcgagccgctatggggcgtcattcttgaacaattccaagtctggcttggacggcgcacagttgcgccgaggcaaggaagttgctgatcaaatcctcaacgaaaggagtgcctcaaagtga

SEQ ID NO: 533993 - DNA, 972 bp, Stenotrophomonas maltophilia
atggcatcaaagaacacgctgcgtgaattgatcagagaagacatcgatgcgctcgcaaggaagcactcggaccttgtggatgattttcagaagcgccgtccagcaatggttggatggtacgaagatgacgagccccgccgccgcggctacgggtttgcatcagccgacttgacgatcagcttctctacatcaggcaacggccctcagcaggccatccacgaatcgttcaaggtgctggatctgtcactctgtcaagccatagagctggcaagtgggaaatccgcgcctttgcaagtcaagcaaaaagccgatgtggttcgtaagctagacgcctcttcgctcatggagcccttcaagggaagagactggttgatgcctcgcctgctttcagtctatgagtacgttggccgcatccgaggaagcgctcagcatggaggcgagtttgagtgcagcaacggccggtacaccgtccatatcaccgggcgaaagaatggtgacgtcaaggaatcaatctcaatcagcttcgacgagatcgctctgttccagagactagcgctttgtatcggcatggcctgcattgccccctgcctgatcgatgagctttgggagaagcacgtcaagcacctcctgggccggctgttcaacctgcaccagatccgagccgatccacagatgctgcccgagcgaggccgcgtcgatctccgattgaatagccaactggaaacgcccttcgactacccgcagctgaaaggtgattttgactatccgtcgtcatacgagatctacaaagagctggtgctcgacgtactgttcatcagtgaggacaggaactactacctggttccggccagagaggtaagggcgcttccttcgagcattaccgagcaatccctgatggagttcaagtgcgaatctgcacctgatttcatctcactgaagatcaaccaggaagtgccggccgagggtggttga

SEQ ID NO: 533994 - DNA, 1221 bp, Stenotrophomonas maltophilia
gtgctcgatcgctggatcgtctcgccacccgactccatacggcgaatccccatcgcgctgacgcccttcggcacacttctctactaccgaaagctgacggaaaccgacgaggacgtggcctacatcgatcccgtgtcaaagaagacgggtgagctggcgtggagtctggatgacttcttcaacacattcctttgcgagcaggatgcactcgaatcgcttatttcaccggcgtgggtccggtccgcgagagaagcgagcgatgcactcgcccctggcgaagtctacgaagtcgatcagatgctgctttccatgcagatgctacggatcgcgaaagtcgatgcgctcgacatgcatcgccgccttcgcgatgccattgattttcccaatccgaaggccgacgagcccatgacagtattcaacgcgctgccggtcgagcatcgcgccatgttcgagggcattgcaacgggcccaggactcgccggcctgtacctgtcctcctacatcgacgggcatcggctgttggcgctgcagccgagcggccagtaccgcctgctgttctggcgcattcatcacaagacgttcgagcgcaccgagatgcgcgtttacggcggctcctacgagatctccagcaattctgagggggatgacatcgtcgcgctcgacgtcaccctgcgggaagattcgctaggcagcgacgccaacgatgaagaactggtggcgatgcattcagataacacgaccttcctgctgcgtgccgacgagttggaggacatggcaaccgccatcggcggtcgtggcgtgatagggcgaagcgaacactactttcgccgcgtcacgttggacgcgccatttgtagaggagcccagcgatggccgcgcagcaccatcattcacggatctgccacatgcgctacaagcattgatccatgttgaacctctccttgcgaccatcactcacgttgacgatccagatctcgacgaagagcatgaaggccagggcgccgtcatgtgcacgctcgatctgggtgaggacgacgggttgcgcatgaacatgccgctctattcgcctgagaatacccgtcgccaactcaagggatgggtttgggacatggcaccgcacgcctgcaaggccggcatcaggtatcggcgcggagacgacggtgtcattgaatatggacccgtggtaggcgacgtgttgactacccgtgctccggattcctag

SEQ ID NO: 533995 - DNA, 216 bp, Stenotrophomonas maltophilia
atgaccaagatcgacgccgcgtggctaaaagccttcgacgaggagctactgcatctgttcgctattgaccatagtgacgccggcatggatagggacctgctacgccgctacgcggacttgccgccgcgcgaagctgcgctggcgttcggcagcgattacgacctggagcgcgacgatgccttgtggccacggccgggcgcagcgccgaaacgttag

SEQ ID NO: 533996 - DNA, 3690 bp, Stenotrophomonas maltophilia
atgagcaaggatgccgggggcgcatcgttcatggaacgcttggtcgatctcatcacccagcgccgcgagcgccgcgcggtggttctgctgcgatggcttcactcctggatctctaagcctcgtgcgctgcctaagccagcgttcgagccgctatcgccggttgatgtgaccgatgacaagatcgcggtctatgagtcggaactaatcaatgcactccgtacccctgaagtgcgcaatatcgcgatcacaggtggctacggtgcaggaaagagtagtcttatcaagagctttgtaagaaggcatcctgagtaccgttgtgccttcgtctctttggcggcctttgagggtgaggcgccacttccagagcggagcgacgacgagaagaatgcagcacaagatgccatcgagggtacgatagttcagcagcttctttactcagtgcaagcgcgaaatgtaccggggacgaggctgagaaggataacttatgcggccaagagcaaggtcgccatggtggcgctgggggccttcgtagcagggctctcttatctgagattgatgcctgcatggccaagactcctcccaaatctctccagcgagattcaatggattccagctgtcgtcgctaagctagctcttgcgataggagtgatcgcggggatctactggatcttccgagtcctttccaatctgaggctgcaagaagttagctttaaaggagttaagtgggatgggggctcatccgtctcggtgcttcacaagcatgtcgatgagttgattcatctatttgaaatggttcctacggatattgtgtttgtggaggacctcgatcgattcaaggataggtctccgtttattcggctcagggaaataaacttcattctcaactcgtcagtcgggattcgccatccagtcaggttcgtctacgcactcaatgatgaattgtttggcagtgacgacaaatctaagttctttgatatagcgattcccgttgttccaatcatcaattccgacaacacccgggacatgtttgtgtctctgcttgagcgtagagtgcctggtatctcgagcaacgacagagttgctcggttggtagaaacggtcgcatatcatgtcggtgatctcaggcagatcaagcaaatggtcaatgagttcgatctttatcgtgcggtactgaaagggggtaatactggggacgtaagtaaagagctttcaatggtagctattcgatgcatctatccccaggagtacgccgcactcctgcgaggtgcggggagcatcaggtacgccatttcaatgtttgcagggtggcagagggatgagctcgcgaagtgcttggaggaggagcgcgctctgatccgaatagaggcgagacgtgacatagaagttctcaaagacgccggcgagatcatggcgttaatctggtcgaagtatgaggacaaggcgagtagcgaaagcataagctctatcagttttgacgggggcggcagatatagcaagcaacaattcatggtggctctcgataaaattgacgaaatttctgccgcaaaacgagtgcttctctataggaatggaagcttcgttggcgaatcgacagtgcatgagatcattctgagcgggagtccatctattcgagatcgcttggcattggcgatgcgacccgtcgaccccgatcgagaagagatggaccgcctcacctcgcgtatagaagagctgcgtgctatgtctctccatgatgccttgaatgacgcatcattcatgcacaatgtaagtgagtactgcaaggaaaatggacttcacctcattcctttcatgatgaggaatggttttctcggtctggactacgctgattacatcggatatttctatcctgggtcaattagccaagacgacaaggctgctctcttggatctgcggtctggcaaactgctcgatgttggtcacaagttcacgtcgccctctctgatcctcaagaagctggcaatcaaagagttagaaggcggcgttggaatggtctcatcccttgtctgtgagatcattcgccaggtcccgggcgaggactcacttcgcgcaaggaggatagaggcaattctatccgcatcagagacgcactttgatcggatggatgaggctttcagcttggttcatcagagcgggctaatcagagagctggttactgagacagccgagtcacggttgcccgatctcctcagtctcgccgaaaagggcacctcttgttcacagcctgggttgaggcacgcaattgcaacggcaattggttcctcgaccagcccgtcgatggccggaacattaggagaccgcgtggccattctgctgtcggggctctccaatctacaggaagtaatggctgccgccgagggaagttcgctgggtggctggtaccgtattcaaggcgcgagaatgcggcgaatatcaaatgacgttgacgcagctgacgtgcaggcggcgcttcggcttcgcgcgctgcaggtgaccaccagcaacgtcatgagtgttgcgaaatgccttgcgggtagggagattgagagtgccaagtattcggagctcatgaggctaggcaatgctgatgttctgtcattcgtccactcagactgggtcggatacttgcgagaaacatatgagctgagtgctgatgcagaggagtcagaagacgttcttatcgagatgctccgcgaagcgtccgatggcgctgtccatgagttcattatcaggaaagttgtgtccaagatcagtgatttggattcgctgccgaagcaactctggtcgctcgcttttgatcatttggagatcgttgcgagctcagacaacctcatgcgtctggctgttctggacgagatcgatgatgcagagaggatccgcatggcaggattacttcttggtcggatggaggccattgatcaactctcatcgtcattggcggagggtgcaactgattccctttgcgtaatgctcgcgaagctggccgtcgagcacgctgacgcggtagccagaattctcatagagctcaacttgttcgattcgttgttcaatataggtgatgaaacggagtctctcctaattgccctcgtgaaagcagggatgccgttgacatcctcgactttcaaggctgcttccattgtttcggacgacgtggctatctatctcgcagtttcacggtttgatgaattcctggagtacgtgactcatacggatccaggtgcattcatcatggagcgggtcatgaattcgcaacttatctctatccatgagcgacgagagctgttttcggtgctcgatttcgagcgaactgctatatcccgtgaactggcggatgcttgtattgagactctcttggcggttagggcggcggatgagatgaagcttctttatgagcgaaagagaatcaatgaaattttcagatttgtcgaggggcaggatgcgatcgttgagctcctttcgtcggtgctgcttgccgcgccttggcaggatatggtgcctcagatctcgcgtttgcagggctctggattcgcgtcgcttcttgaggctccgcgacgaatcgaagttgaaagcacaaggtcaaatttgcggcttctagagacccttcgaatcagaggtatcgtcggaagcctcaatgaaaaaggcgggaatacctggtcgagagtgaggaagtcccaaataaagtttgttccctga

SEQ ID NO: 533997 - DNA, 1032 bp, Stenotrophomonas maltophilia
gtgggagcaggaagctcggctattgcggtgctggtcctagtgatcagcggttacgttttcaacctcatctttcatcccgcgcgttacttcgcaggccgggccgaaggtcagaaattgttcttcatgtcggcgggttccggcatcctgatcggaacagtggtgttcctcgccgtttctgggcttaagccttgccttgctcccgattcctggccgctgcagtttgcccagttcgtcaatcgatcaatccccatcccctatgcatttaggctaattcttacgctgactgcgtcagtggctcttccttcgttccttaacctgttttccgtacgatttatcggtggcgcaaaggaacaaaagcagttgctaaaagggacagctcgtacccgtgcacagcgcgtgtatgaccgcctgaccgattccaacggcagtccaatggctcaactatttcggcgggccgcggacaggcagagtctagtcatgctgacgctcaagtcgaggaagatctactgtgggcgcatctttgaagtgccgcccaatattgacgcttcagatgcttgtatcgagatacttccgtcgttctctgcttaccgtgataaagatagcttgagaatgggtgcagaacgaacggattatccagtaatcgagctctggatcgctaggcaacggttgtacacgctaagtcaaaacattgatgctcttgatcgcaatagagctggattgcaacagcgggtagtggctgcaggtctgccagcggggcttgcagaaaaatttatgcgccgaacgcggaggctcattgaggcgcagcgcaaagaagcgcttgatgtggtgacgaagtttcaggggaagagggagattgatgtctctgactggatcaaggtcatagccatcaaagaaatagaatctgcttccttctatgatcctgatgcatatacggcttggttttccaaagtgcaggaggcgtcgacgaacgagtgcgatgcaaatgtgtcgagcgcgatagtaatggcggggcccgcggcgggggctccctaa

SEQ ID NO: 533998 - DNA, 198 bp, Stenotrophomonas maltophilia
atgtcgaccagtacgcggaagatcaagggcgatatccggaatttcgctgacaaggtgatgcgcgaacttcaggaacgccagacgtcccagagcttcaacggtgccctcaaggtccattacgaccgcgttgtggtcaacgagatggatggaaagcgagccatcaacaagctgaagcagagattggctcagcagaagtag

SEQ ID NO: 533999 - DNA, 780 bp, Stenotrophomonas maltophilia
atgaaccgcctgttccatcgcgtcgtcgcagccgggctgctggccctgctgccgcagtttccagccacagccctcagtaaaaggctccctcccctggtgcacagccagcaggtcgtggtggtggtcaccgacagctgggatgccagccaaggcaagctgcaggcctacacccgggacaccaaggggtggcagccgcacggcccggcgttcgacgtggcgatcggacgcgctggcagcgcctgggggctggggctgaccggcatgccggcgggcggtccgcagaagcgcgaaggcgatggccgcagcccagccggcgtcttcgcgatcggcagcgcgttcggctacgcaggcaaggccaccaccggtctgacctaccagcagatgcagcccacacactactgcatggacgtgccggcctcgccgcagtacaaccagattgtcgacgcacgtgaggtcggcgctgaggcagtgaagggctccactgaacccatgcggctggacctgcacaacaagggggatgtgcgctaccggcagggctttgtgatcgcccacaacgccttcaacgatccgggctatggcagttgcatcttcgcccatctgtggcgtcaacccggtgaggccaccgccggctgtaccgccatgaccgccgctcacatgcgcaccctgctggcctggctgagcgatgaagcacagccgcggttcgtgctgctgccgcgcgctcagtaccacgagtatcagggaccgtgggaactccctgaactgacggaagcactgcgttga

SEQ ID NO: 534000 - DNA, 810 bp, Stenotrophomonas maltophilia
atgcattcgatcttccgctggaccaccgcgctgctgctggcgctgggcatggcgttcggtgcgcatgccaacgacactgccgcgcagatccgccagcacggcgccgagcatcgcctgctggtactgggcgaattccacggcacccgcgaggtaccactgctggtgcgccagctggtggacgactacagccgcgacggtaccccggtgctgctggcgctggaactgccccgtgctgagaaccccacgctgcacgactatctggattccgatggcgggacggcggcacgccaacgcctgcacgaccgtgcgttctggaccgtgcgcgatgaccagcacgatggccgccgcagccgcgacatgctggcgatgatcgaagcactgcgggtgctcaaggttcagggccgtgcgatcgaggtggtgggctacgacgtgaaccgcagcgacggcggcaaccaggcgcgcgacgagggcatggcggtggaggtgcgacggctttaccaggggatgccggacacggcgcgcctggtggtgctcgctggcaacgtccacgcgatgctgcaacggcccgaaggcgcgccgccggaaatgcagatgcagccgatggcctcgctgctgcaggatctggatctgtacagcgtgcgcctggaggcgctgcgcgggcagttctgggcctgcctggaccgttgcaaggcgctgccgctgcgcgatcaggctgcacgcgcgccgcaggtggataccgaagccggccggcagtacgacctgtgggtgtggatgccggagctgagtgtcggcaccctgattgatccgtga

SEQ ID NO: 534001 - DNA, 279 bp, Stenotrophomonas maltophilia
atgcataacgagagcccgctgcaaacctgtagagccgagccatactcggctgacgagaagcagccgaccagcggtcggctctacaacagcgaaaagcagccgagcatggctcggctctacaacagcgatgaacagccgaccagcggtcggctctaccagggcgagagcaacggcatcgaacagcaacgccaacgcgcccggcgcaccgccgcctgggtcggcgcgatcgcggtgctggtctacgttggcttcattctcagcggagtgatcggccgatga

SEQ ID NO: 534002 - DNA, 1620 bp, Stenotrophomonas maltophilia
atgggtgattcgcgtgccgatcttcccaaccaggccgcgcccgtttccctgcaacagcttcgcgaagcgcttgccttcatcagcgaccagtacaagagcgccgtcgacggcagcaagaacgttttcgtatggctgtgggagtcgatccagggtgatttcaaccaggaccgcaccgcaggacagatcgtgttcgacacggccatttccatggtgccgggtgtggaccaggtctgtgatgtccgcgacatcattgccaactgcaagcagatcaacgatgacaagagcaatacctgggcatggattggcctggttctgactctggtcggcctgattcccaccctcggttccctgctgaagggtgtgctgaagatcttcttcctcttcatccgccgcttcggcctgaaccacctcgtccgcgccgtcgatgaggccatgggctgggtcattaccctcctgcgccgacgtgaggttgccaaggactggaaagccctgcgctgggaccgcgtgttccatgaactggcgaagcagacccgcatcgtgcgtggacgggtgacccaggcacagctgttgaaagcctttgatcgtgccgtgctgctgatgcgcaacctgctgggcaaggtcgccgatatcccgctggtgggaagccgcgcgcaggagaccatcgacctcgtggttggcatccggaagatcgcagacaagtacatcggcaaggtactggcgcccgtgcagcgcattcttgacacgatcatcaagcggcttgagttcgaggacatggtgcagcggcgcggcatcgtcaatacgggcaacttccatttcagtgggacgctgcccgaagcacatgccgtgacgctgatgcggcgggttgatccaccgccgtcgtggcttgggaagggcagaccgacaaagaacaagccgctggatccctccgactatcgtccacatgtcgatgacatggcgaagaaggacttcccgaagctgaccgatgaccagatcaagagcttcgcccaaggcatgcgtgccgatacgatcaaggggccagcgaagctctatcgcgtggtttcgccttcaaactcaggggccggcgccgactggatgacggaagaggtcttcaacacgatcatgaaatcgcccgaccccaaagccaattggcgaaagcatcttgcggtctggcctgattggaaccccaacgggcagttcgtaatctatgagctcaaagcgggcgaaaaactgaatgtgtggcgagggcctgcatctgtacagacaaaagacactttgccggatcaccaccttgaaggcggctatgaacagatcaagtttgatgctgccctcgaatacgatgccgccgggaagccggggaagaaagtcctgggtgacagtcaggagtactactccgtcgatgaagcgaccggtgccatgaccagaagcagcatgacctatgagaagtggaaagacttgcccgcgcatgagcaggtaaagcatgtcagtctccggacaaagatcaaaaatccgcacattcttggccccgttgataccggatggggcaccaccgacttcggcagccagatgaacgacgtgagactggggttgccaaacatttctggccagaagctcaatcgctga

SEQ ID NO: 534003 - DNA, 1110 bp, Stenotrophomonas maltophilia
atgaaaattcactatccggaactcaacccgtggcacaagcggcaagccgcgctcatccatcatttcacctcgatggagtacctcaaagacctgctaccacaaatcgatagcctgttggccctgactgaccagatgcttgccgagcgctcgcatctggatgcggcaggcagggcgttggcggggtggagctcacaggacacggcgtcgcacttttcgacatatgcctatcctgccctgatggaattccggcaggcggtcgtcgaatgcatcgccctgcgctcaattgagcgctaccgtcgggctggcgagcaccaatgcgcaaggatgttggaagagtacgcccacctgatggcctgggcgacgccgcagcaggaagcaatgttccgagataccacagagcgggtgttcaggtacgcctgggagatttccggaatagttgcacgcccccccgtcaagaacgacttctcattctggttgctttggaacaagggagtgatcaactcacatcgaatccccaagttccgggtccgcaccgacgttatcgtgcggaccaatcaagttcctccacgtaccggcatctacgttgcaaaagatgatcccatggccacgctccagtttgcatggaccggtggatacggagagctgtgcccagccgtgaccctcaatgatgttggaagaacggttctgcagcagttcggccgcgagcgactgtggggcgataccgaagggctgtatcgcttcctcgatgcaaaccggcacctggatccctatggctggccctacatccaggccgagctggccaaactggctccgtcagtgatcgcaggtgtggccttcgatgatcaggactgcgaatggtacttcgtcgaacgcgttgccgatgaattcgaggatatcgacggcagctacaccggtacggattggaatgatcgccggccggatcgtgtcgcagccggcaagccagtgccctttgatggctggtggtacacccctgcccaaggcagcaggcgctacttcaggcaaggcgacgtgttccccagcatcaacagcgattggggtgacacgttctggatctgggcgccagaccagacgccaccgacgatgggttga

SEQ ID NO: 534004 - DNA, 1095 bp, Stenotrophomonas maltophilia
atggaacttaatccctggcacaagcggcaagccgcactcatccatcatttcacctcgatggagtacctcaaagacctgctgccacaagtcgatagcctgttggccctgaccgacaagatgcttgccgagcgctcgcatctggatactgcaggcagggtgctggcgggttggagctcgcagagcacggcgtcgcacttttcgacatatgcctatccagccctgatggaattccggaaagctgtcgtggaatgcatcgccctgcgctcaatcgaacgttatcgtcgggctggcgagcaccaatgcgaacgcatgctggaggagtacgcccacctgatggcctgggcgacgccacagcaggaagcaatgttccgagataccacagagcgggtattcaggtacgcctgggagctttccggaatagttgcacgccccccggtcaagaacgacttctcattctggttgctttggaacaagggagtgatcaactcacatcgaatccccaagttccgggtccacaccgacattgtcgtgcggaccaatcaagttcctccacgcactggaatctacgtagccaaggacgatcccatggcctcacttcagtttgcatggaccggtggatacggagagctgtgcccagccatcaccctcaatgaagttggaagaaccgttctgcggcagttcggtcgagagcgactgtggggcgatgtggagggcctgtaccgattcctcgatgcaaaccggcatctggatgcgtacggctggtctgacatccatgcagatattgctctggtggcaccgtcagtgatcgccagtgcgtccttcgaacagcaggaccgcgaatggtacttcgtcgaacgcgttgccgatgaattcgaggacatcgacggcagctacaccggtacggactggaaggatcgccgaccggaccgcgtcgcagctggcaagccagtgcccatcgatggctggtggtacacccctgcccaaggcagcagacgctacttcaagcaaggcgatgcgttccccagcatcaacagcgactggggtgacacgttctggatctgggcgccagaccagacgccactgacgatgggttga

SEQ ID NO: 534005 - DNA, 270 bp, Stenotrophomonas maltophilia
atgcaccacccctccgcccccgcccgccatgacgccattgcccttcaggccggcatgctgggcagcctgctcggcgtggcgctgttcaaagccatcgcgctgtcggcgctggccagtggctcggtgatggtgatcgggttgtggctgctggcctgcgccctgttgggtgcctgggccctggcggcgtgcctggcctgcctcgcgctgagccgccgtgtgttcgtgctgatgctggtgttgtgcatggcgctgatggcctgcatcgcctga

SEQ ID NO: 534006 - DNA, 495 bp, Stenotrophomonas maltophilia
atgtctcgacatgcgctttgcctcctgctggcctccatcgccagccacgcccggggcgccgactgcccgcaagcgggcgccgcgtcacgcatgctctccagcacagcgtggcttacaacggcggtgtacgaaggcgatgacaggacgcgaaacctggtcgaccagtacccggctgtggtgggcgtatcgctctggaatgcgtgcagcaaccggttcgagtacttcgatccggcagacggcacctcacgccgtaccaatgggggcggcggctacttcttctttaccggtgacggcacccatcagatcaccgtcgccgatcacggcccagcactgcgccgacggatggaatcactggatgccaagactttcacctattcacgccgcgtaccacggcatttcatggaaggacagcctgaaatcacactgtatgtggagcacacgccatataccggtaggctgccactgccggcacagcccaagtcggaggagtcctga

SEQ ID NO: 534007 - DNA, 624 bp, Stenotrophomonas maltophilia
atgctcattccaggcttcacggcgggcgcgcaggcgccggccgagctgcatacccgttggtcgccgtggcgcgcgctgctgggcgccttggccccgccgcatcgtgccggcgccgagttggcagcgaacgatcgctccgaactggaagcccaggtggcggccctgcatcgggtgcaggcggtcatcgagttcgcgctcgacggcaccatcctgcaggccaatgacaatttcctgcaggcggtgggctatcggctggaggagatccagggcaagcatcattccctgtttgtcgatccggagcaggcgcgcagcgccgaataccgcgacttctgggcgcggcttgggcgtggcgagttcgatgccgggcagtaccgccgcttcggcaagggccaacgcgaaatctggatccaggcctcgtacaacccggtgctggatcgccaggggcgcccgtacaaggtggtcaagttcgccaccgatatcaccgcgcagaagctgcaggcggccgattcggcagggcagctggcccatcggcaagtcgcaggcggtgatcgagttcagcctggacggacgcatcctgtcagccaacgacaacttcctggccaccaccggttacagcctggatga

SEQ ID NO: 534008 - DNA, 546 bp, Stenotrophomonas maltophilia
atgcctgcatcactcctgccgtcacttccagataccctgcccgcacgcctgcgcgccctgcgggtggaagatgctgccgcatggtccggctacctctctctaccaggcgtgatcgaacacaccagctggagcgatatctccgaaactgcattgcgccagctggtcacctgctacctgcccgcgtcccccgaccagcgctgggcgctggtggatgcccacgaccggctgatcgggaccttcggcctgaatggaatcgaccaccggcacggccgtggtgagctcgcctatgacctggacccgcgctggcagggacaggggctggccacgcaagcggcgcgcgcagtactcgactggggccatgcggcacggtcgctgacgcgcatccaggcgaccgttctggacagcaacgcccgatcgatcgccgtgctggaacgcctcggcatgcggcgcgaagggctgctgcgcgcctaccgccaggtgcgcggccacccccggaacttctggatgtacgcccacctcgacgacattcccgcgtcacccccctga

SEQ ID NO: 534009 - DNA, 540 bp, Stenotrophomonas maltophilia
atgttcgacgtacctgtccacctgcagggcatcgcctgcgatcttcagcaacggctcgaccgcctccaggcactgcccagcaacatcgactaccggctgctgatcgatggagaagcgctgcgcttcccctatcgcatctacgccgacggcgtgcgcctggaacgcctggcctcttccctgcagggcgatcaccgcctgctgtgcctgtgcctggccacccggcatcctgatggcttcctgcgacaacgcgcggtcgaggcaatggagcaggcgtcagcaccgtgggtgctggcgttccatctggcgctgctcaacgagtatgtcgaagagatcgctctggcaatcgaccatcatgcccggcagatcggcgtggccgcatacacgccgctggtccgcgagaacgccgccttcttcgagcggtgcatccagcgtgccgcaagctattggaatgcctatcaccggcaacggcatccggcgctgcgcacgtttcccgcccaccgcctgctgctggagatacgccgcacctgccgcgcggattga

SEQ ID NO: 534010 - DNA, 387 bp, Stenotrophomonas maltophilia
atggataccaccgcagaacatgaaatccaccacctgcacgacaaactgcagtcgtggttccgtgccgacgtcggcgcggatgcgctcgatgatctgatgacgcacttctgtgcggacttcagcatggccggcatcgccggccgtcggctggaccgcgatgcggtgcaggcattgttcgccggtgcccatggcgcgcgaccggggctgcagatcgccatcgaggccgtccagtccgtggacgcgccacttccgctggcggtgctgcgctatcgcgagggccattcgattgatggcggcaagcctgcaaggcgggagtcgctggcggtgctgcgccaggaacaggggcgctggtgctggctggcgctgcatgaagtgacggcggcctga

SEQ ID NO: 534011 - DNA, 441 bp, Stenotrophomonas maltophilia
atggattccactcatccgcatggagacgtgcatggaaaggtgcagggggccgcgacaaaggactatccccactacatcgatgcgacaatcgaccccgaggaaccggtctacctgcgcgtcaacctggcctcgctacgccacgcactgcgcgacaactcggcttgggcagacacgccgttcgagcgcgatgaacacaccttcaatgtttttaggtacggccgcgccctgacgacgatccttcaaggatccgcgatctacaccccgtcattggtcagcgaacacggacgggtgcgcatcgtggatggacggcacaggttgtatgcactcatcgatcagggctattcgcacgcgcggatcgtgaccgccccctcacacgctacagtccttggcgcactggtcgatccggtcgacagtgcacaggaccacaacgcgcagccgtag

SEQ ID NO: 534012 - DNA, 474 bp, Stenotrophomonas maltophilia
gtggtctggttccgctgggccaccaccgtgctgagccttgccgtggtggtggcggtgcggcttcgatggccatcgccgcccgtgcctgagcagctcgtgttccagagcatctccgacgatcgcttctcgcagctgcgccgccaggcaatgcagttcgtggaggagcggccacggcagggcttccacttcgtcgatacgccgaaaggcgcgtctttgcagattcactgccggggcgttccagtgctgtggctggaacggcggccccagcatctgctgatgcaggtatcgctggatgccgagcagcgggcgccggatgttctgccgttgcgggccttcctgcgatggcagatggagccgttgggcgcgctggaacagatgtctgctggcgtgccggagcctgttgtgatggatcgggtgttgcagtggttggcaggtggcgtgcctgaggacgctcgatgtggcggagacggatag

SEQ ID NO: 534013 - DNA, 2172 bp, Stenotrophomonas maltophilia
atgaaccaggcacatgcggcccttgcggtcgcggacggggagagagggggcgcttcccaggatacggtcgatctaggcctgcgcgggctggtgctgcttgcgcagtaccatggcgtagcggcagacgcggagcagttgtcgcacgcgttcgcggccagcggtgagtccttcgaccaaaccaccctgctactggcagcgcgccagctgggcctgaaggccagcgtcgcgcggatacccattgcgcgtctgccaatggtcagccttcctgcactggcatgggacacatcggggcaggcattcctcatcgcacgcatccacggcgaagaggtgctgatccatgacctggcgcaacggcgcccgcgccagatgaccctcaacgaactggacgcatgctacgcaggcacgctgctgcaggtggcatcccgggcctcggtgctggggcagctggcacgcttcgatttcacctggttcattcctgcgatcatcaagtaccgcaggatgctggcggaggtgttcatcgtctccctcttcatccagctgttcgcgctggtcacaccacttttcttccaggtggtgatggacaaggttctggtccacaacggcctgaccaccttggacgtgatcgccatcgggctggtgtgcatggcgctgttcgaagtggtgctcagcggcctgcgcacctatgtcttcgcgcacaccagtagcaagatcgatgttgagctgggcgcacggctgttccggcatgtcatgacgctgccactggcctacttcgaatcgcgcagggtcggcgacaccatcgcgcgcgtgcgcgaactggagaacatccggggattcctgaccggcaatgcgctgacgtcggtactggacctgctgttcaccgtcgtgttcctcgccgtcatgttctggtacagcggctggctgaccctgatcgtggtgctttcgttgccggtctacgcgctgatctctgcgggcatcacgccggttcttcgccggcggttgcaggacaagttcgcgcggggggctgacaaccagtccttcctggtcgaaacggtcagcggcatcgggacggtcaaggcgatggccgttgacccgcaggcaacgcgcacctgggacaaccagctggcggggtatgtcaacgccagcttcggtgtcacccgagccgccaccgtggggcagcagagcgtccagctggtgcagaagctggtgggggtggcaatcctgttcttcggtgccaagcaggtactggagggaaagctgtcactgggccagttgatcgcgttcaacatgctgtccggccaggtggccgcgccgatcatccggctggcccagctctggcaggacttccagcaggtgggcatttcggtggagcggctgggcgacatcctcaacacccgtaccgaactgccgggcagccgcgcggccctgccgccgatccagggtggcatcagtttcgagcgcgtgcagttccgttaccggcccgaagccccccaggtgctggatggcatcgatctggagatcaagcccggcgaggtgatcggcatcgtcggccgatcgggctcgggcaagagcacgctgaccaagctggtgcagcgcctctacattcccgagcgtggccgcgtactcatcgatgggcacgatctggcgcttgccgacccggcgtggctgcgccgccagctgggggtggtgctgcaggagaacttcctgttcaaccgcagcatccgcgacaacatcgccctggccgacccgggcgtgcccttggagcgtgtgatccgcgccgcgacgctggccggtgcgcatgacttcatcgtggcgctgcccgaaggctacgacacgattgtcggtgagcacggcgccggactctccggtgggcagcggcagcgggtggccatcgcccgcgcgttgatcaccgagccacgcatcctgatcctggacgaggccaccagcgcactggactacgaatcggagcatgccgtgatgcgcaacatgcaggccatctgcaagggccgtaccgtgctgatcattgcgcaccgattgtccacggtccgccatgccgaccggatcgtggtggtggagaagggccgcatcgtcgagtccggcagccacgccgagctggttgatcgccccggcggcgcctaccagcggctgcacaccctccaggcgggcacgccatga

SEQ ID NO: 534014 - DNA, 1419 bp, Stenotrophomonas maltophilia
atgaaacacgtgttcgaaggatgcgcggcgttcgtacagcgctattacgccgcgttccgtgcgcactgggccgcccggcatgcacatcagacgcctgcgcgccagcgggcggagcgcgagttcctgcccgctcacctggagctgatcgagacccccgtctcgccgacagcgcgctggacggcctggatcatcattgccttcttctgcgtcgcgctgctctgggcctgcctgggcaagctggacatcgtggcggtggcgcccggaaggatggtggctgactcgcgcaccaagatcgtgcagccgctggagacggccgttgtgcggcgtattctggtgcgcgacggtcagcaggtcgcggccgggcagccgctgatcgaactggataccaccgccagcggcgcagagttgagccaggtggacgctgcactgacagaatcgcgcatgaccgcactgcggctggccgcgatgatcgaggcgatgtcctcggggcagcgaccacaactgccccaggccgaagggatcaccgatgcacgacgcgccgccgagcagcagctgctgctgagccagttcgacgcgctgcaggccaaccggctcaggttgcaggcgaccatcgaccagcgggcggcggagatccagaccacctccgaggccatcgcgccgatggccgagcttgcacggatcaccaaggtgcgtgcggaggactatgcgcggctggtgcagggcaactacgttgggcgccatgactacctgctgcgcgaacaggagcggatcagcgccgagcgggatcttgccgtgcagcacaatcgcctgcgtgagctgaaaagttcactggccaccgcgcaggaagaactgcgggtgctgctcaccgaatccaagcggcagttcctggagcagctgcgcgaagcacagcagcagatcgcacagggaacgccagaacgggacaaggctgggcagcgcaaccgcttgatgaccctgcgcgcgcccgtggccggcaccgtgcagcagctggccgtgcacaccgtcggcggcgtggtcacgccggcccaggagcttctggccgtggtgcctcgggagtcgctcgaggtggaggccaccatcctcaacaaggatatcggcttcgtccgcgccgggcaggccgttgttgtaaaggtggaaagcttcccgtacacgcgctacggctatctgaccgggcgcgtggtcagcgtctcgcacgacgcggcccaacacgaaaccctgggctcggtcttccctgcacggatccgcctcgatggcagcaccctggatatcgatggcgtggtggtgggcatgagcgcgggcatggccctcagcgccgaggtgaagaccggcaagcgacgggtgatcgactacctgctcagtccattgcggcggcatgccggggaagggctgcgcgagcgctag

SEQ ID NO: 534015 - DNA, 8862 bp, Stenotrophomonas maltophilia
atggctgcagatgcgatcaatgatgcgaaggcgatgctgctgaccgagatatcagcggcccttgcggccaacctgaagctcgggctggatcgggtgaggccagcggacgggaccggtgcagttcctcctgaccagctgctcgccatgtacaaggatgtgctggagcagaataccgagctgctgagcatctacgccagccggttccagctggaaggaaacgccgatctgctggcgtggtgccagggcatgatcgccgacacgcagcgtcagctggcgctggtcaacaaggaccaggagccggccatcaccctgaaggatctggccagcggtgtgatcagctcgctggacgagcagggcaagctcatctcgctgggtgggtcggaaaaggtcttcggcgtggtgggcaagggactggaccgcctcgacgtcatccagaagatgctcgacggtgacttcagcgcggcggccgccgtctttgcaggcagcgccgtcaataccgtcgtaacgggtgtgctgaccggcgcggtggtcgcggcgggcgtggtctcttggccgatcgttgccggcatcgcggtgatcggcgcggtggccggtatcgtcggcggcaacatggccaacgacctggtcgaggacttcttcgaattcgccaaggagccggaagaccttcgcgacgatgcctacaattccatcgtcttccagatccagcacggcggcagcagctacctgcccgccatgggcgactacctcagcttcggcacctccggcgatgaccagctcagcgcgcagtatctgcagggcaacggcagcatcctgatcggcggaggtggcaatgacagcctgcacggtgccgagcgcgtggaccgcctgagcggcggcgccggcaacgatctgctgaagggctatgaaggcaacgacgtgctcaacggcggtgccggcaatgacgttctggagggcggcaagggatccgaccggctggaaggcggcaccggctttgacacctacgagttccatctggccgattttgccggcggatcgcaggacatcgtggtcgataccgatggcatcggcaagatcaccttcgacaacgtcgccatcggcgatctctctgtcaatcacgtctcccgcgacggccttggctgggaaacccaggaccgcaagttccgcctgcaggtggtcggcagcggcgatacatcctcgctcatcatcacccaccgcgagaccggcggccgcatcgtcgtacgcaactggtccaatggcgagctgaacatcacgctgccaggcctcggccagccgggaacgcccgagaatccgtacgcgttgaccaacgagaacgaccaggtcggccacgatggcgatccggaggaagtacgcagcggcaacgacatcatcagcgcgatgggcggcaatgatggcgtggacggcggctatggcgacgactggatcgacggtggccacggcaacgacctgatccttggcgggccgggcagcaaccgtcttctcggcggactgggagacgatgtgctgctcggcattccaatgctgctggcatggaccgtgccgaacgatctggaaggctggtacgaggacatgcgcgaacgcaacgatgtcctcaatttcggcaagggctggtacacccacatggagggtcacgcgccggtcaacggtgacgcgacacagaacctgatcggcttccaggtcagcgctacctacgacaacgggcaggatccctgggtcgaaaccgattcgaacgtgagcccgagtggcgacgatgagatcgacgccggggacggctcggacgtcgcctacggtggcgaaggtgatgacaacatcagtggtggtacgggcaacgacctgctgatcggtggcgccgacaacgactacatccgcggcgaagaggacaacgatctcatcctgggtgatgacttcgctgccgccggcggcatgtgggatttcgtggcgacgcagatttccagccaggccaatacctcaggcaacgacaccctgatcggcggatcgggaaatgaccgcatctacgggcagggaggccacgacatcatcgacggcggtgaaggcgatgacatcctccagggcgaccgtgtcgactatgggctgggatactcctacaacgtcggcggcgtggccggggatgacttcattgatggcggcgagggcaacgaccagatctacggtgacggcggcaacgacacccttcgcggcggtagcggcaacgacatgatcgttggcgattccatcgggatcgatggatcgctgcatggaaacgacacgatcgatgcaggcgaaggtgccgacaccgtgatcggtctgggcggcaacgacgtgatccggggcggtgatggcaacgacatcctgctcggcgacggcgccctcagcgatgtcggcgcagacttccacggcaacgacaccctgtacggcgaagcgggcgacgacgagctgcagggcaacggcggcaatgacttcctcgatggcggcaccggcgacgatctcctgtccggccaggatggcaacgacactctgcagggcggcgacggcaaggatgagctgcagggcggcgacggccaggacacgctgtccggtggaaacgacgacgatcgcctgttcggccaggacggtgacgacgtactgagtggcgatcacggcaacgatgagctgtatggcggcgcgggcaatgaccgcttgagcggtggcgcaggcatcgacaagctgggcggcggcgtcggcaacgatgtcctggatgggggtgatggcaacgacaccctggacggcgaagccggtgacgacacgatctatggcggcgccggcaacgacaccatcgacggcgacgacggcagcgacctggtcttcggtggagccggcgatgacggcatctacggcggcatcggcaacgacgaactgcacggtgaagatggcgatgacatcatctcggccgccgaaggcaatgatctggtccttggcggtgccggcaatgacatgctcaacggcgacgcaggcaacgacgatgtgcagggcggagacggcaacgatcacctgaccggcggcgacggcgacgatgtgctgaccggcggtgcaggcaacgatcttctgcgcggcggcgcaggcaacgaccgtttccatttcgagtccggcttcggcgccgacctggtggttctggaagatgcaggcgcaggccaggacaccatcagcttcggcagcagcatcgctgccgaagacctgacctacacggcccatggcctggatctggtcatccttcacgccagcggtgtcgactccatcgtcgtgcgcggattctttgcggcagggatggcagcagcggtgcagcttcccaacggcacggtctttgatcgcgcctacttcgagcagctgctgtccatccccgtgccgaccggcgtgggcagcccgggcgacgaccagatggtcggcacggagaacgcagacaacctgcacggcggtggcggcaatgatgtcattcatggcctggccggcgacgacttcctgtacggcggtgctggcaacgacaccctcagcggcgggctcggcggcgacgtactcgacggtggcaccggcaacgacacctacatcttcaacttctacgacggctacgactcgatcctcaacctgggcgaggcggacgcgggcagcgatgtgatccagctcggcacgtcgatcacccgggacatgatcaacaacttccaggtctccggagacgatctgatgatcgccttccggcagggcgccgacttcgccagcatctaccttgaaggattcctctcggcagccaacggcacgcatcgcatccagttcgccgatggcacctggttgtcggcgcaggatttccggggcaactccgatgcatgggtcggcaccgacggtgatgacctctaccttggcaccgccgccaacaacaatgtgcagggcgggctcggcaacgatgagctgcacggactcgccggcgacgaccgaatctttggcggcgcgggcaatgatcggatcttcggcggcgccggcaacgattcgttggacggcgacggcggcatcgatgagatcgatggtggcgacggtgacgaccagctgtatggggacgacgcgatctccggccccggagagtacgacgtgctgcgcggcggcgcgggcaacgaccgttattacgtcggtgccggttaccaggatgcgcccagcccggatacggtgatcgaactggcgggcgagggcatcgacaccgtgtatgcggagtcctactcctacacccttaccgccaacgtcgagaacctggtgggcgtctacgcctccaccttcctgtactggcagaaccccgagtactacgggtggcgcgtcaacatcccgcgcaagttcgtcggcaacgacctggacaacaccatccagatcgggcctgcgccctggaacggcaaccacgatcagcgcctgtacctgctggacggtggcgctggcaacgacaccctgatcggcagcattgccgatgagatctacgtcgtcgacagcctgggcgatgtcatcgtggagaccgacaccggcgtcggcgcatcgttcgataccatccgcgcctcgctgtcctactcgctggccgaccacgccaacatcgagcggcttgaactgtggggcgccaacgcgctctccggctggggcaacagcggcaacaacatcctggtcggccgcacgtccgatgtggccaatcacctgtatggcgggctcggggatgacacctacgtcatcaccgccaaggatgtggtggtggagaatgccggggaaggcatcgacaccgtgatcatcgatcacgtcgacgaagtgagcagcgcgacccaatggttcaacgtgtccgactacgccaacgtcgagaacctctcgctgggcaacaacctcagcctggacctgtacttcagcggcagcaacaacgaaggcgccttcaatgccaacctgcgtggcaatgccggcgacaaccgactggtcggcaacggcttcagcaatgaactgcgcggtggcggtggcaacgacaccctggtgggcggcgagcgcgagctcaacacgtcctacgccaccggccgcgactacctgtacggcgaggaaggaaacgaccttctgcaggccggaagcgggggcgccgacctgtatggcggcaccggcaacgacaccctggaaggcggcaccggcaacgatgacttccattacgcgcgcggtgatggccaggacaccatcgagtccaagggctatggcgtctcgacccgcgaccgtgtgatcttcgctgccggcatcgatccggacgacatcacctggtcgcaggtcgggctggatctggtggtccaggtgggtacggatccatcggaccggatcaccgtcagcggatactggcaggaaagcgatgcgggcatcgttctcagccagcgcatcgacgaattcgtgttcgccgatggcaccatccgcaagggcgggctggatcggctgccgttcaccaacaatccgcccgaaaccctgatctattacttcgatcatgaggcggtgggcgaagaggccttcacgcttgcactgccggccggcatgttccgcgatgcggccgatgacaccctttccttcagcctgggcaatggcagccccgagtggctggccatcgacgcgagcacaggcgtcatctccggcagtccgcccaacgggggtggcgagtacacggtgcagatcgtcgccagcgacagctggggccagaccaccacctcgtcgctgtcgctgggcgtgcgcaatgtcatccgcggcaccaccgcggcggactccctgaccggcacccagttccgcgacgacatccatgctggccagggcaacgacaccctgacaggcgcgggccccggcgatcgtctctacggtggccagggcgacgacacctacgtggtcaccgacgcctcccagcagatcatcgagctggccggcgaaggccacgacaccgtacaaagctcgagctacacctacacgctcggcgaacaggtcgagggcctgaccctgctgggccaggccatcgagggcatcggcaaccagctggacaacctgatcatcggcaccgacggtgacaacctgctcgacggagggctcggcaacgaccggctcgtcggcgggctgggggacgacatctaccgcgtcgactccgcatcggaccagaccgtggagcaggcaggcgagggcatcgatacggtgctggcagacctcagctggcagctcggcgacaacgtggagaatctcgaactggtcggcaccgggaactggaacgcgaccggcaatgcactggacaaccagctgatcggcaatgccggcaacaaccgcatggagggtggcggcggcaacgactggctgcagggcgcgcagggcgacgactactacgtgaccggctcggcccaggaacgtgtgatcgaagagctcgatgcgggcgtggatacggtcgaacggcgcttcgaaaccaatctggtactggcttcgaacgtggagcacctggtgctcggtgccggcatcgtgaccggcaatggcaacggcctttccaatcagatcacgggcaatgctgcggccaatcgactttcgggtatggatggcgacgacaccctgatcggcgccgatggcgacgatcaactgtggggtggcaatggcctggatatcctgcacggcggcaacggagcagactatctggacggcggggccggtgccgaccagctgcgcggtggcgccggcaatgacgtctacatcgtggaccacgccgatgacaccgtgatcgaactggcgggcgagggcaccgatcaggtccaggcgtcggcaagccacgtcctgtcggccaacgtggagaacctgttcctgaccggcactgccgccattgccggcaccggcaatgatgccgccaactacatcgcgggcaatgcgggcgccaacacgctcaatggtgccggaggcaacgacacgctcagtggcggtgcgggcaacgacctgctgatcggcggctcgggcaacgacgcctacctggtggatgccagcagcggcagtgacaccgtggacaacaccggcggcggcagcgacacgctgttcttcggcgctggtgtgagccgcgagcgcctgagcttctcccgcaacggaaacgacctgctgatctccatcgatcagtccgccacgccggcggtgcgcgtgctcaatcacttcctcggcggcgacgcggcaatcgatttcgtgcagcccgacggaggcaacaccctgacggctgcgcagatcaaccagatcgttgccggcaacggcagcggcttcgatcaggtggtgcagggcacagcggcgggcgagcagctggtcggtggcgccggcaaggacctgatcgaaggtctcggcggtgccgacaccctgttcggcatgggcggcgatgacacgctgcgggggggcgacggcaacgatcagctggccggcggcagtggcaacggcaccggctcaggcaacgacatcctggaaggcgggctgggcaatgacacgctgcgtggcgaggacggcaccaacaccctgagcggtggtgcaggtgatgaccagtacgtctatggcggcggcaccgatgtgatcaacaacaccggcggcggcaccgattggctgattttccagaacggcatcggcaccgcgcagctggcgttcacccgcgatggcaacaacctgatcatcaccgtcaatggcaatgccagccagcgggtgacggtgaccgatcatttcctgggcggcgacttcgccctggattacctgcagcccgccagcggctcggcgctgaacactgccgcgatcaatgcgctggtctccaacaacggcggcggcagcaatccgggcggcggatcaccgggcatgggcaacgacgcggattacccctcggtcaagaccggaaccgcgggcggcgaacagattgtcggcaccagcggtcgtgacctgatcaaggggctggccggtgatgacaccctgttcggcatgggcggcgacgacaagcttgatggtggcgatggcaatgactacctctccggcggcaacggcagcttcggtggctccggcaaggacatcctcatcggtggcgccggagacgaccagctggtaggcgaggacggcgacgatatgctgttcggaggcaccggaaatgacacctacttctataccgacgcgtccggtgccgacaccatcgacaacacaggcggcggaaccgactggctgtatctggagggcatcgaccgcgcgcgcctggcttaccaccgcgatggcgacgacctgatcgtccgtgtggatggcagtgccagcaagcagatgcgggtgctcggccacttcctcggtggagagcgcgcgatcagcttcgtccagccgggtgatggcggctacgcgatctcggccgccaccatcgctgggcagctgaccccgctgccggcggcccgggctgcatccagcgctaccgcaagcgcggcggcgccgctggatgcgccgttgcccagcctcgcagacgaggcgtccgccttcgtccaggcgatggacctgttcgatgacggccacagcatcagcctgccgtccacggtgaccgcagcgccggttgtcgcaccgccgcttgcagaggcttccgcccaggacgtctcaccgccgacgctgcgcacctcgtcgtcgatccgggcaggtgataccgccgcatcgcttgcagagctgcagcacctggtggacagcatgggcagtttcggcggcaagggggctgagctggcgctgggcagcgaagacgacccgcaggccagcctggcccaaggtcacgcactgacagggggacgcctgaatccccgttacaccgccaacgcggtacgccagctgctgctgtga

SEQ ID NO: 534016 - DNA, 1005 bp, Stenotrophomonas maltophilia
atgcccatcgagccctctctggtcagctcgctgacctggttcgcccacatcgcccggcaccgcagcttcaccaaggcggccaccgagatggagatcacccgcgcggccctctcccagcacctgaaagcactggaagagcggctggacgtcaggctgctgcaccgaacgacccgcaacatgtcgctgaccgaagaggggcagcagttgctggacgtgctgcagccggcattgaccgccatcgaacgggcggtggaagaactgggcgaagtgcacgccgagccctccggggtgatccggatgaactcttcgcggatcgcttcacggctgctgctggaaccgcacatgggcgagttcctggcgcgttaccccaaactgcggctggaactggtcatggatgacggcctttccaatctggtggccaacgggctggacgccggcatccggcttggcgagagcctggatgcgcacatggtggccgttcccatcacgccgcccctggagatggcgattgtcggctcgccggcctacttcgagcagcacggcctgccgcagagtccggccgatctgatccggcacaactgcctggcctaccgcttcacctccagcggcaccatcgaccactggacgttcgccgcaccagacagcgaggggcgaaagctggtgttcgaaccgcagggcaatgcggtgttcaacgacgacgacagcatgctgcgggccgcgctgcagggtgtagggctgattcgccacatcgatctatgtgtgcgcgaacacctggccaatggctcgctggtgcgcgtgctcgccccctggtgccggcccttcccgggcttcttcctgtacgtgccgtcacgtgcgcagatgccggcgaagatcagggcactgatggacttcctggttgaacgccgcgagcagctggttgctccccggcacccgcgcgccgccaccgaggatcgtcgagtgaaaagaaggcatggcagccggggcaggacggtgtcgggtcaatag

SEQ ID NO: 534017 - DNA, 918 bp, Stenotrophomonas maltophilia
atgcgcaacgtcacgttcaagaatctcaacggccagggcgtcaccacggcggccaccctgtacttccccgaaggctttgacgagtcccgcacgtaccccgcggtggcggtgtcccacccgggcggcggcgtgaaggaacagaccgccggcctgtatgcgaagaagctggccgacgccggtctggtcacgatcgcgttcgatcgttcctaccagggtgccagcaccggcgagccgcgccagctggaaaacccgtacatcagcaccgaagatgtgagtgcggtcatcgattacctgaccaccttgccgtatgtcgacccggaccggatcggtgccatgggcatctgtgccggtgcaggctacagcgccaacgccgccatcaatgaccgccgcatcaaggcgctgggcatggtgagcgcagtcaacatcggccagatgttccgcaacggctgggagaacacggtcaaggatgccgatgcggtgggctacctggacttcggctccaatgcacgcagcaccgacatcgcttcaggccagttcgcgaccatcccgctggcaccgctgcgcgaagaagacgcgcccaatgccgaactgcgcgaagcctgggagtactaccacaccccgcgcgccgaacaccccaacgccccgggctttgcgctcacccgcaacctcaaccagatcatcacctacgacgcctacaacaaggccgaagcgttcctgacccagccgatcctggcggtggccggcagcgtggccggcagcaagtggatgagcgatgacctgctgtcccgcgccgccagcacggacaaatccctgcatgtggttgagggggcgaatcacatgtcgctgtacgacgtgcccaacttcgtggaagaagcggtttcggtgttggcaccgttcttcctgagtcgcctgaagtaa

SEQ ID NO: 534018 - DNA, 936 bp, Stenotrophomonas maltophilia
atgagcaccattacccccaagaccgtcagctaccccaacctgggctggcagacggcggccgatctctacctgccggccggtttcgatgaagccagtaagtacccggccatcgtcagcacccatcccatcggcagctgcaaggaacagacggcgggcaatgtctatgccaagggcctggccgagcagggtttcgtggtgctggtgcacgacgccagtttccagggtgccagcggcggcgagccgcgcttcattgaagatccggcgatccgcgtttcggatatccgtttcgcggtggattacctgcagtcgctgccgtatgtggatgcgggccgcatcggtgccatcggcgtctgcggcggcggagcctacaccatccacgccggcatcaccgaccatcgcctgcaggcgctggtgtccatcaccggcgtgaactacggccggctgatccgcgagggcttcgcgcagttcaagccgcgcgagctggcggccaacatcgccagcatgcgcaccgcccaggcgcagggcgctgcgcgtgatgtggccaacctgttgccggattcggtggaagcgggcagggctgcgggcatcacggatatcgatgtgctggaggccaccgagtactacaagaccgcacgcggccaacagcccaacggcgccacccgccagctgatgtccttcagcggcgcggcgatgggctgggatgcattcctcaatgccgaggtgctgctgacccagccgctgatggtggtgatcggtgacaagcccggcggcttcggtgcctatcgcgatggctgggagatctacggccgcgccgcgtccgagcacaagcagatcgtggtggccgaaggctggtcgcactacgacctgtacgacaagccggagccggtcgcgatcgcgatggcccaggtggttccgttcttcaaggcccatctctga

SEQ ID NO: 534019 - DNA, 639 bp, Stenotrophomonas maltophilia
atgaagaacgtgctcattctgggcgcaagcggccagattgcccggtggttgatctcgtcgcttgccgcagagaaagatgtgcagcagaccctgctgctgcgtgacccgaagaagctgacgggcaaggaacctgccaacgcgaaggtggtcatcggcaacgtgctggacaagaagctgctgaaggatgccgttgccgggcaggacatcgtctacgccaacctcaccggtgaagacctggacaagcaggcgcagacggtgatcgcggcgatgaagggcacaggtgtcgaacgcctgatcttcgttctctcgctgggcatcctcgatgaggttccgggcaaattcggtgaatggaacaacgccatcatcggcgaggatctcaaacccttccggcgtgcggccgatgtcatcgaagcgtccgggctggactacacgatcctgcgcccggcgtggctgaccgacgaggacgaagtggactacgagaccactgaaaagggccagccgttcaagggcacggtggtctcgcgcaggagcgtggccgacctgatcagccagatcatcgtcaatccgtctcgccacaccggcgcaaacctgggcgtgaacaagccgggaagcgacggcgacaagccgtacttcatgtag

SEQ ID NO: 534020 - DNA, 681 bp, Stenotrophomonas maltophilia
gtgtctgcgataggcgagggggccactggcatcgccagccaggccaccccggaggagggcgcagccgaagcgaacagcatagtgcgcgagagcgtgttcgccagggcctattccctttggagaggccccatccttcgaagtctcacccgcttcaaaggcacgcccggcgacagcgaagacgtgcttcacgatggcgccgtgaagtggatcgctgccgagccggcactcgatgcctgtgatcagcaaggcgcctatttccgccgcaccgtgatgaacgctgtggccgacgagtatcgtgagcgccaggccggccgccgcctgcagaccctgcctctggcagacgcagaggacgctggccactgcctggccacggatgaatcacagtgtccgctgcacctggccgcacagcggcaacgcctgcagcgcctgggcgaggcactggccgaactgccggagcgtcagcgcgaggcgttcgtactgtgccggttcgatggcctgacccaggacgacgtggcggcccgtatgcagatttcccggcgcatggtggtcaagcacctgtcgcgtgcggtcgcctactgcgagttgcgggtacgctatgcgtccctggcgcagatgcaggcattgcaccggcccggcggggcgggcgagcctgccattgatgctgatctaccctgccgatga

SEQ ID NO: 534021 - DNA, 1038 bp, Stenotrophomonas maltophilia
atgaccgacctctctcctgccgcaggttccgatgcgcttgccctgcacgaggcggctgccgcctggctggtacgccggcaggatgcgcactggcaagcggatgatgaggccgccctgcagcaatggctggccgagagcgaagcgcaccagcaggcgtttgccaacgtagccagaacctgggacgacctgggtcagctgcagcgcccgatcctggcctccgaacagcctgcgacgcccgccccggcaccacctaccgctctgcggcggcgtggtccggcgcgccgtgcgcggtcctggcgcctgccgcgtgtggcgacggctgcggccgtggcagtgctggccctgggcagcgttggctacggctggtacaccgcgcccacctacgtgcaggaggtcgctaccggcgctgacgagatccgtgacctgcaactcccggacggttcacggatttccctcaacgcgcgcagcacgctggccgtgcatttctatcgatcccgccgtgaagtggtgctcggccagggcgaagcgttcttcgacgttgccccggcagccgaccggcccttcagcgtggatgcgcagcgcagccgggtgaccgtggtcggcacggccttcaatgtgcgcaacgggacgggcgaagtactggtcaaggtgctgcatggacacgtgcgggttcagccggatcgcgccgaacccaaggccatggtgagcctgcacgccgaacagggcgtggccgttaccacgctcaccgccgcctatcgccccattgccgccagcgccgacagcatcggcggctggcgcaatggccacctggtgttccggcgcaccccgctggacgaagtcgcgcaggaaatcgcccagtacctgggccagcccatcacgctgggccagcccgggctgaagttcctgcccgtctccgggtacgccgctaccgacgcgcccgccatttttctggaggcactaccggatctgttgccggtgcaggtgacccgcaatgcccagggcggctaccgcatcgacgaacggcctgcggcccgctga

SEQ ID NO: 534022 - DNA, 1623 bp, Stenotrophomonas maltophilia
atgcagctgtcctggcaggaccgcagcggcgccgaacacgaacgctgggtggatgccgccaccggcgcggcactacccccgccgcagctgcggcagaccgagggagggcgtcacttcatgtccttccattacaccctgcacggcggcatggccggctactggctggtcggctggatcacggcctgcatgttgctggcgctggtctccggtgtggtcgtgcacaagcgcatcttcaaggatttcttcaccttccgcccgggcaagggacagcgcagctggctggacgcgcacaacctgagcgccgtactgacgctgccgttcctgttcatgatcggctacaccgggctgacgttcttctacagcagctatctaccgtggccggtgcaggtggcctacggcggtggcgatgacacctacgcgcgctacgaggccgaactggcacctgcacccacggtggcgcgcgccctcatgatctccgccgcacggccgccgcaggcaccggacctgtcgcacctgctggcacgcgcacgcgccatcagcgggcagtcgccggcacaggtcgtgatccaggcgccgggcaccgtgcacagcgtggtggaggtcatcggccgcaagccgcaggatggctcgcacaggcatctgctgactgaagcgagccggatcacgttcgatgcgtccagcggcgcactgttgcagcagcatgcgccgcatccggagcaggtgggcgccgtgcaggtgcacgagaccattgaagcactgcacaaggcggatttcggcggctggccgatgaagtggctgtacttcatcagcggcctgctcggcacggcgatgatcgccattggcacgctgctgttctcgctgaaacgacgcaagcgcagcgagcatgagttcggtggtgcaacagcggccatctaccgcggggtcgaggccttcaacgtgacctcgctggcaggcattgcgctggccagcattgtgtacttccacgccaatcgcctgctgccactggcaatgagtgagcgcagcaactgggagatacgcctgtttctgctggcgtgggcagcctcgttgctgcacgccctctggcggccgccgcgtcgggcctggatcgaacagttgtggctggccgcagtgctgtgcctggcgttgccgctggtgaatctggcgaccactggccagcatctggggcagtatctgctgcgcggcgcatggcagcaggccggtgtggagctggtggcgctggcattcgggctggtgctggcgaggatggccgtgatgctgcagcggcgttggccacaggcgcaggaggctgcacgtcctgccagaccaacggccgggcagggcagggcacaccgctggcaggtggcaagccgggtcctggcggcctccgtgggggcctatgtgctcacagccctggccgccaccgcgctggcgctgttgctcccggtgctgctggacgtgcgcctggccgcctcggttctgagcggttcgctgttggggtttgccgggttggtggcgatggcggtgggcgtgttcagtgcacgcagcacgggccaggtatgggcggggctggccattggctgtgcgctgatggggctgctggtgcagctgttgcggcccgggtaa

SEQ ID NO: 534023 - DNA, 411 bp, Stenotrophomonas maltophilia
atgtccgccaacttcaccatcggccagttggcccaccagaccagcaccaaggcagagaccatccgctactacgagaagatcggcctgctggaaccgccgctgcggtcgcagggcaactaccgctgctacggcgccgaggacctgaagcggctatcgttcgtacgccgggcccggcagctgggcttctccatcgagcagatccgcgagctgatcgcctttggccagcaacgtgaacacgaatgcagcgccgtggacgatgtggtgaaggcgcatctggtggacatcgcgcgccggatccacgacctgcaggcgctgcagggcgaactgggccggatgatcggcaattgcccagggggccgcgtggcggattgcagggtgctggaagcacttcagccccgggccgatgcttga

SEQ ID NO: 534024 - DNA, 732 bp, Stenotrophomonas maltophilia
atggacatgcaggcaaggaccggagtcgattcgccggaccagacgaagcagcaggaactgacgttccactggcttttccagcgggtgcaggtgctggctgcgcacagcatctaccccaaggccggccggctggagaggtggtcgttccgcatcggtattgccgccgcgatcatcggcattctctgtggccagattcctgatcgatggctgcctgtcaacatggtgttgcatgtggttgtcgcgtgcctggcgatagagattggtggtttcatcgtcggaggcatcctggctgcgcacaggggggtgcggcagttcagccagccacggctgtcgcacgcccacgagatggatggcgacttcgctcactggcaggcggtggttatcgaacttcgaaagttccctcgcatcgagcgtgagcggcgcctccgatacgtcagcacactgcgcaccaacatgatcgagcgcatgggcatcatgtatggcggcctgcagcggcttgggccgttcccgctgttgattgccctctacctgcaattcaggggatggaaatggggcgactgggcgagcgcattcgacgtcagtctggtgggcgcactcctgatcttcgccatggtgctgctgtacctgctgggctggatgctgatcagtctgcgcacgcgcctggacacctacgtcgccctgctggaaggctccacccacgaacccgagcccacgccgcccgccaccccgtag

SEQ ID NO: 534025 - DNA, 1011 bp, Stenotrophomonas maltophilia
atgaggcggcttgagagaaccgcgtgcgttgctcccgctctcgccaggggcttgagaacgcgtttcagcaagacgagcgccttgggcgcttggctctgctgcgtgctgctggcttgcctgatgctcacgccaaccgcgagcgcccagacggtcacttacatccataccgatgcacttggttcggtcgttgccgaaaccgatgaagctggcaaggtgatcaagcggtacgactacgagccctacgggggtgtcgtggacgaacccgccacggatgggcctggctacacggggcacgtgagcgatgctgccacggggctgagctacatgcagcagcgctactacgatccccaaccagggctttttctctctgtagatcccgtcccgccaaacgacaacccgggctctgccttcaaccgctatcgatacgctgcgggcaatccctacagattcgtcgatcctgatggtcgccaggagcgggcggcggagagacatgccgactcggtggcgagctcaccctcggcatatgacgtgttcggccctgcggtacttgcggtaacaaccgcgattgtgcgcgcgacgccagttgttgggcctgctgctgcatcggcaatgtctggctccatcaattcggcgcaaccactagccctgccagcaccagcccctgcagtgccctccgcgccaactcctgccgctgccccgacaacaccttctggccccagctatgtcgtctcatcgaacggaacagcatttccggtacccacaggtgcgagcggaccaactccggtcatcaaccccgcaggaaaacagaccggcgtcgcattcactgggggtgccggaggcagtaatgggcaagtggccaccatgcggatgatggacccaacccctcccaggggaaacagccccggatatccagctggctatatcaagtacgagaatgctggaaagcaaggcgtagatccgctctcgggaaaaacgctacccaattcgaagtctcacttcccagtcagatag

SEQ ID NO: 534026 - DNA, 333 bp, Stenotrophomonas maltophilia
atgatcgaccaccagacggaagcccttcagccactgatcggaaaaaaggtgacacttgtagtggaagatggcatggccacgataggtacgcacgatggctgggagctgcatatctacaactctttcagcctccttggcgatggcattgcggagacccctccgccctcaacgctgagcctggtgctggaggattgccggttcgatcaagagacaatggttgcgcagttttctggaggggtaacactcatagtcgacctaagtgacgacggctactcaggcccagaggcgatgcagttgaacagtcaagatggaaccatcgtgatctggaactaa

SEQ ID NO: 534027 - DNA, 297 bp, Stenotrophomonas maltophilia
atggccgatttcaatcgactgcgcctggcgctgctgttgccgttcgcactggtggcgctgaccgcgtgtgagacggggagtgaggctgtcgggcatgatgccgccgcgcagagtgctccggctgcttcggccggggaggcgatgccgatgcagccgaccgcgccgatggagggggcggcaccgtccgaggcggtgcaggtgcgccggaccgatgacggcggtgttgaaatccgcaagctggacgcggcggacgggcagggcgcggatgcagcgccggccgaaccccggcagccctga

SEQ ID NO: 534028 - DNA, 921 bp, Stenotrophomonas maltophilia
atgggtaagcggcttatcggattcgtcgcgttggcagcagtgctgaccgtcgcagctgttgcagtgtcgagctaccggcagcaggcaaccgccgatgccacacaagaggaatccggaaaggggatcaaccgcgaggaaaggcccgaccggccagaacaactcccgatgtcagctgcgggaaccgcgcagaggcttgagcagggcaacaagatcccgcctgggtcgtacaaggccgtgggaccgaaggcctacgaaatcgtcaggggaaacgagttccgcccgcccggcgacgcgctcgcccacgtcaagcagctgatgctgcgctccgacgcgggagacgcaacggcaacctacgaaatctatcgaaccatcgagcagtgccagaccttcatctcggaccgcgctgacaagctggccgattcagccacccgcgtcgggtcgggcaactggttcctggagagatccgaacgaatcctcaaggaatgcgaggcactggccctggatcagggcatctatcacgccgattggctgtccaaagccgctgccatgggatcgcaggaagcgatgcgcgcctattcgcgatccccggagaaggtcatcggttcgcttgatgacgcgatccgtgatccagccgcgctggaagcgtggaaggacaccgctaccggatatctccgcgaactggaagcacaagggaacgtcaatgtcatcagcgacatggcaatggcctacacctatggcggcatcgttcccgcagaccccgtggctgccctcgcctacacccgcgtcctcaacaggatagacccacgttttgccacgaccgatgacattgcaaaccatgagaaaaacctgagcacccagcaaaaagagcaagcccgcctttcctcaaacgaaatcttcaagaactgttgcatcccacgataa

SEQ ID NO: 534029 - DNA, 987 bp, Stenotrophomonas maltophilia
atgtcagatccaaccacgatcattgatgcattcctgaccaagggcgcccggctgattcgcgagcggcccttcgggtcattgccatcaccggaagaagcactggacgagcttccgattccaacactggtctatctgcgatggttggcttcaaccggcgccttcatcgatcaggctgtgggatcgaccatcgctcgatcaaattccccaatggagctcgtcgaaagcctgcacgcggcatttcatggtgagattcccggcaatgctctcagtgaggatgcattgagcttcactgtcgagtacttcagtccacgcgccacctacctctctgatttcttctcgttgttcccggaaagcccttcgccatcgcaggaagagttgtggtccgggcagaagaagatgtggaagctaatggattcacgccatacggcgtggcgcaatggggagcccgtgcatcgaggactcatcgccgatgctgaactacagggccagaacaatcagattgcaccgatggacgcagatgactggatctcgaccctgcatgacctgtccaacgcagccgtggatcagaagagctgccgggcctatgcagaccacttctacacacctttgaaagaagcgccgccagaaaaggtcatcctggcggttatgagcgaattccttcggaacccaccacatgacgcgtcgatcatgtgctcagccgagaacttcctgtcggacattccgctctcccgctacatcaaagtctattccctcctcgcgtcggacctgcttgacctgtcaccagacaccgcgctcagtctcttcgactatcccggctgtgaattgaccccacgtcaggtccggcagttcatcaaggaactcaggcggtgcaacccaggccgcgacgtggtcggagaactgacccagctggccattgcatggaattcggaagacgacgagccatttgcaaccatcatcgaaatagcgcaaaggcatgggcaagtctag

SEQ ID NO: 534030 - DNA, 447 bp, Stenotrophomonas maltophilia
atgaccgtattcgatcactccctggtaaccctccggttcttcggggatgacctcattccagacgaggtcactgccttgctgggcgcgaatccaaccgccgctcatcacaagggccagcaactcacaggcagccaacccggcgccgtgcgtaccgccaggaccggaagctggcggctcagtgcggctcggcgtgagcctgaggatctggaagcgcagatcttcgagatcctcgatcaactcaccagcgatttcgctgcatggcagtctctggcaccgttccggccgaacctgttctgcggccttttcatgggcagcggcaatgatggtgtctcgctttcgccgcgcgcgttgctcgccctggggcagcgcggcatcgagctcgggctggacatctacgatgccgatgaagaagagcccagcgctccgcgtgcagcgctcatcagttga

SEQ ID NO: 534031 - DNA, 297 bp, Stenotrophomonas maltophilia
atggtgttcaacatcgtagtgacagttgcggtcgtgttctcgctcatccatcttctggtcttctaccgatttgcattccgcttccaaggacggtaccccgaactgtggcgagctctggactgcccggagccatttggaatccgcgggcaaatgacctatctggccgtggtgttgggccttgagcggaaggcgcccctgcaagcgctgcaagaggttcgaaatgaagtgatcgtgatgcgaatcgcgttcgcaatcgccttcgctgcatacgtcgtgacattcgcatggttgggctga

SEQ ID NO: 534032 - DNA, 267 bp, Stenotrophomonas maltophilia
atgagtaccgagcacgtaaagagaagaatttttgcgtctatttccgacctgatcatgaaggagcccgcttcagaaaaggagttgatggattggcatgaacaagcaaaggaagttaaagccttgatggggctagacaacggcgacatccaagtgccgcacgccttttggcattacctggatgatgcagatattcgtatgaaagatcagagctatgcagcagcgcagattctgcagatcagagagcttcttcgtgcctgggtgaattga

SEQ ID NO: 534033 - DNA, 1503 bp, Stenotrophomonas maltophilia
atgccggagatggatttcggacagcccgtgccatggctatggcatagcaacggcgttttgacaccgcttttggcgcggctcggcgtcgcgtccctgctcctgtttgtcggaccgcctgcaaaggcgcagcagctatcgccgattgcgttggctgaagatgcattcggctccaatgccggcggtgatcagatcggcatctactcacaggatgcggtacgcggtttctcacccgtggatgcaggcaacatacgaatcgagggtctgtacgccgatatcccgcagggtttgggttcgcgaacgagctatcactcaagcgtccgcgttggaaacagcgcttcggggactctgtggtccgcgccgtccggcatcatcgactacgcgctccgggacgaggatgcgcctcgcgatatccgggttcgcgtcgataaccatggtgttctgcagatacgtaccaacgtgcgggtggcgccgggtaacttcttcggtgcggcctggagcgggtccggtgccagctataacggaagccggccggaagagacggcaatgggcggtgtgcatcgcggcggcaccgacgcattgaactgggccatcttcgccgaacgcagcgtcgccgagggactgatcgaaccgtcgacctaccccacggcaagcgcaccgcttccccgctaccattctggccagtattacggtcaacgatggctacgctatcgttatgaggacctggcggccggcgccttgctgcatgctgtgctttccccttcgcttcgtgtggatgccggagtcttccgagcgacaagcaactcaccgctggacgggtacgatgtgctttcggatgtggcagccgatggcaccggtagccgcagcctgtacagcgttgccgggggctatgcgcgctcgtggtcgggtgatgtgctggtgcgccttacgcttggcgaggacgacaggtccctcacctggttcgcgggcctgcagggtcgagctgccgatgtcgatagcgggcgatcgcaggtctacgacatcgggcagtggcacatcaacaccccggaccagctaccgcgtccgttgcagccatccagcacggaagaggcgagttgggatacctttcggcaggtcgcggtgcgcggcggcttcctttggcggacagagcgctggctgatacgtgcaggcgtttcccccacttaccttcgtcaacgcagcggcgacgccacgaccgtcgcagcgccggcgcgagcatcgagcaagctgctctactccgggatggtgcgcgtcggatcagcagaactctccgcgtttgccagcatctcaagcggccttgagcagaacggcgtagcgccgcagagcgccaacaaccgcggcagcgcgatcgagccgagcctcactcgccaggtggatgtcgggggtctctggcgcagcggacgattggacctggacgggagcactctttcgcatttcgcgcccacatgcctcgctcgatgccgacggctacttcgcgctcaacgctga

SEQ ID NO: 534034 - DNA, 315 bp, Stenotrophomonas maltophilia
atggcaacaccacgcagcaaactacaggcgtcctgggagtatcgtgcccgggcctggccggtgatcttctccgccacggccacctacctggacgacatgcgtgtgggcgaacgcggcagcgcacgcctgccgtccagtaccgtcatggatctggaggcacagtacgacctcacggtccttgggcgcccttcgagcgtctcgctggcggtcaacaacgtggcagatactcgcaccttccagagcacgctcgacggtggcctgatcgaggcgtcgcggcgcgaacttgttggaaccttctacatgagtctgccgtga

SEQ ID NO: 534035 - DNA, 654 bp, Stenotrophomonas maltophilia
atgccagtgcatctgcagttcctcgctgcggcagcgcagcgccagtgcagcgcaatgttctgcatctggctgccacgtatggaagcgccaggaggatgcatcgtcgttcaacgcagcatcaagttccagtgtgatgcgatccccggccacgctgaatcggcagaactgcatcggaacggaaagtcccaggccgcgcgccttcaggtagctctccttcaacgtccaaagcatgcagaggctgcgcgcacgcatggatatgggttgcgtatgcagccaggtggactcggatggggacaggcactgcgcggcgatgtcgtcccctggccagaacgaagcgatctgttcgacgtccacgcctacctccgcctgcgcggccaccgcgcaggcgacccatgttctgcagttggagaggttgaaggcaagatctccccccggaaggggatccagaatcaccgggcgcccacctcgctggcgcgtgaagcgccagcgttccggtgcgataccggtgtgggccgacaaggccgtgcggcaaagggcccgggtcagaagaaactccatgcgcagagggtcgaacgccagtcgctgcagtcgtgcgcgttcgtcatcactgagcagtgctgcgtagtaggcacgccgttccggggtgtcgcatga

SEQ ID NO: 534036 - DNA, 909 bp, Stenotrophomonas maltophilia
atgcagcgtcctgcgctgcctgcccgtcccacctcctgggtaatggaagacttcatgactgtattgaacgtagcggtgattggcggtggcaatatcggtgcgagcctggcgtatgactgcgccctgcgtgactgccgcgtggtgatcgtggaaaaggatgccgagacgtgcaggcaaagccgggagcgcgtgtcgggcatcgcggcgcatggccggcttttcagcccgttggccaagcacagtacgcctgcacaggttctggagagcatcttctggaccgatgacatcgaagcagttgcagattgctcgctggttgtcgagaacattcccgaggagctgcagctgaaggagccgctttacggccggctcggcgaggtgctgcatcccgaggcggtgctcgccgcgaatacctcgtgcattccgattacccacctgggagcttgcagtgggcgtcccgagaacgtgatcggtgttcatttcatgaatccggtttacatgaagggcacggttgaggtcatcctgggactgcgtacctcggaacagacgcgaacgcgctgcctggaaagtcttgcacggttggggaagcaggccgttatcgtgaacgacggtccgggatttgtttccaaccggatctcacatctgttcatgaacgaggccgcattcacggtgcatgatggcgttgccggcgccgctgaggtggatacgatcttcaagcagtgttttgggcaccggatggggccgctggaaaccgcagatctgatcggcatcgacacggtggtcaagtctttggatgtcctctacgccatgttccaggactccaagtaccgtgtctgccccctgatgcggcggatggcggaggccggcttccatgggcgcaagagcggcaagggcttctacacgtatgagtga

SEQ ID NO: 534037 - DNA, 723 bp, Stenotrophomonas maltophilia
gtgactgaattctcaacgaccgtcgtgcagtactgggacggtctgctgcacagcgggcagcagctggccagtacgccggggcttaccgccttcgtcaatcccggactggatgtgcagcgacgcgcgatgatcctggaggccggcgacggcagcgtacacgcggcgctcaccccggaagttgcagcggctgcgaagctcacggcgcatcccgctacccccgtttcgccagcaacccttcgcgaggccctgcacagtggcggcatccgcctgcatgcgcccgatctggtgtactacgccagccccggcgccgtggcaaaggtgatgctgaagtccagcgtgcaggtgcgtcagttgggccccgaggacgcaaagacgttcgagcacttcacgcgccaggcctccgagcaggaccaggaagatgcctacgtggagctggatcactggtctgtgttcggagccttcgatgggggcgaactgctggcagctgccagcatgtatccctggggaggcgccgcgattgcggacatgggggtgctgaccttgccacgcgcacgcggcgcgggcttggggcgcgcattggtgggtgcgctgcgcgccaacgcggaggagcgcggtcaccagctgcagtatcgctgccagcatgacaatcacgcctccatcgcgctggcccgctcgagcggcttggtgcgctatggcacctgggaagtcgcctacgaatcgtga

SEQ ID NO: 534038 - DNA, 798 bp, Stenotrophomonas maltophilia
atgagaacgatggataccccgccagtgaccatggtcaacatgcaggcgcgtccacaggccgacgtggcggtgctgttcctgcatcatgcgggaggctccggtttcccctatcttcagctcggtgcgcgactctgcgagcggctcgaagtcttcgccgttgatcttcccggacgagggacgaacttcggacgccccctgcagtccgaggcaatgccgacgatcggcggcatcgttgacgccgtgcttgagcgcggcttggccagcgagcgcccgttgctgctcgtggggcatagcctgggcgcggagttggcgtaccacgtggccagcgaactgctgaaccacgttgacgcagacgcattgcaggtggttctgtcagcgcgtggatgccagatgccggtggcgcgacctgctcgcgacctgtctgatcaaggcattctggcattgctgcaccggcacggtgcaacgccgcaggaagctctcgaagacccggcgcttcgccacttcgtgctgacgacgatgcgtagcgacctgcaactactggaccaacttgagcaacgtccccggcatcgactgcaatgcggagcccacctggtcggaggtgatcgcgatgtcgatgtcaacgacacgcttggcggatggcgcccgctgttcagcgcctgcgctgctccctcgctgtttgaaggaggacacttctacatcttcgacaaccctcacttcgttccgtggttggaatcgcgcgcactagcactgacagatttcgccgcctcgtacacacaaggaagcacccacagtgactga

SEQ ID NO: 534039 - DNA, 1089 bp, Stenotrophomonas maltophilia
atggagatctacaggaacgcgtggaatgcactgggcgatatcggtgtgtgggcattccaggaaatgctcttctatcgcaagaaggggccctatctgcaggaagatgcccgctcgaccgaggcgccggcgcgcttggccgccgcggactacaggcacgtgcaacgtgtgcgcgatatcgatgtgcgcacgttctgcagccgatatctggagacggcaacgcccatcatcgtggccgacggttgccgtgactggagagccatggaggcatggacatttgactacttcagcacggagttcggtgacatgcaggttcagctgcagggccagggcttcgaggcacgcgatcgtgtcgtgctgtccagctacctgtccagcatcgcgcatgtcccgcccattcaacttggcgaacccggcccgcccgtagactacctccgctatacctacggaccccgtttcgagcatctgctcttcacctggggattcggcaaccgggtgaagacggagcacttcacctgcgccgcctatcagcgcattgtcgatgactgggccctgccgtacttcctgccggaatcggactaccgcgtgccctgggtgcaggccggcacgctgcagcccaacaagcgcatgtgccaggactggggcctgtacttttccgcccctggagcgcgcactcgcctgcacgtggacggtacgcgcaccaatgccgtcatctgccagatccggggacgcaagtccggctggctgttctcacccgacctggaatacgcagcacgacagctcgccgagagtggcggtgtcgctgctgcggcggcggctgatgccgcccccagtgcgaaccgcgcagggaccatctggcgattcgacctggagccgggcgagatcatgctcatcccgaagggcctggcacatgaagtgatcaccctggagccgagcatctccatgatctacaacttcgttaccagcgccgagtacccagcgtactatcggcagatgcgcgaacggggaccgggctgggtcgcacgcgaggcgatcatcgacgacccacgtttccagagcatcgtccgccgggataccagggacagtgcatga

SEQ ID NO: 534040 - DNA, 4923 bp, Stenotrophomonas maltophilia
atgagcggagccgtacgggaagatctggacatcgcggtggtcggaatggccggccgctttccgggcgctgcagacataggccagtactggcagaacctgctcaccggcgtcgattcggtgagcaggttcgatcgtgatgaactactggctgcaggtcattcggctgaacgaatcgatagtcccgcgttcgtcgcggccaatggcgttcttgcggatgcaggcagtttcgatgccgagttcttcggctgcagccccgccgaggcggcggtgatggacccgcaatcgcgcttgatgctcgaatgcgtgtggcttgccctggaaaacgcgggaatggacacgcagcggcgcggccgcgacgtcggtgtgttcctgggtgcacgcagcacggtggcctggaccatgcaggcaatgctgtcggcgcatgctgccaacgtgggcggattcatggcctcgcagctggccaacaaggatgcgatgagcacgctgatctcctggaagctgggcctgcagggaccgagcctgaccctgcagacggcgtgctcgacaagtcttgtgggtgtgcaccttgcggttcagagcctgatcaacggcgaatgcggctgggccgttgccggtggtgccagcctgctgctgccgcaggcaaacggccacacctatcaggaaggcatgctgttctctcgcgacggcacaacgcgtgcgttcgatgccgacgcaaccggcagcgtgttcggtagcggtctgggagcggtcgtcctgcgccgcgcaggcgatgccttgcgtgacggcgacccgatctgggcgatcatcaaaggctcggctgtcagcaacgatggcgcccgcaaggtgggttatacagcgccaagcgccgctggacagtccgctgccgtccgcacggcatggcagctggccgagttggagccgcatcgggctgactacatcgaatgtcatgggaccgcgaccgcgttgggcgacagcatcgaggtggccgcactgcgtgacgtgtttggcaagggcaacgcttcgcccagcagctgcgcgctgggtgcggtcaagggcaacattgggcatctggattcggcggcaggcatcgccggcttcatcaaggcagtactggcacttcatcacggcattattccaccgaccctgcatttcgcccgcccgaaccccgcactggacttcgactccacaccgttctacgtcaactcccacgcagtgccatggccagagcgcgacggcgcgccgcgtgtagccgctgtcagcagtttcggcgttggcggcacgaatgcgcatctggtgctgcagagtgctgaaagctcggcgcggattgctgcggagcggctgaccgaaccgcggctcatggtgttctctgcacgttcgcagcagggcttgcaggcgcagctggaacggatgcgaagctggttgctgcagcgccccgctgtggatcccgcggcactcgccaccacgttggcacgtcgtcccgccctcactacccgggttgcgttcgccgcccagagcgcagcgcagctctgcctggccattaccgcatacctgcgggctcccaccgaggacattgcactcgtactccagaactcctgcagccacctcccggaagcagatgcagaggcgctggcggccgccgccggaccatggctcgacggcgcggcgacccgcgcgggcgactctttgtacggcgatacaggtacggcgctggcaatggacctgcccggctgccgcttcgaaacccgcgactacggtctggcgcacgtcgacgaggctgcatggcagacaatcgccaaggtactcaacggcgagggcgttcaggagccctcttcgcgtgatagcgaaggctggctggcaccctactggcggcgattccgtctgccggcgctgcgccaggacagtatcggggatggccttgtgctgatcgatcccagtctggtggatgccttcccgctggatggccataaggggctgcaggtagaggtgattgcgcccacggacccggagcagctcgatggcgcgctgcgccgcctaccgtcccagccttcgcctggtgccgccgtggtgcaggtgtccctgctggttccacccaccctggcaggcggcggcgtgcaggcattggacgcactgaccttcctggcgcgacgcatcgccgcattgccgacaccggctcggccagtgcatatcaacctcgtgaccgtaattgcaccggcgtcctctgacttccaggcacgcacgcaggcggcgctgacctgggcattgttgcaggcacttgcgctggtgctgccacaggaaacgcccggtctcacctgcacgctgatcggcgtgcagggcccggatgcgagctggaccggttcggcactcgcgcccctgctgcgcgatcctcgtcccggccccatccgactggatcgcgaaggcgcagcggttgccgatgttcgtcggctgccatcacacgtgcgctcgtccattccgtcaacgctgatcgcgaagacgttcgtgatcaccggtgccagtggccgagtggggcgtgcgatggcacgcactatcgcatcgcgctacggcggcaagctggcgttgctgacacggcgatcggcaaagtcggaagaattgctggcactgaaggaggagctggttgcgctgggtgcggcggacgtgaggctgtgcagcgtgtcgctgcacgacctgtcggagatgcgcgcatgcctgcagagcgtcgagcaacgcatggggtcgattcacatggtgctgcatgctgccggtgttgttgacggcgactcgttcgcaacgctgcagcagttgagcggagcgcatctccacgagcagctgcaggcgaaggcggttcccgcaacggtcctggcgcagatcgccgaggagcgtgccattgcgcattgcgtgatggtctcctcgatgtccgcgttctttggtgggatcgcccacgccgcttacaccgctgcaaacgcgttcctggacgaatggtgcaggctggcgaaccaggcacacatcggaacgcagtggacctgtgtgaactgggacaccatacactttgacgacacagcttcctccccgcgccctggcggttgggcgcaggatgaaatcgcgttgcggggtgagcactttcctgcattgttcgaggaaagcctgatcgcgcatccggacgaggcgcatctgatcgcctcggccgggcagttcatgcgacggatgcatgactggggcgggcatgctgccgacccgttggcatcacccgctgcgctgaacaccccgctgacgctgcgggcgcggccggagcggctgtccagcccgtatgtggcgccccgcgacgacactgaagcggcactggtccagatatgggaggccattcttggggtaagcggcattggcgtggaagacagcttcgtcgaactgggcggcaacagcctgcgcaccgtggtcatggcggagcgtgtgcatgtgcgtctcggcgtgcgcatcgcactgcagacattcgtggctgaacccacaattgcggccatcgtacagggaatgcacacctccgccagcgcagccgaagagcgcgaagacctggcccatatcgatccgcttgcgccgattcctgcgagcgaagatcaggagatgatccacgtctatcagaccacctatgcagacggcacctacaacatgccggttgcgttccggtgtcctgccggactgccgatggagcggcttatcagcgcgttgcatgcactgctggaccggcatgtggcgctgcgctgtacgctccagcgcaacgatgatgcgctgttgatgctgccccagcagcagcgggagatgcccatggacctgcagccagagggcctcggtgagcacgcgtccctgctcgccatgcagcgcttcgcagcacagccgttcgcgctggatcgcgaacttccgatccgcgcaatgctgctgccaagtgcagaccacaccctgggtcatcgggtcatcgtggtggtgcaccatatcgtctgcgacgcagtatcgttggcaatcctcagctccgatctgatggcgctgctccagggtcagccgctcgaaccgcggccctacgatttcgcccacgcgcgtaagcgcctgcagcagcctgcaagcgcgcgggatgacgcgcgggcgtattggcgtgccaacctgctaccgcttccgccggctctggagcttggtggtagcgacacccgaagtgcgccgacgaccggccgcggctgcacggtccggcagatgctgtccgtcgatgcatctgtgcagctgcgcgagctgtgcgaagagctgcgcgtgccaccgtttgtggtgttcatgacggccttcagcgtgtggctctcccgggttacttgctctgatgccttcctgctcggtgttccagttgccgggcgaatgacactggaggaagcgagggtggtgggctatctggtgaacatcgtgccggtcaggatcgagacccagagggcggcgggctttgccgagaacgcgttgggagtgaaggcgcagtgggccgacagcatgccctaccaccactatccgatcagcgcgcttgtagacgatctgcgcgccgagccctattgccgtcgtcgccgcgggcggcatccgctgttcgacgcggcattcaacttcctgcctcgtgagctgagcagcgcttcggaagcggcaacgggcggattccagcgcatcgaacttgaggcaggcagtgccaagttcgacctggaactggaagtcgctgagcacggggaaaccttcgaatgcactttccagctgcgcgaaggcatattggcgacgctgggtgaagccgcggcattgggcgagtttgtcagcttgttggaagaagtctgtgctgatccggataccgagctgtcgagccttttcgacagcagccggttcagtgcaagcgtatccaccgtcgacacggaattcaatttctaa

SEQ ID NO: 534041 - DNA, 11067 bp, Stenotrophomonas maltophilia
gtgctggccacgcacccgggcgtgcgcgaggtggcggtggtggcacgtccggatcctgcgggggagccgtcactggtcgcctatctggtggggccgcaggtggaggtggaagcgctgcgcctgcatctggccgggcaactggccagctacatgctgccggcggcctacgtggtactggaggcaatgccgctgtcggcgaacggcaagctggaccgcagcgcgctaccagaaccgctgcgccttgccacaggggcaggtcatgtaccgccgcaggggccgctggagacccagctggccgcactctggtgtcaggtcctgggcctggacagggtgggacgcgaggatcatttcttcgagctgggcgggcactcgctgcgcgctgcgcgcatgctggcgcgggtggaacgggagaccgggcagtccatttcgctgctggagttcttcgccaacgacaccatcgccgggctcgcacggcacattgtgcaatccgctccggtgccgcgcgacgcgccactggcattgccgcgtggccaaccactgccggcctcgatggcgcagcgccgcatgtggttccttgaacaactggatccgggagccaatcgcgcctatcatcttccgattgcggtccgcttggacggggcgttggacagggcagcattgagggctgcgatcgacgcgctgcaggcacgacacgaagcgcttcggacgcgcttctgtgtgatcgatgacctgccgcaccagatcatcgatccggcttcgccgggtatcgcgctcatcgactacgatgtgagcggattgccgccgcatacgcgacgccatcgcttggaagaggcagttgaagaggaagcgggcgcgccattcaacctggagacggggccgctggtccgcgggcgcctgatacgtctggatgagaacgaacacgccctgctgctgacgctccaccacatcatcgccgatggcgcgtcgctgcaggtgcttgccgacgatctggccagcggctaccgcgccgccctggcgggtgtatcggcccatgcggcagcaccggaactacaacaggcagatctgtccgcctggcaggacgcacgcctgctggccgatacccatgcagagggactggcgtactggacggagcatctgcgcgatgcgccgccgctgctggcactgccttgcgatcggccgcgacccgccaggcagagccatcgcggtgcgcaggttgtcgcggtgctgccgacggcgcaggcacaacagctgcgacggttggcccaggaccatggcgccacgctgttcatggtcatgcttacggcgtggtcaacgcttctttctcgtctcaccgggcagcaggatgtcatggtcggaaccgccgtggccaaccgcgacggcgcggccatggccgatgccgtcggtctattcgtcaatacggtggcattgcgcctgcggccgggcgaatgtgagagtgtccacgctgcccttggcaacgcgcgcagcgtggtcctgggggcgttcgaacaccagcatgttccgtttgagagcgtcgtggaagcgcttcgcccgcagcgcagcctttcctacagcccgttgttccagagcatgcttaccgtcgatgggccgtcggatgggcccgcactgcagcttgccgacgtgcaggtaaccgcgttggccgaagagacccgtacaacgcatttcgacgcgtcgcttgcggtgatggatgatggcacgcagatcgtctgcgcgctggagtatgcccaggatctgttcgaccgctgtacggtggaagcgtggctggacatgctgcagaccttgctgctcggcatggttgagcaacctggacaggcacccgcacggctgtcgctgttgccggctgcgcaggaacaggccttgttgcacggtcacgcgggggcatcggtcacgcttgccgcgccggcgctggtgcatgcgcgtttccgagcgcaggccctgcgtaccccagacgccgtagcgatcgaggaggcggggagctcgctgacctatgccgagctcgatcaacgcaccgataggctggccacatggctgcgcggcaccggcctgcagcgcgaggagctggtagcgctgtgcctcgatcgcagcatcggcatggtgacggccatgctcggcgtgctcaaagcgggcggggcatacgtgccactggatccgagccacccagatgagcgcctgcgattcgtgctggacgattgtcgcccacggatcctgctcgccgacgccggactgatcccgcggttgcgcggactggcaggcgtacaggtccaggtgcatgagctcccggcgatggacagcgacgccgcgcaggagagtggtgccgaagctgcagctgacctccccccctacgactcgctggcctatgtgatctatacctccggctcgacaggtgcccccaagggagtgatggtcgagcacgccagcgtggtcaaccatatgcaggtgcatgcgcgcttgtgcgggatggccgagggcgatcgcgttctgcagttcgcctcgtgtacattcgatacctcggtcgaggagatattccccgcgctggcagtgggcgccacggtcgtgctgcgtccggccgacatgatggtgcccgacgaatcgttcgcacgcttcctccaggcgcagcggatcaacgtccttgatctgcctaccgcattctggcacctgtggtcgcaggaagtggccgcaggtcgaagcctgccgcctgacacgctgcggatcgtggtcatcggcggagaagctgctttggcgagccgtctggatgattggcagcgcgcaccgcagaccgctggctgccccgtactgaatacgtacggtccgaccgaggcgacgatctacgccaccgcccaggtactgtcgcctgccgacgccaccggcgcggtgaccatcggcgttccgatcgacaatgtgcaggtgttcgtgttggacgctgagggccagccgctgccgcctggtcttgtgggggagattcacctggccggcgcaggcttggcgcgtggctatctcggccgtacgcaactgactgcggaacgattcgttcccgccgccttttcgccacacggcagcccacgcctctaccgtaccggcgacctcggacgctggaggcggaatggggaactggagtacatcggccgtaatgacttccagataaagctgcgcggctaccgtatcgagctgggagaaatcgaggcctctctggccgcctgtcccggcatccgggagtcggtggtactgccacgccgggatgcgcaaggggatctccagctgcaggcatgcatcgtggctgaggagggcgcggatacgtcgccgccaacgcttcgcggatggctggcggcacgtctgcccggccatatgatcccggcgtccttcgtgacactgccggcactgccgcttaccggtagcggaaagctggaccgcaatgtgctctctgcgctggccgacgtgcaggcgacgcgtgacgacggcgacagcgtcgtgttccagccgccccgcggagcaaccgaacaggcgctggcggaactttggcaggagctgttgcaggtaccgaagattggccggggggacagcttctttgagcgcggagggcactcgctgatggcgctggctctgctgtcgcggatccgcagccggcttcatcgggacgtttcgctgaaggatctgttcgccaatccagtgctgtcccagctggccgatgccctgcagcgtgccccggtgccgagcccgccgatcaccgtagcgcagcagcgctggccgagtcctttgtcctttgcccagcagcggctatggttcctcgcacagttgccgggtggcagcacggcctaccacatcccgctcgcggtggaactgcgtggcccgctccagttcgatgccctggcaagtgctctgcggcgagtgacgcaccgccatcaggtactgcgcagccggatcgcgcccgagggcggcgcgccattgcaggtgctgctgccgccaggctgggagatgccggttgttctcgaggagctcaacggtgatccgcaggcgctgcaacgcctgctacagcgaatggcggacgaaccattcgatctcgaacgcgacccaccactgcgtgtctgcgttgcgcggatgcagcctgaccaacacatcctggcgatcacactgcaccacatcgctgcagacgggtggtcggttgcgcgcctcttcgacgaggtggggacgctctaccgcgcgttcagcgcagggcaggccgacccgctggccgaacccctgttgcagtacgccgactacgcacaatggcaacagcgctggcttgccggcgatgtgctgcaaacgcattcgcgctattgggcgcaatcgctcgccaacgcccccacgatactggaccttccagcggatcgtccgcgcgcgccagaacagtgctacgacggtgccaccgttgccatccagatcgatgccgggttggccggacaactacgacagctcgcgcgccatcgcggcatgaccctgtacatggtggttctcgccggttggggcgctctgctgtcgcgtcttggcgggcagacggacctgatcatcggtacccccgtggccaatcgagccctgcccgagtccgaggccatggtgggtctgttcaccaacaccctggcgctgcgattgcgtatcgagggtagcgtctcgcaggtactggcacaggccaaggacgtggtggagggcgcgcaggtacaccagcagatgcccttcgagcaggttctggagattgcaaagccgccacgccagccgggcagaacgccgctcttccaggtgctgttgaactggttggaagctcccttgcaggcgccggatctctcaccactccaggtggcggcacttcagcaggactataccgtggcgaagttcgacctcgaactggccatcggtgagctggaggacggcggactgggcggcgagctgcgctacgccaccgcgctgtacgaccccgccaccattgagcagcatcgcgactatctgctgcgcatgctgcgtgcaatggccaccgacaccctgcaggcggtggaggatgtggagctgctgagcgaggagcagcgcgctgtgttggcgccgcaggccatttccgccgggcgtgatgcaacagacgctacccagcagctgcatgtgcggttccagcagcaggcggccgagcggcccggggccgttgcattgcgttgcggcgaccagcagctgagctacgcgaggttgaacggccaggccaaccagctggccaggtatctgcgcaagtgcggagtgggcagcgaagatcgcgtcgcgatctgcatggaacgcggcatcgacatgatcgtcgcgctgctggctgtgctcaaggccggagccgcctatgttcccatcgacccagggtatcccgccgagcgcatcgcctacatgcttgcagatgcagatccgacattgatgttgacagatggcgtcctcgacgacgtggtcaacgctctgcctgcgggccagacggtggttgacgtgcgccggcagaaggccatgtgggcgcagcagcctgacagcgacctgccgccaacgcagtgttcggccggtggccgcgaccttgcctacatcatctacacctctggatcgacaggcctgcccaagggcacgatggtcgagcacgctcatgcgctgcggttgttcacggccactcggccctggtttgattttactcaggaggacgtgtggacgctgttccattcgatcgccttcgacttctcggtatgggagatcttcggcgcactgctgcatggcgggcgactggtcgtggtgccccaggcgacgacccgatcccctcgcgagttcctgagcttgctggcacgtgaaaatgtaaccgtgctgaatcagacgccgagcgcgttctatcagcttgcccacgccgaggccagcgacgctccgcagttgacgctgcgctggatcatatttggtggcgaggcgctggacctgcgaaagctcgcatcctggtacgcgcgccacccggatacccagccacgcctggtgaacatgtacggcatcaccgagacgaccgtccacgtcacctatcgccccctgttcgccggcgatgttgagcggttcggcgcggtcagtccgattggcgagccgattcccgacctgcggctgtacctgctggacagccgacagcgcccggtaccaaccggcgtagtgggggagttgtacgtagctggcgcgggtgtcgcgcgtggctacttccgccgcgaggcattgaccggcgagcgattcatcatcgatccgcacggaagtgggcagcgcctgtaccgcactggcgaccttggacggcgccgcagtgatggcgagatcgagtacctggggcgcaacgatctgcaggtcaagatccgtggtttccggatcgaactgggcgagatcgaatccgcacttcttgtatgccctggcgtgcgtgaggcgatcgtcctgtgcagacctgacgcgcacggggagccgcgtctggtggcatggatcctgcccgccgttgccggcgcggctccatctgccgcaaccctgcgcgacacgctttcgctgtcgctggccgagtacatggtgcccagcgcattcgtcgccgtggatcgatggccgctgaccgggaatggcaagcttgatcgccaggcactgcctgccccggaccgcgattcgctggcggtgcagtcgtatgcgcccccaacgaatgagaaggagcaagccgtcgctgccattctggctgaactgctcggtctggagcgggtcggtcgccacgatgacttcttcgcgctcggcgggcactcgttgctggccctgcaggtggtcgagcgtctgcgtgccgccggcttgcataccgacgtgcagcgtctgttccggcagcccacgcctgcaggtatcgccgcgtcggccgatagcggccacgccgtcgcgactgccaagaccgaggcgccggcgggtgtgcctgacggtgccgaccggatcaccccggacatgctgccgctggtagccctgagccaggcacagatcgacgggattgttgccgcggttcccggcggcgccggcaatgtccaggacatctacccgctggcgcctctgcaggaaggtttcctgttccaccacctgttccagcagcgtggtgatgtctacctgactaccaccgtctaccacgcgcgcaccaaggcagatgcactcgcctacattgcagcggtacagcaggtcatcgatcgccacgacatcctgcgcacctcgttggcctgggaaggtctggatcaaccggttcaggtggtctggcggaaggctccgttgtgcggtgagcacatcaatctcgatcccgacggcggcgacgtgaccgctcaactgatcgagcacttcgatccctcgcactaccggatggatctgcgccaggcgccgttgtggcggatcgtgcttgcacacgacgaaacccatgatcgctgggtcatgctggaactgatccatcacatcatcgacgaccgcaccaccatgcagttgctcgaagaggaggtccggtcgatcctgaacggtgccacggacgcacttccgccgccgcgggcattccgcgacttcgtcgcgcgcgcgacggaggcgaccaggatccgtgcacccctccacgaagcattcttccgcggcacgctcggtgatgttgacgtgccgaccgcgccgttcaacatcctggaagtaccggctgcgggtgatcgtatcagggagtacggtggcgcactcccggacgggttggtgagcgggctgcgccgtgctggccgccaggcccgtgtcggcgtagcagcgctgtgtcacctcgcgtgggcggtggtgctgtcgcgcctgtgcgatcgcgacgacgttgtattcggaaccgtgctgtccgggcgaaccggcgagggcggcgacgatggccgcgcccttggtgtcttcatcaacacgcttccgctgcgtatcacgctcgagcgcatgagcgttgcggagtgcttgcagcagacccatcagaacctgttggacctgatgcagcacgagcaggcgccactggtgctggcgcagcgctgcagcgcggtggcgccccccttgccgctgttcacatcgctggtgaactaccggcacgtggcaggcacagagtcggcgagcgccgggccccacggcgaagacgcattcggcctccgctttgtctcagggcatgaacgcagcaactatcccttcaacctgtcgttcaacgaccatgcgggtgccggtctgagcatcgacctgcaatgcccgtcggaggtgaacgtcgacgccctggcggcgatgctggaaaccacgttgaacgccctggtgcttgccttggacacgatgccatcgtgcgcggtgggcgatcttgaggtgctgccgcccgcccggcgcgcggcgctgctgcagaccagtacaacacctgcggcgtgtgatgggttcgtgcccctgcatcatcgcttcgaagccaccgcggcccgtctgccagacgcggtggccgttcgtgatgcgacccggtcgctgcgctatcgggagctggacgctgccgccgaccgcctggcggcacacctgcatcatctgggcgttgcacgcggtgccagagtgggcctatgcgttgatcgtggcgttccaatgaccatcgcgctgctcgcggtactgaaggcaggcggcgcgttcgttccgctggatccgacactgccgccggagcgactgcgctacatgcttcaggatgcgcagcctgtcgcggtgctggcctgtccccgccagcttacggccgtgacgctggaggtcctgcgtgcgagccaggtaccgctggttgacctgcaggagcccgtcgatccgcagatggcggccgcatcgcctggcggcgatccggtctcggccgacgatctggcctatgtgctgtacacctccggctccaccggaaagcccaagggcgtgatggtccatcacggcgcgctggcgcattacctgcagcatgtcctgcaggcctacatgcccgctcctgtcaccggtggcgttgtggccacgccgttcggtttcgacgctacgttgaccaccctgctggggccgtggttgagcggtggcaccgtcatcctcacccccgatgaccgtgagcagagcctgcacgcgctggcatcgttgtgccagcagccggaaccacttctgttcaagctgacaccttcgcacctggaggcgctggcggacattctgcgcggcgcgcccggcacagcggcccatgtcttcgtggttggcggtgaggccttgcagtggcgtactgtcgagcgcttccgccgcctggtggcaccggctgcaaccatcatcaacgagtatgggcccaccgagaccgtggtcgggtgttccacgcatgtactgacgccggacatgcccgctgacggtaccgcagtgtccatcgggcgacccatcggcggcacccgcatctacctcctggatcggcatgggcgcctggttccggaaggtgtcgccggcgaggtccacattggcggcgatggtgttgcgctgggctatcttggacgcagcgaactgactgcggagcgcttcgtggtcgacccgttccgggccgaccgccagcaccggatgtatcgcagcggcgatctggcggcgtggtcgatcgacggcacactggtctatctcggccgcaatgatgaacaggtcaaactacgcggtcaccgcgttgaactcggcgaagtggaagcctgcgtggccgaatgcgcaggtgtgcgggacgtagccgtgtccgtacaccgcggcagcgacggccatgctcgcctggtggcgcatgtcgtgaccgagagcggtcgcgcaccggatgcaacgcagcttcgccgtcagctcgcgggccgtctggccgactacatgatcccgcagcagtatgtggcgataccggcgctgccgttgacacccaacggcaagctggaccgtgccgcgctgcggacaccagatgccccacattcggcatcgcagttcgtggcgcccggcaatgtgatcgaacagcggctcgccaccttgtgggaaagcgtactcgggcatgcaccggtcggacgcgaagatgacttcttcgcactcggtggccagtcgctgctggcggtgcgcttgatggtgcgcgtgcgtgacacccttggggtggatctgccgatccggcagttgttcgtcacccccgtgctgaaggatctggccgcatggctgcaggcgtcccgttctactgatccctctcatctggtgaccctgcgcgccgagggcgaacgcgcaccgctgttcctgatccacccgggcgaaggggaggttgcctatgcacacgcattgagccgatgcctcgatccccagcttccgctctacgcgctggctgcccagggaatggtggagggcgaggaggcggcggatgatctccagcagatcgcgaagcactacatagcaaccattcgcagcgtccagcccagcggtccttaccggatcgccggatggtcgctcggcgggacgattgcctacgagatggccaggcagctgctggatgcgggccagcgcgtgggcttcgtcggcttgctggatacgcgcacgacgtatccggacgccctgaggctgcgaggttccaaggcgcaatccatgccagccatcgagtacctgctgtacacgttgggctccgctgcagcgccttccgtccgctcgatcctggagtggcatgccggccgctacgacctgcacgccatggtagccgtctgtcaaagacacgatcttctcgattccgacctggacacggctacggtctgccgccacatcgcggtgcgggctgggctgcaggcggcggtggcaggctatcggccgcaggcgctccgggccggagcatggttgttcgctgcggcagattcagacatcgatctgcacgcggattggcacgcggccgtcggcgaccgggtcaggtgcattaccgttcctggcgatcactactcgatcgtcaccccacccaacatcgaagcgcttgctgaagccatcgaacaggcgctcgaagacgtacatgaagggcaggccgaagacgtgtccgatattcaacaggagcaggaagcatga

SEQ ID NO: 534042 - DNA, 489 bp, Stenotrophomonas maltophilia
gtgccgactaagcgcctggcgctgatcggctgcctgtccctgcttgcggcgtgctcgccgcaggcagcggacaacaccgccggcgtcgcgccgaacgcagcacccacatccgagccgcaacccgctgccgaccggccttcgggcgacgaggcgttggacagggcgcgcgccgcagccggctgcccggttcctgcggacgtgtatgacgtcgacgacgtgcgcatctactgccagatgcccagcgatgtgcaggccttcctcgcgcgcgaaaacacctgccagcactttgccggcgaggaaccctacgacgacgagcgccgccgtgagctggaagcggccaatgccgagtactgcgagggccgcgagaagaacttcagcgcgctggttgcgcggcatcgcgacgactgcgtggtccgccaggcactgatcgcgatcaacggccgctacgacctggtgttcgagctggacctgaagccctgcgagggctga

SEQ ID NO: 534043 - DNA, 4458 bp, Stenotrophomonas maltophilia
gtgagcatcgccgccaagcatttcgatccgcagctgggcatcgacatccacatgtacgcggtgccgccgtgcccgctgccgacgccgcatatcggcctggtgctggatccgttcgactacattccgttcatcggctcgaccatcaaggtcaacggtgtgcatcgcggcaccgcaggtaccggcggcctggacatccacattccactgggcgtgtggggaccgccgctggcggcgccgatggggccgcagttcgacggcgaagaaatcttcatgggcagccgcacggtgtcggccgatggcgagccgttctcgcggctggcgatgccggtgctggactgcaacctggccggcatgatcaatccgttccgggtgaagaagccgaagaagccactgcgtgcgatgtcgctgccgaccggcctgaacgtggccattcccaccagcgtcaaggtgggagggccgcccacggtgtcatggaccgcgctggcgttccgcgccgcgttcgccggactgggcaagctgcgcaagagtgcgttcttccgcaagaagatggatgcgtttgccaagtggcggcgcggcaagtggggccatctgccctccggcttcctgaagtgcaaggtgctgcgtgccgagccggtcgatatccgcgatggcagcgtggtggtcagccaccaggacttcgacattccggggcggctttccttcgcctggcagcgcagttatggctcgcgccgcgcgggcgagcccggcttgtgcggcgccggctggcagacgccggccgacattcgcctggaactgctggacgacggcagcgtgtggttgtccggcccggaccaggccgcgttcttcccggagctgccccccgctgaaggcgaggccggggcgatcctcgatttcgtcgatggcgcgcgcctgctgcggcggcgcgggcagtggcaggtgcgcttcaagagtggcctgaagtatgtgttcggcggcgaactgccggcaggcgtgagcgcgctgccgaatccacagtcctggccgatcgagcgcatcgaggacgcgcacggcaaccactggcggttcgagcgtcgcgacggccatctggtgcgcatcgtcgagagtggcatcggtgacctgcagggccgtttcatcgaggtggaggcgcgccacggccgcatcgaccgcatggcgctgcatgacccggccaccggcctggtgcatccgctggtgagctatcgctacagtgccgacggcgatctgctggcggcagtggacgcgctgggcgcgccgcgcaccttcgcctacgagcagcaccgcatggtgcggcacaccgaccgcgttgggctgtcgttccattacgcgttcgacgcgcagggcagggtggtgcattcgtggggcgatggcggcctgtacgactaccacttcgagtacgacgcgctgctgcgcgagacccgggtaaccgactcgctgggccacttgagcgtggtcaagttcgacgagaatcagctgccgctgtgcgagatcgatccgctcgatggcgtgacgctgttcgagtacgacgattttgggcggaccgtggcggtgaccgatccggaaggactgcgaacggcgtttgcctatgatgcgcatggcaatgttgtcgagctgctacgggcagacggcagccgcatacttcacgagtacggcgatctggatcttctggctgcagtgcatgttccagattctggaacatggacccagagctacaatgagttcggagatatcgtcgcgcagacggatcctctaggcgcagtgactgaattcgcctatgactctgcggggcaattgctgcagcagacaagcgcaagaggaggtgcgacgaggcttagctatgacaggcatggtgccgtcgcgagtgtcatctctgccaccggtcgggaggtcaggttcgagcacgatggtaggggcctgctcatgcggcaggttgacgctggagggaatcagactcagttccgatatgacgtgaaaggtcgattgacggagtgcgtggagcgggatggtcggagtgttgcctattcgttcgatgcggaagatcggatttccgtttataccgacgcgctgggaaaccgtactgtcctggagtacacaggcctgggccaggtttcgcggaggcggtcgccggatgggtcgcgggtcgagtatttttacgacactgaagagtgtctggtaggtctcatcaattccgatgggcagcgctacgaaatcgtgagagatcctcttggccggatcgtggaggaaatcgattactggggacaggcccggagctatggatacgatggcgcagggcggctcaaagagtgcgtcgatcccgaaggcagggttgttctatacacatccgacaagctcggccgtgtgtcgcggcgctccgtggtatgcgctggatatatcgaagaggattacttcacctacgacgcctgcggaaatatcgtcgagtgcggcaatgcaagtcggatcgtcaagcgcgtgttcgacgcggtggggaatctggtggaagagtctcaggatggcttccgcgtgcgtagcagtttcgacaggtcaggcaaccgcgtgtgcaggagcacatcgaccgggaacacgattgaatttgcttacgatcttgatgatgagcctgtcacgcttgccatcaatggagaacgttgtctgagtgttgcccgggatgaatccgggcgtgtggttgaagagaagatcggccgactcagccggcatctgcagtacgacccctcctcgaacgtgagctcgcaagcggtcagatgcggggatgcgccgctgtttgatgttgcctacgaatatgatcgtgcaggaaatctgatccgacgcatggacagcgtgcaggggactgatcagtatcgctacaacgccttgggcaggctcaagcagcggattgatccccagggccgactgcacaatctgcttgacggatctttcgcctcacgactgaagacggacattcgaagacatgctccggcaaagcgtgtgggtggggctgaagaggatgaactgtggactcgtgagggcgtactcgatggcgtgagttacgttttcgatcgaaacggcgcattggtctgcaagcgtagcctcgacggcggtcggcacctcgagctgacctgggatggccatcagcgtctggcagcggcgacggtcgacggctcccggtgggtctatggctatgactctttggggcgtcgtgcattcaagtcaagcgggaatagaacggtctggttcttctgggacgcgaatgtattgctgagtgaggtcgaggaggtcaggactgatgacgggtggaatgtggccgagcccggcagtcgaacaagtgtggtggaatcgaggcggcgcgagcgtcgtctcgccgcgctatctggcagggcgagggagtacgttaattaccccgacgggtttgtcccgttcgcaatggttgatcccaagacaaagcttgatgcggcagatggatcgaggggccgcgaaggtgaaggaagggctgctcagcgtccgcgtctggaactgctgcaaggtgccgggccggttcaagccggagaccgtggttcgctcggtatgttgggaggggcagttctgggcggagcaaagccaaaggatgcttcaaccgggatgatccttggcagtacggattcgcagcttggtgccgcacgcgccaggccctcccgcaatgtcggtgcacccgccagcgctccggatgcagaagtcgcagtagcaaaggtctattacttcttcaacgatctcaatggccgaccggtcagactgctggatgctgacggcacggtggtgtgggagagagctgcaggcgcatcgttgagtgatcagccttccgtccggcagattgctgtcaatcttggctatcaggggcagtacgtcgatgaggagacggggctgtgctacaaccggcatcggtacttcgatcccgcaatcgatgaattcgtgtcgcaagacccgatgcggctggccgcaggagagagcttgtatgcgtacgctctgaacccattgggctgggcggacccgcttgggctacactccacgcaggtggactacggcagtaccgacctcagtcagatggctcagatgcatcgcttagagaacggcatcaagggagggcggaacattgcggttttcgagtatgtcgatggcgcggggaatccaagttacatcgtggatgccagtgggggtggcctgcactctgagaggaggatcgcggccaagttgacccagatgaacattcctcctgagaatgtcaaacgtgtctatactgaacttgctccctgtccgccggtcagaggaatgcagtactgcggaagaatgctgtccagtgttttccctggtgcggcggtcactcacagcttcgattacggtgtgacgcgggcttccagacgatcaggcgtcaaggcgctgaaggcggcggtcaggaagctattcaatggttgtggctga

SEQ ID NO: 534044 - DNA, 588 bp, Stenotrophomonas maltophilia
gtgactgaaactgcattctcccgcgtttatggctcaggctcgttggaggtgagtgcccagatccttcgggatttcggactggaaccgtcgaccagtgagctgatattgcggctgggacttccttcaaggctgcccggtgatgtgcctattgttcagttcgaagtgccccgcgtggtcaagatcaatggcaccagacttctggctatcgggcgagagccgtggggtgaggatctgctgctgtgcctgtcggcgagtggcgaggtacttgccgcgggtgatggtggacgtcagatcgtgaatggacgcctgtcgagcttccttgggtttctcgaagcgtatgaggcattccaggcccaggcaaaagcggaagattccggccccgtggtctactcccaggcggagatgcaggcccggctggaggcattcaagcgaggtgagatgcccaagcgctctgcaaagccgcgattcgatcgcagtgaggcgatcaggaccatggtgtcggactggaggaggcttgattccgctgcgctgaaggaagggtcatggtggtcaattgttctggagcagatccaggacggccttatctga

SEQ ID NO: 534045 - DNA, 387 bp, Stenotrophomonas maltophilia
atgctgaaaacctgcgcattgctgctgccgggcctgttgctggtcgcgaacgtgcaggcgcagaccaacgtctacaagtgcgtggacggaccgcatccggtctaccagcagacgccttgccagggccgggccgagtggcgttgggaggttgcggccgaacccgggccatcgtggggcgcggcggtggtggagggcagtgagagccggccgaaaccggctgcgatgccgccacggcgtgcacaggcggcgctgatcgcgatcagttccgatcccgtcgcctgtgatcgcgctcgccggcaacggcaggcggcgctggccaggcgcgcccggttggatctggtgcaacggcgccagctggatgatgcggtgtacgacgcctgccgctga

SEQ ID NO: 534046 - DNA, 591 bp, Stenotrophomonas maltophilia
gtgaaccctgtgctgctccgaagcctcctctgtatcgcctgtgttgccccggtcgcagccgttgcgcagaacctcgtcgtcgagcccgctgccgcaccagacgttgcatcgcccaagcgctacgccaaggacgggttgaagatgcaggtgcccgggaactggacggtcgtggaagaccatcccagcgagggagagaaccagcggcgtgtactcatcgaagccgacaagagccgtttcgaggtcttgaacctggacgtccagatctatgtcgcccacaccagcgacaccacgtcgctgccggattgggcggcctattcgtactcgctggatgtgggcgagagcgggcactacggaccacccaggtacacgcccttccagttggcgccgggcgtgaaggcccatgccacgcagttccagcacacgcttttcgaagacgaccaaccgtatgcgcagcgcctgcacgtgctggccgtcaagcggtgcggccagcagtggaactgctacgcgtccacctggacgctggaggcaaatcgcaaggccgcggaagcgggcatgcgaaagatcatggaaaccgtcacgttcacggactga

SEQ ID NO: 534047 - DNA, 588 bp, Stenotrophomonas maltophilia
atgaaacgtcgcccgaaccacctgctgcttgccatcgcgctgatcctgccaacggctgccatgaccagcagtcacgtgccagcgcctgcgcctcaggccgatgtcgcctcgcccaagagatacagaatcgatgggctgaggctggagttgcctggaaactggtctgtggcacgggtcggattcgacgacgaaacgaacaaccgctacgtgcgtgtcgaagctgacctggagcggcctggacagatcgcgctcgaatcaagggtagacgttgccttcgtcgatcaggctgcgacgctgtcggagtgggcgtctgcgacgtatgcgtcgcagccggacgtggcgctgttcggggaacccacacattcagcattcgagctttccccttcgatccaggcctatgcgacccggttccgcgacgaccgtttccccgtgggtcatccgaatcgtgatcggctgcagctggtggccatccggggctgcggtcgcggctggtcctgctatgcctccaccacgacggtcgaggccaatcgcgaagcggctgaggcggggatgcgcctgatgctcgaatcgatgacctataccctttga

SEQ ID NO: 534048 - DNA, 342 bp, Stenotrophomonas maltophilia
atgcaaaggacgagcgcagcgcgggcaaatagcgtgacgcaggatgcacgcgtagaactcgagctcaccttcctcacaccggaacagggcgggcgctctcaaccggcctcggccaacggctatcggccgcacctgcgcgtgccacccgatgacacgctgctcggcgttgcgttcgtgggcgccgacactgttttcccggttgggcgtccgctgactgccgtggccacgctggtctacgcgcctgccgtttcgtacgcggcgctgcagccgggagcccctgttgagatatgcgagggtgcacgcgtggtcggtcatggacgcgtcgttcggcctctgacctga

SEQ ID NO: 534049 - DNA, 504 bp, Stenotrophomonas maltophilia
atgtcgctaccttttgtcgggcagataatgcccgcggcgtttggttttgcgccgaaaaacttcgcgtcctgcaacggccagctgctgcccatcgcacagaaccaggcgttgttctcgttgttgggggtcacctacggaggcaatggcaccaccaacttccaactgcccgacctgcgcagccgcacacccatcgggtttgcacagggcgtcccccagggcacgctcggcggcgtcgagaatgtcaccctgcaggtctcgcagatcccgcagcacatccacacgttcaatggcaccaccacggccgcgagtacgcgcattccggccggaaacgtcctgctgggcagcaccggcacgcagaatgtctatgccgctgccagtggcacgcaggttccgctcaatgccctggacaacgcaggccagacgcagccgcatgccaatatccagccctatctggcgctgaatttctgcatcgcgctgaccggcgttttcccctcgcgcagctga

SEQ ID NO: 534050 - DNA, 531 bp, Stenotrophomonas maltophilia
atgtcaacaccctatgttggtgaagtgcgcctgttcccctacaacttcgcgccgctcggctggctcgactgcgatggacgcctgctctccattgccgagtacgaggtgctgttcaacctgatcggcaccacctacggcggcaacggccaggataccttcgggttgccgaacctgtgcggtcgcgtgcctgtccatcagggccaggggggcggtttgtccaactatgttcttggacagtcggggggtactgaaacggtgacgttgaccaacgcacagttgccagcccacacccactcgttcaatgcggtgacgtcggcagcgagctcaccaacaccgggcagcacgctgcagctcggctcggtcagcggcgaaacgctgtacacaagcagcattaccggcattgccggcggcaccctggcgcccagcgcggtcggtgtgagcggtggcagccagccgcatgacaacaccatgccctcgctggtggcgcgctactgcatcgcatgggccggcgtctatccgtcgcagggctga

SEQ ID NO: 534051 - DNA, 534 bp, Stenotrophomonas maltophilia
atgagcgatccctatcttggcgagatccagatcttcggcttcaccttcgcccccaacaactgggccatgtgcctgggacagctgcttccgatccagcagaacaccgcgcttttctcgttgttgggcacgacgttcggcggtgacggccgcaccacgttccagcttcccaattacagcaacaacgccagctgcggccagggcaccggccccgggctgacgccgcgcgatatgggtgaagtcttcggctccccgcaggtcagcctcatgatcaacgagatccccgcgcatacccatgccgcgcgcatctacaaccagcccaacaaggcgttgcgcacgggtattcccgctgcgaacgatgccctggtgacgccgggtgcggtgtcgatcctcacccccaccaccacgcccaacagtgcctatcctcccaccacgatcggcatcgccgggggcggattgccgcacgagaacaggcagccgtatctggcgatgaacttctgcatctgcttggcgggcgtgttccctcaacgaccgtga

SEQ ID NO: 534052 - DNA, 549 bp, Stenotrophomonas maltophilia
gtgagcacacaggctgcattggcgtttccttcgttgcgggcagcctggctgccggcagcggaggaaacgctgcccccacagctgcgatggcgcgaagcggttgatgacgatctgccgttcctgcgccagctctatgccgacacccgcgcggccgagctggccgcagtgccctggccagaggcactgcggcagcagttcctcgacagccagttcgcgctgcagcacctgcacttcaccacgcactaccagccggcacattatctgctggtcgaacattcgggcacgccggccggccgtctttacctgcacagtgatgggcaccaggccaccgtcatcgacatcgcactgacacgcgcgatgcgcggcagcggtatcggctcacacctgctgcgcctggtccagcaggttgcccggcgcgatggcctggcggccgttgtgctgcacgtggataagcgcaatgtggcagcacagcggctttatcatcgcctgcacttcatcaccgaagccgatatcggcagccacctgcagatgcgttggccgacggcctga

SEQ ID NO: 534053 - DNA, 789 bp, Stenotrophomonas maltophilia
gtggcgctggcattgctcctggcacgggtcacacaggccatcgacgtgacctcacactacgtagcgatggcaatcctgttgttcaccggcgtgatgattcgcaagcaggcgtccggactgtccttcgcccgcttcgccctgcgctggtgggctgacatgcgtcggttgacgctggctctggcgcggctcgaatggcgggtgcattgctcgatccttgggaaattcgcatggatgaaatcgcccgttgagggcgatgatcaagtgtttggtttcaccaaggctgtggactatcgcggggcattcgttctgatgatgctcctcgcgttgctggaggtgcccatcgctcacctgctggtgcactgcttcatcgaggaggacaggcgcttgcttcttcatgccgtccttgcgtatctcaccctctacggagtgatctggatggtctcggaccgccgcgctgtcggacgctcttcccatcggctatcgagccggagactgcaggtgcagatggggtggagatcgagcatggacattcgcgtacgggatatccgtggtgtaacgctgctgcagtcgaatctgcgcgcatgggcagaatccaggaagcttgatcgccgggagctggcggtggtttcgccgttggacgcgcccaacatcgtgctggagctggacagtcgcgacacttacctgagtctgctttccatcaagccgatgccccgctatctggccctcttcgtcgacgagccgcagctgctgaagtcagcggtagagagcgtaatgagcgagccgcaatga

SEQ ID NO: 534054 - DNA, 672 bp, Stenotrophomonas maltophilia
atggcacctgctgctctgtctgccgatcggccctgccgggtggcgctgctggatccgcacccggtattgcgactgggcgtggaggtgctgctgcgccagcacaccggtgtgcaggtaagggtgagtctttccaatgagcagcgcctgctgcggctgctggagcgcaatcccacctgcatcgacctgctggtgttcgacgccttgccgatgggcgacctgggtgatggggtagccctgctgcgcgtgctgtcgcagcgctggccgatgctgccggtgctggtgctgtcggcacagtgcaacgccagcgcggtgagcacgaccatgcgcgcaggtgcacgtggcttcctgtccaaatcgacggcaccgggcacgttgctgcgcgcgattgatgtcgtggcccggggcggccgcttcgtgccgccggagctgcgcgcggaactgaacccgcagggcgcaggacacacccccacgccgacgctcgcaccgctcagccagcgtgaacgcgaggtgctcggcctggtgttgaaggggttcagcaccaccgaaatggcgctgcgtgccggccgttcggccagcaccatcagctcacagaaaacgtcggcctatcgcaagctcggcatccgcggcgacggcgacctgttccgcttccgtcacctgttcgaatgcggttga

SEQ ID NO: 534055 - DNA, 867 bp, Stenotrophomonas maltophilia
atgcatcgaagaagtacatttttctttctgcctgcatccatgatcttgatcgggtcaggcatctggtattgctcaacggccaaagacacaacggaggcagagcgcaagaacaccactaccatttcatttgcaccagccactggaaattcttcgagtacatcaacctccgccgttgcagcctcgtcaccacaatcgccggcaaacagggctgttcgcgtgcggcaactgtccggaagagctttcgcagttgaagatttcggccgagtaccaaccgggaccgttgacaaggtgatagcggaactcacttcgcaggccgtagccggagacgccaccgaatcctacggaattttcctcaagctcaatgaatgcgcgaatatcagcaggcgtgcatcaagaggtagcgcacttcacgcaccggaagatgtggtggccgcgtgcagcgacctttccgtggagaacgaactcagttccagtaaatggttggcgcttgcagcggagcaaggaaatataggagcacggctcctctatgccgcggattcagagtccgcccttggcggacgcgcagaactcctacgtgatcctgatcgcgtgaaagattacaaacacagagccgctggctatctggaagagatggttgaccaaggaagcgtggatgcacttctacaacttgggaatgcctaccacgctggcgtactgatcgatgaggacccagttgcgagcagagcctactttgaagctgttcgtatcgcggatccgtcggtggttccagctcagcaagtaagcacattggacaaagcactgagcgcacgacaactgtcgcttgccataagaaaaggaaatcaaatatatgactcgtgctgcaggtag

SEQ ID NO: 534056 - DNA, 708 bp, Stenotrophomonas maltophilia
atgcgcggcctcatcgccctgcgtctgctcgatgcgccaggccaggcccgcctcggccagcaggcgggtgacgaaggcccaatcggtctcgcggtactgggtggtgatcgcgcgtaccggcagtgcggcctgcacgtcgaagcggaacaccgcctgcgggtagtcggcgaagatctgctcgcagatcgcgcgggtgtccaggtcctggaagatcaccgcgttgcggcgcaggcgcagcagcgcggtccagggttcgaggatcagccggtagcgggcaaggccgccatcgctgcccagctgcgccgcttcggtgcacagcccgtgccattgccgcagcgcgccgtcggcctggcgcagctgcagggtcagtggctgttccagccacgggtccaggtccaggaacgcatcggtggccaggcagtcgatctgcaggcggttgtcgccgcagaccgcttcggtgccttcgaagcgttcgaccacccacgcctcatgcagtccctgcagacgcagctggcgtggctgccgggcgtcgagcgtgatcgcccgcatcagtgcgacaacagcggcttccgtgcccatgcagaatctccctcgggtagtgggagaactgttgggcagggcgccgccggtgacgacgtgtcagagcattcctgtggagtggatcacgcttgccgacatcagatcaggctattcgcgacaaactcctaa

SEQ ID NO: 534057 - DNA, 480 bp, Stenotrophomonas maltophilia
atgcgattcatttttctcctgactgcgagcctgtcagcgtgtgcgtcgcatcccgccggtgtcgttcagtgccccgaggccacgatcacctaccttggcagtgaaacgacggatgcttcggcttatggccgcttcaagatcaccacagagggaccgcaggcgctgcgggtgccactggccagcatggatcggcagttgcacgcacatgccgtatcgaccgatatccgcgacgggcacggtctggcctggcgccccttcaatgtggttctggatgaggtcataccgccggttgccgacctggtggttgcgcgcggtgaagttgaagccttcctctacgacggcaagggcgccttcgcgcctggtgcggtgcaggcagggcaggcgctttccatcgtggtgcgcgatcttcaaggctgcgcgcatcgctcgctgccgttcgttcctgagccgccaggacgtggaagcacaagcgaccggtag

SEQ ID NO: 534058 - DNA, 246 bp, Stenotrophomonas maltophilia
atgcaagctcgatatgaccgtgtcaccgagtactttcagcggatctcaggcaggccggatctcggtcgcgatctggatgtgttcgaggaagggctcgtcaattcgctcgcagtcatccagatgatcgagttcctggaaaggaacttcgccataaaggtcgagatcgacgacctggatcgggcgaacttcgcgagtattgccgcagtgtgcgcgtttctcgagcgcaaggcggccgtcgatgcttga

SEQ ID NO: 534059 - DNA, 1194 bp, Stenotrophomonas maltophilia
atgcttgagcgcttcctggactctgtcgagcgcgaatcgctgcacgcattcgaatcgttcacggcacagcaggtcgctcgctccgctgatgaatgggataggcgcgagagcgttgatgtcgcggtcatcaaagcgctcgcagaacgcggttggctggggggcgttgcggcgttggggagcggaggaaagggcttctccgcaacgacgttcgggctgttgaacatggccgtcggctctggcagcgcatcgctgaccgggctgctcaatgtgcattcgatggtgctggccagccttgagcgctgggggacaccgttgcagcgcgatacccatgtggctgccatggccgcgggcacgctgattggcgcgttcgcgcagacagaaacagaagcaggtggcgacacgcagaacctgtccacgcagatacgtgtggaaggtgatgcgctggtgatcaatggtgacaagacgtggatcaccttcgcacagcatgcagatgtgttcctgttgttcggaaagctggatgggctggataccgcggtacttgtcccgcgcgatacgccaggacttgaagtgcgcgcgcaatcgggcatgctcggctttcgcagcgcgcatctggcagcgctgcacctgcgcgactgcaggctcccgttgtccgccatcgtcggcaagccgggatttggtcaaagcctgatttccagcggcgcgttgaactacgggagactgagcgtcgcctgggcggcggttggcctgcatcgtgccgcactcgcagctgccgcacatcgtgctggagcccgtcgcgcattcggaacgctgctgattgaccatggcatcgttcgcgcctatctggcggagatgtccgcgtcgctgttggcaagcgaactcatctgtttgtctgccagccgcgcgttcgatgcgcgtgaggaagatgcggtcgagcagatcctgcaggcaaagctggtcgcgtcggaaaatgccgcgacggcagcgtcacgcgcaatgcagatccacggtggattcggctgccaggaagcggtgggtatcagcaggttgtatcgcgacgcgaagatcctacagatcgtggaaggcagcaacgagctgcagaagatgctgatcggcgaatgcgtcggtcgccgctacggcgcgcgggcgccattcagtgcatgcccgccgtctccgcaagaatgcccagtcccatga

SEQ ID NO: 534060 - DNA, 1476 bp, Stenotrophomonas maltophilia
atgtcctggtcggtgcttgggcgcgcagcgtgcgtgctggcgcggcagttgtgcgaagaacacggggttcgccctggcgacagggtggcggtatgcatgccgcgcgatccagccacgctgatcgccatctacgcgatcgtgttggcgggggcggtctacttcccggtggacccgtcaacaccgacgtcacgcttgcaggcaatgatggaaatcgccgggtgttccgttgcgtttgcccgggccgccgattcggaacggatttcccgcgcgcgggagggactgcgggtactcgacgctgaagcgatctcatggactcagcaggttcagcagggcatgccgaccttgcccgccgccgcagcgcggatccgcggcgacgatccggcatatctgattttcacttctggcagcaccggaacgccgaagggcgtgctggtcaaccacgcggcgctggccaaccggctgcagtggcaccagacacacagccgcatgcagtccgacgacgtgatcctgcaacgtaccgcactgacgttcgatgtgtcgctgtgggagctgttcctgccggcgctcaacggcggtagtctgtatctgctgcgacccggcctggaggcttttccgcggggcattgtgcatgccctcaccgctggcggggtgagcatcgtgcatttcgtcccaagcttgctcaagcctgtgctgcaggaactgctgcaggcgcctcatctggatgcggttgctccgcgtctgcgccaggtctacgtcagtggcgaggcgttgccagcaagtctggtggagcgcttccggcacggtctcggtccacgggtctcgctctgcaatctgtatggcccgactgaagcggccatcgacgtgacctactttgattgcgaagttcctgtcgaaggagctatcccgatcggctggccgctgccgggctgccagctgcacattgtccatacgcagacgcgcgtgccctgtgctgatggagagatcggcgagatcgcattggggggcatctgcttggcggatggctatctgaatcgacccgggttgaccggcgaggtgttcgtcgatcacccgcaactgggcaggatctatctgaccggtgacatgggatggcgctcggagccgggcctgttcttcttcgatgggcgtaaggacgcacaggtgaagctgcgcggtcttcgggtagagctcggcgagatagagcatcatctgctgcagcaatcggagatcactgcagcggccgccagcgtactgctggacgccagcggcgagcagtggctggtcgcagccgtcaccgggttgcccatggatttcgacgcccggcagcttcgggagcgtcttgccgagcagctgcccgcctacatgttgccggctcgcctgctggcattcgagcagttgcccaggagcagttcagggaaactggatcgccgcgcgatcgcggcagcgctggaagcccgcctgtttggcctgccagcatga

SEQ ID NO: 534061 - DNA, 4428 bp, Stenotrophomonas maltophilia
atgagtatggattcgccgcgcactgtgctttcacggcctcagcaggcgatcttcgccatgcagagcttcagcatggcgggggaacagttccagctgggcggcgttgcacgctttgccggaacacttggcctggagcgtttggccgatgcggcgcagcgcgtctatgccaacaacaccgcttgtcgggtcggattccttcaggatccgattgacctgcagtggtacggggtggcgcgtggggtgacctcgcgcgcggtggaacaggtggatttcagtgatcacccacgtccgcgacaagcctttcgtgattgggccatgcgtcagctgcgcctgcgcgaagacctcgcgcatggaggcgtgcgcatgttcgcggtgcgcttcgatgccgatagcgccggttggttcgtgaaggctcaccatgcggcgttcgacggcgccgcacttgcgttgttgatggagaagctgacacaggcgttggacgaccaactgccgccgcttgatgcagcagatggcccggaacctgccttgctggtcgcagcggagcaggcgtacgagaattcgccgcgtttcgagcgcgacaggtgttactggcgggagctgctgggccatgaagatgagggcgccagcgagcctgcgccccgcactctgggcggctatcgcgcgcaatcggcggcgtgcaggcgcgttgaagcacaggtaacggccgaagagaccgccgtgctcggacagttcaaagctggcggcggatcgcttctgcgcttgttcgtggcggccgcggcggtggtgcagatgagcatcgaggataccgatgccgttctgttgcagattcccctgctcaaccgctggagcgcggccgagaagcagagccttggcatggccgttgcaccggtactgcttccggtgcgacgcacgccagacaacagcacggcttaccactatcgcgcactggagcccgtgctgcggcagtcgctccggcatgcacgctttgcacccgcgacgcgttggggtgatgtcgcaggccaatattggaaagcgcaggttcctgcgttcggtgtatcggtgcaaaccgggcgcttccggcacacggttgccgggatgccagtggagatcgagcacctgcaggcggtcgaggcactgttggccactgtacatatccacgaccgcttcgatgatggcatgctccgcatcgaggccgacgtgaggtgcacgtggacgcctgcgcaggccgatggctttctcggagcgctgctgcagaatgctctcgatgcggcccgcagcctgatggagcatcctgttcccgcacagggcgcacagggcgcacaggcgcagacggcctcgctgccgatcggaacgctgatcgagcagtccatgcgccggcatgccgatgccgtgctgattgccgatgcgtcggggcgcctgccgccgctgacttaccgggacgccgcgcacgcgattgccgacatcctgcagcggatgccggtcgcgcaagggcaacgggtgcttctgctcgggcgtcgggttcctgaaacgctgctggcataccttgcctgcctgatcggcaatgtcccggtggtgctggtctgcccggacatgccaccggggaggttggcgacgatcgcgcgggacagtggtgcgatcctgtgcatccacgctgccaccgattgcgcgctggctgcgacgctgcagctgccgctgtttgacgcttctccgggcacgcagatcgccgatggcggcagtcgcctgtggccggtggcgccggccattgcgccggcgccggcctacgttctgtatacctctggctcgacgggcagcccaaaaggcgtggtgatcggcactgatgcactggccaggtacgccacggctgcctgccacgcatactcggatgaaccgatcagtgctccgctgttcacctcgttcggattcgatctgactcagacatcgatcctggtgccgctgcttagcggcgggcgcatcgaggtgtacgaggatgacctgcgcgtgcgtccggacatgctggatgcgatggtggccgacgacacgctcggtctgatcaagtgcacaccgtcgcacctgccgctgctgctggacaccgcagcactgcgaaagcgcccgctgaccctggtggtcggcggtgagaacctgatgcaggagaccgtcgatgcgctccttgggcgcctgccggagcacagttgtgtgttcaatgagtacggtcccacggaagccacggtcggatgcagcatccaacgtgtctcagcacgatcgaccctggcaaagcagcatggtcctgtaccgatcggcagggcgcttggcgaggcgcgcctagctatcaaggacagtcatggcgccacgcttcccccggggttcccgggcgagatctggatttccggtcctacgctcgccgattgctatctcaacgatcctcagcggaccgcttcgcgttttgcccgctgcgcgcaaggctaccggtggtatcgcagcggagacgcgggcatctgcgatgcgtcgggagtcttccattgcaccggtcgcatcgacgatgagttcaagatccgtgggcagcggattcacccctcagagatcgagtgggccgtgcgctacgccgcagcgtctgtagggcagcacgaatgccaggacatcaaggctgtgcgcattgctgacgatgtagcggtgttcagtcgaggcgcattgccgtcgaatagcgagtcgtttcatcactgcgtgagcgcccagttgccggcagcctgtattccacgccattacgttgtggtgccagtgtggccgctgacgtcaaatggcaagttggacgtcgcagcactgcgggctgtgctggccggccgcccgcaggatgcaacgtcgctgtcgacagccgacgatacgcagcatcggcttccggactggctcgacgcgaccctgctggcgcccatctggccgcaaggggtggacctgagcaagccgttcaccgcgcaggggggcgactccatcaaggctatccgtctggcggcactactggcacgagagggcgtacaggtcgtccccaccgccttgctggaagatctgccgttgcacacggtactggctcgcgctgtcgcgcagcgggtggtgtcggtggatccccctgccgattccgatccggcagctgcggctgcgttgccgtccgtccgctggatgcgcgcgcagcagttccgttggcctgagcaggtccagcagtcggtgtgcctgcggttgaccagcaggcacaccgatgcagcggtgcacgaggctgtcgcccgtgtcatgtcacggcatgcggtattccgcctgcgcagcgatccgcgattggaaagcttcgagctggcaccaggcgtccccgcggcgcaggcgacgcagaccctcggcgatggcgcaggcctggaccacatgctgctgaagctgcgcggttgtctgcgcctgccggaggcgctgtcggcccaccaggtggtgctggatccgttcgacggcacccgctacctgttgtggacctgccatcacctgctgtgcgatgtccactcctgggtgattctgctggacgaactggacctggcgctgtccgccaggctatcggacgccacagaggagcatggtgcgttctggtggggggggtggttgcagcaggcgctgccggcggtcagcgagagcgccgcttcgcaaccggcgtctacggcgttgccaccgcagacgttgtgcttgacccagtcgcgagcgcagctggaagcaatctctgcggaggctcgggttgcgcgcccagtgctgctcgccgccgccctgctgcaggttgcctcggacgcgggcctgtgcgtggacaggagtgatgtggtgctggagaacgcgggacgtctgttcaccgaagcgcgcgcgttgcccgcctccgatgggcggctgggtagtgcagtcgggtggttcaccggcctgcagcgtctgcagcccgatcccgccgcggtggcatcggggagcgcgctgcgcgcggtgaaagtctgcgtacacacgcaggccgacgtatgggcgcaacgcctgggtgcggagcagaccggcgcccgcccgctgttgaacgtcaacgatatcggcggtggcctcagcggcgtggcgcgctggtcggagttcggcgtgatgcccgaactttgcggcggctaccgccatcccggtgaccgcgcgattgccgatctggaaatgctggtgtccgacgcggctgatggcagtgccgtcgaggtgatgctgacgctatctacccaggcagcgtccggaaacgatgcttctgcattgctgatgcagttggacgcgttgctgtgcgtgtggggcgaagctttcgaagccggtacatccggcaaccgggcgccgctgcttcccacagatttcccctacagctccctgtcgcaggcggagttggatctgatacttgaggcccgatacgcatga

SEQ ID NO: 534062 - DNA, 1233 bp, Stenotrophomonas maltophilia
atgaccgctttgttggacggagcaaaaaacgtattcctgtttccgggcgtaggtgcgcagcaggccggcatgttcgccggcttgtgtgagttccccgagtaccgtgcgcacttcgagcaggcctccgatctatgcggcctggacctttggaaagcactgtatgccggttcgagcactgcactgaaagacgtgcgcaccgcccagctgtgtctgaccactgccacggttgctgtggcgacgctgctgcgggaacgctgtggcgtcgtgcccgattttgtgatgggccacagccttggacagttgcccgcgctgtgcgctgcgggttacatggactttgcgcggacgatcgagatcgtcgaactgcgggcgcaggtcgtttccgaagtggcagggcgcatcgaccaaggcgagatgtgctgggtgctgcatgtacccagcgcggaagtggagcgcctgctggtgcaggcgcgcaccgaggatggtctggaactgtacctgtcggccgtggatgcgccggaccaggcgagcatctccggcacgatggcgcagatccgccgctttgccccgcgcgtcgaggcgctcggtggtctggtctttccgttgcggatcggcgggcccttccacagcccgttgatggcagatgcccggcaagtgcttgccgcgcgcatcgacgcactgccggtgccgcaatgtggcgcggtcatctcgcagttggtatgcaacgtgagcggtgccgttctcgctccctccgacgtgcgcgcggccgtgcttgaccagctggtgtcaccagtgcgttggctggaggggctgcgcacgctgtctggcgcgggcgtgagcgcctacatcgagctttcgcccaagaccgtgctgggttacttgaacgagcgtgctggcatcccgatgcggccactgtgtgccccggatgctctggtggagctgatcaacgaactcgatgggcccgggccgcgctcgttgcgcctggtccgtcgcgtgctccggttgctctacagcacgccgcttcctcccttggccgccgacgctgtcgcgcaggtgcaggacatccggcgcgatgtgtcttcacatctgaatgccaggtcaccggagcgggccgatgtacaggcgctctacgccgcggtcggacgctggcttgatctgctggacagcaccgatggcgccacgactctggtcgagagggaacgtcttcggcacctgtacgcggcggcgctgcaatga

SEQ ID NO: 534063 - DNA, 3237 bp, Stenotrophomonas maltophilia
atgagcatcgagcgtgctgtgatcgaagagatcgttcgcctcagccctcaggccaatgggttgttgttccatgcgctcaaggatggcaacgacgcctatcacattggtgtaacgctccatattgaatccgatgcggatcgcgccgccattgaactggcatgggagcgcatccaggcagcgcagccggcgctgcgcgctgtgttcgcctggaagcacctgcaccaggcgcatcagctgattcaccgccggccccgggtgccgttgcagttccaggatgccgaagacgttgaacaggcggaggagatggcggcggcattcgtcgcgagctcacggcagcggccattcagtctcgaggctgaggtcatgcgcatcgcgtgcttccggatccggcatgccgcagcaatgacgctcaccttctgtttccaccatgtacttatggatggctggagcagcgcactgctggtggagtgctggatcgccgcgttgcgcggcaggagcattccgtcgctggatgcgcgcgcctatgccagacagctggacagtgccatgtgcgcgccgctgctgcgtgacagcaaggacttctggtgtgatcattttcgggacctggacgagggtgtcagcaccctgctgctggccgagccggcgttcgctcccgagggccgcagtggcggacgcctgtgccgggcaacgcgccagtgggataccgcccggaagcagcgcatcgaggcgctgtgcgcggaggcaggggtgaccccggcgtgcttcgtctacctgtgttgggcacttctactggccaagtacacgttgcagcgggctgcggtcatggggtgcaccttctccggacgtggcgcgctgggtgcgcacgatgctgaactgcccgctcttggattgttcaccaacaccgttccgttggcgataccgctcgatggcacgcataccgccaggcaggcactgcgccaggtcttcgccctgctgcagaagctgcgcgtccacgagaacactccgccgttgatggtgcgcgaagccgctgcctgcagtggagacatctacgacacgattgtggtgctggacaactatcctgtcgatcctggcatgcagcagccgggtacggcgcaccgcctgcagcggctgcacagcgacgagagcacccacttcggtctgacgctctctgtgtcaggttgctcgcagtgggaggttgcactctccaccggcggcaggtacgagggtccttcactggcaatcgagcaggcactgcatgccttcgatgccatcgcatcgaacatgctggacgatccggagcgcgccatcggaagcctgcgcttgtcgctcggcgatgacgacgcgtcgcggtcgatcgtgcgtggcagggtcgcgccggtggcgggtattgatacccagcttgccgcgctgcgccaacggctggtggctgaaccggacggcagctatctgcatgccgacggggcgccgattgccaatcgtgagctgttgagggaggtcacgtgtatgcaatccgcactcgcgatggccggctttgtccccggggatcgggtggccgttcacctgccaaagagccgggcagcgatcgcagcgctactggccgtcgtgttctgcggggggagttatgtctatctgaacccgtttgagtccgcgcagcgccggcgcacgctgttggacaatgccggatgcacgctgatgctgggcgacgagctcgaaggctccggatcgccattgccggattcgctgcgcacgctaccagtgccgctccgggcagcggatgcggcagcagaactgcaggtgccgaagctgcgcgcgggacgtggacccgatgacgagttcgcactggtctttacctcagggacgaccgggcagccgaagggaatccaggtgcgcaacgcgtccgttgccaatcagctggcgtggttcatcgaagcaacggaactatcgaagcgggatcgcgtcctggcgttgacggagctcaatttcgatccaagcatccaggatgtgtttgccacgctgttggccggcgcacagctggttctgccggagcgcacggtgctgcaagagcgcggcgccttcgcacgcgccatccagtcgcttggcatcacggtgatcaacttcattcctggggcgatcgcggaactgctggacgaccccgacgcgttgccgtcgatgcggttgtgggtgctggggggggaagccttgccggcaaccctgcgcgatcgactgcgcgctgccgggcagacggtccgcaaccactacggtcccagtgaaaccacggtggattgtctgagcgccgagcagggcgatggttccatcacccttggggggccgatcaacaacgtcaacgcgttcgcggcagacgtgtttgggcagccgctgccgcagaaagttcgtggcgagttgtgggtcggcggcgtcgctgtcgcgcatggctactggcagcgccccgatgagtcgatgcgggccttcgtcgcccgcgacggcgaaatctggtatcgcacgggcgatctggtggcgctgaccgcgcatgagggcttcatgtaccacgggcgcgtggacgatcaattgaaggtcaatggggtccggattgaaccacgcgagttcgaggctgcagccgaacgggttcccggggtgcgtgcagcggcgctactcgggctacccgacgccggcccgggtcggtgggtgctgtgcgtggacagcgccgaacagacggcggtgatcgcgccagctgtcgtccgcgagatgcgcatgcagacggcccgcaacaatctgcaggtggaggtcgtatcgctggacggcttcgcccgcaccgccaccggcaagattgaccgggcaggtctgcgcacacgtgtgcaggtggtgatggagtcgcacgccgggcgccggcacacacctccttccgatccgctccagcagagagtgatggcgatctgggaggaggtgattggtcgtgcacctacgggcgtgaacgtgaacttcttcgatgccggtggagattcgctgcgcatcgtgcggctgcagtcgcggctgcaggacgcattcggcgacgacatcggcgtagccgatctgttcgagcacccgaccatcgcggcgttctcgacctggcgccaaacgcattcctcctctacatccgcgacaggcaatcagcagccgtcatcggcaagcccactgccggcgcgtgccggcaagagccggctcgcggacaggcgttcgaagattcagcgaggtcagacatga

SEQ ID NO: 534064 - DNA, 6393 bp, Stenotrophomonas maltophilia
atgaagcgagagtattccggaaatgagattgccatcgtcggaatgggttgccggttcccaggtagcgaagactggcagtctttctggcagaacctgattgccggacgtgatctggtcacgcgcttcacgcgcgaagagctgcttgccagcggcgtcccggtcgcgcagatcgaccatcctgcgtatgttccggccaaggcgctgctggaacatgctgacagcttcgacgcagaggtcttcggctactcgccgcgtgaggcctcgcgcatggatccgcagttgcgggttctgcatgaggtggcggtttccgcgctggaagatgcaggcatccgcaccggcaccgacacgctggagtgtggtgttttcgttggatcgacgttcaacgttgctcgtatggagcagttcgcaggggcaggggcggacatcctgcaactgttcgatgccggcaactacaacgacccggcagcgttcgccgcgcaactggcatatcggctcaagctggtcggccctgcggcgaatgtgcagaccgcctgctccacttccctggccgcggtgcatctggcctgccgtgccctcctggcgggcgagtgccagttggcgatggccggtggcgtgtgcattaccgatccgcaggcggggggctacatctaccagccgggcatgattctgtccgaggatggtgtctgccgcccgttctgtgccgagtccaatggcactgtgaacgggaacggcgccgcactcgtggtgttgaagctgctcgaccaggccctggccgatggtgatcccatccatgcgatcgtgctggaatcggccatgaacaacgatggcgatcgcaaggtgagcttcgaggcccccagtgtcgctgggcaggccgaggcaatcggccaggtgtaccaggcctcgggcatcccattcagcagtctgggcatgatcgaggcgcatggcacggccactgcgctgggtgatccgatcgagatccaggcgctggtgcgggtggccgaacagatgatcgatcccgaggaccgcgccggcttccggtgtgcagtgggcagcgtgaagtcgaacatgggacacctggacacggccgcgggcgttgccgggttgatcaaggcagccctgagcgtgcgcttcgggcacattccgccctcattgcatcatgtgcggcccaatccgcatctgagactggagcagacgcccttctacattccgcaggcggcgtgcgcatggccagcggagcaaccggtccgccgggctggggtgagttcgttcggcatcggcggtaccaacgtgcacatccttgtcgaagcgccgcccgccagcacgcagacccccgccgaggacagcgacgccgctgatgcgctgcagctgcttccgttggctgcaagctcgttcgaggcattggaccgtcttgtgcaggcgcatgcgcgccatcttgatctggtcgacatgagcgctgcggagtttcgcggttttgcgcaacagctgcagggcctgccgtcgaaaggcgtgtgccgctcggcctttgtctgcgcaggcaagcagcaatggaaacaacagctggcgcaatggtcgttgctgtcgcaggcgcggcgtaccgacgaaggacaggtgtgggtgttcggcggtcagggcgcgcaggtcgcggggatgggcctggcgttggctgcagcatatccgcgtttcggcagtctctatgaagggctgttggcgcgagccgccgagctgatgggcgagaatccattgcagttgcaggagcgggtgcggggcgtgcaaccgttgtcgacgctgcaggtccagccggtcctgtactgtgtacaggcagcattgggaacgtggctgttggagatgggcatccggccgcgcgcggtctgcggctacagcctcggtgagttcgccgccgcagccgttgccggtgtcttcagcgccgaacacggcctggccctggtcgttgagcgcgcgcggttgatggcgcagtctccgcctggcgcgctgtttgcggtgagtgcgtcgggcgcgttgccctcgttgccgccccagacctggtgcatctcacagttgagcccaggcgcgtgggcactggcgacggcgcaggataccgtgccggagctcgagcattggctgcagacgcacggtcttgctcacaagcgtattcctgcggaactggccttccacacgccgttggtggatgcggccgctcaagcgtttggcgaacacgtcgcagcactgcaggacgtgtatacgcagactggggcgcagaccttgccgttcatctccacagcgacgggattgccgacaaccgcccgcgacctgtccgaacccgcctactgggtcgagcagatgcgccagccattgcgctgggccgaggccgcgacgcagatgggggtcgatcatccctctgcctgcatcgtgcagatcggaccgggtacggaactgttgcagcatctgcgcaagtggttggcactgcccgcctcgcgactgctgccgacttcaggaaacgatgcccgcacagaagttgtcggcacgctggccgccattgcccgtagttgggagcaagggcaaccggtccagtggccctgcgacaatcgcaacatcgcatcgcccggtgcggcacgcctgcatgttccgggccccgcgttccggcgtcgacgctttgcccagtccggtgctgcggcgaccgcgcagatcgagcagttgccgatgggagggaacttctatgggctccaatggcgccgctacctgcccgatgcgacgccggccggcgatgcagccggcaccacctgggtgctttgccgccagccgggggcgctggaacatgccctgagcgcggctgttcgggaggctggcggcgaggtgcgagtatttgcctgcggggatagcgaactggccatggcgtcggatcgggaagctcgcgacgcctggctgcgcgaactgggatgggacaccgcaccgccggctgcaatcgtgttgaccggtctgctcgacgcactctctcctgaactggcccgcttgtggtccttctggttgccgatggcagcagccaggctttcaggcgcacccttgcggctgctgtgcgttgcttctggattgaccctggcggctgggcagggcgagctggcaccagagaagagccaattgatgggacctctgttgctgattccggaggagtatccggcgatcgccacagcagccgtcgacgtgcacgcgctcacaccggccgaggtggcaagggctgtcgcaccgtggttgaacgcgcattggagcggggcggtgtcctgcgcctggcgcgacggccaatggtggcagcgcgaaatcaccgcacgcgtgcagagtgcacccaccgcacggatcatgcccgatctcggacgcagtagctgggcattgatcacgggtgccaatggcggcatgggccgggcgatcgccgaacacctggcgcgggcgtaccactgcaatctgatcctgctggtgcgtgacccggtgctgccgcgtgcgcgctggggcgaagagatcgccgccggcggccagcgtgccgagttcctgcgctgggtcctggacctgtcccggcacgccgcgcgggttgaactgctgcatgccgatctcgggtcggcagccgcgctggagtctgctttcgcgccggtgttcgccatggcggcgcagggagatggtctggatgtcgtgttccatgctgcgggacgtggcgagggagcgctgatgcagtggcgggacgatgcgctgtccctgcagacgcttgcacccaaggttgaaggaacccggttcatctgcgagaaccgtcagcggatgggtgacccggcgctgctgctgttctccagtctgggcaatcttctgccacgcgagaaagccgggcaggtggcctatgtatcggccaacgcctgtctggaggcccatgccgaacaggtccgtgcccaaggtgggcgtgcgctggccattggctgggacgactggtccgaggttggcatggcggtgcgctcggcccatgagctggacgccgcagttcaacaacgcttggatacaagcgccggcgacgggcactggcgccgtagcctggaccctgccaccgactggtggttggacgagcatcgcctcgatgacagtactgcggtgctgccggcgatgggggcgctggcattggtgcagcaggcgctggacgcgcgcgatccggagtcgaactggtcactgtgcgacgtaacgattgagcaaccggtggttgtccgcaacggtgtggcgtgcgatgtggtggtagctatcgacgagcgccgcccgcagttcgcgctctacaccggcgttggcgagtttggcgtttccacgtggacgcgacatgtcacaggccggctgcagcaggcagtaccggcgccgccggttgccgaagacgcgcttgatgggccagcagaatgcctgttcgccagcgggaccgggcaggcagagagtccacagggcgctctgattctcggcccgcgttggcgaaacattgaacgggtggagcgggtgcagggggcgacctacgtaaatcatctggccctagctgcccagtatgccggggacctggaccaggccaggctgcatgtggcactgcttgacaccgccacctcgattggctcaccgcgagagcaggcgcaatgggcaccgctgtcgattacccgcttcacacagcatgccccgatgagtgcgcgcggacgcagcgtggtacaggtgcgtcaggcaggtggcaaccgcgtgctcgatgtacgcatctacgcgcccgatggcaccctccaggtattcattgaaggtctgctgctggtggatggcacggcggcgttgcaacgtcttgagcagaatccagtgcataccgtgctgcggcttgccgacccgggggcgggcacgctcgcgttcgctggtcgtcgcgaaccgcgccgcgcacctgctccggacgaggtagagatccgggtacatgcagcggggttgaacttcaaggatgtactgattgcgttgggtgtgctgccggccccggatgatccggccatgaccttcggccaggaggccgctggcgtggtcgttcgtgtcggtgcactggtgcgtgggttccggcctggtgatcacgtcatgtgtgcagggcatagctgtctggccgaccacgtacgggtgccacagtcgagcgtcgccgcgatccccaaggtgctcggattccatctcgcagcagggattcctgtggcattcacaaccgcatggctggccctgcgccatgcggcgcagcttgggcctggcgagcgcatcctgatccacgccgccgccggcggcgtcggactggccgcggtgcagatcgcacgccatctcggcgccgaggtctgggcgactgccggaagcgatgccaagcgcaagctgcttctcgacatgggcgtgcgaggcgttggttcatcgcgtgacagcagcttcgccacgcagttccgcgcgcaactgggcgagcggccgttcgatgtggtcctcaatgccctgtccggagacctgacccgggccagcgtcgccctgttggcaccgcaaggccgcttcctggagctgggtctgcgcgacattctggaggacgcgcccttggcgctgggcatcttcgccgaaggtggcagctaccacgcggtgcaggctggggctggtcatccgcgctacgcccaggcttggcgcgaggtggtggaccttttcgagcgcgaggtgctggttccgttgccgacccgcaggttcggagcggcgcaggtgggtgaggcgttccagtacatggctcaggcgcggcacgtcggcaagctcgtcatcgacatgccggtcgccgccgagtcgtacgggttccttgacaagcttcgtcgcgatggactgaccaccgacgagggcgtacgggtggcgatgagcatggcagcgatcgctgccggaaccgctcatagctatgtggccgtgtcgaaactgccgatcggacaagtgcttgagaatcaggaaagtacccagcagatgctgctgggtacgctgtccacgggggctgaggatgctcaggatgcggcgtcgttgcgggactgcgacgcagcgcagctgctcgttgagatgcagaagatgcttgcgcagttcctcggactcgccgaagtggacccggatgccgcattcttcaacctcggcgcaacgtcgctggatctgatccagttcgcgcggctgctcgcgcagcgcatggagcgcgaggtacctgtggcaacgctgttcagtgccccttccctacgccagttggccgtcgagctggcgccgcccgcattgcaggtgccgtccgtcgatgcctcacctgatcgcgtgcaggatcgccgtcgttcggcgctcgcgcggagacggctgcacggcgaagtccaggccgaaacggatcgcagcgatgcgtga

SEQ ID NO: 534065 - DNA, 3120 bp, Stenotrophomonas maltophilia
atgcgtgagttctgcctgcacgcgatgctgtggttcggtgtgttgctgacgttcccggttgcggcgcgtggcagcagcacggatgcggcacgggtcgacaacgccattgccatcgtcgagcaacgctggcagcccgatcaggtgcctaccggcggcctgtcggtcgtgaccggcgacagcgtggcggtccgctcgcttggtcaccgccaagccggtgcttttgaactggcgtcgtcttccaaggccttcaccggcctcctgattgccgacctggagcagcaaggcctgctgtctgcagaagacccggtgatccgatggattcccgaactccgactgcagcccgccacctacgcggcgcgtctgtctgtgcgtcacttgctggaacataccagcggaattccggaggaaacgctgggcctgctgcgccccgacacgagcgccgatgcactgtccaggctgccgcagttgctcgtggacgttcagctcacagctgcacccggtacgcggcaggagtatgcgacgctgaactacagcttgttgggcttgatcgccgagcgtgccgctggcaagccattcgatgtgctggcgcgtgaacgcatcttcgccccgctgggcatgcacgacacctatgtggaagcctatggccaagcgccagaatcacggattccgggctatcggatcggtttcgggcgcgccaggccggatcgggcgccgcgctatctgcagaacacgcccgcaggctacgtggtaagcacgcccgcggacatggcccggtggctgcggttccagttggcgctaccggctgacgcatccgcggggctctccccatccctggcgaatctgtacaccgcacgcgaggcaatccagcgcaaagcaccggcaacggccggcgacgcatatgtttacggctgggacgttcatgttggtacgaccacgtcgtggagccatcctgggcagaaccccgacgcgaccgcatatgtcgcattcaatccagatgtgcgggttggcgtggcgttgatgggcaacagcaacagtcctcaggtggaagccatcggatcggccctgttcagttcgctggtcgagggtgcgcaacctgcatccatccctccgttgcctgccgatggcggggatcgcggcgccagcgtgatcgctgccgtgctgtggtccggatgcggcttggcgttgcttgccatgctcggcctgaacgtgcggtatcggcggcaccctgcacgggcgggggcgtcgccggaccacggccgtcccctgctggagaccagtctgtccagttcggatatgccggccgcgccatgggcctttctggggcagctggcgttgtgcagcgtggtcctcgcgctggccctcgccgttgcaccgaccgtcttgctcggaatggactgggccaccctcctggtatgggggccgatcagtcttcctgttgcggctgctggcgtggtcgctgctttcgcggcgctggcgatctttctgcgctatgcgggcatgctggggcagcgggcagacggccgactactgcacgtgatcctgatcggcaaggtggtgggcctgacggccaccgctggcctgatgaactcggttctggtcctgctgatcatccgtgccatcgagcaacccgcccggcacctgccgcaggccgctgtgctgctggcggcctgcatcttcctctacatcgctgcgcgccgaaccgccgaactgcagatcatgcgtttcggccacagcttcgtgcagctggcgcgtgcagacatcatcgcgcgcctgctcgccgccgattatcaggacattgcgcggctgtcacctggaaagatccagtcggtggttggcgaggatgcgcaggaaatggcgcgcagcatgctggcgtttgtcccgttcctcgccaacctgctcaccatcacattcctctttgcctatctgatggtgttccagtcggccatggccaccggaatcctgctggcctgcgccgtgccgatggcagcgctgtactaccacgcctcgcagcgggccggcaggctcatgccgcaggtgctcgatacccgcagcgacttcatggacatggtcgaagacctgcagaagggctacaagggcctgcgacgcgcagcggtcaagcgaagcttcctgtcccgtaccggagaagtttcggcgcgctacatggacctccgggtgcgttacgaccgcggctttctcaatgccttcttcatcggcgaatccctgctggtagtgctgcttgccacggtggcgctggtgtttccgatcacggtgccgtcccttgccggcggagccgcgaaagactacatgatcatcctgctgtacctgatcggaccgctgaacgccgtcatgagtgccatgccggagttgacccgcatgcgcggcctgctcaacagcatgcaatcgttccggctttccatccgtaccgcgccggaacaggcgccagccagggtgacgccgatgatccggcagctggaactgaaagctgtcagctttgcctatcccgttccagccggagaagagcacgggttcgcgatcggtccggtcagtttcacggcacatgctgggcgcagctacttcctgaccggcggcaacggttccgggaagagcacactggcgttgctgattgccggcctgcatgcgccggggcatggcgccatctgcgcggatggacaggcgctctcgcaggcgcaactgctggaacagactcgctgcatattcaacgagaactggctttcgcgccgggtctatgatcccgatctgctgaagaagcatccgcaggtcaatgccaacctggctttccttggccttgagcgcaagaccgcactgcgcgaagacggcatgttcgagacgattgctctgtcgacgggtcagcgcaagcgattggcgctggcattgctgctggcagacgaaagtccaatcgtggtgcttgatgagtgggctgccgagcaggatcccatctcgaagcggaacttctatcgggaatggctgccggcgttgaaggcgcaagggcggatcgtgttcgtcatcacccatgacgacgagtacttcgcagatgccgatgccgtcatcaccatgaaggatggccgactcgtcgacctcaaggagcatgactatgcgtga

SEQ ID NO: 534066 - DNA, 765 bp, Stenotrophomonas maltophilia
gtggttcaaccagcccggccgcgagtaccagctgagcgtgcgttaccagccgaggtagtgccggccgctggccggcaacatcgcgatcttcggcaacgcattccgggttgccggccaacggccggcactacccattgcgtcgcggccaacgtgttcgaccgcaggccgcgagtacccgctgagcgtgcattaccagccgaggtagtgccggccgctggccggcaacatcgtgatcttcggcaacgcattccgggttgccggccaacggccggcactacccattgcgtcgcggccaacgtgttcgaccgcaggccgcgagtacccgctgagcgtgcattaccagccgaggtagtgccggccgctggccggcaacatcgtgatcttcggcaacgcattccgggttgccggccaacggccggcactacccattgcgtcgcggccaacgtgttcgaccgcaggccgcgagtacccgctgagcgtgggttaccagccgaggtagtgccggccgctggccggcaacatcgcgatcttcggcagcgcattccgggttgccggccaacggccggcactacccattgcgttggcccgggttaccgcccgacgaccggcgttgtccgttgcatcaaccctgcaaccccggcagttcgcgcaggtcatcgatcaccgccactgcatgcgcggtggccagatccaggccgcgcggatagccgtagcgcaccagtgcgatcggcatgccggcatcttcggcggcgcggtaatcggtga

SEQ ID NO: 534067 - DNA, 624 bp, Stenotrophomonas maltophilia
atgcgcaagatgctcctggcaacctgcctgttgctggcaacgccgctgctggcgtcggccagcgacgagctcagctacacctatgtggaaggcggctggaatcgactgaagctcgatgccggcggtgccgctgacttcaccgccgacggtggctatgtccgcggctcgttcgctatcgcaccgcagttccatgtgatcgcaggcgcatcccgcgtcagtgcaagcgaccatggcggcgatgcgcgggtgaagaccacgctcgacgttccgtacctgggcctgggatatcacgcaccgatcagcgaccgcctggacttcaccagcgagttcgcctggaaccaccgttcggccaggtcggaccaccgactcggcgatgcgcgcttccgccagacctctcgcttcaaccaggtactgggcatggtgggtgtgcgcggcaggttcaccgagcacgccgaaggctggctgaagggcggctacgccaatggcggcgacgggcaggatgcccgctggtacggcgtggtgggcggacagctgaacatcaccgatacctggggggtggtgctggaaggccagttcgacaaggacgcctccgagtacaggacgggcgtacgcgccagcttctga

SEQ ID NO: 534068 - DNA, 819 bp, Stenotrophomonas maltophilia
gtgagcaagaatctctctccggcgtctgccatttccagcctgttccggcaccatcgactgattgtgcagttggccaagcgggaagtgctcgggcgctaccgcggttcgatcgcgggcctgacctggtcattcttcaatccgttgttgatgctggcggtgtatacgttcgtcttttcgtacgtgttcaacgcccgctgggcgggggccgtggaaggcagtcgcgccgaattcgccgtgatcctgttcgcaggcatcatggtccatgcgttcttgaccgaatgcatctcgaaggcgccgaacctcatcatgggcaacgccagctacgtcaagaaggtggtcttcccactggagatcctgacctggtcggcggtggcttcggccttcttccacctgctgatcacgttgacggttctgttgatcgcgcagtacgcattgctcgggcgcttgccattgacggtgctgtacttcccgatcgtgatcttcccgctggtactggttgcgctcggcgtgacctggttcttcgcggcgctgggcgtctactaccgcgatatcggccagatcaccggcctgctggccacggtgctgctgttcatgagccctgcgctctacccggtgacgtccctgccagaagggatgcgcaagtacatctatctcaacccgctgtccttcatcatcgaacaatcgcgcaacgtcctgatgtggggaattgcacccgattggatctcgctgctgaagtacacgatcgtcagcctgctgattgcctacatcggctactactggttccagcttgtccgtcgaggtttcgccgatgttgtctga

SEQ ID NO: 534069 - DNA, 1344 bp, Stenotrophomonas maltophilia
atgagcgatatcgccatccgggtagaagatgtctccaagtgctaccaggtctacgagaagccgcacgatcgggtgaagcaggcgctgctgccccgtatccggcgagtcgcagggttggccgaaaagcgctacttccgcgaattctgggccgtgcgcagcctgtcgtttgaagttcgccgtggcgacacggtgggcatcatcggtcgaaacggctcgggcaagtccacgttgctgcagatgatctgcggcacgctggcgccgacaacgggcaacgttcacgtgcaggggcgggtagccgccctgctggaactgggcgccggcttcaaccccgagttcaccggccgcgagaatgtctacctcagcgcggccatcctgggcctcagccgccaggaagtggaccagcgcatggatcgcatcctggcctttgccgatatcggcgatttcgtcgatcagccggtcaaggtctattccagcggcatgtacgtccgattggcgtttgccgtgatcgcacatgtagacgccgatgtcctggtcgtagacgaggcgctggccgtgggtgacgcggtgttcgtgcagaagtgcatgcgcttcctgcgctcgttccgcgagcgcggcaccctgctgttcgtcagccacgacaccggttcagtgctcagcttctgccagtctgccatctggctggatcgcggcgtcatgcgcagccatgggaccgcgcaggaaaccacccagtcctacatcgaatactgcgcgcaggagagctacggcgacgaagtgaagctgcaggcgctggacgatcgcaaggccgccgcagcacgcggccccagccgggcaccggccaaggttgaagaagagctgcggctggagctgttcgacaacatcgcccactccgatggctggaagtcgggtgaagcctccatcctggacgtgaagctcaccaatcttgacgacccgggccggcccttcttcctcggcggggaagcggtcaacctgcgcatccgcgcgcgcgtggaacgcgacatggtgagcccgatcctgggcttcttcgtgaaggatggccttggccagtccctgttcggcgaacacaccttcacccatgtccagcccgccctgaccgtggccggtggccaggagatcgaagcggagttcgacttccatctgcccctgctgcccaacggcgactactcgatgacggtgtcggttgctgaaggcgacccggtgaccaatacccagcaccactggctgcacgatgcgctgatcctgcgcgtgtcttcgccggttctccgctatggcctggtcggcattccgttcgagcgcgtgcagatgcgagtgatggaggcagaatga

SEQ ID NO: 534070 - DNA, 558 bp, Stenotrophomonas maltophilia
atgagcacctatcagtgccagattgccgagctctccagcagcgacccgcggatttccgtcggcaggttcacctacggcagcccccagttcaaggtgtgggaggacggcgagtcggtgaccatcggtgcgttctgctccatcgctgacgaggtggtgttgtttggcggtggcgagcaccggccggaatgggtgaccacctatccgctgcgcattgccttcggtgatcctctcgccggcaaggatggtcatccagcaacgaaagggccgacccgcattggtaacgatgtatggatcggctatggcgccacggtgatgtccggcgtcaccgtgggcgacggtgccatcatcggtgcgcgcgctgtggtcacgcgtgacgtcccgccctatgccatcgtgacgggcaacccggcgcgggtggcgcgctatcgtttcagcgaagaagtcatcgctgcgctgctggacatccggtggtgggattggccgattgaaaagatccatgccaaccagggcgcgctgtgtggaggcagcatcgacgaattcgtcgcgcagtttcgataa

SEQ ID NO: 534071 - DNA, 1089 bp, Stenotrophomonas maltophilia
atgattgaccttcccatcaacaacgcaatgttcatcaagccccgcaacacgcctgaaagcgcgtggctgggtcacattccgtttgcagcctggatgatccaggtgcagcgtccggatgtgttcgtggagcttggaacgcaccggggtgcctcgttcttcgctgtctgccaggcggtgctggaaaccggcgcgccgacgcagtgctttgccgttgatacctgggaaggagacgaacacgcaggcaagtacggcgacgagatcttcgcgcccgtcgcagactatcgacagcgcaactacgcggacttctccacgctcatgcgcatgcgtttcgaggaagccgtagagtatttcgaagacggcagcgtggatctgcttcatatcgacggcctgcacacctacgaggctgtccgcagtgatttcgagacgtgggagcgcaagctgtcccgtcgcgccgtggtcctgttccacgacatcaacgtgcgggaacgcggctttggcgtgtggcgctactgggccgagatccaggcgcggtacccgtcgttctctttcagccatacccatggcctgggtgtgctgctggtaggcccggaacagcccgaagcactgctgtccctgtgcaacagcgcgggcactgaagagggcagcgtcctggtcaaccgtctgttcgagatgctgggccgattgatcagcgccaacgtggacatcggtacgctggcgcgcgaacagggccgtcttgcgggtttgctgcatcagcgtgaagtgtccgaggccggtgcctgccagcgcgtcgatcagctccaggtcgagctggcccaggccaatgacgccttgagggagcagcgtgagcgcaacagtgcgctggccgcctcggtcagcaatgcggcgatcgccgacgaactgcgtgagttcgccgcccgcgccgaatcccgggaagcggagctgtccggccagacccgccagttgcaggaggcgttgactgcgacccgtgacgcgttgcagcagtctcaccttgagctggagaagatgcggacatccaccagctggaaggccatggggccgttcagacgcatccgcaggtggtttggttga

SEQ ID NO: 534072 - DNA, 2508 bp, Stenotrophomonas maltophilia
atgacgccttggcgtgttgtagtcctcgatacaaagaggagcaatccaaatcactatatctatctggccatcgtcaacgcgctgcgccagagtgaccgcgtcgagttcgtcgccgcggccgattaccgcgcggcattgcatgaagcgcagcgtggcaactgcaacctcttcatcgccttcgatggagaggagcttgatcgttcgattgtcgagcgcatcgctggtctgtgcgaacgcagcgtgctctggatcactgaagatccttacgaacggcgagtgaatcaggccaacgccgacctgttcgatcttgtgttcagcaatgacacgggcagcgttgctgcatatggcgagaaggggcgctcgctggtgttcgccgccgatcccgagttccacttccatccggttccatccagcgaccacggtcactacctgtatgacctgttctttgccgggacggcgtggcccaatcgcgccgagttcctggcaagtctgcagcgccagcttcccgacatccgtctgaagcttgcgctgccatcgaatccctacattcctgctccgaagctgaacatggagcagagtgcgtacgactggcgcacgccgaacaccgagttcgcaaagttcgccaaccgcagccgcgccgtgctgaccctgcaccgtgccttctcgtcgtccggcaatgagcccgtcgcgcatacgcccggcccgcggttcttcgaagtcgcgctggctgggggcttccagctggtcgacatgtctctgccagagatccgggtgcaggatttctacgaagagaacaaggagttcatcggcttccgcgatgtcgatgaatgcatcgagaagctggcctactatctttcgcacccggaagagcgcctcgagatcacccgcagggcgcaggcaaagacacgccagatgcatctgtatgcgcatcgtgtgacgcgcttgcttgccgagatcgactcgctgcccccgcgatccatccaggacgtggcgtcgccgtctgcggtgatcgatcaggctgctccgcgccagcgcgttctggtggtatcgcacaacaccaccggcgtggctccctacggcggcgtcgaggtttaccaggagtcggtccggctggcgctcgccggccagtttgaattctggttctacaccccggaccgctctgccaagccgttgggcaaggcctacagcctgcgtgatgagaacctccaggtcgttgagaccgtctccttcccggacgggctcaatcctgacctgttgacctgcccgcaacgtgaggcggcgttctccgatctgctgcgcaggtacgggatcgaactggtgcatttccagcatctgatcgggcacccattgtcgctgccgctgctgacgcggccgctgggcatccgctcgctgctgagtctgcatgactactatggaatctgcgcgcgcttcaatctggtggactaccgcggtgtgtactgcggtatcgacaagcttccgaaggaaacctgcgatgtctgcctgaacgcggcggatggcgcgggcgcaggcagccaggcgcgacgtcgcgccttcatggggcgcgtgctttccgagatcgacgttctgcatgccaacacgcctggtgtggccgcgatgttcaccagcctctacccgcagctcagcgcggcggggaagatcgaggtgaatggcgttcccatgccgcgcgccgatgtccttgccaccgaacggagggaggcatcggtagacggcccgttgaggatcgcggtaccgggcaacttcacccgcaacaagggcggcaatgaacttgtccacgcgttcaaccagctgcgcgacgacgatgtccagatcgatattctcggcccggttgccgccgagtacgagccgattctggatgtcctgaagattcccaatctgcatgtacatggtccctacgccccgggttcgctgcccaggctgttgcgtgaccacgatgtctcgattcatttctcgatctggcctgaaacctactgcatcagcctgtccgaggcctgggctgcaggcctggttccgatcgtggccgacatcggtgcactgggcgaacgtgtgaacgaccgcgtcaatggattgaaggtgccgctctgtgaagccggcgcgcttgtccatgcggtacgtacgcttgcagctgaccgcgcgcagttgctgaacatgcgctccaatatcggccatggcgaactgtgccagcacgacgcccatatggcgtggctgtcttcgacctactcgcggctgatgccgcaggcgcgtatcgcggcatcgccgggaacgcagttgaagggcaacaccatcgccgatctgggcatccttctggtggatccacgctggctgcacccgccggtcggctcgacggtggccggtggagggagctccccattggcgcccgtcgcgcctgtcagtctgcccagacgtgcgtggcgctacctgcgtacacatggtttgcgacgcacgctggggcgcgtcatccaggcgatcgctcggcggatggaaggttga

SEQ ID NO: 534073 - DNA, 978 bp, Stenotrophomonas maltophilia
atgaagaatgaaagcttgagccgggtgctggtgacgggtgcttgtcccgacaatcacaatcgcaataccgtgctgcgtgattatgtcgccgagggatttggccagattgatgcggtgagtgccgtcgcgacctgcccgttggagcgtgctgcagaggtcgcagccgtgttcagccccgatgtcgtgctgtgtttcggatcctgcatgcccgatgatgcggactacgcgcagctgcggcagtggtgcagcgagtcgggtgcgtgcatggtgttctggctgcatgacgacccctacgagttcgactacaactacaagctcgatggcgtagccgacatcgttttcagcaacgaccgttggtgcgcggcgcactatgcgcatccgtgggcccggcatcttccgctggcggccagcaaggccgcccactggcgtgacagccagggcacgaagagcatcaatctgttcttctgtggcgttgctttcgacaaccgcaagcgcctgctgaaggatctgcgaggcacgcttgagcggcatgatgcgctgatcctcggagatggctggcccaaggacctcccgttctgcgagaaccgccggctgggcaactccgagctctcggatcattacgcgcgtgccgcgctcacgctcaacatggggcgtgatttccattacgccaacgatcgcttcaagcttgacccctccacgccgggtccacgcacgtttgaagctgcgatggccggcgccgcccagttgttcttcgtagagagcctggagatcatcgactactacgatcctgcgaaggaaatcgtgctctacaactcgggccacgaattctcgcgtctggtggatgatctgctggcctcgcccgaggcgtgtggccggatcggacaggccgcgcaggcgcgcacgctgcgcgaccacacctacgcggtacgcgcggcaaccatcatcgacgaagtggcacgctggaggcagcgggcctga

SEQ ID NO: 534074 - DNA, 561 bp, Stenotrophomonas maltophilia
atgagagctttgcctgcttggctgacccccgattccgcgcttgcggccacgctgctgctggttggcgcatgcgcgctggcagcccccattgccgttcagagcctgctgaaggatggcggcttcagcgagcgtcggcagagcatcgacctgagcaactggacacacatcagcgccttccggaagggtggcgcctacctgggaatcaatcgcgaagtcgacggaacgccgcaccacgaatcgtggatcaatgcggggcaatggctgcagttcgaccgtgttcccgtggcccggcactcggtgttcattgcacaggcgagggttcacccccagtggccgcgagacagcctggtcccggtcgaattcgtcgtcgaagccaccagcagcgacggaagagtgctgcggtcggtcgttgagcagctgccagccgaacaggacgactgggcgcagctgcgcctgccgctggcagacctcgccggcagcgaggtttcgatccgaatcagcccgagatcacagcaggacgtctggacactgctgcgcgatccggcagcaacgatggaatga

SEQ ID NO: 534075 - DNA, 1719 bp, Stenotrophomonas maltophilia
atgtccaccttacagacagtccttcttgctggcctcgtgggtcctgcctatctgctggccgtactggtcatcggcacggcggttgccccctcgtggatccagaccctgccaggccgctgggaccgtgcgctgctgaccctgttggccggtacgctgggccatgccctggtggcagccctggtgcttgccattagcccggcatacgtcggcgcggccttgtgggtctgtgccggcatcgcgcttggcacgttgctggcaaagcgccaacggctccaggtcggcgcgccgcacgtggtcctgctcgccctgttcgcgctgtgctacctgctgatggtgagctatcacttcagcccggccagagggcctacgctgttctggtcgctttacggcctcaccggcatcacgccaggcgattccccgcagggcgcgttccaggcccagtacctgctgtggggccacgcgctcaaggagggaggcgagttctccctgttcgaccggcctttcctcggtggcatcattaccgcagacgcgctcaaggcgttcggtttcgggttctccgatcgcttctatgattacagccctgcgctgcagatggcctacgccagcctctggatcgcgatcaacgcgatctgctcgatcgcactgctttccatcgtttccagattcgcgcgcggacgggcggcctacctctgcggcatcctggtactggtcagcccgttcttcctgctcaatgtcatcgggctgtggcccaagctctatgcattgacctggttgtgggccgcatgcctgctggcattgcagcggcgaccggtgctggcctgcctgctcagtggcatcgcgttctatgcgcacggctcgttcctgtggtcgcatatcgcattctgcggcgtgatcaccttctacctcctcgcggaggcatggcggcagcgcgcgatcccctggccggcgctggccggctcgctcctgctctgcgcactggtgcccgcattgtggttcaccgcagagcacatcttcggcggtgcatccccgctccgccagtactacctgtacaacgttccggtcaccgaaggcttccatcacgatgccgcggagattgcccaggccttctatgccaccacctcaccggcgagcctgagcctggtgccctggatgaacatggccaagggattgctgccgaccgaagtgctgcagctggtcatgggctccagcctcgccaacccggcccccagctggcgcgatctggccgaatcgctgttccaactgcagttcctgcgcgcactgttcgcactcggtctgcttggcggtgcggtggtccttcgtggtttcttctccgccgaagcgcaccgctggacacccaggctcctgctgatcggcctgctgctgctgccgctgattcccgggctgggcctgtatcgtcgtgacgatcacttcctgctgccggtgatgctgttcgcggccattcccgtgctggtgcatttctgcatcggcatgcagcagctgggggcgaagacgatcaagctgatttccctggccatgctcgtcgagtttgttggcgttctctactggagaatgccgcctgccagctacgaaggtgagttcacccactacttctcttcgctcgtcctggttaccggcgtggtcaccgccattctgatactgcgcgctccaagccgtttcatgcctctgcccggcgcgcacgacccggagagcatccgatga

SEQ ID NO: 534076 - DNA, 777 bp, Stenotrophomonas maltophilia
atgaatctcccacgctggaccctgctggtactcgtgcttgcctccggttgccaaccggccgcaccaccgtcgccttcacccagcgcagccacgccggacatccggtccgcggcggcgcccgtcggggcgcaatgtctggcccgggtgatcgacgatctgacggtggcgtggccggacaaccatgcgatcaacattgtcgcattcggccacagcgtacccgccggctatggccggacgccgcaggtccagaagaccgacgcctatccccgtctgctggaagatgccctggccgctgcttatccccatgccgtgctcaatgtcatcactgcgggggtgggcggagaaaactccacgcagggacgtgccaggttccagcgcgacgcgctggatcatcacccgcgtgttgtgctgatcgactatggcttgaatgatcgctcgctgcccctggccgagtcggagcgcaacctcaccgacatgatcggcagggcacgcagtgcaggggcctgcccggtgctgatgacacccacctgggatgagcaggcgcacccggaacggcaggacgatccgctccgcatccaggccgacatgatcgcaggccttggggcccggctgcaggttccggtcgccgacaacctggcctcgttcctgcatttcaagggcgaccgcagcaggctcatggcgcagtccaaccatccaaacaggcaaggccacgcgctggtggcgaggaacctcgcagacctgttcgcacgaccggccgccgcccccgcaaacaggtag

SEQ ID NO: 534077 - DNA, 1155 bp, Stenotrophomonas maltophilia
atgctggccctcgaccagcacgccacgcccgccgaggcaacacatcgcagcgttgacaacgattccgctgaacacggcatgcgactgcaggtgcagttggccctggcaatggacatgctggtcactcacgtcccggatgctggaccgttgccaatcctgacgctggccccgccagctacagagaccagccgctacgcggcccggcattggcccggcttgatgaaaatgcaatccgatcagcctgcccgactgctggtgcgcgaacgcgatctggacggcccctcccttgtgccgctgctgcgggacctgcacaggatgatggacgagacacccctactggacagcatcgcgctgctcagcgtcgatgggcgcctgatccgcgacgacacagggcggcaaacgccgcgccaacctcccgacgacagcatcgtgctgctctgggtcagccgagagcagctgccatcacgtatccgcaaggagtcgatcgccgaagcacgcgccgacacggacgcgctgcgtgcaccctacctgtggtggcgggacgaaatggagtcgatgattccaccgcgcttcgccacacctgaaacccacgttcatcccagctcgacctggcagcaagccatgtctggcgagatgaccgagggggtcccagagggtgccgcaggcgcacatcacccgtggtatcccgcgccgtggacgcacgagcaggtttcccagtgggacgccgtgcctgtgctggcatcgctgccacctccagccttcatcccgatcaagccacacgaaaacgtgctgacatccgctggccctcttcagcagcggatcgcagaagcgtggaacgcgcttatcgccaccctacccggcagcgcgctgcatatctggtacgacagccactcggagcctggccacatccgcgcacttcggcttgccttgtcgggtctgaccgagcctatcgacctgctcgatccggaacacgccacggacatccattcccaggtgggaatgctgggcagcggagcgggcgcctcgatgctggccctggccatgcacagtgcgggcaatcatgtggtcgtcgttgcgtccgcagacggactgctgctgcagccggtcctttcgcgcatcccatccaatgagtcactaaacgaggaaaccgcatga

SEQ ID NO: 534078 - DNA, 1989 bp, Stenotrophomonas maltophilia
atgagtaagcagaagatcgagcatgcatggcttcccggcgacgccccggcaacgctgcacttcaatcccgtatcgccgcaattgagttctggcgtggtgccgtgccagatcacaatgcagttttccatcttctttgatggcacacgcaaccacgcggatgaggacaggccaagtggatcgcacagtaacatcgcccgactcttcgatgtctgccttgagaaaaccggagctggacagagcaggctctacatccccggcgtcggcacaccattcccacccatcggcgagcacgaaccgcacccgatgggcgcgcgcgagggggcctacggcgaacgtcgcctgcgctatgcctacctgtacatcgccaatcgaatcgccaaactcagcggccatccggcgattgtcgaagagaacgagccagcactgatccgcgccattgaagacaaagaacagataaagatctggacctcgaaactggccaacatcctcgccagtcccagaccggccgcaccccacattgccgacatcacgctggatctgttcggattctcgcgaggcgccaccgctgcgcgcacgttcctcaatcagctcatcgagtgggctggcgacaaccagcccagtatctgtggcattccgctgcgggtacgtttcatgggattgttcgacaccgtggcatcggtgcatgtggccgactcggtgccctttctgcccggtgatggtcacctgaagtgggccgaaccgcgccacatgggcgttcctgggttcgtcgagcagtgcgtgcacatgattgcggcacatgaggcgcgaaactcgtttccgctcaccaccatcggtgcacggcagggtgaagcaccacagcggctggagatcatctacccgggcatgcattctgacgtgggcggtggctatggcccgataacgcagggcaaaggcacgaaccagtccggcgccattcgccagcagcagcaggacatgctctcgcagattccgctcaacgatatgtatcgcagggcgctggcagcgggcgtcccgctcatggatggagccgcactggcgcgcgcgagaactgctgccgacttcgccatctcccccgagctccaacgcgcgttcgatgcacatcaagcccgccttggcagcttcaagggcggcgcccccttgatgcgtcagctgcatcaccactacctcgactacatcggctggcgccgcagcgtgctgcgcagaagcgattacatcgccctgcccttcgtccggcagtgcaagcccgccgtgctgcaggaatacatcaatcttgaccagtccaacgtcgagctgcaccaggatgtggaggcctgcgagggcttcggtggtaccgtccgcagcctggtcagccgctggtccggtgcctacagctacgccacgggctttccgcccatgcgcgagatgtaccagcgctactggaagatctcgcccgaccccacccccgcggtccgcacgctgctggaggaccatatccatgattcacgggcggccttcgtgttgaccgacccgcagtgccagcgtgactacgacacgatgcacaagcagctggaggagaaggatcggcgttacaaggaatcccgacgccgctacgaggagcgcacgctgccggagtatcggcgacgcatggagcggaatccctcccgccatgaagaagagcctctcccacctgtcgacccattgggtattgaggacaggcgagcgctgaagatcttccgcgacgggggccaacccatcttcaccgatgcaaaaccagcatcggccatggatggaaaggccgacgtcctcgacgtcatcgccaaggtcacccgccgcgagccccgctggagctacctgcgtcgccgccaggtattccgcatcacttcaggcaccacaggcactgtcaggccctctggaccactggcgcagccttcagggggaaatcgacccttctggatcagccggcgcctcacgtacgcagatggcttgtcatga

SEQ ID NO: 534079 - DNA, 582 bp, Stenotrophomonas maltophilia
atgagtaagcgggatatctacaggcatcgccagagttccaccgcttgcctgctcaccctgcgaagccaaatccggccagtgctgaatcgagcttggctgctggtggccgccgcggcgctgtgcgcatgcgcgcgtgcagacaaggcgggcgagccaccggagtacatcggcagcaatctgacttcgatggattacgagccgactgacaccttcgttcggccggtctatgtgaacgggaaagggggggggcgagcaagcaccggtgcgagcaccatgctgggagtcctcagcttgccggcgcgctggtatcccggcctgaccgtgcgagtgaagtggcggcgttgcgaggcaggtacagagtacgtacccgatgaaccagtagatgaaggctgccgctggatggaaaaagacgtaccagtccagccctacacctatgtagccgagacctggctgcacatttttgacaacgacgaggtcctggtcattccgagcgttcttttcccgagcgatccggactatcccggcgcgcgctacccctacaagaacttcaatgagaagcgaggtattggagaacatgagtaa

SEQ ID NO: 534080 - DNA, 582 bp, Stenotrophomonas maltophilia
atgagtaagcaggagatcgacagacgccgcatgttttgcaccgcttgcctgctcaccctgcgaagccaaatccggccagtgctgaatcgagcttggctgctggtggccgtcgccgcgttgtgcgcatgcgcgcgtgcagataagaaagacgagcaacccgcgtacatcggcagcaatctgacttcgatggattacgagccgactgacaccttcgttcggccggtctatgtgaacgggaaagggggcgacagcgctggtacagggggcagcaccatgctgggcgtcctcagcttgccggcgcgctggtatcccggcctgaccgtgcgagtgaagtggcggcgttgcgaggcaggtacagagtacgtacccgatgaaccagtagatgaaggctgccgctggatggaaaaagacgtaccagtccagccctacacctatgtggccgagacttggctgcacattttcgagagcgatgaagtactggtcatccccagtgctttcttcccaagcgacccagattatcccggcgcgcgatatccctacaagaacttcaatgagaagcgaggaattggtgagcatgagtaa

SEQ ID NO: 534081 - DNA, 603 bp, Stenotrophomonas maltophilia
atgactgaggagctggcgaacatgagtaagcaggaaatagtaagacatcgcctgaactccaccacttgcctgctcaccctgcgaagccagctccggccagtgctgaatcgagcttggctgctggccgccgccgcggcgctgtgcgcatgcgcgcgtgcagataagacagacgggcaacccgcgtacatcggcagcaatctgacttcgatggattacgagccaaccgacacctttgttcggccggtctatgtgaacggaaaaggaggggggcgagcaagcaccggtgcgagcaccatgctgggagtcctcagcctgccggcgcgctggcatcccggcctgaccgttcgtgtgaaatggcggcgctgcaatcggaatctggactacgtaccaggcgagcccaaggacaaaggctgccgctgggtggagaaggacgtgtcggtccagccctacacctatgtggccgaaacctggctgcacattttcgagaacgatgaagtactggtcatccccagtgctctcttcccaagtgaccgaaattatcccggcgcgcgctatccctataagaatttcatcaagaaaaggggcatcggcgaacatgagtaa

SEQ ID NO: 534082 - DNA, 834 bp, Stenotrophomonas maltophilia
atgaatccgctgcccagccagtggcaccactgctgccaacagcccggcatcgagccgctggtactgctggacggcgcattgcagcgcgatgtcggcgcccgcctgacgcgccgcgcaggcgacgccgtttcgctgttttccgatctacccgaagcggcgcaggcgctcggcccgtggctgatgcgacccgcccaggctgcatcgatgggactggatggcagtggcccagggatgaactggctggcaagccgctgggccttcgaagacacgctcacgcacctgcgccattggctgcgcgatggcgacgccttcggtatgcattacacccggctggcagacgggcgcgtgctgcgtgcggcgatgcaggtgtggcgccctgcgcagtctgtcgctttcagcttgccgtgggccgcgtggtggctggcagatcgtgatgggcgggcgcagcggctgacgattcccccgttacctgcggtgcctgccgatgaggatgcgtcgccagggtggaatacagaccaggccacagcgctggccgagctggagctggccgatgcgctgctgcagtcgctgaagcccacgcttcgctgtacggcgtcagccacaagccgcgaagcgcgccacgccctggccacagcactgatagccgcagcgcggcagcagggatacgtcgagccgaccgatcttgccagctggattgcctggggaatacgtcgcggcgaggacgccgaagctctgcgcgcgcatccggtgcatgcacaggaactgcgaggcgctgcgctctggatggcgctgggtaatgcggatggaaatcgctccaccaccgcttccgtctaa

SEQ ID NO: 534083 - DNA, 2514 bp, Stenotrophomonas maltophilia
gtggacatgagtgcaaggccagcaagcaccgatcgactgatcgacatctgctggggtacggaggcacccgcaccgtcagtcttcatccagtctctcgactaccgtgatgcattcaacgaggacttcaccctcatcgcccgcggcctggtgcagggcagtcttgatgaagcgcaggccctgcagggtcgtgtcctgggcatcgggctggcccaacctggcagcgggcgccgctggttctgcggcgtcgtcgatgccgtccgctgtaccgcgcagcaggacgcatggcagaacgtaacgctgcaggtcgtgtcagcgctggccctgctggagcggcgaatcgcctgccgggtcttccaggacatgagcgtgccggatatcgtcgcgtgcatcctggaggaacatcgccagggcaacgcccgcatcgcccttgcattcgatcaccgtcgctccctgctggcgcagcatgacgttcgttcgtactgcgtgcagttcaacgagtccgacaagcagttcatcgaacgcctgctggccgaagagggcatcagctaccggttcaccttcgacctgctggacggcacgccgcgccacgtgctcgtgctgagcgaccagccgctgttcgatgcggaacgcgccattgcgctcccgcaccgagcggccggtaccgatgacggtacgccccatctgcaggcgtggcagctgctgcacaggctgccaccctcgcgccacaccctgtccagcttcgactatgcgagcgcacagcagctgcgcggcagcgatgatcttgccctaccggtgagcgcggacgtggcccgcagcgtgcaagggctggaaagccatcacgcgcgcacgttgtactacggcagcaacaccgccgacatgaaccgctacgcgcgcttgcgaatgcaggcgcaggaactgcggtcgcggacctggctcggcgaaggtgacttccgtgggcttgcgaccgcagacagcatccaggtggaaggacgtcctggcactaccgaagcgcttccgccggcaggcttcctcatcagtggggtgcatctgcttgcgaccaacaatctgcccgacgccgcccccagcctcggtccggctgcagagcacatgccgcccgcaggccaatgcgtcacccgtttccgcgcggtgcccggcaacatccctttggtgcccgtgcacgcgcaccgactgctgcgccccaacgcgcctggcatgcagaccgccacggtggtgggaccgccgggcgagacggtgtacaccgatgccttggggcgcatccgcatccgcttccactggcagcgagcgcaggagcaccccggcgcaccggacccacaggatgagcgctcctccacctgggtgcgcgtgtccatgcccagcgtgggtgacggttttggccatcagttcctgccgcgggtgggccaggaagtcgtcgtcgccttcctccacggcgacattgatcgccccctggtgatcggtggcgtctacaacgggcgccacgcaacgccacgcttcggcggcatgggcagcctcccgggtaatcgtgctgtatccggcatccgcagcaacgagcacgatggcgaggggttcaacgaactctcgatggacgacaccggccaatcggtggggaccacgctgcgatccagccccttcgaaagcgccctgcacctgggccacgtggcaacgccacgccgtgatggcagcgcgcaggcgcgtggacagggcgcggaactgcgcaccgatgctgcactggccttgcgctcggccaagggcttgctggtgagcagccacgcacagcccggcgcgggtggcccgcagatggcgttgccggagctgctggaggtgcttggcagctgccgtcagctgtttgattctctcgccgagatggccacacgcctgcaggccggcacgccggagggcgatgcacaggcggcgctggatacggcgctgcagggctggtcggcggataccggtgcagcaaacgagccgatcatagccctggccgccgctgccggcctggtcagcgcctcgcctgccagccagctgcacgtcagcggtcagcaccacgatgtcgtggcgcagggccgggtgcagcacaccagcggtgagcgcatgcagctgctggccgggaaaggcctgtccctgttcgtggccgaaggcggccttcaggccgttgccaaccagggcgacctgcagctgcaggcacgcgacgggctgatcgatggccacgcgctgtccggccttcagctgagcagcgaacagggcgagatcgtgctgtccgcgcccatcatccgtctggtggccgccgatggcagcttcatccgcataggcgatggcgtaaccgtgggcagcaacggggcgttggccttccacggcgccgaccatcgctgggaaggccccgcgagcgaccactggagccggacactgccgacggaaccgccaccggtctgcctgccctgtctgctcagggctgcagcgtcggggggcgcgcgcgtacagctggcaggtgcggcatga

SEQ ID NO: 534084 - DNA, 537 bp, Stenotrophomonas maltophilia
atgcagcgctggatgtggacgatggcggtgatcgtgttggccgcgccgtgcagggcggcaacaccggccgcgctgccgatggccgatgaggtgcaggccgaccggctgatggagatgagccggcgctgggcggcgccatggccgcgcacaccacggcgcgccgacctgcatgcaacccttcctgcctcagcggcggtcatcgaagcgcgcggggcgccgccgcacctgacattgcctgccatgccgatttcgcttccgctgcggatcaccgctggcgtggtgacgctgtacccggaccgtcaacgcgtgcagtccgtgcacctggacatcagcggcgcctgcgtgacccgccagcagatcaatcagcgcctcggtctcgctgaccgggtgctgccacccagcggccatgcaccggaacaggcgctgacgctgagctatgccgaggccgaccgctggatcagctacctgtttcccggcgtggatcatcgttgcgtttcgcaggtggttctcaggccggcggatgcgcctgctccgtga

SEQ ID NO: 534085 - DNA, 669 bp, Stenotrophomonas maltophilia
atggaaatctgcacgatccgcaggcgaatcaacacgctctggctcgcaccggcaatttggctctgcctcaattgctcaggctgctcggttgataaaggacgcgctccagactcatcgacccagccggctgctgcgccctcacagaccgacgttgtacggcagcttccacctgacgtcggggaagtagactcacgcacgccacatgacgagggaatctcatctgggactggttcggccatgggcgtttcggactatctctatctagcggcagagtccaggttcgtgctcaacggaggcatatccagccagagcgccgagcacctgctgcattccagtcgaaacatgactgatgcgattgaccagctgtcgcaagaggccgcatcacgccctgaagcactggcgctgaccgctcactatcgctcgtccttgtcgcacactatggggcagactaccgtgctcgagcgtctttcctgcggactgagcatctgcgttggaattgcgcgtgcccgaagcgaagcggaccatgcggcatggagcagcaggttcgccaacactacctcgtctccaacgtacagctttgcggaagcctccgagagcgttgccggcggatatgagaacaggttcattttctccaccgacccggcgctgaacgcgatcagcggaaactga

SEQ ID NO: 534086 - DNA, 333 bp, Stenotrophomonas maltophilia
gtgtttcattccgatctgatcaacggtatcgcggcaggcatggccctgctgctttctgtcatcgccgcctggacgatgcaccgacggctgcgcacgcgcagtagtgccgggttcgcgtggtcgaccacggccatgtgcctgtggcccttcttgtcgtcccctgccatggccctggtgatctactattccggcaatccgttgcccgaaccctgggccaacgctctgggcctggccatcgattcgttcatcccgatgctgctgaccctggcatccgccgcgctcttcctgctggcggtgcgcggcatcgagcgccacaagacaccttcggtctga

SEQ ID NO: 534087 - DNA, 666 bp, Stenotrophomonas maltophilia
  misc_feature (120)..(122): n is a, c, g, or t
atgctcggcttgcgcgcgccagcgcggtctgaccgcagagcagccgagcgtgggctcggctctacaccgtcatgcggcctgccacgccgccagcagcgcgcggcaatgggaatgcagtcnnncgtcatgcggcctgccacgccgccagcagcgcgcggcaatgggaatgcagtcgacactgccggccagcggccggcactaccggaaccttcggccgacacgctgtttgattcctgtagagccgagccatgctcggcttgcgcgcgccagcgcggtctgaccgcagagcagccgagcgtgggctcggctctacctcgtcatgcggcctgccacgccgccagcagcgcgcggcaatgggaatgcagttggtgggtgtcgacctgggtcgacactgccggccagcggccggcactaccggaacgtccgaccgacacgttgcctgctctctgtagagccgagccatgctcggctggcgcgtgccagcgcggtctgaccgcagagcagccgagcgtgggctcggctctacacggtcatgcggcctgccacgccgccagcagcgcgcggcaatcggcgaaatgccaatcggcgctgcccggccacgggttttccggcagattgaccagcacggtacgggtgcctgcggcgcggccgcactccaggtcatag

SEQ ID NO: 534088 - DNA, 786 bp, Stenotrophomonas maltophilia
atgtcggctgacaaatcgggcgcactagccaaggccgttctgatgcgggagcttcagtccatttctgcctccctgtctgcggatggagatgtccaccggtccatccacactgcgcgaaaagcaatcaggcgaacacgcggcctgctggcactattcagcgagggcgccatggcactgcaggacgaagaccgcgctctgcagcggctgggtcggggcctgtcccgcctgcgcgacgcccacgtcgctgtggagctcgccctggaactacacggcgcgcacggcgatgccacgagcaatggcgtcgtcataaggctgatcacgcgcagggaagcgatcctgggccgcatcctggcggccgaccccggatttacacgccgccggcagagcgtagagcatgtccgggcgcttctgcaggagaagccttgggacacattgcaacgatcgcaggtacgcgcctcgctatcccgtagtctccgcagggtagtcagggcggaagtcttggctcgcaatggagaaccagaggcggtgcatcgttggcgtcgacgtgtgcgtcggctgcgcatgcaactggagattgggcctgagctcggcggtctctggaagactcagccgaaggatcgcagccttgtccgacgactcaagacactgcatcgactcagtgatcgactagggctcgcacaggatctgggattgcttcgcaatctcgtacgaacgatgccggccagtcaggcaaagcaggcgttgcttgccgaaatcggtgccaggcttggcgtagactcggcttga

SEQ ID NO: 534089 - DNA, 1335 bp, Stenotrophomonas maltophilia
atgcttgaagtattgcgacactccacgttccgccgcctgttcggtgcacaggtggtcgcactggttggaaccggcctggcgacagtggcgctggccctgctggcctacgacctggcaggcgcccaggccggcgctgtcctcggcactgcgcttgcgatcaagatggtcgtgtatgtcaccctggcgcctgtttccggagcattggttccggccaggttgcgcaagcgggttctgattgccttggatctgatccgcgctgccgtagcgctctgcctaccgttcgtcactgagatctggcaggtatacgtgctgatcgccttgctccagtcggcatcagcgtgcttcacccccttgttccaatccacgatccccgagatcctcaaggacgagcgtgattacacccgtgcgctgtcgctgtcccggttggcctatgaccttgagagcctgctgagtcctgcacttgccgccgcattgctgacggtgatcagcttccacggactgttcgctgggacatcggctgggttcgtcttttcagccgtgcttgttgcttcaacggccttccctctcctgacgactccccccagcagcgacgggccgtacgcccgcgccattcgaggcatgcgcatctacttgcacacaccaagactgcaggggttgctcgcactcaatgtgtgcgcagctgccggcggcgcaatggtgttcgtcaacaccgtggtcatggtgcgcactgttctgggtggcacggagaaccaggttgcctgggcgctggcggcttttggcggcggctcgatgctgattgcccttttgctgccgaaagtcctggatcgcgtctcggaccgcgtggtgatgctgtccgcggcgcttgcaatggtcctgacacttgtcgctctgattggcgagtgggccgctctcgatggtcggctcggatggggcacgatcctgcccatgtgggctctgttgggcatggcatatgcggggctggtgacacccggcggccgcctgcttcgtcggtcagctgagtccgctgacttgccattccttttcgcagctcagttctcgctgtcacacgtgtgctggctgatcgcttacccgctggctggctgggttggagcacgctatggtttgaacgtcgcgcttgcagcgctggctgttctggcggcactgggattcatagcggcctggcgcagatggccggcacatgaccccgatgagattacgcatcagcacgagaccctcgcagaggacgatccacacgttctggagcatcgtgacgctgaaggcatccaccgccaccgcttcgtcattgaccacctccatacgcgttggccgggctga

SEQ ID NO: 534090 - DNA, 252 bp, Stenotrophomonas maltophilia
atgaagaagcacgttgccctcgcactcgcgctgtccgccggcttgacgctggccagcgcggccgccgctcacgacccggcgcttcacgcggatgccgccccgacggcgtcgacgccgaaggccaagcccgtcacctgtgagcagctggctgaccgttccaagttcaaggtggacctcaatgatgcgcagaccaaggcgttgaaggatcgctgcgacgcccaggctgcatcaggaacagcgaagaagaagtaa

SEQ ID NO: 534091 - DNA, 255 bp, Stenotrophomonas maltophilia
atggtcgccggggccgggatggtctttcactggaccgctacgggtgacgtggccgtggacatgcacggcgagcgtcccgacgtgaagggggcctggaccagctattcggttgaggccgcccagcgccaggcacagggcacctttgtcgcgcccttcgacgggacgcatgggtggtactggcagaaccggagcagcgaagcggtaaccgtaaccgtcgaaatcacaggctatcaagccgacatctatcagccgtag

SEQ ID NO: 534092 - DNA, 1242 bp, Stenotrophomonas maltophilia
atgaatcgatacacctacctgattctgctttcgctgacgctgtcggcctgcggcaagagcggcgccccggccccctccccctccgaggtgattgaagccgccgccgctacaaacgattacgagcgggggccccatcgcggcaggatgcttcgtgatggcgacctggccattgaagtgacggtctatgagaccaacaccccgccgcattttcgtttgtatgcgtatcgcaatgacaagccgctcccacctggcgaggtcaaagcacacatgcagctgaagcgccttgatggtgaagtaaacaccttcagcttcagtgctgagaaggactacctggtcggcagcgcggaagtcgtggagccccactcgtttgacgtgaaggtggaagctaccgttgccggcaaagcgcacagctggacctacgcctcctatgaaggccgcaccacgattgatcccaaagccgctacggatgcgggcgtcgtggtggagcaggcaggtccagccaccattcgggacaccgttgccctgatgggcaacgtagccgtcgacacgggccgttttgcggccgtaaaaggacgctttcccggtgttgtccggagtgtggcggtagagatgggtcaacgcgtcgcggcgggccagacgctggcgactgtggaaggcaacgacagcatgcgcacctatgccgtcaccgctcccttcagtggcgtggtgcttgcccggaatacatccgtcggcgatgtagctgccgacaatgcgctgttcgaactcgccgacctgtcagaggtctggatcgacctgcgtgcgctgggcaccgacgccgagcagctttcaccaggccagttggtgcggatccgttcggcaaccggcgcactggaagccgaagggaaactccaggcaattctgcccctggcgggttctggccagaccgtcgtggcgcgcgtgagcctgcccaatggcgaaggcagatggcggccaggaatggcggtggctgccgaggttgtcacagcgcagaccgaagtcgcattggcagtgaaggaaaccgggctgcaacggttccgcgatttcacggtggtgtttgcgcaagtgggagacacctacgaggtacggatgctggaactgggcaggcgcgacggtgagtacgtggaagtgctgcgtggcttgaagcccggaaccccctatgtgaccgaccagagctacctgatccgcgcggacatcgaaaagtccggcgcaagccacgatcactga

SEQ ID NO: 534093 - DNA, 1251 bp, Stenotrophomonas maltophilia
gtgaaattccgtagtttgtgggcgctggccattgccggcgcctgcggtgtggccgttcccggtcacgccgccgaagtgctgcgtctggaagacgcagtggcccgtgccctgggcactcatccaagcctcaaggccgatgcggcgcaactcgaagccgttagaaaccgagccggtcgcgaagccctggccccgccccttgttgtagggggagagcttgagaacctagcgggctccggcgccctcaatggcatcgaaggagccgagacaaccttccgcatcaccaaggtgttggaactgggcgggaagcgagctgcccgccaggcactcgggggagccgaggtgcaggcgagccgcagtgccgcagacgtgaccagggtcggcgttgcgaccctggccgccggtcggttcattgacgtcctggcagctcaggagcatgtcgagcacgccgaagagcgcatcacgttggcccagggcatgcggcgagaggtcgctcgctgggttgcggcggcacgcaatcccgatgcagatctccgcgcggcagagatcatcgttgccgacgccgagcttcagcgggagcaagcactgcaggcgctggagtcggcccggatgtccctcgccgcgtcctggggggcattgttcccggactttgactcggtcgctggtgacacccgcacgctccctccgttggagacattcgatgtgctcgcttcccggctggaggcaactccccagcagcgcgctttcgatgcacaggcgcaggtccttgacgcgcgacgtgaggttgcccgggccagcgccaagccggatgtcagcatcggcgtaggcattcgtcgtctggaggccacgaaggataacggactggtgatgtctgtctcggtcccgctaggcacccgtcgacggtcggatttctctgtggccgaagccgattacgagctgacagcgctcaagtccaggcgggaagcgcaactccttgagttgcgtcaggaattgtttggcatccatcaacggctcaagcaggcgcagtcagagatcgaatcagtacgtcagcgccaactgccaaaagccaaacaagccctggaccaaagtcggagggggttcgaggagggccgcttctcctatctggtcctgagccaggcgcaaagaacgatgttcgacctgcgcgaacgggatgtcgaagccgctgcccgctatctccgccttcttgtcgaggcagaccgcctcaccgcctctgccctggatatcctcccatga

SEQ ID NO: 534094 - DNA, 369 bp, Stenotrophomonas maltophilia
atgtccgccattctgacccgccaccgtcgttacatccgcctcggccttttcgtgctgatgctgttgagcgtggtcgtgcggccggtcgtgatccagcttggcgagctgcacgcctttgaacatgacgtcgcggctgcagcggaccacggccactcccacggagcggcgactggcgacaacgttgacccgaaacatgcctctggtgtccacggaattctccaccaagcggacgtcagctttgccggcaccttgctgtccccccatctcaacctgaccccagtctctccggcatccctgatgcttggtttgggtctggcaggggagctttccggccgcctctcatcgccattcaggcctccgatcgtctga

SEQ ID NO: 534095 - DNA, 5364 bp, Stenotrophomonas maltophilia
atgccgcaatctccagaacttgctggcggtgaaggattcacatacgagggcgacgcggccgcatactacatggctgcgttgctggccgaggcttatgcccctgggatcgatgaccgcaccgtagttcgcgtctccgtccaacagcgcgatttcggagagccgctagacgatttgattgtcgactttgctgataaggacgggcggatcgcccgcctcagcctgcaggtcaagcgttcgctgaccatcagcgctgccgccaccaatgtggactttcgagagattattcgcgacgcctgggcgacgctgcacaagcctggctttcgctccagaatcgatcgctacggcgccgccatcggcgaagttgccctcgtgccgggccgcgctttgaagaccatctgcgagtgggcgcgcgagagttcgacggccgaccacttcgacgcacgatttgcgcctgagggaagtgcgagcgacgagcaccggaaggtcagagccagcatcgagcagttgcttgcagcggggagcacaaccgcctgcaacagcgagcagctgcatcaattcttggctcactttgtcttgatcgaattcgacttcctgcgcgaaggttcggtggatccgccaatggcgatcaatctcatccgcaacagcttggcgcccgaatcggctggagaagccccgatggtgtggtcgcgcttggtcgaactggctcgtgctgcggccgggacctctggtcagttcgatcgcgcacgtctggtccgcgagctcgcgccgctgattcgactgcagaccgcgccgtccctgcaagcagaccttggccggctcaccgagttggcccgcagccaggctaacctgatcgttgacgacatcggtggtgcccggatcgaccgaagcacctatttgcaagcactggacgctaagttggtggacgctaggttcgtgcaggtgcgcggcctgccgggcagcggaaaatcggcggtggtgaaacaggcggtacagcgttcgctggcgcaagggccggtgatcttcctcaaagccgaacaggtcgatgccgtcagctggaacggatatgcggtctctcaggggctgtcggagacgagcttggagcggctgctggttgaggttggcgcagtgggtacgcccacgctgttcattgacgcgattgaccgggtcgctacagcacagcaacctgtcttcgtgcaacttatccagaccatcgcgacatcgctggagctggcacattggcgcgtcgtcgcctccttgcgcgataccgggatcgaggtgttgcgcacttggctcggcgaggcgttagcctccctcacggtcgaaacgctcacggtcggtgcgttgagtgaagccgaggccgatgcgctcgccgaggccaagccgcaactgcgtccgcttctattcggggcggacgccgtgcgtgagatcgtgcgtcgccccttctttgccaaagttctcgaccagacctttgacgccgcacccgccgggcccgagttcgccccccggtccgagattgacctgattgagtactggtggaggcgcggcggctacaacgcatccgggcaaaccgcgcttgaacgccagcgcaccttgcttggccttgcacgcgcccgcgctaaggagctcagccggccgatccgactgggtgagctccagtcgaccaactgcgttgaagagctccgcgccgatggcatccttcaacatgcgcggcacggcatcagcgtccagtttgcccatgacatcttcttcgaatgggcattcttccatgtgctggcggagctaggtccgaactggatcgacgctatccgcgccgccggcgaaccgcctgcggtcgcgcgggtcgtcgagctagcctcgcaatgggaatacagccacggtgacgcctgggctgcgtacctcgagcagacgcgagcctccggtctacgttcgcagtggacccgggcctggctgctggcaccacttggtaccgccgcctttgagtcggacgccaccccctactgggcggtggtttccaagaacgactttaccttgatgcacaaggccctcgtctggttccaggccgagaagacgacaccaaaccccgctgtcctggccggcacgcttccggatgatcggcgccaacgtgtcgcggacctcctaggttggccctctgatcttgcagcggcgcggcgcttgctcatgtttctgttagcgcggatgccagaaattccgcagacactttacccggctgtgctcgccgtactcgagctctggcagaacgctttcgatggctattcgaaccccatctcgcggcgtctgcttgaacagtgcgatcaatggctcgcgggcctggacgcgattagcgaagaccgcggccccgacgagaactcagccttctgggagaaggtgcaagacctgagtgcatttcgaacgtcgctgatccaactcgtactacgctcatcgcttgacgagccgagtatcgcggacgccctcctgttacgcgcgattggctcgcgccgcattcgttccgatgcctttgaggacatagttgtgttctcgccgcgcttagcccagtcgttaccgcatcggcttgtcgaactagctttggcatatctgcgagaagagctaccggaagaccgcgttgcgcgcgaacaagcggagcaagatcgtgcggttgcggcgcgacaggctatgtcgaaagacccgtcaagagcgctaagccgcgtcgaaagagtcagttggtccgctgtccactaccgaagtatcggcgagttcagttcctcagactgggagcaactggcgatccacgacgattaccgcagcttctggccgccgtcgccactgcgggagcccttcgcctcgctgtttcgtaagtcgccagttcacgccttgcgtttgctgcgtgaactgtgcaaccacgccatcgctgcatggcggcagttgcatcgtctcgactccgagtcgcgtcgcgtgccgctgccactggagctgacgttcccatgggggcagcagacattctggggcggcgatcgcgaatacctgtggtgccgctcaacatgggccccgaaagctattggctgcggctttcttgccctggaagagtggtgtcttggcgagatcgagcgcggcacacccgtcgatgatctcattcagcaaattgtggctggcaacgactgcattgcgattctcggaactgcggctatgctcgctcttcacactaaagcggtgtccgccaccacactgccactgttcacgtcgcaacgtctactaacggccgaccgccagcgtttcgcgggtgacctatcgcccagcaatctgatgggattcaggcacgcatcggatcggcctcatcaggacgcaatgcggaccgcaaatgcgcgcccggttcgtaagctcgaactccgaggaatggtgcctcagttcgtgttcgccgatgcgccgcttggctcgcaagcgcgcaccgccatcgaggcatttccgaaacggctaccctatcagtacgaggaggatcgtgaggatcccgaggtgcagcgtgaactcgccgagcaggcggcgaagtacgccgagctggccgacgagtccacataccaagcctaccgaaccgatagcgagcatatcactttggtgcacgtcagcccctctgccgccgagccggagaacgtcgccaaactcgagcaagccacgcagtacctgtcgatcgccaacctgtggacgtgggcatccacgtcctttgagaagcatgcgctcgacagccggctaagtctcagtgatgccgtagctgcggctaaagggttcgacgtgccggagctcttcgggagatcgagggtggatggctctgacttcatcgacatgcagcgaggcgcggtggcatcaacggcagcggtcacgttgacctttcgcacgggggctactagcgaccagttgaaatgggcacgccgagttctgcatcgtgcggtacggctacaggaaaaagccgatccttggcggttgcccggctcgatgattccctggcatcacggcatctacgccgcctacggcctcgccgcggacctgcgcgttggaaccgcaacgcgagcagctccgggcgacctgctagccctggtagcacacccgctcgaagcggtgtcgctggccgcagttaaggaggcgtgcgacttatgggacgctgacccgaagctgacgttggcggccctgttcctcgcgttctcactgtgtcacgtgccgcgaaccggccggagcagtcggccgcacaaaggtgtcattgagccgtccccgctagcggctgaggcgctgcgcatggcgggcgtgcattacgaccgcggtactgatttttcctccatcccacgtccgccgccggcgtgggtaaaaactgaacctagagggcggctcggtcagcaatcgtacgaaagctacgaagcttgcgatgcgacgaatccagaggaatgctggactgaacctgacacccactggcactccgcgtacgcctccgaggtgctggctcgggcacctgtgatcgggatcttgcaaagcgacgcacgagactcattgctcgattttctcgccgacgttctggcttggacgatccagaaaaacgctccgccttgggttgagcgtggacgacgtggaccatcggccacgcgcctaatcgaatggacgcgcgccctcgcgtctcagatcggtaacgttgcaggctacatgcccctttcggatctccagccgcgcttcctcgagccaatactgcagctggagggcgagaactgctgggccatgctcggcccatttgctagcttgtacatctgcaggtacatctatgatgcgcagactgtgccgtctgacgcagtcgccgtgattgatctttgcctgactcggcttctagcggaccgagcattcaaacgtgacagttatcgtgcgggcgagttgtccggtttcgatttaccgaggcttgtcgaaagcttgatgtttgtgtcaatcgagcgggctgaacgtgccagccgttacgtcaatggtgactgggcggagattgagagaatcatgccgctggtggaccggtacgtgcgtgcggcgggctgggcggttccggtaatggcggcataccttactttatgcgaacgatcgcgagcgcattacccctccggtgcgttcgcggaccaagttctggaggtcctttcactgggccctgatgggctgcgaggttggcgcggcacactcttctgcgcacgaatcgccggccttatccagcatctgtcacatcgggacgccccgatgaacctctcgatggcgcaggccttccttcggatactcgaccagctgatcgacatgggcgaccgtcgcagcgccgcactgcaactgggtgagggcttccgcgacattcgtctgggatcttga

SEQ ID NO: 534096 - DNA, 282 bp, Stenotrophomonas maltophilia
atggctgtctatgtcgtcacctggaacttgaatcgcgaagccaactacgacgcaaagcgcacagcgtttctcaagcaagtcaaccaatatcagaacgttgcagatcccggactggagtcagttcgttggatttcaacgaacctaacacccgacgcgctcacagatgatcttaagcatccgctcgataagaacgacaaacttttcgtagcgcgcatcaccacgggtagccaccaaggctggttgaacaaggccacctgggattggatcaaccagcgactgtga

SEQ ID NO: 534097 - DNA, 1053 bp, Stenotrophomonas maltophilia
atgcaggttcgcaagggagtacgtggtgtcggcgcgctgatgatcgcgctgctggctgccaacgccaacgccaatgccatggccgatacgccgaaggcgatagaggtgccctctccggaggcgcaggtgcagatcctcgacctgcttgaacgacaggcgttgtatcgcgaccgggtggattggcccgctacgcgtacacgtctgcaagcggtgcagggcgatcccgcgcagcggctggtgttgctgcgcgaagccatcgcgctcagcacgggccgtcatggcgtatggacgacgacccagcgccaaagtgaatcccttgcgcggacgcagcgggccggcgccgccgccgtggacagggccaaagccactgatgcagtggatgcgcgtatcggctgggtggtcatcgagggctatgcctccacgcccggcacgacgccacaggaaaagtaccgccaggacatccagcgcgctgcacggtggcagcaggtgattagcagcaaggacgatggcgcgcgctgtggctggatcgtcgacctgcgtgacaacggcggtggcaacatgtggccgatgctgctgggcatggcaccgttgctgcgcacctcggtgctgaacaacgaggatgtagggaccttcgaaagcgcacaggggccgaagcgctggacgttgaccgcgaccgccgtgcagctggcgggcaagcccttgctggattccggccagtccggctatgcgctgcgccagccaggcgcgccggtggcggtgctgttcgggccgcgcaccggcagttccggcgaggcctcggtgctggcgtggcgtggccgcgcgcagacgcgcagctttggccagccgacggcgggcgtctcgaccggcaacgtcgggcacatcctggccgatggtagccgcctgttgttgaccaccactgtgatgcaggatcgtgacggccgcggcgatggcctgaagatcgaaccggaccagtacacggaaggtgacgccgccacgctggcggcggcacagcagtggctgttggcccaacccgcctgccagacccgctcttga

SEQ ID NO: 534098 - DNA, 441 bp, Stenotrophomonas maltophilia
atgacgactctgcgcaccattcttcttgccgaagacagcccggccgatgccgagatggcgatcgatgccctggaagaggcgcggctggccaatcccatcgtgcacgtcgaggatggcgtggaagtgatggactacctgctgcgccgtggcgcctacgccagccgcgaggaaggcctgcccgccgtactgctgctggacatcaagatgccgcgcatggatggcctggaagtgctgcggcagatccgcgagcacgatgaactcaagcgcctgccggtggtgatcctgtcgtcctcgcgcgaggaaagcgatctggcccgcagctgggacatgggcgtgaatgcctacgtggtcaagccggtggatgtggaccagttcttcggcgcggtgcagaccctgggcaagttctgggcgttgatcaaccaggcaccggaactcgagtga

SEQ ID NO: 534099 - DNA, 1053 bp, Stenotrophomonas maltophilia
atgacgcgaatgcaactgccgctggctctgctgggactgctccttccgatgttggccagctgttcgtcaccacccgggcgctatcagcaggcggcgatacatgatcgcgatggtgtgccgtgcttcggagtacccgacaccaaagaaacgcgcgccaacccgccactgatcaccgcgatttcggtgacagagattggccggggcagcgagccagtatgggaacgcgtcttcctgcgccctggatccaccgaacctgcgttacatccgaatcagtgcctcacttacggccaagatggagagcctgcatcggccccgccgctgcgaagcggcaagcactaccaggttgttatttcaggaggtacgcccggcgagccaggtcaggagcaggcgcgggttttcattgcctgcttctatctggtggaagccgctgataggagcgcgatgagagtcgtcctatcggattgttcgaccgcgctctcggccgggccaccgcctgttcggatggaaagcaaatggcgagggccccacagggaaatttccatgaaacgactacaagcatggatgctgtcagctctactgctgccgatgatggccagcggctcagcgccccctggccgctaccagccagcgacgattcgggacctcaatggcctaccgtgcttcggcgtacccgacaccaaagagacgcgcggcaacgcgccgattgtcaccggcgtgtcagtgacagaagtaggctcgggtggtgcaccgatatgggaacacgattttctgcgcgagaggacgaatgaaccctcactccctcccagccagtgcctcaagtacggcgatggcgtggcgtccgtcccctcactactgacgggcaaacgttaccaggtagtgctatggggacgcacacgaggtgttcccggcaggaagggcgaagccgaggcccgtgtcttcagtgtctgcttccaaatggtggaagtgagcggaaagggtatagagcccgtcgtatcgaattgttcgaccgcgctgcctgccgggttaccgcctgttcggatggaagacagatag

SEQ ID NO: 534100 - DNA, 1281 bp, Stenotrophomonas maltophilia
atgcatgacctttgcacggccgcacgcgccgccgaactggatcgcatcctgcatttcgttctggaacggaagcgaatcatggcaaggaactggattgtggtgggtgacccgacctccagcggcggccgcgtgatcaccggctcaagcagaaccgacatcgacggcatgagcgttgcccgcgtcggtgacaaagcgacctgcccgacgctgcatcagggcgagttcgccatcgtcgacggcgatatcacgaccaccatcgacggccagcctgttgcactgcatggcagcgcgctggcctgtggctgctgtgtcctgtctacccaacagacccgggtgtacctcatcaccaacggcggcggcggccggacgcctgcaggtgatgccggcccgaccgaactcgcgtctgccctgcaacccgcagcctcgccatctccccgcactttcgaccaggcgatccgatttgtcggcagccgagggagcccgctggccgaactgccctatacgttgtatttggacgatggcagggtattctccggcaccaccgatgcacagggcggtacggcgcggatcttgaccgcgcagagccaagccgtggtgcgtgcggaactacgtccgcctacggtgctggcaggatgctgtgtgcgcatggcgcccggcaccgctgatgcaccggagatattcgatctcgagggtgtgatcaccacgccacaggacatgggcgtttcgatcgtggaggtgagcgcccccggccatgagcgaagccttacatacggcgagatcgagatggcgcgactggtgtttggcgactcggtcgactacagccgggtgaaggtgcacaaccatggctactggctgttgtttgggttccagcacaaggacactggcgtcacgccaaatggcgaaatgtactttcctaaagatatctactacgacgacttctccgccattgatgtgaggcttcaagcgttcttcattcacgagatgacacatgtctggcagtatcagctcggctacgacgtcaagctggctagaggaccgagaccgcgcatgagctacgactatgtcctcgacgaatcaaaacgctttcacaactacaacatggaagctcagggcgacatgctggcggactatttccttgtcatcttctgcaattcgcaggagaagatgaacaaccgccactatcgtgcgacagttggcatcagcgcaaagttggagcgcgcgctttccggcttccttgacgaccgcagcgatgagggaaacctgccgaggacgacccaatga

SEQ ID NO: 534101 - DNA, 408 bp, Stenotrophomonas maltophilia
atgtccgacctgctccccgactatccccgcctgcatgctctgctcggcgatgccgtgcgcgatcttcccaattcgttggccgagaagatggaagatgccctcagcgatgcggccgagtccattccgtcctccgcgttcttcaccttcctggagcgctacggcaagcaacgtcgcgccgacggtcaggcatggacggaaacccggctcacgcctgcgcgcgcgtttgacctggcattggccacgcgcagtgcgtcaggtatcactgcactcagcgccgtgctgcatgccgcacatgtcgcgcgtgagaacgatgacccgcgcagctgtccgtccgcagcactggttgatggcctgttcgacgcctgcgaagcgctttcgctgcaggttgagcgttgtcttgtgccatag

SEQ ID NO: 534102 - DNA, 270 bp, Stenotrophomonas maltophilia
atgccctctcccatctgccaaggcgatgccaccacgggcgacggcgaggttacccgctgccagcttgctgcaacccaccgcatcaatggccatccgttggcggtaaagggcgattacgccacctgttccctgcaccccggcgagcacagcttcgtcgagggcagcagcacccatctggccaacggcctcccgatcgtgctggaaggccacctgctcagctgcggctgccatgccattgccggcaaggctgcgcatatcaacgtggcatga

SEQ ID NO: 534103 - DNA, 324 bp, Stenotrophomonas maltophilia
gtgcagctggaccctcgctcccaggcgggttttgtcatcttcgaggctgacggccgccgccttactggcttcgcaggctgccagccgctgaccggcgtctaccatctggaaggcgagcaggcgctggcggtggaagccgttgcccgcaccggcacgcgctgccacaaggccatgttcgacacggtgggcgaccgctttgccaccgcgctcagcactgctaccggctaccgcctgggcaaggacgatgcggtgctggagctacttaacggtgaacgggtgacggcgaccctgatctatcgcactccgcctccgggccggtggtga

SEQ ID NO: 534104 - DNA, 1299 bp, Stenotrophomonas maltophilia
atgaggccggccccgctgctgctggcgctgttgctgggctgggctgcactgggcggcctggtgctgggcgggttgctgccgcgctggagctgggcgctggcggcgctggtggtggccacgctggcgctgttggacctgtggcggcaggcgcggcgtccgtcgccgcaggtgcagcgcgaactgcccgaggcgctggcgctgggcgttcgccgtgaggccgcgctgcgcctgcaggcggcgcaggcgatgaccgtgcaggtattcgacctggtgccgggcggctggccgctggaatcgctgccgcagcgcgtgcggttgcaggccggcaccgcctccaccctgcattaccacctgcagccgctgcagcgtgggcacttccgcttcgaaggcgtgcacctgcgcatgcgctcgccatggcgcctgtggtggcagcagcgcaccctgccaccggcgctggacgtacgcgtctacccgaacttcgtgccgctcacccgctttgcgttgttcagtgccgaccaggcctcgcggctggtcggtgcgcacgtgaagcgtcgccgtggtgaaggcaccgacttccatcagatgcgcgagtaccgggtcggcgacagcctgcgccagctcgactggaaggccaccgcgcgggcgcgcaagctgatctcgcgcgagtaccaggacgaaaagaaccagcagctgctgttgatgctcgacagcgggcggcgcatgctggccagcgagggtgggctgtcccatttcgaccatgcgttgaacgcctcgctggtggtggcctacctggcattgcgccagggtgatgcggccggcctgttcgccgccggaggcgagcgccgctgggtggcgccgcagcgtggcatgggcacagtggagcacctgctgcgcgccagctatgacctgcaaccgcgcgcggtggccaccgactacctggcggcggccaccgaagtgtcgctgcgccagcgccggcgtgcgctggtgatgttggtcagcaacgtgcgcgacgaggacatcgaagacctgctggcggcggtgcgcctgctgcagcgccgccacctggtgtgcgtggccagcctgcgcgagcgcgaactggacggcgcgatggagggcgacgttcagactctggaggaagccgcgcgcgccggtgccgccgccctgtatctgcaacagcgcgcgaaggcgcacgaggcgctgcgcagcgagaaggtgatggtgctggacgtgaccgccgacgccctgcccggtgcgctggtggagcgctacctggcggtgaagcgcgaagggctgctctga

SEQ ID NO: 534105 - DNA, 987 bp, Stenotrophomonas maltophilia
atgaccgaagttcccgaactgccggcagcggcccacgcccgcctgatcgaacgcgtcgatgccatccgccaggccgtcggccatgccttcatcggccaggccgacgtgctggaccagatcctggtggccctgctggccggtggccatgtgctgatcgagggtgtgcccgggctgggcaagaccctgctggtgcgggcattggcccaggcgctggagctggactacggccgcgtccagttcaccccggacctgatgcccagcgacgtcagcggccacgccgtgtacgacccgaagagcgagagcttcaagattcgccgcgggccggtgttcacccatctgctgctggccgacgagatcaaccgcgcaccggccaagacccagtcggcgctgctggaagtgatgcaggagggccaggtgaccatcgagggcaaggccttcaccctggcgccgccgttcatggcgctggccacgcagaatccactggagcaggaaggcacctacccgctgccggaagcgcagctggatcgcttcctgttgaaggtgctgatcgactacccgcagctggaggacgagaagcgcatggtggccgcgatcacccgtggccgtgccgccagcgatttcgatctgagccaggtgccgcgcgtactgggagccggcgagctgctggaactgcagcgtgccaccgcggcgatcagcatcgatgacgaagtgatcgactacgcagtgcggattgtcgccgccacccggcagtggccgggcatcgcggtgggcgctggcccgcgcggcagcatcgcgctggtgcgcgcatcgcgggcgcaggcggtactggccggtcgtgacttcgtcaccccggacgacgtgcgcgacatcgcacgcccggcgctgcgccaccgtatcgcgctggcaccggaactgcagatcgaagggcaggacgccgatgatgtgctgggtgcgctgctggccaaggtggaagcaccgcgccgatga

SEQ ID NO: 534106 - DNA, 1185 bp, Stenotrophomonas maltophilia
atgagcccgcgcctgttctggtcgttgttgctgggtgtgctggtgctgcttggcgtgccgctgaccatcctctacctgcgcacgcatgagcgggtgaccgagaccatcacgctgcccgcgcagggcgaggccgcctacaacccgctgtatgtgctcggccaggcgctgcgcgccgatggtatcgaggtgcatgctcggccccggctggagctgcagcagatggcactgggccgacacgacacggtggtgctgctgcaggacagcagcgaactgcccgcaccggtggcgcgtgcgctgttggattgggccgggcgcggaggtcatctgctggtgcgcaccccaccgccggccgaagatgacgccggcagcacgcagggccccttgctggaccagctgggcgtggacagcctgttccagcgcagcgagtgccagccgttccatgtgcaggatgatcccagccacgtggaattctgcacgggcaggcgcttcaccctgggctttgccgccagcgcgcaggccgagcgtcgctggggcagcgatcacgacctggtgttcgcacgcctgcgccatggccagggccgggtgagcgtgctggccgacatggcattcatgcgcggcgaggtggattcgcctgccgcgcgcctggcggccgccgccggcaacgccagcgacggactgcacgatcgtgcgcaccgcgacctgacccgttacctgcttgatccgaactacggcagaggcagcgtctggctggtctatgccagccgcccaccgtcactgtgggcacgcgtgttctaccagggttggccgctgtgggcaccgctgctgctggccatcctgggctggctgtggggccgctcgcaacgcttcggcagcctgttgccatcgccggtgctggagcgccgctcgctgctggaacacgtgcgcgccagcggcgaactgctgctgcgtttcggccagggtgcgcgcctgtacgacgccgtgcacgccttgttcctgcatcgcctgcgcctgcgcgcaccggtcgccgccgcactggagggcgcaccgcgcgaacaggccatcgccgaactgctggcctggccgcgcagccgcgttgccagcgcactgaccccgccaccgccgcatgattcctccgccctgcgcgagcgcatccgcttgctgctccagatgagatccctgctatga

SEQ ID NO: 534107 - DNA, 1617 bp, Stenotrophomonas maltophilia
atgcggattgaccgcctggacgtggtgctgcgcgcacgcagcggctgggaggcgatggagctgggcagcgccctggcccgccgccatgcccgcgcggtatggggcagctggctgctggccagtgcaccgctgttcgcgatcttcaatgcactgggttggtggctggatgccttcggctgggcgtggctggccatgtggtggtgcaagccgctgttcgagcgcgcgcccctgtacgtgctgtcgcgcggcatcttcggcgaaccggtgacggcgatgggcgccctgcgcgcgcaacgcagctggggccacagcggattctggggttacctgggctggcgccgcttcagtgtgctgcgcagcctgtgcctgccggtgaacctgctggaaggcaatgcgccgaaccagcgtggtccccgccgccgtgcggtggccgccggtgcggccggcgccgcgacggcgctgacggtgctgtgcatggtgttcgaagcggtgctggtgtccggcgcgatcggcgcggtgttcatgttcatgccgctggagctgatgtccgagtcgtggcgcgcggcctgggacatgatcggcaaggacacgccggcctgggcacgcttcggtttcaacctggcgtgctggctggcctcggtgctgatcggcccgttcttcgtcggtgcgggcttcggcctgtatctgaaccggcgcacgcagatggaagcctgggacgtggagatcgcgctgcgccgcctgcgtgggcgcctgctgccggtcgccccgacgctggccctgctgctgtgcctggcactgccactggcggtcgggccggtgcacgcgcagaacgcaccgcagagcgccgaagaggccagcgagacgggcctggacgacacgccggacgaggaagcggccaccgccgacaatgacccggccaacgccccggcgaccatctttggcaccgcaccggtggataccgcagggttccgccaggcggtgagccgcgcctatgaagatccactgcagcgcccgacgcgccaggtcacacactggaaaccgatcgagcaggccgaggaagagaagaaagacgacaaggcgctgcagcgcgacagccgcaacacgggtgaacgcaaggcccgcagcagcggcatcgcctggctggcgcgcctggccgagtggggcctgtggggcctgctgggcgtactggtgctggtgctgctgctgaccgcccgggtgtggctgccgtggctgcgtggcagtggccggcgcaaggccgttgccgcgccagaggtggtggaagatcacgtggaactgccggccgtgctgccaccggatgtggccacccaggccggcctgctgtgggaccagggtcggccgcggcaggcgttggccctgctgtaccgcgccagcgtgcgtaccgtgggcgagcgcagcggcatcgccctgccccccggcgccaccgaagcgcagtgcctgcgcgcatcgcggcgcatgcccgaagctgccgaccgtgacctgttcgcgcgcatcgtgcgcatgtggcagtacgccgcctacggtggccgcctgcccagccgcagcgacttcgacgcgctggccgcaacgctgcgccagcagtaccggtggcaggcatga

SEQ ID NO: 534108 - DNA, 993 bp, Stenotrophomonas maltophilia
atgaagcaggagcagttcgtcgcccgttatcagcaggaatggcaggacctggagcaatggctgcggctgcgcgccggtgtctcgcgtcgccggcgccgccaggccagtgagctggccctggacgataccgccttcccgcaacgttaccggcgcctgtgccaacagttggccctggcccgcgagcgtggctacagcccgcagctggtgcagcgcctgcagcagctgatgcagcacgggcacagcgtgctgtaccgcacgccgcccacgcgctggcgtgcggcactggaattcctggtcggcggcttcccgcagctggtgcgcagccaggcgcgcagcatgggcgtggcactggcgatgttcgcgctgccgaccgtggcctgcttcgtgctggtgcagctctacccggacctgatccatcagctgatggacaaccgccagattgccgagatggagcgcatgtacgacccggccgccgagcgcctgggccgcgacagcggcaccgactggatgatgttcggccactacatcatgaacaacatcagcatcgccctgcgcacctttgccagcggcctgctggccgggctgggcacgctgctggtgctgctgttcaacggcgtgatcttcggttcggtggccggtcacctgcagcacatcggccacggcgacccgttctggcgcttcgtggtcggccacgccgccttcgaactcaccgccatcgtgattgccggtggcgccggcctgcagctgggcatgaagctgctggcaccgggccggcgcagccgcctggacgcgctggtcgaaggcggacgcatcggcgcgcggctgtgcctgggcgtggccttcatgctgctggtggcggcgttcatcgaggcgttctggtcgtcgattgccgaagtaccggcatggggcaagttcagcgtggccggcgtgttgtgggccggcgtgctgctctggctgtggcgcggcgggcgcggaggcggcgatgcggattga

SEQ ID NO: 534109 - DNA, 690 bp, Stenotrophomonas maltophilia
atggccgcgccaatgctcgacacctaccgcgaggtggtgacgccggagggcgttccgctgcagctgccggccgccggcccggtgccgcgggcgatggcctggctggtcgacctgggcatacgcttcgccgtgctggtggtgatgtcgtttccgctggcactgctggacgagttcggctccgggctctacctggcgctgatgttcctggtctactggctttacccgatcgtctgcgaggcgctgtggggccgcaccctgggcaagcgcgcactgggcctgcgcgtgctcgcccgcgatggcgcgccggtgggctggatggcggcgatcacccgtaaccttctgcgcaccgtggacatgctgccgttcggctatgcactgggcctggtcagcagcctgttcgacgcgcatggccggcgcctcggcgatctggtggccggcaccgtggtggtgcacgcgccggcgcagtacctgccgccacccccgaccatcgacagcgtgctggtgccgccgcagccgctgcggccggaggaacaggccgcggtgctggccttcgccgagcgcgcgccgcggctgtcgccggcgcgccagcaggagctggccggcattgccgagccgctcaccggcacccacggccaggtgggcgtactgcgcttgtatgcaatggccaactggctgttggggcggcgatga

SEQ ID NO: 534110 - DNA, 531 bp, Stenotrophomonas maltophilia
atgaacccgttgcgccccttccgcgacaagatgccggtcctcggcgagcgcgtgtacatcgacccggcctgcaccatcatcggtgacgtggaactggccgaggacgtgtcggtgtggccgggcacggtcatccgcggtgacgtcaactacgtgcgcatcggcgcgcgcaccaacgtgcaggacggcaccatcatccatgtcagccaccacagcccgtacaacaaggccggctacccgaccctgatcggcgaaggcgtgaccgtcggccatggctgcatcatccacgcctgcaccatcggcgattacagcctgatcggcatgggcgcctgcatcctcgacggggcccgggtggagcgccatgcgttcgtgggtgccggtgcggtggtcggcccgggcaaggtggtcggcgaaggcgagctgtgggtcggcaacccggcgcgtccggcacgcacgctcagcgacaaggagatcgaatcgctgcactactcggccgaccactacgtgcggttgaaggaccagtacctggcctga

SEQ ID NO: 534111 - DNA, 690 bp, Stenotrophomonas maltophilia
atgagcacgtcccccgccgacgccgcgaagatcctgattgtcgaggacgagccgcgcctggcctcggtgctgcgcgactaccttgcggccgccggtatggccagccactgggtggacgacggcggccaggtgatcgaggcgtttgcgcgctaccagccggacctggtgctgatggacctgatgctgccgcagcgcgatggcgtggacctgtgccgcgaactgcgcgccagcagtgatgtgccggtgatcatggtgaccgcacgggtggaggaaatcgatcgcctgctgggcctggagatcggcgccgacgactacatctgcaagccgttcagcccgcgcgaggtggtggcgcgtgtggtggcggtgctgcgccgctaccgccccgatccggccacgcgtgccagggctggcctgtgcatcgatgagccggccgcgcgcgccacctggaacggcaaggggctggacctgaccccggtggagtaccgcctgctgcgcaccctgctggccacgcccgggcggatctgggcgcgcgatgaactgctcgaccggctgtacctggaccatcgggtggtggtcgaccgcaccgtcgacagccacgtgcgcaacctgcgccgcaagctggccgacgccggcatggacgaagatccgatccgttcggtgtatggaatggggtacagctacgagccgtaa

SEQ ID NO: 534112 - DNA, 1392 bp, Stenotrophomonas maltophilia
atggcgaagattcgactcacattcggcctgaccgcgaagaccttcctcgcgatcttcaccgcctgcctgctggtgctggcagtgaacggcattgccagccgcgtggccttccagaccggcttcctggattacctcaacgaccagggcgacctgcgcatgcagcgcctgatgccgcacctgcaacgcgagttccgcgagcacagcggctgggagcacctgcgcggcaacgccgatcgctgggcacgcatgttgcggccggacctggcccatggccacgaaggcccggtgccaccgctgtccgaccagaccggcgtaccttcgcggctgggcctgttcgatgcgcagcaccgctgggtggccggcaacccggacgccaccagcgatgacgagccgcatgcggtgcaggtggatgggcagaccgtgggctggctgggcatggtgccgttccagaccgtcatcgccaccaacgatctgaacttctacaacacccaggtgcgcgcctggtgggtgatcggcatttcactgctgctggtgaccgtgctgctggcctggctggtctcgcgcgcgctgcggcagcgcctggccaaactggccgcggccacgcaccgtctggctgctggcgattacgccacccgcatcgagcgcaccagcgatgatgaactggatgcgctggtgaacgacttcaaccggatggcgcaggcgctggacgataccgaacgcaaccgccgcgccttcatcgccgatatctcgcacgagctgcgcaccccgctggcggtggtgcgcgccgagctggaggcgatcgaagatggcatccgcccgctggaccgcgccaacctcggcgccttgcagggtgagatccgccagctgggcaagctggtggacgatctgcacgacctgtcgatgacccagtccggcggtctggcctaccgcttcgcgccgctggacctgggcgcactgctgcgcagcgaactcaacggcatgcgcgtgcgcttcgcccatgcaggcctggcactggaagaagacctgcccgccacgccgttgcaggtgtccggtgacgaacgacgcctgcagcaggtactggccaacctgctggaaaatgcactgcgttacacccacgccggcggccgcgtgcaggtacaggccgcccgcaccgccgacggcgtgcagctggtggtggaggacaccgcgccgggcgtgccggccgacaagtgcgcactgctgttcgagcgcttctaccgggtggaaagctcgcgcaaccgcgccagcggcggcagtgggctgggcctggcgatcagccacaacatcatcctcgcccaccacggccacatccacgccgaaccgtcgccactgggtggcctgcgcgtggtcatcatcctgccggagcctgcatga

SEQ ID NO: 534113 - DNA, 1197 bp, Stenotrophomonas maltophilia
atgccactcctgcgcccgcttttccgtacttcccgtccgctgttgttgcccctgctgctggccctggcggcctgctcggaaggcaggaccgatgccccggccacgcccgaggtcggcgtcatcacggccagtgcgcaaccgctggcgttgcagcagaccctgccggggcgggcggtgccgttcgagatctccgaggtgcggccgcagatcggtggcctgatccgccagcggttgttcaccgaaggccagcaggtcaaggcggggcagctgctgtaccaggtcgatccggcgccctaccaggcggccttcgataccgcccgtggccagctggcgcaggccgaggccaccgtgctgtcggcacaaccgaaggccgagcgcacccgcgcgctgctgggcatggatgcagccagcaagcaggatgccgacgatgccacctcggcattgaagcaggcacaagccaatgtgattgccgcgcgcgcggcattgcaggccgcgcgcatcaacctcgactacacccgcgtgaccgcccccatcgacggtcgcatcggcacctccagcgtgaccgctggtgcgctggtcgccgccggccaggacgctgcgctggccaccatccagcggctggacccggtgtacctggatgtcacccagtccagcacgcagatgctggcgctgcgcaagcagctggacgccggcctggtgaaggccatcgatggcaaggcgcaggtgaaggtgctgctggaggacggcagcatctacacgcatgaaggcaccctggagttcgtcggcagcgcggtcgatccgggcaccggcaacgtggtgctgcgtgcggtcatccccaacccggacggcctgctgctgccgggcatgtacctgaaggcggtgctgccgatggccaccgatgcgcgcgcgctgctggtgccgcagaaggcggtgctgcgcaacgaacgcggcgagccgctgctgcgcctgctcgatgccagggaccacgtggtcgagcgccgggtcagcaccggtcaggtggtcggcaaccagtggcagatcaccgatggcctcaaggccggcgaacgggtgatcgtcagcaacggcagcgcggtatcgctgggccagcaggtgaaggcggtggcggccacgacggcgcagctggccgcgatgccggcgatcgacccgaacggcaacaccgacgaaaagtcgcactga

SEQ ID NO: 534114 - DNA, 3150 bp, Stenotrophomonas maltophilia
atggttcgtttcttcatcgaccggccgatcttcgcctgggtgatcgccatcgcggtcagcctgctcggcctgcttgcgatcctgatcctgccggtggaccgctacccgcagatcgcgccaccgaccatcaccatccgcgccacctacaccggtgcctcgtcgcagaccgtggaaaatgcggtcacccaggtcatcgagcagtcgcagcagagcctcgatcacctgatgtacatgacctcgaccagtgcctccgacggctcggcgcaggtcaacctggtgttcgccaccggcaccaatccggatacggcgcaggtgcaggtgcagaaccagctgcaggccgccatggccacactgccgcaggcggtgcagcagaacggcctgaccatcaccaagtccagtggttcgatcttcgaggtgctgtcgttcaccagcgaagacggcagcatggacaacttcgatgttgccaacttcatggaagcgcgcatcgacgaccagatcagccgcgtcagtggtgtcggcaacatccagccgatcggccaggagtacgccatgcgcatctggctggacccggagaagatgcgccagtacgccttgatgccctcggatatcgagagcgcgctgcaggcgcagaacactgatgtctccgccggcgaactcggcggccagccggcgctgaagggccagcagctcgacgccacggtgaccgcgcgcagccgtttgcatacgcccgagcagtttgggcaggtggtgctcaaggccgatgccaacggcagcgtggtgcatctgggcgacgtggcgacgattggcctgggcccggagagctacgacagcatcagcaccttcaacggcaagccgtcggcctcgctgggcatcgagctcaatgccggtgccaacgccatcgccgtgtccaaggccatcgatgcacggcttcagcagctgcagaagtactggccgcatggctacaccgcccacgtggcgttcaccactacgccgttcgtgaccatttcgctgaaggaagtggtggtcaccctgatcgaggcgatcatcctggtggtgctggtgatgtacctgttcctgcagaactggcgcgccaccctgatcccgaccatcgcggtgccggtggtgctgctgggcacgttcggcgtgttggccgcgttcggctattcgatcaacacgctgaccatgttcgcgctggtactggccatcggcctgctggtggacgatgccatcgtggtggtggagaacgtggagcgggtgatgaccttcgaagggctggcaccgaagccggccacgctgaaggcgatgggccagatcaccggcgcgctggtcggcatcgtgctggtgctgaccgcggtgttcctgccgatggcgttcttcagcggtgtcaccggggtgatctatcgccagttctcggtgacgatcgccgcggccatgatcctgtcggtgctggtggcgatgaccatcaccccggcgctgtgcggcagcctcctgcacccgattcccaagggcgggcatccgcacggcgaccacggcggcgagccgagcctgctgggcaagttcttcatctggttcaatcaccgcttcgagcgtacgtccaacggcctgcgccgccgtgtcgatggtttcctcggccggcgcacgctgggcgtggtgttctatctggtgctgagcgtggtcaccggcctgctgctgtggcacctgccgggcgcgttcctgcccgatgaagaccagggcatgctcaacgcgctggtgaagctgccggccggcaccacgctcgaacagacccgcgcggtgatggatcgtctgagtgccgcagcggtgaaggatgacagcgtgttgtcgatccaggccaccgccggcttcagcgtgaccggcagcggccagaacgtcggccaggccttcatccgcctgaaggactgggatgaccgcaaggacgatgccgataccatcgccgcacggctgacgcaggcgatggccagcgtgcccgatgcgcaggtgttcatcacctcgccgccggccatccttggcctcggcgatgccggcggtttcaccctggaactgcaggacgaaggcggcgccggccatgcggccgccgtggctgcacgcaacacgttgctgaaggaagccgccaaggatccgaagctggtcaacgtgcgctatgccagcctggaagacgcgccggtgtacgcggtgaaggttgacgacgccaaggcacaggcgatgggcgtgaacccgcaggacatcaatgacaccctgaatgccgcgctgggcggcgacttcgtcaacaacttcatctacaagggccgcatcaagaaggtgttcatccagggcaccgccgaagcgcgcatgcagccgcaggacatcgagcgctggagcgtgcgcaaccaggccgggcagatggtgccgctgtcgtcgctggtcagcgcgcactggtccagcgcaccggccgcactgcagcgctacaacggcatctcggcgatggagatcaccggccagccggcgccgggcgtcagctccggtgaggcgatggccgagatcgcgcgcctggccgacacactgccggaaggcttcagccacgcctggtcggacatggcctaccaggaacagctgtcgggcaaccaggcgccgatgctgtacgccatctcgctgctgttcgtgttcctgtgcctggccgcgctgtatgaaagctgggcggtgccgttcgcggtgatgctggcggtgccggtgggcgtgttcggtgccgtgctgatgatgaacctgcgtggcctcaacaacgacgtgtacttccaggtcggcctgttgaccacgattggtttggcggccaagaacggcatcctgatcgtcgagttcgcgcgcatcctcgaacagcagggcaggagcacccgcgaggcgatcctgcaggcggtctacctgcggctgcggccgatcgtgatgacctcgctggcgttcctgatgggcgtgctgccgctggtgttcgccaccggcgccggttcggccgcgcgccgttcgctgggtaccggcgtggccggcggcacggttgcctcgatggtgctgggcatgttcttcgtgccgttgttctacctgctggtgcgccgcctgttcccggggcgcgcgccggccgaagccactgctgcggggacaagcccatga

SEQ ID NO: 534115 - DNA, 1416 bp, Stenotrophomonas maltophilia
atgaagccgatgctgctgcgcgccctggcggccgcaacgatgaccaccgtgctcggtggctgcatgagcatggccccgcattaccagcggcccgaggcaccagtgccggtgcagttcggcaatgccgccaccggcgaggccgagccggcactggcgatgccggcgtggcgcgaggtgttcctcgaaccgcgcctgcagcaggtgatcgcgctggcgttgcagaacaaccgcgacctgcgtgtggcggtgctgcaggtggagaaggagcgtgcgcagtaccgcatccagcgcgcagcgctgctgccatcggtggatgccagcggcagcgtcacccgttcgcgggtcagcgatgccaacagcgagagtggttccacccaggtgaccgaatccgatgccgtgcaggtcggcatcagcagctgggagctggacctgttcgggcgcatccgcagcctgaagaacgaagccctgcagaactggctggccagtgccgagaaccagcgtgcggcgcgcaccagcctggtggccgaagtggccacggcgtggctggcgctggccgccgatgggcagtcgctggcattcgcgcagcagaccctggacagccagcagcagacgttgcagcgcaccgaggcgcgtcatgcgcagggcgtggcctcggggctggatctgtctcaggtgcagaccagcgtggaagctgcacgcggcgcgctggccaggctgcagacccagcaggcgcaggatcgcgacgcattgcagctgctggtgggggcgccactggatccggcgctgctgccgaccgcgcaggcgctggagggcagcgtggcactggcgccgttgccggccgacctgccgtccagcgtgctgctgcaacgcccggacgtgttgtccgccgaacacgcactgcaggcggcctccgccgatatcggtgccgcacgcgcggcgttcttccccacgctgaccctgactgccaactacggccacagctccaccgcgttgtcgacgctgttctcggccggcacccgtggctggtcgttcgcgcccagcatcaccgcgccgatcttccatgccggcgcactgaaggcctcgctggatgcctcgaagatcggcaaggacatcggcatcgcgcagtaccagaaggcgatccaacaggcgttcagtgaagtggccgatgcgctggccacgcgcgatcacctgagcgcgcagatggatgcgcagcgtgcgctggtggccgccagccagcgcagctacacgctggccgacgcacgttaccgcaccgggctggagggctatctgcaggcgctggatgcacagcgcagcctgtatgccgcgcagcaggacctgatcgcgctgcagcagcaggaagcgggcaaccgggtgacgttgttcaaggtactggccggcggcgccgacgcacggtaa

SEQ ID NO: 534116 - DNA, 1890 bp, Stenotrophomonas maltophilia
atgaacccgtccttccatcgttacgacgtcatcgtcatcggcggtggccacgccggcaccgaagccgcgctggccgcagcccgcaccggcgtgcgcaccctgttgctgacccacaacatcgaaacggtgggcgcgatgagctgcaacccggccatcggcggcatcggcaagggccatctggtcaaggagatcgacgcactgggcggtgcgatggcgcatgccgccgaccgcgccggcatccagtggcgcacgctcaacgcctccaagggcccggccgtgcgcgccacccgctgccaggccgaccgcaacctgtaccgcatggcgatccgcgccatcgtcgaaggccaggccaacctgaccgtgttccaggccgccgtggatgacctggtgatcgaaggcgacgccgtgcgcggggtcatcacccagaccggcctgcgctttgacgccgaggccgtggtgctgaccgccggcaccttcctggccggcaagatccacgtcggcccgacccagtacgccgccggccgcatgggcgacccgccggccaccacgctggccacgcgcctgcgcgagcgcccgttccaggtcgaccgcctgaagaccggcaccccgccgcgcatcgatggccgctcgctggactacagcgtgatggacgagcagcccggcgacacgccgcggccggtgatgtccttcctcggttcggtggacgagcatccgcagcaggtcagctgctggatcacccacaccaccgaacagacccaccagatcatccgcgatgcgctgcaccgctcgccgttgtacagcggccagatcgaaggcatcggcccgcgctactgcccgtccatcgaagacaaggtggtgcgcttcgccgagaaggccagccatcagatcttcgtcgaacccgaaggcctgggcatcgtcgagatctaccccaacggcatctccacctcgctgccgttcgacgtgcagctggagatggtgcgcagcatcgtcggtttcgcgaacgcgcacatcacccgccccggctatgcgatcgagtacgacttcttcgacccgcgtgggctgaaggcctcgctggaaaccaagctggtcaacggcctgttcttcgctggccagatcaacggcaccaccggctatgaagaagccgccgcgcagggcctgctggccggcctcaacgccgcgcgccaggtgcgcgggctggatggctggtgcccgcgtcgcgacgaggcgtacctgggcgtgctggtggatgacctgatcacccacggcaccaacgagccgtaccgcatgttcaccagccgcgccgagtaccgcctgcagctgcgcgaggacaatgccgaccagcgcctgaccccgactggccgcgaaatgggcctggtcgacgaccgccgctggagcgcgttcgaaaccaagcaggccgccgtcgccgccgagcgtgcgcgattgggcgcgctgtgggcgaccccggccaatgcgctgggccgtgaagtgcaggaaacgctgggcgtggcggtcagccgcgaaaccaacgtgctggacctgatcaagcgccccgagctggactacgcgcagctgatgcaggtgccgtcactgggcccggccgtggccgacggcaaggtggccgaacaggtggagatcggcgtgaggtacgccggctacctggatcgccagcgcgaagagatcgagcgccagcagcggcatgaagccacgccgattgccgaggcgttcgactatgcgacggtgcgcgggttgtcggccgaagcgctgcagaagctcgaacgcgtgcgcccgcagaccatcggccaggcgcagcgcattccgggcatgaccccggcagcgatctcgctgctgctggtgcacctggagcgcgcgcgccgcgggcgcgtggcgtaa

SEQ ID NO: 534117 - DNA, 474 bp, Stenotrophomonas maltophilia
atgaaaacgcgcctgttgcttgccggtggcctgttgctggccctgaccggctgcaccacctacgactacgtcggcggcggacgcagtggcagctactaccacggcgcgccgtcggtggagtaccgctacccggccggctatccgtacaactacggcccctattacggtggctacggcggctattacggcggctacggctatccgtactactcgcgcccggtctaccgcccgccgcacaaccaccggccgccgccgcgtccgccgggcaacgggggcgagcatcggccgccgccgcgcccgaacaatggcggttcgccctggcgcaacatggactcgatgcgacgcccgccgcaggcggacatgccccgaccggcaccgccggcacgcccggcgccggcaccgagcgcgccgaggatgaacggttccccctggcgcaacatggatcgtgggacgcagcgcacacttgagcgctga

SEQ ID NO: 534118 - DNA, 963 bp, Stenotrophomonas maltophilia
atgagcgattcactgtggccccgagtcgaagacgtcctgcttgctgctgcgaggatcgccccgcatgccagcgtgaccccggtgctgcgttcgcgcacgctcgatgcgctggcgggcgcgcagctggcgttcaaggccgagcatctccaacgcggcggcgcgttcaagttccgtggtgcctgcaacgcggtgtggtcgctggatgccgatcgcgccagcgccggcgtggtcacccactcttccggcaaccacggtgccgccctcgcgctggctgcccgcacccggggcattccctgccacgtggtggtgccggaaggggcggtcgcggccaagctggccaacatcgctcgccacggcgccacgctctggcactgcccgccgaccatcgccgaccgtgaggccacctgtgccaaggtgcaggccgataccggcgcaaccctggtccatccctataccgacccggcggtcatggccgggcagggcaccgccgctctggagctgctgcacagtgacggtccgttcgacgtgctggtggttccggtgggcggcgggggcctggccagcggcaccgcgctggcgctgcagcatgccagcccgcagacccggctggtgctggccgagccggccggtgccgatgacacggcgcgctcgctggctgccggcgagcgccagggcgcattcaccccggacacgatctgcgacggcctgcgcacgctgatcggtgtgcccaacttcgcgctgctgcgcgcagccggtgccgaggtgatcgtggtcgatgacgcggccacgatggccgcgatgcgcctgctgtgggaggtcctcaagcaggtggtggagccgtcttcggccaccgtgctggcggcggtactggcgcagccgcagcgctttgcggggttgcgcgtggggctggtgttgtccggcggcaatgtcgacctgccggcactgcgctggggcgcgccatga

SEQ ID NO: 534119 - DNA, 633 bp, Stenotrophomonas maltophilia
atgagtcgcgaccggcagcgacggcgtaccggcctgctgggctggatctggcggctgttcgtggtgttggtgatctggctgctgggtgtgaccgcttggatcgtctggatcggtgagcgtgaccaggcggccaaggccgacgccatcatcgtgctgggtgccgccgcctatgacgccaagccgtcaccggtgttcgaggagcgcatccgccatggcctggatctgtatgacgcccgctacgcgccgctgctgatcttcaccggtggctatggcggcaccggtgcgcgcttctccgagtcgcaggtggcacggcgttacgcgctcaagcatggcgtgccggacgacgcgatcctgatcgagaccgcctcgcgcaataccgtacagaatctggtcgaggccaagcggctgatggaccagcgccatctgcgccgggtgatcatcgtcagcgacccgttgcacatggcgcgcgcgctgcgcctgagcaaggcgctgggcatcgatgcgctggcctcgtcaacgccgagcacgcgcttccgcagcttccacaccagctggcgcttcctggtgcaggagatctacttcttccaccgcgatctggtgcgcccgccgctgagttcaccggccaatacctga

SEQ ID NO: 534120 - DNA, 780 bp, Stenotrophomonas maltophilia
atgcatatcgaagtgaccggccaggggccggacctggtactgatccacggctgggccctgcagggcggcgtgttcgcgccgttggtggagcgcctggcggatcagttcaccctgcatctggtcgatctgcccggtcacggccacagccgcgaagacaccacgccgctgcgcctgccgttcgtggtcaacgccattgctgcggccacgccgccggcggtgtggtgcggctggtcgctgggtggcctgttcgcgctgcacgcagcggcgacgctgcccaaggtgcgcgggctggcgatgatcgccgccacgccgcgattcgtgcgcggcgaggactggccgcatgcggtggaaccggcggtgttcgagcagttcgggcgcgagctggcgactgacttcggcggcaccctggagcgtttcctggcactggatgtgatgggctcggagcatgcccgcgaggagctgcgcacgctgcgccagcgcctggtcgagcgcggcgcgccgaccgaacgcgccttgctggaaggcctgcgccttctggaaggcaccgacctgcgcggcgcgctgcccacgctgggcaagcccagcctgtggatcgccggccagcgtgaccgcctggtgtcgccggcggcgatgcaggccgctgcggcgctggccccgggcgcgcaggcgctgaccatcgcccacggcggccacgcgcccttcctcggccatgccgacgaggtggccgccgccctgcaacacttcgttgccggcctgtcaccggccgatggcggacaatga

SEQ ID NO: 534121 - DNA, 1224 bp, Stenotrophomonas maltophilia
atggcccgccccgacctgaccgcccgcctccacgcccaacgcgccctgcgcgatgcccaaggccgacgccgcacgcggcgcacggtcagccgccgtgatggcgtccgcctggaagtggacggccagtggctgaccggcttctgcagcaacgactatctgggcctggcccagcagttcagcgtggtcaacgcactgcaggatgccgccgcgcgcgaaggcgccggtgccggtgcctcgcacctggtctgcggccaccacgcgatgcacgacgcgctggagcgcgaagtggccgagtggctgggctacccgcgtgcgttgctgttcggcagtggcttcgccgccaacctggcggtgcagcaggcgctgctgagcgaagagaacgacgtgtgcgtgcaggacaagctcaaccacgccagcctgctcgatgcgacgcggctggccggtgcacgcctgcgccgctatccgcacctggatgcggaaggggcgatgcgccagctcaagcatgcgccggagggtgcggcgatgctggccaccgacggtgtcttcagcatggacggtgacatcgcgccgttgcgtgcgctgtcgctggtggcacgcctgcagcaggcactgttctatgtggacgacgcgcacggtgtgggcgtggtcggcgatggtcgtggcgcggtggccgccgccgggctgggcgtggacgacgttccgctgcagctggtgacgctgggcaaggcgctgggcggttccggcgcgctggtgctgggccgcgacgacctgatcgagcatctggccgagaccgcgcgcccctacgtctacaccaccgccctgccaccggcgatggccgctgctgcactggaagcagtgcgcctggcgcgccgggacaactggcgccgttccaagctggccgacctgatcgccctgttccgcggcgaagcgcgccgccacgggctggatctgatggcgtcggaaacgccgatccagccgctgctgtgcggtgatgaccacaccgccgtgacgatgtcccaggcactggaacaggccggctggctggtcggtgcgatccggccgccgaccgtgccggaaggcaaggcacggctgcgcgtcaccctgtccgcgctgcacacgccggaacaggtgcgcggcctggtcgaagccatcgccagcgcgcgcgaccgcgtggccctgtccgtgcgcgaagccgcaccgccaccactgcccgcctttgcctga

SEQ ID NO: 534122 - DNA, 1044 bp, Stenotrophomonas maltophilia
atggctgctgccatccgccacgactggcaacacgacgaactgcagtcgctgttcgagctgccgttccccgagctgctgttccgcgccgcagcggtccaccgcgagcacttcgaccctgcccaggtacaggtctccacgctgctgtcggtgaaaaccggcggctgcccggaagactgcgcgtactgcccgcaggcgcagcgctacagcaccggggtgaacgcgcagaagctgatggagaccgacgcggtgctggccaaggcgcgccaggccaaggctgccggtgcgtcgcgcttctgcatgggcgccgcatggcgttcgcccaaggaccgcgacatcccgaaggtggcggcaatgatcgccggggtgaaggcgctgggcctggaaacctgcgccacgctgggcatgctcagcggcgaacaggcgcgcgccctgaaggacgccgggctggactactacaaccacaatctggatacggcgccggactactacgattcgatcatccacacgcgccagtaccaggaccgcctggatacgctggaacacgtgcgcgatgccggcctgaagacctgctgcggcggcatcgtcggcatgggcgaaacgcgcgcgcagcgcgttggtctgctgctggcgctggccacgctgccggcgcatccggattcggtgccgatcaacaagctggtgcaggtggcaggcacgccgctgcatggcagtgccgagctggatccgttcgagttcgtgcgcatgatcgccgtggcgcgcatcgccatgccgcgcgcgatggtgcggctgtcggccggtcgcgaggcgatgagcgacgagttgcaggcgctgtgcttcctggccggggccaattcgatcttctacggcgacaagctgctgaccaccggcaacccggaaagcgaacgcgacctggccctgttcgcccggcttgggctgcagccgatggcggtgcaggtcgatgccgaagggcatgaccacggcggcaccgtgcatgccgatatcagtgccgatgcgcccggctgcggctgcgctcacgcggcctga

SEQ ID NO: 534123 - DNA, 309 bp, Stenotrophomonas maltophilia
atggacagccaccagacttacccgacccgccgcgatgccgtgctgtgcagcctggctgaactgcccgacggcggtctgcgcgtggtgctggatgatctgcgtcgggccgatgcgccggggcagtggaagaattacgccttcgtgacctgcaaggactacccggcaggggagctcgatccggcgatgttgccgaaggaggagctcgaagcattcggtcactatgtcttggttcgcttgctggcgataaacggttgcctgcgtgatacggacgaaggccccgacagcgatgtccatctcactgaccagtag

SEQ ID NO: 534124 - DNA, 1323 bp, Stenotrophomonas maltophilia
atgaccgatctccatcgccttcgcggccgcatcaccgcgctggttctcagcgaggcctggcgccggcgcgccgcgttgtggggcggcgccgtagccgtggcactggtggcgatcctgttcgccaaggccagcgacgcggccttccatgtgttccagcgcatcaccgcgcactcgccgtggtgggctctgctgctcacgccgggcatcttcgcgctgctggcctggttgaccgcaggtgtgctgaaaccgacccgcggcagtggcattccgcaggtcatcgccgcgctggacaagccggatgagtcattccgcagcagcaatctctcgcctgcggtctcggccggcaagctgctgctgacctcgctgtcgttgctgggcggcgcgtcggtgggccgcgaaggcccgactgtgcatgtgggcgccagtctgatgtatctgttcgggcgctggttcggcttcaaggatccgcgtgagctctcgcatttcctgctggccggtggcgccgccggcatcgctgccgcgttcaatacgccgttggccggcatcgtgtttgccatcgaagaactcagtggccgcttcgagcatcgcttctccggcacgctgctgaccgcggtgatcgtcggcggcgtggtgtcgttgggcctgctcggcaactacacctacttcggccatgtgagcgcgcgcctgccactgggccagggctggctggcgatcctgctgtgcggggtggtggcgggtctgctgggtggcctgttcgcacgtgccgtgctggccagtgcggcgggccgcccgcgctggctgggccagctgcggcagcgccatccggtactgctggccgctggctgcggcttggtggtggtgctgctggcgctggtgttcggcgaaggggcgttcggcaccggctacgagcaggcgcgcagcctggtgcagggccaggcgctggtcggccacgagttcggactgatgaagctgctggccaatctggcctcctatgtcgccggtattcccggcggcctgttctcgccggcgctggcggtcggcgcgggactgggccacaacctcgccgtgttgatgcctggcgtggacccgcgcgcgttcgtactgctgggcatgtgtgcgtacctcaccggcgtcacccaggcgccgttgacctcggcggtgatctcgctggaactgaccgacagcggcgatctgctgctgccgatcctggccacggtgctgattgcgcgtggcgtatccgggctggtgtgccgggtgccgatctatcgcgggttggcggagttgctgctgatgccggcggcagcgcgcgaacgcgccagctag

SEQ ID NO: 534125 - DNA, 696 bp, Stenotrophomonas maltophilia
atgcgcctgtcacctgccaacgccctccacggcatgttccactcgctgcttcatctgctcatgccgttgcgctgcctggtctgtggtgacccgggccatgatgatctcgacctctgccgcgcctgcctcgccgatctgccctggtccggccgtgcctgcctgcgctgcgcactgccgctgccggacaccgcgctgatcgtctgcggcagttgccgcgaggaggcaccaccccagctcgccacccatgccagcctgctgtacctgccgccggtcgatcagttgctggtgcgctacaagttccaccaggatctggccgccgggcgcctgctggtgcagctgatgctgcgtgctgcaccgccgtggtcgtgcccgccgctggccccggtgccgctgcacaaccggcgcttgcgccagcgtggctacaaccaggccgcggaactgtgccggctgctgccgatgcaggtctggcatgggctgtaccggcgacggcataccgcaccgcagtccgaacgcagcgccgaacagcgccgggagaacctgttcgatgccttcgatgtgcgcgggccggtgcctgcacggttgaccgtggtggacgatgtgatgaccacgggcagcacagtcatggagattgccgagacgctgcgcctggcgggcgccgacgaggtgcgcgtgtgggtctgcgcgcgggtgccgtga

SEQ ID NO: 534126 - DNA, 552 bp, Stenotrophomonas maltophilia
atgaattcccccttgtctcccttgttgtcggcggttgggcgcagctggtggatcctgctgctgtacggcctggttgcgttgggcttcggcattgttgccgtcggctggccgctgtcggcggcgatggcgctggcgtggacactgggtgtggtggccattgtcgaaggcgtgatcagcctgttcgcgctggtgaccggaggcagtggcgcttcgcggggctggctggccctgtatgccatcgcctcgctgggctttggcatcctggcggtgatcaatccgctggccaccgccagtgtgctggtgctgttcctggccgcgtggctgctggtagctggtatctaccgcatcgtgttcgcgatccgcgtacgcaagcagatccagggcgagtggctgctgattctcagtggcgtgctggccgtggtgctgggcctgttgttcgccgccaacccgtatgcgggtgtggccgtgaccacgttgtggatcggcatcggcagcctgttgtacgggctgctgcaggtgctggtggcattcaagctgcggaagctgaagtga

SEQ ID NO: 534127 - DNA, 465 bp, Stenotrophomonas maltophilia
gtggtgctgggcgcggcgatggttctggccggctgcatgccagcggccacgcccggtgcgcgggtgggggcggaccgcccgccacttcccggtgtggatgtgcgcctgagcgcggtcgatgcggccggcaagggcgtgccggtgcagtggcaggacgagacattgacgctgcgcgagcctccgattgccaccagcgcggacatcgccgatgtgcgctctgtgcaggatgactacggcctgacggcactgcagatccgctatcgacccgaggcgcaccagcgcatccacgatggcacggcggcgatggtcggccagcgcatggcgatcagcgtggatggccgggtgctgatggtggcaacggtgcagggaccgttctctgaatcgatgaatctgagtgggttgaccggtagtgatgccacggcgctggagaagcacatcaccgggtctgcgccggtggagcggtag

SEQ ID NO: 534128 - DNA, 183 bp, Stenotrophomonas maltophilia; identical to SEQ ID NO: 533909

SEQ ID NO: 534129 - DNA, 861 bp, Stenotrophomonas maltophilia
atgaagcgcctttcaccgctccccctgttgctgttcgcctcatccattcacgccacggatgattccgagaagatggcggcaccctcgttcgagtgcccgccagctccggcgacgatccatgtcgtagccgacggcaggatgctgcgctgcgcgggacctggtcatgacgcataccggcaccttcctttccctgatgacgcgtcacattggcaacatctgctcggcttgaacggcttttctgagccggacctgctcagctacgcctccatccaagcttggccattcagggctatcgttgtttccaagcaaccaggcgcgcgagaggaggatcgctatttcgtgtttgaccaaattggcactgtgattgattccaatgatgtcagtgccatcggcgaacagatgatggagattcgactgtcaggcgtacttctgtggcctcgatcgcgcgtctactatcgcgtgccagcgacttctgcgttgcgcgcggagaaggacttcgacgtcgacgtgcgtgttgctgctacatcgcagtacgcaatggtcattgagggcggcacattgtgcccgacgctctacagccgcctatacgacgactggcagcatcccagtgctcctcaggatgcttcagccgcctacatcaatggacactgcgcgcaggcgttccccacgacttctgcgttgattccagattcgcaaggggaatggctcgcctatccggggtcttcgatcgatggcctcaacatgatctggagcgtgcagcgccatgactcgccagtacgaccgatcatgggccgagatggaacgtgtctggcgcagtgcgataccgacaagggcgatcagccaccgactgaccgctcatga

SEQ ID NO: 534130 - DNA, 834 bp, Stenotrophomonas maltophilia
atgacggaattcttcatacccatactgatgatatcgcaggtaattgctgctgtatcagcacgcattgaggccgggccctgccccgccccgtcagtcaccatgaagtcctcagaggaccgcgtctatctctgccaacagcgcaatggaacgattgttccggtagacgtaaccccgcccgatgacgaggcacactggcgactcggcttcgggctttcggccaaacgtcccaacggctccgggtcctaccatcccgtacaggattggccctttcgctcgctgtatgcaacgcagacgcttcttctgaacagcaatgagtacttctacatctttgatcgcaatgggcgaatcactgaatccagcgaagccgacgccgttggtcaacgcatgatggagatccggatttccggccttcgaatctggcccactgcgaatgtgtactaccgccttccggattcagatgagagaggcgaccacctgatcatggagatcggagacacatcaatcggcacgatgaagtatgccgtagtggtcgatggcaggatgctgtgcccagcgctggatgacagtggatattccgagtggaagaatgatgatcgccatcgctcgaccggcgggttccacatcaatggtcattgcaaggatgcgagaaaacaccaaacctctccacttgaacctgatcaggaagctcaggtcttgtacacctatccggggcttcctgccgaccgacagccgtttgagtggagcttccagcgccacgatgagccagaacgccctgtccgcaacaagcagggcgaatgcatcgcgctctgcatgccgccagacaatgtgctttag

SEQ ID NO: 534131 - DNA, 1344 bp, Stenotrophomonas maltophilia
atgcggcatcggaaccagccgcctgccgcggccatcgtggtccgcgatcgcgacaacgtggccatgaacgtctaccacgttccagtcaggcaccatgtcgagatcaccttcacgatgagaggcgggaatgacgggaagactactcagctgaccaagggactgccctacgtcgtagtacatgcgcgtccggaggatcccagccactggcgtgtgctggagcgcccaaggaacgcttccgggaagacgtcctcgcagggaaaagcacatgtgctcctccagggtgcggggaagtacaggatctacatcaatgagcccacagaacaatttcatccgcgtaccacttttttgatacagcagcatgcacttgccgacggtcgaagcagtggacgtgacgtgcagccactggtcgagctggacgtgatcgaagcagccgatctgagcctgtctgtccgcaccacccaccccaatggcctgctgcgcgctcgtggcgtggcagctgactccatcgcagcgaacggcgccgtcctacagttgacgaaccatcaacaggccaatggtaaggaggtcaaacccttggatcttgggcgccaccttatctccttccaggcgtgggctgatgcctctcgcacctatggtagtgagcaccctctcatcgaggccagcgactatcgcgaacaactacgcatcatctacggcgagcgattgacgatgaacagcgcacgggacgctcacttgcacgaccggatgcttgagcatggcgacaaacggattgagttcaaccatcagtcaactaccggcggacgcgggcggctctccttccgcgaagacaacggccatgccggaaaccgcatgactgcagatgagagcctgcgcaggacacatccagcagccatggagttcctcttgaggatgatgcatgacctggacatctcgcacattcgatctaccggtgcgtggcgcccgcacttcggctccgttctgcatcgctatgcttctgcactggatattaccgaagcaacgtcctcaattgtgtcgaacgacgagcaacggcatgacgttacgatccagtttcatcgaaccaactcgcccaactcgcatccattgcagatagcggcgacagaaacgccagctcggatacgcatgcgagagctctcatgcagactgcattcctacctggcgcagggtcaagcaaatggagaactgggctggctgggaggtccatgggaactgagctacgcgcagctggggatccatgacgcagaaaatccaaacaaagtttcgataagaacagactccacccacattcatcacatacacatcagtctgggcgacacacagccatga

SEQ ID NO: 534132 - DNA, 360 bp, Stenotrophomonas maltophilia
gtgcacgcattttctgatgcctgttcaacaggctcgacgcagcttcacttcgcgaccagcttcggcgaaccgctggacagagtcacataccgactgagagacggtcgagggaatacctttgttggcagcacctcaacagatggccggggtgtcaggctgtcttcccaccacgacgacggcccggtggagcaggaaggaacgtggcggctgtccggctctggccatgtgcagatcgatatacgccgcgacgatgactcctggaagcccattggaagcttctgccatcacgctcaccagcgcagcaacgtactgatcacggccaacgctaccgccttccccttccaggtggagatcgcatga

SEQ ID NO: 534133 - DNA, 297 bp, Stenotrophomonas maltophilia
atggctggagagttcaagcccgcaggcatcgtcgcgttgccgaggcagcttgcgccgcgcttgaagtatcgcgggaagcttcgggtggtggatgcgcagcagcgagcgcggcccagtacgtactacaagattgtcaccgctgcgggcgaggtgttggctcagggcgttaccgatgacagtgggcgcagcatcacggtgggaaccgaatccggcgacgcgcttacggcctacatcggcaatggaggctggaccatcgaaacattgatcgatggacaggatgacgcatgcgactgctga

SEQ ID NO: 534134 - DNA, 387 bp, Stenotrophomonas maltophilia
atgagcctgttccgccagggacgttcctaccttgttgtcggcctggcccagctgctgctggactggctgctgttcgtcgcctgcacggcagcgggcatgccggtggtgccggccaacgtggccggtcgcgtgggcggcatgctgctggggttctggctcaacgggcgctacaccttcgtcgatggccagggccgccaacggctgggttggcgccggttcgcacgcttcctgccgctgtggctgctgctgaccgcggccagctcgctgctggtggccgccgccgaccatgcgctgggcctgcagtacgcgtggctggccaaaccgctggtggaaggtgggctggcctgcgtgtcgttcctgctgatgcgatatgtggtgtaccgctga

SEQ ID NO: 534135 - DNA, 417 bp, Stenotrophomonas maltophilia
atgtggcagcgcgcccgttcccttgcccgattgcagcaacagcgtgacgcgttggaaaccgagctggccgagcacgcccagcgactggcgtcgcggtgcgggcccgaagagctggtcgtggcactgatgccacaggcgagacggctggtggaagtcaggtccaagatcctgcgggccacacctgcgcgagtgctgatggagcgggcgcacacgctggagcatgaactgcgccgatcgaccgcgcgcgatgaacgcacgcaacgcttgctgcgcgatgagcttcgcgacctgcgcctgtatctggatacgccgcggcggcgcccgctgacgctgcgggtgctgctgatcctgttggccagtgtcgcggccgcgctgctgctgccggacctggtcgtggatctgttgtccgccgcctga

SEQ ID NO: 534136 - DNA, 1242 bp, Stenotrophomonas maltophilia
atgccattgccgatgcctaaaggtactcgtgcgaaacttcgcgctcagctaaccgagtcacttagacgatcaagaattttctccaatggaagaatcaatccatcttcggtcagactgaccgaagtgcaggcccttatacaacaaggctctgcactcgataaggctgcgtcagagttccttggcgaacaacacattactaccttcatcaatagcgaactccgatccatagttcttccaaaagaaaaactcagcatcccggaaagatcgttgggaggagtgttcccagtgagtctcgcggacgaaattgcttcccaactcatctccaaatttgaatcactcccttggccgtatcagtttcacttccccttgcccgggatggctacccagtcccttccgttcgatgaaggatctattgaagtagcgccaaacacgcgactcatcgcaggctggtttctaaataatgaagcaagaacctctggcaagctcagcgagcgtgggcgaccttctgcaaccgaagttcagtggattgaatcagacatatacatcagagtggacattgaaggctacgtcagccgggattaccagtcggacacagtgctccaagcacatgaaagaattttctccctgattggcctactggtcgccttccagattctggaaaccgattacctttgggctaatggaggcgaaggtaggcatccaatatcaatctcacttttgagtaatgaaatcgaaccagcagcttcgacgcttgaccttgactcaacctaccaaactctagccaatgacttgggctatgcactaagactgctggaaattctagataagtcgcccgagatagcactggaagaagttaagcacgccacaagcatgtgcgtggacgaccgcatcagtagcgcggcgaagtggttcttagacagccacaccgggaacaacgcgcaagtcaaatttgtgcagctgatgattgcgttcgaaacactacttggcgacagacaaacggccagggaaactggcatcgcgaatctaatggcaaaccgctgcgcatacatgattgggacttcatccactcatagagagacgttgattgcagcattcaaagaaggctatgacattcgaagccgaattgttcacgcaggcacaagccgattgactcacaaagagaaagtcaacttccagtgtctacagcaactgtgcgccgacgttattcagcatgaagcaaaaatactgatggcagcaaattag

SEQ ID NO: 534137 - DNA, 153 bp, Stenotrophomonas maltophilia
gtggccgccgccggccacgaccggaccatcatcaacatcaagcccgagcacgtggatgcctggttcaatccgggccctgccaacctggatgccctgtaccggatctttgacgacaagcggtgcccgttctacgagcacaagctggccgcataa

SEQ ID NO: 534138 - DNA, 732 bp, Stenotrophomonas maltophilia
atgatcactgatactcaggtgaatcccactggcagtggcccgcttgaaactgaggttggccaaattgttaatctcagggttcagcattgcgtaaagaacgtattctggcgggagggagatcgggaagggatggcagccaccggtgcattcgcagcggcgctaggccttagtggaccagcagcaggcatggctatgatgtctgcggaggaaatggaagagccagttaccaaggttgagttcagacttggtgaaatggctgtggaaggacttctctggaactggccctttaacgagggtgacgttgttcgaattgtcggtacacggaacgacaaaggaagattttttgctatctcagttcttgatgaggaaagaaggctgattgtttcctatccgcatgttagtgctggtacgttggcgcattggatttcagtgctgaagttttcactaattatttcgattccatggtggggtgttataatagggtggttcgcttggatgacttccgcgccatttcatttcttggctcggtcgtacttgattggtgttctcgtcttctgtgtaattggatatcgaattggtcgtaggtttgtttgctatgcaagactggcggattcagttttttctacgcttggatggagacgggcgaggcgaataaaccttcgtagagtgaccaaggtgaagcgacggccgggcgaccatcctgccctgggcgatacctatttcaggtactga

SEQ ID NO: 534139 - DNA, 945 bp, Stenotrophomonas maltophilia
atgagcacggcattggccagccccgcactggaacaggccgccgagtggttcgcattgcgcgagcagggatggaatgacgaggagcaacagcgctggcacgcctggctgcacgccgatgcgagccacgcccacgcatggcaccgggtcgagtcggtctggcaatcgttcgcgccgctgtcggccaccgcagccgcgaaggcgctgggcaccataggcctccgccgtcggcaggcgctgcgtggcctgggcggtgcccttgccatcggtggtgtctcgttgctgggcctgcgcgggctgcaactccaacgcggattgcagacccagcgcaccgccgcaggccgcaccgggcactggacgctggccgatggcagccagctgtggctcaacgccgacagtgaagtggcgatccacatgggcgacggccagcgcgccgtgcatctgctgcgtggcgagctgctgttgcagaccggccatcattccgcgttcgccaacctgcccctgaccgtgcatgttctgggcgcccgcctgcagccgatcggcacccgtttcgcggtaggccgcgaggcacagggcagccgcctggatgtgtttgaaggcgtggtgcgctgcctgccgcagttcggcccggcacgggatatacccgcccgcagcgcggtgcggatcggcccgatgggcggccttgcagcggtcgagcccgatccgctgcgcggcgattggcaggacggtcgcctgcaggtgcaggacacccggctggtccgcgtcgtcgaagaactggcccgccaccatcgcggctacctcggctgcgatcccgctgtcgcagcgctgaaggtcactgcagtgctgccgcgactggacagcgcacaggccctgcacctgctggcccgcgccctgccgatccgcatcgagcagcgctggccatggtggaccgtcgtgcatccgcgttga

SEQ ID NO: 534140 - DNA, 912 bp, Stenotrophomonas maltophilia
atgtctacgttctcacttcggacggctgtcctgttagccatcctgccactcactacctcggcgtgcgccaaggatgaaaggtcgtcgccccaggcaaaaaaaggctccggcgctgaaacacagcagaagatcatttcggacctggttccgatcaagggtggcacgttcctcatgggcgattttggccccgtacacaacgaggacaaactgccctacagcggagcaattaatgatgacgtcctccgtaagatcacgctggacggcttttcgatcatggcccacaaggtatcgattgaggattttgatgcttttacggacgcgactggccgtcccagggtgggcacctccgatctcgacgcaaggcgatatcgcgctgacctcaaagccgctgcaggagtgaaatggcaggacgctgtggacttctgcacgtgggccggagcggcatctggccggaaactgacacttcccaccgaggcgcagtgggaattcgcagcgcgctcaggcggaaagatggttgtgtatccgaccgatacaggcacagtcgaggatggtcgcaatgtcgcaagctattcccagcaccaggatggtagcggagtcgctctgggcaggtttcctcccaatcccgctggactgtatgacatgattgatcacggctacgaatgggtccaagattggtatgaggaggcttactctggcggcgactccagaaatccttccggcccaaagagcggcacacagaaggtcatccgagggaatagcaatcgcggtggtgattcgctcgctttgctttcaatgacctttactcgcgatcatcgccttccggatcctccgaagaataaggacatcgatggcagtgagatcgattccaatcagaacaggagccacgggtttcgctgtgtctcccagaactga

SEQ ID NO: 534141 - DNA, 1440 bp, Stenotrophomonas maltophilia
gtgggacgcgaggatcatttcttcgagctgggcgggcactcgctgacgctgcttggattgctgccgaagatcgaacaggcggttggtactgcggttccactgagcatgctgatttccaaccttgaactggccgcacaggcggcggccatcgcggcggcatgtgccggcgccggcatgccagcgacagcgcaggcgcctgccacgttgcatgatccgttcgggctgataccggcgttgccgacacaacggcagatatgggcggcctcgcgcttcgatccaaccgacgcctccaccatcagcacgatggcgctccatttgcgtggtgcagtcgatgtgaaccggttgcagcaaaggttgcagaccgttttcagccgccatgagagtctgcgggcgcgcttcgtcgtgcaccacggtcagttgttcctcgaacctgccaagcgattcgccttccggctggagaagcgctcccgcctgggcgaactgggagacgatctgcgcgacttcattcgcccgttcccgttggacgatggcatgaacgtgcgaggccgctggattggcgatgcccagggcggagtacttctgcttgcgttctcgcacgcatgcgtcgacggcgcggcaatggagcggttgttggttgcgctgtgtgacgaggccccggcagaagacagccaactggccgcgtacgccgccgcactgcagaacggtgtgctggccgaccgacgtcgccagcacactgcccactgggccgggcagttgcggacgtggcccaacgagggagtcgcgtcggccggcggggcagtggtccacgggcgctggcaacggcatctcgacgcgaccactgctgcgcagattgatcgacgcgccagacaacagcgcgtcaccaggcaggaactgatggtgatggccttcctgcggatgaaggccttgcttgacgcccagctgcagcagtgcacagccgtcatgtatcacggccgcgacagcgtcgaggagcagtcgctgatcgcgccgttgatggtgcaacttccgctccgcgtgcaactgagcggggattcggatgcggatgcggatctgtgcgagggcgcacggcaactgcggttggcgcagtccaaccatctgttcgatcccgcacagctggaggcgcagggcatcaccgccgcgacgccgtcggtgctgttcggctactaccagcttcgcagcttcgtaggacgcatcgctgatgcgccgtttgaacagttgccgttgcccgacgtcaccgacaagccacaaccctggcgcttgacttgcgaagtgatggagcacggtgaccacttcaccgtggatatcgaagccgctcgctacccggcggcactgccggttgccgatctgggttcgctgttcctggacgcgctgcagggggtggtgacggcgtaccgtcagacagacccgccggtactggcttag

SEQ ID NO: 534142 - DNA, 1122 bp, Stenotrophomonas maltophilia
atgcgtggccgacagactggccccaacggtagcgccatcgagatggcagcggaacggcagcgtattgatgaactgccccatccagtcgtcggtcatttccactgccgccagccgtccgcgcatgaccgtcgcgtacaccacgtccagaacaccggttcgtcgggcgagcacgattgcccaggccagatgaaaaattccggccacgctggcgccgtgctcccgcgcctgctgcctgatcctcatgcagagcgtcggttcgagcatcctgcacgactgggtgaagccggaactcccggcatctgtcgctgcaccatctcccagatcaggcatgccggcatacccggccagcaacgtgtcgaagaacgaacgctgctcggcaatggccggagcgggaagcagccgttgcagcgcataggcatgcgtgggtccaggtgccggcagtgcccgaccggccatcgaggcttcgatctcgcggtgcaatgcttcggcagtaatgtgatccatgctcagatgatggtgcaggtgcacaagtacccactggccatgcacatcgtcgaagccaaatacgcagcgttgcagtggtgcacggccgacatcgaagcgttgcagtggatagcgggtgtgtgccatcagcgcttccagcacctgcgctgcgccatgacccttcacttcttcaacgccaagttcggcgtgctgccagatcacctgcagcacttgtcccaggtcagcatgatggaagcttgcgcggagtgcctcgtgccgcccgatcgacccgcgcagtgcagctacataggcatcgagcaattcgcgcgtgtcgaatcgtacaacctgccagatcacgtaagggtcttcgtttacgcatgcccggttgtggaagaacatgccgtgctggaccgcactgaccggtgcgatggcgacgatgccctgcgtgctgccgagctgcaacagaagctgcgagcgctgcgcttgcggcaccatgtcgtccacgacgggcaatggatcgatcgactccggccgaaggtgaaccgccaatacatgcagttgcggattggtgtagagcgcagcagtctccactgcgaagccctccatggccaacgccgtgcgtacgcgggccgcgagtag

SEQ ID NO: 534143 - DNA, 1224 bp, Stenotrophomonas maltophilia
atgcacgtggtagccgctgtgcgcgatcatcaggcccagctcgtgcaggcgcgcggcccagccgagcatgcgtgcgtcgtcggcatccagggcccagcgctcctgcacctgctccagcagcgacagtgcggtgtcctgcacgcggtcggcctgtacggcgtcgatgccatagcgctggctgagcgcagccaccgactcttcgcgcaggtcgttgtcgccggcacggccgacgatgtcatagaggatgccttcgcgcatcgccgccttgctgaccagcagtttctgcaggcccagcgcctggaaagcggcttccagcaccaggatgccaccggcgatgatcgggcgacggtcgctggacaggcctggcaactggatgtcgtcgatcttcttggctttcagcagttcgtcgcgcagctgcggcagcgcttcagcggtgatcgcgcccttgctcagcttcatcgtcgcgcagatctcgctgatcgccttgtgcgtgcccgacgaacccagcgcctcctgccagcccagcgcgcggtacttgctggcgaagggctggaactcgcggccgatctcggccagcgcgtccttccagcgcttgcggctgagcttgccgcccgggaagaagcgacgcgtgctggcgatgcagccggcctgcaggctctcgcgttccagggtctgcatgcccatgccgatgatgaattcggtcgagccgccgccgatgtcgatcaccagccggcgctggccgggcttgggtggctgcgcatgcgccacgccgaggtagatcaggcgcgcttcttcgcggccgctgaccacttcgatggcgtggcccagcgcggtctcggccggaaccaggaacgattgcggcgagcgcagctggcgcacggtgttggtggccagcgcacgcacacggtgcggcggtacattgcggatgcgctggccgaagcgggccaggcactccagcgcacgctgccgggccgcggcggagagcccgcccttgccgtccaggccgtcggccatgcgcaccgtttcgcgcaggcggtcgatcacccgcagctggccgagcgtgtagcgcgcgatgaccatgtggaaactgttggagccaaggtcgatggcggccagcaggtcgccatcctgcaatgcgggcggagtcgtggtggtatgcggcatgggcgaatgttagccgaaggccgggtcgcggcgtcaccgcgcggccttcacattttgtga

SEQ ID NO: 534144 - DNA, 690 bp, Stenotrophomonas maltophilia
atgcacgttgccccagccctgggtggccagttcgaagccttcgccacgcagtgcgccacgggcggtgtcctggtgcgcgatcaggtagcccagctccagccggctgtcggccagcgagctgtgcaggcgggtgcgcagctggcccggcgtatcgtccatcacccattgctgggtgccgctgccgtcatgggcctgggtgtgcaggccactgagcacgccggggtggcgcgcgttctcgtcgatgccgccaccgaacggcggggccacctcgccgttgtacagctggccggtgatgcgcggctggtcgatgtcgccgtgcaggaattccaccagcacctcgctgcccacccgtggcaggaacgcggtgccccagttcgggccggccacccattcggccaccgccacccagctgccgctggtgtggtcgccgggcgcatggccgggctgggcgctgccggtgtcggtcaggccgcccgggttgggttggctgccgcgctgccagccgaactggatgcgcacctggtgctcgcggctgggggtcacggcggtgttggcgatgccgaccacgcgcgcggtctgcgggccatgcagggtcggccggtcctgcggcagggcgcgcagcggcacgccggcgccggtggccaggaaactgttgcggtaggcgccgcgctccagcgctgggctgcttag

SEQ ID NO: 534145 - DNA, 489 bp, Stenotrophomonas maltophilia
gtgacccaaagcaatctgatcaattacgagtatcagctgtacatcgccaacctgcgctcggcgccgctgcggtttggcttcatggtggcggacaaggcggatcctgatcggcggttgttctcggtggatacggtgtttgattatctgcatcgaaaggggttctcacgcaccgtgcaggagtggcatttcaacgcctgtgagtttgatgggttctggttgaaggactgcacggtggtggaggcgaaggggaggtatgagcattttcttgattctgataatggtccgaagtaccactttgtcgagaagggcatcttttcctcttggaacgcccagatggccaggcagaaggcggccatatccgtagcaggccatcaggcgcagctttcatggttcttcatgcaagttagaacaatggcggcagctacccgattcgcaggcctggatcccctcatctgcaagtacgaaccctatccgggagaagtcggttga

SEQ ID NO: 534146 - DNA, 1086 bp, Stenotrophomonas maltophilia
gtggtgactgccagcagccagcgcaccaacagcgaacagagccattcgaccagtgatgcccgcgtcagccagttggctgcaggcggcgatctcacgttgattgccaacggcggctcgatcctcagccagggcacgcagatgtcggccgagggcaacgctgtgctgctggccaccaaggacatcgtgttcgacgtggcccacaacaccgagcgcagcgacagcagcagccgcggcaagggctggggctttgccaacaacaccagcggcctaccgttcggtaccaacaactcgcagagccagggcagcggtagcagtgacaccatcactggcacgcagctgtcggtcggcggcggcgtgcgcatggccaccaccgagggcaacatcagcctgaccgcagccaacatcgccgccgagaaggacgtgaacatccgtgcggccggtgatctgcgggtccgcagcgggcaggatacggtcagcaacgccaatacgtcggacagcaaggcgatcggcacggtaaagatatcggataccgagaagttctccggctggcaccgcgagcagcaccaggacgacagcgcgcaggtgtcacaggtggccagcagcatcggcagcctgggcggcagcgtaaacctggcggctggcgacaagtacacgcagaccgccagcaatgtggtggcgaccaaggacgtgaacatcaccgccgccgagatcgagcttttgaccgccgacgaaagcggccactactcgcagagcgacaaggacctgaagatcggcgtgttcgcgcgggtgaagtcgccgttgatcgacctgatcaacaacgtggacgcggcccgtcagtccgatgatcgcctgcagaagatgcagggcatggcagcgggcgccaacgcgtatcaggcagccagtgcgatctcggcactgtccggccgtggcggcagtggcgaactgttccgtgctgaagcaggcatcggcttcaagaccgccaacagcagtgccgatggcagcagcatggtttcgcgtggctccaccatccagggcggcggcaacgtcaacctcaccagcacccagggcgacatccatgtggtgtag

SEQ ID NO: 534147 - DNA, 1131 bp, Stenotrophomonas maltophilia
atgatcaggtgctttaacgaagcttatagagtgttgaagcctggtcgctggatgacggtagagttctcaaacactcaagcgagtatctggaacgcgattcagaccgggctgcaagaggcgggttttgtcgtggccaacgtatccgttcttgacaagaaacggggcggattgaatgcgattgttggcgtaactgcggtcaagcaggatcttgtgatttctgcgtacaagccaaacggtgggcttgaagaccgtttcatgaagtcaggtggcaatgaagagtccgtgtgggattttgtccgtactcacctgaattacttgccaatcgttaaggtgaagggtgcggagctcgagttcatcgcggagcgcgatccacgcattattttcgaccgcatgattgcatggttcgtccggcacaacttccctgttccgatgtcgacacaggagttccgaagcggattggctcaacgctttatcgagcgagatggaatggtgtttttggcagagcaagtctcccaatatgacaagaagcgaatgcaggttgctctggctccacaaatggagatgttcgtctttgatgagcgtagtgccatcgattggttaacggattttctaaagcgtcggccatctagttatcaggaagtgcatcctgagttcataactcagctcggtgcaggttggaagaaacacgagtcaaagcctgagttgtcctcgctattagaagataactttattcagtacgacggagtcggcgacgtgccgccacagattcatagttacctttccacaaatcataaagacctgcgggggctcgaaaaaagcgatccgagattagttgcgaaagcgaaggatcgctggtacgtgcccgacccgaacaaggcgcaggacttggagaagaaacgcgagaaggcactgctcaaggagtttgaccactatcgagcgttcacgggtcgtcgtctgaaggagttccgcctggaagcgctgcgcgctggcttcagggccgcgtggggcaataaggactatcagacgatcatcgacatcgcgaaaaaggtgcctgacgaagcgctgcaagaagacgagaagctgctgacgctctatgacctggcgctgacccgtaccgaggacgggatctga

SEQ ID NO: 534148 - DNA, 810 bp, Stenotrophomonas maltophilia
ttggcaggacctccccgcgagatgtatcgcgatgatctggagtccgaacgctgggatcgcctggttgctcgcgcagtatggattcgtctagcgaagctggagtcctcgggcctacatcttggtgtgtctgcagcaaggcgcctagcggagatatccatcgcgcatcctgagttgagattggaccctaacgagaaggacgaattctcacactggatgagcggcaccggagatccggatttcgaggacggcagagaggtcgatgtcgcccctcgcactcgcaaggagctagttgaatggcttgaatcgccgaggcctgcccatagaccgttctatgaggacacttggcgggatgtctgccgtactcgcttcttccatagccttgccgcgctctgcgacctcgctcaccaagacgtctggcccgcagttcggtggcgcgaggcgcttcaggtttggtcggacgattcaatggcagcccgctcctggcagtacgcatcgcctttggtactgctaatgcctgatgaagttctgtccgagatcgcacctgcagtagcgtggtggatggaggccacttcaagaagcggcgcgaatcgcgagaacctcctattgactctcgccggtcgagtgcttgcgcttccgatccccttgagtagtggcatgacaaggaacggcgagccaatcgataaccctgtctcggaggcgattaatcaccccattgggcatgccacgcgcgccttgctcaatctatggttcaagagggcgcccaacgatggagacctacttccccctcgacgtccccccgagattgagtag

SEQ ID NO: 534149 - DNA, 1143 bp, Stenotrophomonas maltophilia; identical to SEQ ID NO: 169901

SEQ ID NO: 534150 - DNA, 393 bp, Stenotrophomonas maltophilia; identical to SEQ ID NO: 169904

SEQ ID NO: 534151 - DNA, 870 bp, Stenotrophomonas maltophilia; identical to SEQ ID NO: 169905

SEQ ID NO: 534152 - DNA, 879 bp, Stenotrophomonas maltophilia
atgggtgagcggcccattcgtttcaacggcgccgtggtgcgctccatccactgccaacgtccacattccctagcaacagctactcgtgattcatctttcgcaaggcttggaaacggcccaataggcgatctagcctccagccggattccttgcgttccagtcctctcgctctcccagagcaaccaggcgcaacttcgccgcgaactgggcagcctcttcatcgacgctatcggcctttacgtcaagccactggcaaagctctgtgcgcaggctcaaaacgtccgctaccacgtcgacataccaattgatatccccttccatcgtgaatcgatcaccggggaccgcctcatgaagaaacacaagccgccgcttcgcgatatcaagctttgcaatgcactgagccaatgcatcatcagctttcgaaggaagaaactcgctgtactcaataaggggcgtcaaagagccggaatcaattaccgaaaccgccttggcaacctgcttgtactgccaagcatcagcgatcttttgctggccctcgggaatccttatcgcggcaccaatctgcagggcttgaagcgtcagaacatcgatagcgaccttcgcatgcattgccgcttgcttcttgcgctttctcctcgacaaccaaattgggagtacaccgacgagaagtgcgacgaatgcagccaagaaagttgccaccgcagaaacagctgtccagtccacaccggtagaagccgcactccctgcctgtactaccagattgctagcagacttcccaacctgcaccacaacacccatggccttcatcctcgcgaacgattccatatattgccacggccttcttgccgacgacgcgcaggagaggttactagtggctga

SEQ ID NO: 534153 - DNA, 309 bp, Stenotrophomonas maltophilia
atgaccgccaagaagcccgcggcgccctttggctgcgacatggccactggccctgacctcaccgccgtggcggaagtcctggacggcaaggtgatcaacgtccgccatctgcctcgcctggacccgctcacgaagaagccggaggtgctgcacgtcctgcaggccggcggccgcatcgtcactggccaccggccagggctcctgcagctcctcggcaccgacagcaaccctgtccccgcgtggcaaaccgccctgaaggccgctcagctatcggccgcaccctccggagatccccatgaaccgcagtga

SEQ ID NO: 534154 - DNA, 459 bp, Stenotrophomonas maltophilia
ttgcccttcggccccaccaccgatgtggaagccggtgagctcgtcgaaagcctgacgaagttcctgttcggggcccagcgaacgcatgaagcaatgcgcgccggtgtgaaggaagccttccagtgcgcccggctccagcacggctcggtgatctacgagcggcgggaatggtggatcggcactgacgatttcgctgagttcacggtggaccgtggccccgcccccaccttctccgttccaaccgtcgatgtcatccgctacgcggatctgagcgtttgggagggtgcactggcccatgaggccacaaaccgggctctcgcctggcctctgccgttcgatgcactcgagagtatggcgggcttcaccccagaatcggtcaacaccggctggattctctacgcgctgttgaactgcgcaggcctcagagcgggccagatagttcttaaactagatccgtag

SEQ ID NO: 534155 - DNA, 309 bp, Stenotrophomonas maltophilia
atggacgccgataccctcttgcatcaaaccgtggtgcgcctgcgtgcgcatgaagggaagtacgccgagatcgcccggcagagcccggacatcggctattcgtggctgacgaagctggcgcacgggcagatcacgaacccgacgattgccagccttcagcagctgatcgaggccctggacgccttcgaaggcgtggagcgggagggcgatgaagacccggtcgcccaggccaatcccgatcgggatctggccccggaacaaagcagcgacatggacgccggccgcatcgtgccgctggagacagcctga

SEQ ID NO: 534156 - DNA, 492 bp, Stenotrophomonas maltophilia
atggttgagaccgtactgggcctgacagatctgcagatcagattcttcacggcattcggccaaactgtcgtcgccgtcgcggtcggaatgatcgcgtaccgccagtggcgaacagctcgaaacaaattgaagttcgatctgtttacgcgacggctggaggcatacaaccgggtacgagaagcgaccatccgggcgatcgcggccgattggcgagaggaggcggaccacgatgtcttcttgagcctaagggacgttcgatggctatttgggcagtctgtctacgatttcgtctggaaggagctctatgagcctgtggtcgacctgtgggacgcaaaaaccacgattgcggagcctggtgtgcttagcgatccagaggtcaggaaagcgcgagacgccgcaattctgagacgccgcgaattgcgacacgcattgaacagaagcatggcgcggctagacgaggtcatgggtgagtacctgacgctgagccactag

SEQ ID NO: 534157 - DNA, 696 bp, Stenotrophomonas maltophilia
atgagttgctgggccttgggcattgattggccggtgatcactcagggttttggtgctgttgcccagggagccggcgcccttgtgctggcctgggttggctgggcaggcctttcgtcatggcgaaaacagctgaaagccacgaagcttcagacgcttgcggaagatgcacttacgctcgtgtatcagttgagggacgtgatcaaagatcttcgtcgccccctagtggccccaagcgaatcggagatggttactcccagagagggggagtcgcagtcagatctcgagcgcaggcggatctacggtgtcatcgagctccggtaccttccgcatgctgaaaagacggcgcagctggaggcgattcgctatagggttctcgccgccctcggagcagaggcggcacatgcgctcgataggatgctggggattctgacgcgtgttcgcaacgaggcagtgaatgcgcagatccacttcaaacgggctacccagtacaagaggcgcttggataggtcagggagtgcagatgacgcagacgcgtatgccgaaagcgccgacaagggatatgcagctgaaagctgggcgttttccagtctgaaaagcgaggacccagtggatattgaggtagataaagccgtcactgcggccgagagtgcgcttcggagctttgcaatgatgacgggcgatcgttcatcaagatga

SEQ ID NO: 534158 - DNA, 567 bp, Stenotrophomonas maltophilia
atgcagaatggtcgcccctttccgggggaagagtacgctgatcaaggcaccaggctgcttcgtccaggcaacttgggagtttctggctatctgacctggctcacggaaaagaccgtctgccttgacccccaatgggaaacctctgcggcagacttcgtgatacgtcccggcgatgttgtcatcaacctgactgcacagtcgctggaagacggattcatgggccgtgtctgcctagcccgagaacacgacaagagtcttcttaatcagcgaatcggtaggttccgctgcaacgaggacttgctgcggccggagtttctgttcagatgcttgcagacatcccgatttcgccagcacgcccacgcaaactgcgagggcagcaaggtaaagcacatgttctggcagcaccttgccaagtatcagatagcgatccccagtatttcggtgcaggaggaggtgattgcccattgcgcctcaatcgatgaggccattgagaacctcggttctcgcctggctgcatcacggcaactggctgcgcgtctgacgaatcaactcgacggagggacatga

SEQ ID NO: 534159 - DNA, 324 bp, Stenotrophomonas maltophilia
atgaacaagccagtgaaatattccgcggaagtacgggaccgggcggtgcggatggtgctggagcaccaggacgatcacggttcgcagtgggcggcgatcgcatcgattgccgggaagatcgggtgcactgccgagacgctgcggttatgggtgcggcgggccgagcgtgatcagggcaagcggccgggcctgacgacggatgagcgggcgcggatgaaggcgctggagcgggagaaccgccagctgcgacaggccaacgagatcctgcgcaaggcgtcagcatattttgcccaggcggagctcgaccgccacttcaagccatga

SEQ ID NO: 534160 - DNA, 810 bp, Stenotrophomonas maltophilia
atgacgaggttcgtgaccgaacaccgccacgcctacggagtcgagccgatctgccgtgtacttcagatcgctccgtcgacgtactacaaccatgcggtccgtcaggccgatccggagcgcaatccgaaccgctggtggcaggaccagggactggcggtggaggtccgccgggtctgggacgagaaccgtcaggtctacggggtgcgcaaggtgtggcggcagttgctgcgggaaggctggcaggtggcccggtgcacggtggaacggctgatgcgtcggctgggcctgcgtggtgtgatccgcggcaaggtggtgaagaccacggtcagcgacaaggcgcagccgtgcccgctggaccgggtgaaccggcagttccatgccgatcgacccaatgcgctatgggtgagcgacttcacctacgtctcgacgtggcagggcatggtgtacgtggcgttcgtgatcgacgtgtacgcacgtcggatcgtgggctggaaggtgtccagttcgatgacgaccgacttcgttctggacgcactggagcaagcactgcaggcccggcaacgggagggcgaattgatccatcactccgaccgcgggtcgcaatacgtgtcgatccgctacagcgagcgactggccgaagctggggttgaaccgtcggtgggaagcgtgggcgacagctatgacaacgcgctggccgagacgatcaacgggctgtacaaggccgaggtgatccatcggcagacgtggcgcagccgccagcaggtagaactggccacgctggactgggtgtactggtacaaccaccaatga

SEQ ID NO: 534161 - DNA, 810 bp, Stenotrophomonas maltophilia; identical to SEQ ID NO: 534148

SEQ ID NO: 534162 - DNA, 2169 bp, Stenotrophomonas maltophilia; identical to SEQ ID NO: 495912

SEQ ID NO: 534163 - DNA, 843 bp, Stenotrophomonas maltophilia; identical to SEQ ID NO: 495913

SEQ ID NO: 534164 - DNA, 801 bp, Stenotrophomonas maltophilia; identical to SEQ ID NO: 495914

SEQ ID NO: 534165 - DNA, 735 bp, Stenotrophomonas maltophilia
ttgacagaagcaagttacagccttagaaaccgctgcgttgccattactggcgccggttcggggatcggactggcaacggcggagatgatcttacgcagtggtggaagcgttcttggaggatccaggcgtttaggtgacttcaagcggctacaggatgagttcggcgctgatcgcgcctactggatgcgtctggatgtgcgcgatccggatagcgtgggtgccttcgcatcttgcggcattgatcactttggaagcgtacattcggtagtggccaacgccggggttggctactacggcggagtcgctgacgcaagcgatgatcaagtcatcgaaatgtgtgaaatcaactatctcggaacggtcctcacggtacgtgctttcctccctcatcttcgtagcgttggtggcgggtatattttgatcgtatcgagcgtcgcagctcatcgcagtggggcggacgaagccgtctacgcaggtaccaaggccgcccagctcatttttgcgggcggcttggaccgagaagtaaggaaagatgggattcgcgtgagtgccatctgccccgcaggtactcatacatcttttgccgtgggtcacggtcgcacggccgacgatccccgtttgagcgaattcatggccgcgcaggatgtagcctcgcagattgtctattgcttgcagcaaccgcggaccttgcggaccggcgtatggacgacttggagcatgagccagtccagctga

SEQ ID NO: 534166 - DNA, 2052 bp, Stenotrophomonas maltophilia
atgtcgcacacatacctgaagtcacgacttgctcttcccacgctgacagttgctattggtctggccctttcttcgcatgccagcgctgaagctttgacgcatgcctcctccgtcaagcagttggacaccttggtcgttaccgccaccggtgcccagcagtggatcagggatgcgccagccagcattagcgttatcagccgcgaggagatcgagcgtaagccggtcaccagcatcggccagctgctgagtaccgtccctggagtgaccggtggctatgcactgtccggagcgcagtcgaagatccgcctgcgtggactgcccgagcagtacacgctgatcctgatcgacggccgccgccagggcaactcctccggcgtgaactaccgcgacgacctgggtccgcaggatctgaactggctgtcgccggacatgatcgaacgaatagaagtggtgcgcggcccgatgtcgtcgctatacggttcggatgcgatgggcggcgtgatcaacatcattacccgcaagatttccgaccactggggcggctcggtcaccttgaaccacagcgtgcccgattcatccacccgcggtgataccacgcagatgggtgcccttttcagcggcccactgaccgacaacctggggatccgcatcggggccaacgtgaccgaccgcaagtccgatcgccttgagggccagactccgggcagcaaggcggagaatgccaacctgcagttccactggcgcctcaacgatgaccacgcactgaccatagaagggtcgcgcggcgtgcagcgcaacaccggcagcggtgatgtatatgcctggggtctgtccaagctggtacagaccggttacgtgctgggccatgatggccgttacggcgactccaccacctccaagaccacccttgtgcggaacgactaccaagacaagggcagtgcggtgggcaaccattcgaaggaaacggtgttcgatactgccttcaccaccgctttccattggggcttcgagcacagcctgaacgtgggtggtcagtggaagcgcgagcagctggaaaacagcgacaccatcggtaccgtacctgtgacttggaccggcagcagccgcatcagcccgaccagtgaagcggactcatgggccttgttcgccgaagaccacatcaccctgcacgagcgcttcgtgctgactctgggcgtgcgctgggacaacaccgacaactacgacgacaacgtgagcccgcgcatctacggcgtgtggcacccggcagacgcatggacagtacgcggcggtgtctccaaagggttccgcgcgcccaatcttaagcagggcaccgctggtgcggccacccagtctctgggacgcggctgcggcagcctgaccccggaaggctggaacagccggctgatcaacgccgacggcacgaccggctgctacatggccggtaacccgaacctgaaaccggaaaccagcaccaactatgagcttggcgtgggcttcgaccagaacggctggtccgcatcggccacctacttcctgaccaacttcgacgacaagatcgaacaggtgccgctgcgcgagatcccaggccagaacactagcttcgtaaacggcttctggtggacggtggcgcagaacatccagaaggctcgcacgcgaggcgtggaagccagtgtgaccgtgccgctgcacgagcgactgagctggaccaccaacgccacacgcatgttggaatcgaagaaccgcaccaccggcgccagcctgctagtggtgccgaagatcaccgccaacacttcgctgaactggagcgtgtccgatgcatggtcgcttaacctcagcgcgcaacacatcgggaagcagcttgtgtcttcgtccagacctaccttcgccaaggcatacaccacggtggatctggtcaccgctctcgatgtgaacgaaaacctgaccttgcgcgtcggcgtactgaacttgggtgatgtttccacgcttgaagaaggcaataattacgacggcggcgcacgcacgctctttgtgggcgcgaccgcgcgcttctaa

SEQ ID NO: 534167 - DNA, 246 bp, Stenotrophomonas maltophilia; identical to SEQ ID NO: 495917

SEQ ID NO: 534168 - DNA, 642 bp, Stenotrophomonas maltophilia; identical to SEQ ID NO: 495918

SEQ ID NO: 534169 - DNA, 732 bp, Stenotrophomonas maltophilia; identical to SEQ ID NO: 495919

SEQ ID NO: 534170 - DNA, 3138 bp, Stenotrophomonas maltophilia
atgctagagcgaatcattcgcgcgtccatcgcgcatagatggcttgtgctgcttctggtcctggcgctgtcaggcttgggcatctggaactacagcaagctgccaatcgacgccgtccctgacatcaccaatgtccaggtccagatcaacaccgaagcaccgggctactctccactggaggcagagcagcgggtaacgttccccgtcgagacagccttggccggcttagccaagctggagtacacgcggtccatctcgcgttatggtctctcccaggtcaccgttgtattcgaagacggtaccgacatctacttcgcgcggcagcaggtggccgagcgcttgcagcaagccgcatcccagctcccaactgggctgaagccaacgctgggcccggtcgccaccggtctcggtgagatcttcatgtacaccgtggaagccgagaagggtgctgaagagacctggacgccgatggcgcttcgtaccctccaggattgggtggtacgcccccagatgcgacatctgaaaggtgttacagaggtcaacaccgtcggtggctatgtgcggcagttccacatcacgcctgacccgcgcaagcttcaggcgtacgagctgaccatgcaggatgtgatggaggccgtggcgcgcagcaatgcgaacgtgggtgccggctacattgaaaagagtggtgaacagtaccttgtgcgcgttcctggccaagtggcggacatggacggcctgcgcaagatcgtggtcgccaatcgcgaggggctgccgcttcgcgtcggtgacctcgcagacgttcacgagggcaccgaactgcgaacgggtgcagcgaccaaagatggcaaggaagtggtacttggtactgcattcatgctcattggtgagaacagccgcgaagtcgctcagcgaaccgctgccaagctgaaggagatcgacgagacgcttccagaaggtgtccgcgcgcatgcggtctatgaccgtacggagctggtcgaccgcaccattgaaaccgtcaagaagaacctactggaaggtgccctgctggtcattgcggtgctgttccttctgctcggaaatcttcgcgccgcactgatcacggccgcggtcattcctttgaccatgctgctgaccatctccggcatggtccagaaccgtgtctcagcaaatctgatgagcttgggtgcgctggacttcggtctgatcgtcgacggcgcggtcatcattgttgagaactgtctgcgccgcttcggcgagcgtcagcacgccctggggcgtctgttgacccgggatgagcgctttgctttggccgccagcgccagtgccgaggtgatcaagcccagcttgttcggcttgttcatcattgccgccgtctacatcccgatctttgcgctctccggcgtggaaggaaagatgttccacccgatggccctgaccgtcgttatcgcgctgactggtgcgatggcattgtccctcacgttcgttcccgctgcggttgctcagtttgtcacgggcaaggtctcggagaaggaaaccaaggctatgcggggcgtaaccaagctgtatggcccgatgctggagcgggcagtcagtgctcgcaaactggttgtgggtggtgcagccgtcctcaccgtactggcgggtcttctggccagtcgcatgggcactgagttcattccgaatctggacgaaggtgatattgcgcttcacgcgctgcgcattcccggcactagtctgacgcaagccatcggcatgcagcgccagcttgaagcgaccatcaagaagttccccgaggtggatgaggttgtcgcaaagatcggcacagcagaggtagcgaccgaccccatgccaccgtcggtcgcagacaccttcatcatgctcaaggatcgcgaccaatggcctgatccccgcaagccaaaggcgcagctcattgctgagctggagaaggctgtccgagcaattcccggcaacaactacgagttcacccagcccgtgcagatgcgcatgaacgagctgattgccggtgtacgcgccgaggtggcggtgaagttgtacggtgacgacctggatcagctggcgcagatcggcagccagatcgaggacgccgcaggttccatcccaggcgccgcagacgtgaagttagagcagatcagtggtctgcctcttatgaccatcacgcctgacctgggtgctttggcccgctatggcgtttcgatcgacgaggtccagaagaccatctctgttgcgctgggcggtgaggcggtcggtcaggtctttgagggtgatcgtcgcttcgacatcgtcgttcgtctgcccgagaacctgcgtcaggacacccggacgctcgcatcgctaccggtagccgtcgccgtcggggccagttccggcgaacagagagcgttcgttccgctggggcagctggctaaagttgaagttgcgccaggcccaaaccaggtcagtcgcgagaacggcaagcgtcgcgtcgtcatcaccagcaacgtacgtggtcgcgaccttggttcgttcgtagaggagctgcgagagaaggttggtcaggaggtgcagttgccggaaggctactggattgagtatggcggtaccttcgagcagctcatctctgccagcaagcggctgtccgtggtcgtgccggtcgtcctggtgatgatcttcggcttgctcttcatggcgttcggctcgggcaaggatgctgccatcgtgttcagcggcgttccacttgcgttgaccggtggcgtggtggctctgtggatgcgtgacatacccctgtccatttctgcaggcgtggggttcatcgcgctgtcgggcgtcgccgtgctcaacggcctggtcatgatcagcttcatcaagagccttagggaacagggcactcccctgcaccaagcggtaaccgaaggtgcactgacccggctgcgccccgtgctgatgacggccctggttgccagcctgggcttcctgccaatggccctaaacgttggggctggcgcggaagttcagcgcccgctggcgacggtcgttatcggcggaatcatctcctccacgctgctgaccttgctggtgttgccggcgctctatcgcctcatccaccgcgaaggggatgagcggaaggaggacgcagcgtga

SEQ ID NO: 534171 - DNA, 1233 bp, Stenotrophomonas maltophilia; identical to SEQ ID NO: 495921

SEQ ID NO: 534172 - DNA, 1251 bp, Stenotrophomonas maltophilia; identical to SEQ ID NO: 495922

SEQ ID NO: 534173 - DNA, 651 bp, Stenotrophomonas maltophilia; identical to SEQ ID NO: 495923

SEQ ID NO: 534174 - DNA, 651 bp, Stenotrophomonas maltophilia; identical to SEQ ID NO: 495924

SEQ ID NO: 534175 - DNA, 324 bp, Stenotrophomonas maltophilia; identical to SEQ ID NO: 495925

SEQ ID NO: 534176 - DNA, 1335 bp, Stenotrophomonas maltophilia; identical to SEQ ID NO: 495926

SEQ ID NO: 534177 - DNA, 3246 bp, Stenotrophomonas maltophilia; identical to SEQ ID NO: 495927

SEQ ID NO: 534178 - DNA, 1170 bp, Stenotrophomonas maltophilia
atgaagagaagtattccggctgttaacaccctgacgatgatcggcgtggctaccttggcgcttggcgcaggatttggcattgcacgcttatccgccccttcagagacggtggtcgaccccgcgaaagacgaagccagcgccagtgcgccggcggaggcggctcaggaagtcgcgattcccaaggagtatgttgccgctgcggggatctcggtggagcccgtcacttccgctcaggtagcggcgaacatcaccgcatcgggttcggtcgtggcaatccccggtggtgaggccgtcgtggtggcacgtgcggccggtaacgtcaccgatgtcatccggcaggtgggcgacaaggtgaagaagggcgaagtgctggcacgcgtagccagccctgatggggcccgtattgcggctgaccttcgtgtggccagcgccagcctctccctcgccgaaaagaacgtcaagcgcgatgagtcgttgctcgcacagggcgtgttggcacgacaagaggccgaggcgagtcgcgccgcttatctcacagcgcaagcagaagcacaacgcgctgccctggtggcacgcaccgccaatgtggatggaggaggtagcgtcaacgtcatcagccctatcgatggaaccatcagcagctcgcaagtgactctgggcgctttcgtcgagccgcaggcctccctctatagggtcacaggttccaatggcgtggagattcaggcctccgttcgtgcgggtgacaccggtcggatcaaggccggcgacagcgcgtccattacccgctccgacggaagcgtcacctcaggcaaggtccgttcagttgctgccgccgtaggtgggctgacaagggctgccacagtcgtaatcaccccgagcgcagaggcgaacggattggttgtgggtgacggtgtgcaggtccggctggtcaccgcttccggatcgggtgaggggctgtctgtctcggaagaggcggtccagaacatcgacggaaaagacgtcctcttcgtcagaaccagtaaggggttcactgcacagccggtcttcattggcctccgtagcggtggtatggcgcagatcctttctggcgtcactgcgggaaccccggttgctacccgtaatgcgtttctggtgaaggccgagatgaaaaagtcgggcggagacgagtaa

SEQ ID NO: 534179 - DNA, 1224 bp, Stenotrophomonas maltophilia; identical to SEQ ID NO: 495929

SEQ ID NO: 534180 - DNA, 459 bp, Stenotrophomonas maltophilia; identical to SEQ ID NO: 495930

SEQ ID NO: 534181 - DNA, 447 bp, Stenotrophomonas maltophilia; identical to SEQ ID NO: 495931

SEQ ID NO: 534182 - DNA, 456 bp, Stenotrophomonas maltophilia; identical to SEQ ID NO: 495932

SEQ ID NO: 534183 - DNA, 1122 bp, Stenotrophomonas maltophilia
atgcacctgtcccatcgggccgtcctcgcactgtccgccgttgtcggcctggcactgtccggcaacgccttcgcccacggcaccctgtccaagccgctcagccgcgtgaagcagtgccacgagggcaatcgcccccagccgttctacgactgggccggtgtcaaccaggccaacgccaacggcaaccatcaagcggtggttccagatggcgagttgtgcagcggcggcaacagcaagtaccgcggcctcgatctgaaccgcagtgactggccgacctcgccgatccgcgccgattcgcgcgggcgctacaccttcgagttcaaggcaccggcgccgcatgctacccgcgagtggaagttctacgtcacccgcgacggctggcagccgggcagcccgctgcgctgggccgacctgcaggaattctgcacgctgggcaacgtgccggtctccggcgacgtctacaagctggattgcccgctgcccaagcgcagcggccagcacatcatctacaacacctggcaacgctcggattccggtgaagcgttctatacctgcgcggacgtgcgcttcgaaggcggtggtggcgttgaaccgccgccgcagtggcaggacgccggcccggtcaccgcccgcggtgcgttggaagaaggcaccaccctgacgctgcgcgtgttcaacgcccagggcaatgatctggagcgtccggagatcaccctggccgcaggccagaccgctgcgaaccagtggccgctcgcgctggcccgcaaggtcaacgccagtgcacagcaggcgcgtgtgggcgtgatgaggaacggcgtgatcacgccggtcgcctcggccaccgagaaccgcgtctacctgaagccgggcaacctgttccagattgatacccgcctgccgggcccggtcgatccggtcgatccgccgccgggtgacgactacgacttcgtgtatccggccggtatcggcagctacacgccgggcgaaaccgtggtcaagggcaccgacggcaagctctacgcctgccggccgttcccggagggtgcgtggtgcaacatcaacgccgatgcctatcgcccgggcaccggtttcgcctggcgcgatgcctgggtcgcgtactga

SEQ ID NO: 534184 - DNA, 1173 bp, Stenotrophomonas maltophilia
atgtcattccaatccacaccgctgctgctggctacttcattggccgccgctggcttgttgctggccggcgatgcttttgcccacggcaccatgaccacgccggtcagccgcgtctatgcctgtttccagggcaatccggagaacccgaccaacccggcctgcgccgccgcgaaagcggtgggcggatcgcaggcgttctacgactggaacggcatcaaccaggccaacgccaacggcaaccatcaggcggtggtgcccgacggcaagctgtgcagcggcaacaatgccaccttccgcggcctggacgtgaaccgcagtgactggcagaccacgccgatccacgccgatgccaatggcaagttcaccttcgtgttcaaggcgacggcgccgcacgccacgcgcgactggcgcttcttcgtcacccgcgacggctggcaaccgggcagcccgttgcgttgggccgacctgcaggagttctgcacgctgggcaatacaccgctctctgccgatggcacctacaagctgcagtgcacgctgccgcagcgcaccggccagcatgtgatctacaacacgtggcagcgctcggattcgaccgaagcgttctacacctgcatggacgtacgctttgaaggcggcagcggtggtacgacgccggcaccgcaatggcaggatgccggcccggtcaccgcccgcggtgaattgccggtgggtacgacgctggcactgcgcgtgttcaatgccagcggcaacgatgtcgaacgtgtggaagcgacgctggccagcggccagacctcggccgcgcaatggcccttggcgctggcccgcaaggtcaatgccagtgcccggcatgcgcgcgtgggcgtgcttgccaatggcgtgatcaccccgtcggcgtcggccaccgacaatcgcgtgtacctgaaggacggcaaccgcttccagctcgatacccaggtgccggacccgggtacgccatcgccgggtggtgatttcgaccacgtgtacccggcgggtatcggcagctacgtgccgggccagaccgtggtgaagagcagcgacggcaagctgtatgcctgccgcccgttcccggagggtgcatggtgcaacgtcaatgccgaggcctaccggccgggcgtgggcgcggcctggcgcgatgcgtggatcgcgtactga

SEQ ID NO: 534185 - DNA, 486 bp, Stenotrophomonas maltophilia
atgcatgcgtggtacctcggtggcatcgaccaccgcccgttcctgcacctgttcgaaaagagcgacaccgcgctggctgcgctgggcatccggcgtcgctgggccggcgaatcaggaggacacccctgccggatcagcctgagcgatccgcccggtggcagcgagctgctgctgttgtcccacgtgcacctgcccctgcactcgccctatcacgcctcgggcccgatcttcgtgcagcgtggcgtgacccgctgcgtgctgccgccgggcgaagtacccccgtacgtgcagcgccggatgatctcgttgcgcgcctatgaccaggctgcattgatgctggccgccgagatcagcgcaggcacggatgtcggcgctcggctggacgcgctgtttgccgaccctgccgtggccttcgtgcagctgcacaacgcggcccacggctgcttctcgtgccaagcggatcgcgtcggcatggcgccgacatga

SEQ ID NO: 534186 - DNA, 345 bp, Stenotrophomonas maltophilia; identical to SEQ ID NO: 498999

SEQ ID NO: 534187 - DNA, 1527 bp, Stenotrophomonas maltophilia
atgcaaagacaccacctcgcgttggccgcagtgttggccagcctgatgcttgccggatgcagccagtcaccgtcacccggcgccgaaggcgccagcgatgcacccagccgccgtttcggcacgatcgacttccagccctgcacgctgtccacggtaggtgccagtgccaacgtggaagcgcagtgcgccaccctgcaggtgccggaggaccgggcccagcccgctggccggcgcattggcctgcgcatcgcctggctggaatcgggcagcagcggctccagccagcccgacccggtgttcttcctggccggtggccccggccaggccgccagcgaagtggccgtcatcgtcgataccgcgctgcgtcaggtgcgcaagcagcgggacatcttcctggtcgaccagcgcggcaccggcggctccaacccgctcagctgcctcggcgcggacggaaaggaactgccgatggacgaggacgcggcgccctccgaggccttgctgcgcgactatgcccagcgatgcgcggcttccctgcagggacgtgcggacgcacgtttctacaccaccaccgaagccattgccgacctggacgcggtccgccaggccttgggcgtggaccgggtcaatctgatcggtgcgtcctacggcacccgcgtggcccagcgctatgcgggtacctatccacagcacacccgcagcatcgtcatcgatggcgtggtgccgaatgagctggtggtgggcggcgatttcgccaggacgttcgaagacgcgatcgccctgcagtcggcgcagtgccgcaaggacgctgcctgcagccggcgcttcccgaccgatacccgtgcgcagctgcgcagcgtggtcgagaccctgcgccgtgcaccggttccggtcgagtatcgcgatcccggcacctacgacacccggaaggatgtgctgacaccggacagcgtggtgggcctggcgtttgcgttttcctacgtaccccagtacgcctcattgctgccgctggttcttgatgaagccgcgcacggccgctacgcgccgctcgcctcgttggcgcgcggtgcgaaccgcagcatggatttccagatcaaccgtggcatgcactggtcggtgatctgcagcgaagacgcgccgcgctaccaggcgccggccgaggatcccgggcgcctgttcggcaacgacgtggcaagttccttctttgccgcctgcccggtatggccgcaccgcccggcaccggcagccaatgccgtgccgctgcgcagtgacgtaccggcgctgctgttgtctggtgaactggacccggtgaccccgccgcgctatgccgagcaggtcctcaagggcctgcccaatggacgcgcgctggtcgcccgtggccagggccacggcacgctgaccgccggctgcatgccgcgcctgcttggccagttcatcgacacgaccgatgccaaggcgctggatgccggctgcctggacacgctgagctacgtgccggcgttcacctcgttcaacggatgggaaccatga

SEQ ID NO: 534188 - DNA, 747 bp, Stenotrophomonas maltophilia
atgatcgtcgccgacaacctgcacaaggccttcgacacccgcaccggccgtatccaggccgtgtccaacgtcggcttccgcgccgaggatggccgcatcaccggcctgctggggcccaatggtgctggcaagaccaccaccatgcgcatgctgtacacgctgatgacccccgaccagggcagcatcagcgtcgatggtgtcgatgctgcgcgcaatccggtggaagtgcgtcgccatctcggcgtgctgcccgacgcgcgtggcgtctacaagcgcctgaccgcgcgtgagaacatcgcctacttcggcgaactgcatggcctgtcggccgagcgcatccgcgagcgcatcgaggtgctgtcgcacgcgctggacatgggggacatcctcgaccgccagaccgatggcttctcgcagggccagcgcaccaagaccgcgatcgcccgcgcactggtgcacgacccgcgcaacgtcattctcgatgaaccgaccaacggcctggacgtgatgaccacccgcgcactgcgccgcttcctgctgggcctgcgcgaagaaggccgctgcgtgatcctgtccagccacatcatgcaggaggtggctgcgctgtgcgatcacatcgtgatcatcgccaagggcacggtgatggccgccggcagcgccgatgaactgcgcgcgcagtccggcgaatccaacctggaggatgcgttcgtgaaactgatcggcagcgaagagggcctgcacgcatga

SEQ ID NO: 534189 - DNA, 1185 bp, Stenotrophomonas maltophilia
atgagcatgatgtcgaccctgatgaaggtgatgcgcaaggagctgcgtgacctgtcgcgcgaccgccgtacgctggcgctgaccctgctgttcgggccactgctgtacccgctgctgatcctgggcatgggcaagctgtccgaaagccgcgtgcgcacgcagatcgagcagccgctgcagattcccaccatcggcgccgaacatgcgccgaacctggtgcgcttcctggctgcccagggcctgaatgccgctgctgcgccgaaggacctggccgaggccatccgttcgcaggacatcgacgtggcgctgcgcatcagcccggacttcggcagggactgggccgatggcaagccggcgctggtggaggtgatcagtgacagcacacgacgtgccgccgaggtgcccactgcgcgcctgcaggcggcgttggccacgtacaacgggcaggtaggggcgctgcggctgatggcgcggggcatcgacgcccaggtcgcacggccgctggacgtggccagccaggacatggccagtgccgaagccaagcgtggcctgatgctgtcggcgttgttgccgatcctgctgaccctcacctcgttcctcggtggtgcctacctggtaatggacaccaccgccggcgagcgtgagcggcagtcgctggagccgctgctggccacgccggggtcgcgcagtgccattgtcagcggcaagatcgccgccgcctgcatggtcggctttgcgtcgctgctgttgaccctggccgcgttcaaggtgagcgcgcagatcgcccccggcaacatcggccgccagctcaacatgaacatcatggcgatggtgcagatgctgctggtgatgctgccgatgctgctgatcggcacctcgctgctgaccttcctggccgcagcggccaagagcatgaaggaagcgcagagccacatgacctggttgatgcttctgccgatgctgccgggctatgcgctgatcgcctacccggtgaagagccagctgtggcagtacgccgtgccgttcctgtcgcagaaccagatgctgctgaaggtgatccgccacgagaccatcacacccgcggtctgggccatctacctcggcgccagcctcggcctggccgccgtgttgtggttcgccgccgtgcgccgttatcacaacgagcgcctggccatctccggctga

SEQ ID NO: 534190 - DNA, 678 bp, Stenotrophomonas maltophilia
atgttggccgaacagccgtaccacgtaacccagcgcggtgtgaacaagggggcgatcttcgttgacgatatcgaccgtcagctgtttctgcacctgttgcacagcgcgttcctgaagcatcaggtcgcactgcatgcctacgtactgatgggcaatcacgttcatcggttggccacaccttccacgcgtgttgccttggcgaatgcgatgcggatgcagggcaacaactatgtccaggcgttcaatcagcggcatgagcgcagcggaccgctctggcagggccgcttccattcttcgatggtggacagcgacgcctatctgctcagcgtctatcgctacatcgaactcaatccggttcgtgcaggcatgactgccgccccggaagatcacccatggtcgagcgtgcatggaaacctgcagcggcgccacgatccgatgctgacagaacatcccgcattccaggcgctcgccccgacccagcgacagcgggcaatgctctatgcggagtttctgcaggacatgaacgcgtccgctgacctgccggcaatccgtacgcacagtgccggccagcatccgttgggaaatgcagcttacctgcgaatggtggaacagaccctgggtcgccccgtgatgctgcgcaagcgggggcgccctcagaagaagggggcggggggttag

SEQ ID NO: 534191 - DNA, 798 bp, Stenotrophomonas maltophilia
atggcagatcagacaactcctccattgctcgaccccgcgctggccgatgccaccgatggaccggcggtgctggcggcccggctgcaccagctcggcaagcgtcgcacggcccgccaccgacatgcgcgtgggcagctgctgggtgcgtaccaggggctgctgcggatcgccgccgacgacctgcactggctgctgcccgcaggtcacgtcgcctggataccgccgttgctgccccacgcgctgctgggcgcagacgggttcaatggctggagcctgtacttcaacgcggaggcctgcctgggtctgcccgccacaccacgcatcttccagcccaatgcgctgctgcaggcggcgacagcacgtgcgctgcaatggccccatgcgccactggatgctgcgcaggcacgcctggccggcgtgatcgccgatgagattgccgccagcacgccgctgccgctggccctgccacaaccgcgtgaccggcgcctgggccgaatcgccgccgcgctggctcgcgcgccgcacgacaaccgcagcgtcgaggactgggccgccagcagtggcctgtccggccgcagcctggcccgccactggctggccgagaccggcatgacgctgagccagtggcggcaacacctgcgggtgctgctggcgctgccacgcctgctgtccggcgagccggtgatcagcgtcgcgctgtcgatggggtacgacacgcccagcgccttcatcgccgtgttcaagcgcgagatgggggtgacgcctgcgcggtatggaaaaggggacggaggggattaa

SEQ ID NO: 534192 - DNA, 255 bp, Stenotrophomonas maltophilia
atgcagccacgcgacatcctccccgaccatcagaacgacgtgcaggtgaacggcctcaccgtgcgcaagggcagtgtcggcgccttcctggccagcgtccgtgactggcaggatcccgccagcgatgttgccacccgttccactgccgaagccgacctgcgtgcgctgctgccgggcctgcacgcgttgggcctgttccaggtgctgacggcgcgcgatccggcactgcaacacctgatcgatggagcggcctga

SEQ ID NO: 534193 - DNA, 1005 bp, Stenotrophomonas maltophilia
atgtcgcacgtctcaacgatcaccgccgcgcgccggtggctgccggttgccctggcactggcactggccgcctgctcgggcaaggaagaatccgcagcgcctgctgccgccacggcgcctgccgctgccgcacccgccgcaccggcggttgctgccaaggtgcagtccatgggcaccgagcagctgcgcgagtcggccagccaggcgctgcgcgagaaccgcatgtatgcaccgaccggcgacaacgccatcgagtactacctcgccctgcgtgacaagacgccggacgacgcctcggtgaagagcgcactgaccgacctgctgccgtacaccctgatcgccgccgagcaacacctgggccgcgaggactacaccgaagcgcagcgcctggtggcactgatcgagaaggtggatgcatccgcgccggccctgccgcgcctgaaggacggcctggccaagggcgtgcagaacgccgccaagcgcaccgaagcggaagccgagaaggccaagaaggacgccgaggaccgcagcaagcagcagaccgagcagcagcgcctgagcgagcagcgcgccaaggaagccgacgccgccaagcagattgccgcgcagcaggatgccgcgcgccgcgacaacgagcgccaggaagccgagcgccaggccgccgcccgccgcgaggccgagcagaagcagcagcaggctgccgcccagcaggccagcgccgcacgccaggccgccgcaccggcagcgcccaccctgcgcccggtcagcacaccggcgccgcgctatccgggcgaagcgctgcgttcgggaacctccggcgaagtgctggtggagatcaccgtcggcactgacggctcggtggtgaacgctcgcgtgctgcgtgcgacgccgggacgcgtgttcgaccgtgaagccctgaacgcggtcaagcgttggcgcttcgagccggtcagcgcgccggtgaccacccgccgtacgctggtgttcgcgccgggcaacaactga

SEQ ID NO: 534194 - DNA, 621 bp, Stenotrophomonas maltophilia
atgagtgcaaaccgcccgccgctctcccccttgtccacgctgatcttcgcctcacgctggctgcagctgccgctgtacctgggcctgatcgtggcgcagtgcgtctacgtgttcctgttcggcaaggaactgtggcacctgatctcgcactcggtgtcgatgggcgagcagcagatcatgctgatcgtgctgggcctgatcgacgtggtgatgatctccaacctgctggtgatggtgatcgtcggcggctacgagaccttcgtctcgcgcctgcgcctggaaggccacccggaccagccggaatggctgagccacgtcaacgccagcgtgctcaaggtgaagctggcgatggcgatcatcggcatctcctcgatccacctgctgaagaccttcatcgccagcggtgcgctgggcggcatcccgctgtgcacgccggagcagatgagcgtggccgctgccaacatcggtgtcgcccgctgctcgatgctgacccaggatggcgtgctgtggcagaccatcatccactgcgtgttcatcctgtcggcgatcggcatcgcctggaccgacaagctgatgtccaacagccacagcaagtcgcacgacaaggcacacgaccactga

SEQ ID NO: 534195 - DNA, 690 bp, Stenotrophomonas maltophilia
atgatcgacctgtattactggcccaccccgaacggccacaaagtgaccctgctgctggaagaaaccggcctggaataccgcatccacccggtcaacatcggctcgggcgaccagttcaagccggaattcctggcgatctcgccgaacaacaagatgccggccatcgtcgaccaggccccggccgatggcggtgctccccagagcgtgttcgagtccggcgcgatcctgctgtacctggccgagaagaccggccgcttcctgcccagcgacccccgcggccgcgtcaccaccctggagtggctgttctggcagatggccggcctgggcccgatgagcggccagatgggccacttcaacgtatacgcgcctgaaaagatcccgtatgccatcgagcgctacgacaacgaagtgcgccgcctgcacggggtgatggacaagcgcctggcccagcacgccttcctggccggcgacgagtacaccatcgccgacatggccagctacccgtggatcggcgcctacgacaagctgccggtggatttcaccgcgttcccgaacctcaagcgctggcatgaagccattgccgcacgcccggccacccagcgggcctatgccctgcgccagcaggtgaaccccaacgccggcaagccgctcagcgacgaggagcgcaagcatctgttcggccagcgctga

SEQ ID NO: 534196 - DNA, 2226 bp, Stenotrophomonas maltophilia
atgcgccacctgttcgcttcgctcgccctcatgctcgccaccagtaccgccgcccacgctgaaaagctgaccctggaagccatcaccggcccgttgccgttgtccggcccgaccctgatgaagccgaaggtggcgcccgacggttcgcaggtcagcttcctgcgcggcaaggacagcgaccgcaaccagctggacctgtggacctacgacatcgacagtggccagacccggttgctggttgattccaaggtggtgctgcccggcaccgaggccctcagcgacgaggagaaggcccgccgcgagcgccagcgcatcgccgcgatgaccggcatcgtcgattaccagtggtcgccggacgcgcagcgcctgctgttcccgctgggcggcgagctgtacctgtacgacctcaagcagcagggccaggcggcggtgcgccagctgacccatggtgaaggcttcgccaccgacgccaagctgtcgcccaagggcggcttcgtcagcttcatccgcggccgcaacctgtgggtgatcgacctggccagcggcaggcagctgcagctgacccgcgacggcagcaccaccatcggcaacggcgttgccgagttcgtcgccgacgaggaaatggatcgccacaccggttactggtgggcgccggacgattcggcgattgcctttgcccgcatcgacgaatccccggtaccggtgcagaagcgctacgaggtctatgccgaccgcaccgacgtgatcgagcagcgttacccggccgccggcgatgccaacgtgcgcgtgcagctgggcgtgatcgcaccggccgccgatgcgcagccgcgctgggtcgacctcggcaaggaacaggacatctacctggcccgcgtggactggcgcgatgcgcagcacctgagcttccagcgccagtcgcgtgaccagaagcagctggacctggtggaagtggcactcgactccaaccgccagcgcgtgctcgcccacgaaaccagcccgacctgggtgccgctgcacaacagcctgcgtttcctcgacgatggcagcgtgctgtggtcgtccgaacgcaccggcttccagcacctgtaccgcatcgacagcaatggcaaggccaccgcgctgacccacggcaactggccggtggacgagctgctggcggtcgatgaaaaggctggcaaggcctacttccgcgccggcatcgagacctcgcgcgaaagccagatctacgcggtgtcgctgcagggcggtgagccgcagcgcctgtcgaaggcgccgggcatgcacagcgccagcttcgcccgcaacgccagcgtctacgtagacagctggtccaacagcaccacgccgccgcagatcgaactgttccgcgccaatggcgagaagatcgccaccctgctcgagaacgacctggccgatcccaagcatccgtatgcgcgctaccgcgatgcgcagcgcccggtggagttcggcacgttgatggctgccgacggcaagaccccgctgaactacagcctgatcaagccggccggcttcgatccgtccaagcgctacccggtggcggtgtacgtctatggtggcccggccagccagaccgtcaccgacagctggcccggccgtggcgaccacctgttcaaccagtacctggcccagcagggctacgtggtgttctcgctggacaaccgtggcaccccgcgccgtggccgcgacttcggtggtgcgctgtatggcaagcagggcacagtggaagtgaccgaccagctgcgcggcgtggcctggctgaagcagcagccatgggtggacccggcgcgcatcggcgtgcagggctggtccaacggcggctacatgaccctgatgctgctggccaaggcttcgaaccagtacgcctgtggcgtggccggtgcgccggtgaccgactggggcctgtacgacagccattacaccgaacgctacatggacctgccggcgcgcaatgaagcgggttaccgcgaagcgcgcgtgctgacccatatcgatggcctgcgctcgccgctgctgctgatccacggcatggccgacgacaacgtgttgttcaccaattcgaccagcctgatgagcgcgttgcagaagcgtgcacagccgttcgagctgatgacctacccgggtgccaagcatggcctgtccggcgccgatgccctgcatcgctaccgcgtggccgaagccttcctgggacgttgcctcaagccctga

SEQ ID NO: 534197 - DNA, 516 bp, Stenotrophomonas maltophilia
atgaccctgccaccgccgattcccgcccatgacccggcatccgccggttggtggtgccgccactggcgctgggcgatgccgttgatggtggtgctggtgctgggtggtgcagggggtgtggtgacctggagcgtgctgcgctggagcgaggcggcacgcgagagcccgccgatgcgcgaggcgctgcggcgcgcgggctgcagtattgaactggtggaagcgttcggtgagccgttgaagatcgagtcgatgccgctgggcagcatgcagactgcgatcaacggccagcgtgatgtcggcctgaccgtagccctggaaggaccgcatgcgcacggacggttgttcgtgcagggtacccgtcgcgatgacgtgtgggactacccggtgatgtacgtgttgggcgaggacaagcagaccttcgacctgacggcgctggatgacgacgaggccgcgcaggagtgcgagctgaaggcctgccgtgatcgcggcgaatgcccgctgaccgccgcgctgtga

SEQ ID NO: 534198 - DNA, 1800 bp, Stenotrophomonas maltophilia
atgaagccgattgcgctcgccgttgccctggccctgactgccgcaccgctgctgtccgcaccaccggcgctggcggcaccctccgccaaggccgccaccccggccagcccggcctgggtcgcccgcagcaatgcgctggcgcagattctgctggacgcccagggcccgttccagccggaggaaaccggcttcttcggcgtgcccggctacgacgacaaggtggccgatctcggcccggacaacggcaagcgctaccgcgctgccatggccaaggcacgcgacgaactgaaggcaaagctggccgtcgagaaggatcccaatgtccgccaggacttggaaatcatgatccacgccgccagccagaacatcgaaggcagcgagctcaacgagaagtacctgctgccgtggagcgatgcgccgcagaccgtgttcagcggcctcaacctgctgctgtccgaccaggtgccagcggagcgccgggccaaggcggtcgaccgcctcaaggcctatgccggcctgcagccgggcggcaccgccttcaccacgctggcgcgccagcgctacgaggaacggctgaaggacagcagcctgttgcagccgacgaagattgaagtgcagcagtcgctggacaacgtcgagacctacatcaccggtatcgagtcgctgctgaagaagtaccagattgccggcgccgatgaagcaatgaaggcgctggccgggcagatgaaggactacgccgcctggacccgcaaggaggtactgccgaaggcacgtgccgacgcacgcctgccggcgccgttgtacgcctaccagctcaagcaggtcggcatcgacatcgacccgaagctgctgatgcagcgcgcgcagctggagttcatggaaacccgctcggcgatgcagcagctggcaccgctggtggtgaaggacaaggggctgaaggtggccgacccgagcgatccggtggcggtgatccgcgcgctgaaggccgacaagatcgccgacgaccatctggaaggtcactatcgcaaggtgatcgatgcgatcgatccgctgatccgcgagcacgccatcgtcgacgtgcccaagcgcgccatgcagatgcgcctgggctcggccgccgagagtgcggccagcccggctccgcacttcctgccggccccgctggtcaacaacaccgggcagcagggcaccttcgtgctgccgctgggcaacccggcagcgggcccgggcgcgcagtacgacgacttcaacttcggtgcggcagcatggacgctgagcgcgcatgaaggccgccccggccacgagctgcagttcaccgcgatggtcgagcgtggtgtgtcgctggcacgcaccatgttcgcgttcaattcggtgaacgtggaaggctgggcgctgtacgccgaagccgagatggtgccgtacgagccgttggacgggcagatgatcgccctgcagttccgcctgctgcgcgccgcgcgcgcgatgctcgacccgatgctcaacctcggcctgaccgaccgtgccaacggcgagcgcgtgctgatggagcaggtcggcctgtccaaggcgatggccacccaggaactggaccgctacatggtgcggatgccgggccaggcaggtagctacttctacggctacacccgcatcctggaactgcgcatgcagacggaactggcgctgggtgcgaagttcgaccgcctggcgttcaacaacttcctgctcgaccagggcctgctgccgccggaccagttggccgacgcggtgaacaaggtgttcgtgccgaagtacaagcgctga

SEQ ID NO: 534199 - DNA, 459 bp, Stenotrophomonas maltophilia
atgaacatccgttgggccgcgttggcggccacgctgctggtcgccgccggctgtgccagcacctccaaggtgatgctgggccgcgcgcgcgcaccgatcgatccggcgctggtgcagatctattcgacgccaccggccggctcccaggaaatcgcccagctggaatcgtcttccgccgtcggcttcggcacccagggccagaccgacgccgcggtggcccgcctgaagcgtgaagccgcagcgctgggcgccaacggcgtggtgctgatgggcgtgggcagcagcgggtcgccggtaggcatgtcggtgggcgcgggcacgttcggctcgcacgtcggtggcggcgtcggcatcgggattccgaccacgcagaagcgcgccgcaggcgtcgcgatctgggtgccgaatccggcaccgccggcgcggttgccgacacaggtgattaccccgcagcggtga

SEQ ID NO: 534200 - DNA, 249 bp, Stenotrophomonas maltophilia
atgggtgtgatcagtctgttgtggggcgtattggcgctgttgtggatgatcctggcgttgattccgctgctgggctggggcaactggttcctgatcccgttcgccgcggtcggtgcggtcatcgccgcgctgggcatcctgttcacccacccgagcaagcgtggccgggcgtgggccgggttggtcctgaacggtatcgtggtggtggtcggcatcctgcgtcttggcctgggcggcggcgtggtctga

SEQ ID NO: 534201 - DNA, 990 bp, Stenotrophomonas maltophilia
atgtcccacccgctgtaccgcccgcgccgcatgcgccacgacgagttctcgcgccgcctgatgcgcgagaacacgctgaccaccgacgacctgatctacccggtgttcgtgcacgaactggccggccgcaccgcagtgccgtcgatgccgggcgtggagcggctgtcgatcgaagaactgctgaaggtggccgaagaggcgctggagctgggcattccggtgatcgacctgttcccggtgatcgacccgtcgctgaaatcgctggatgcatcggcggcgtgggccgaggacggcctggcgcaacgcgcgatccgtgcgctgaagtcgcgcttcccggaactgggggtgatgaccgatgtggcgctggacccgtacaccacccacggccaggacggcatcatcgacgacaagggctatgtactgaacgacatcactgtcgaagcgctggtcaagcagtcggtgtcgcatgccgaagccggcgtcgacatcgtttcgccgtcggacatgatggatggccgcatcggcgcgatccgccgtgcgctggatgccgacaaccacgtcaacgtgcgcatcatggcttactcggccaagtacgcctcggcgttttacggtccgttccgtgatgcggtgggcagcgcggccagcctcggcaaggccgacaagaagacctaccagatggacccggccaacggcgacgaggccctgcgcgagatcgcgctggacctggaagagggcgccgacatggtgatggtcaagccgggcatgccgtacctggacctggtgcgccgggtgaaggaaaaattcggcgtgccgaccttcgcctatcaggtcagtggcgagtacgcgatgatgaaggccgccttcgccaacggctggctggacgagcgcgcctgcgtgctggagtcgctgctgggcttcaagcgggccggtgccgatggcgtgctgacctatttcgcgccgcaggtggcgcgatggctgcgcgagcgctga

SEQ ID NO: 534202 - DNA, 270 bp, Stenotrophomonas maltophilia
atgggacccgaactgggatggatgcaatggctgatctggggcaccggcacgctggtgttcggcgccatcatcgtcggtgtcttcatcgccgcctggcgcgcgggcaagcgcccaccggagcagctctccgccgcccgccacgtggcccgtgagcaggccctgccggacagcgtgcaggccgagctggccgcgctgaaccagcgcaaggacaatggccagctgagcgagatggagtacgagcagttgcgcgccaaggtgttgtcgcgctga

SEQ ID NO: 534203 - DNA, 864 bp, Stenotrophomonas maltophilia
atgatgcgcatcaccccgcccctgctggtgcttgccgccagtctactctctgcccccgtggcgatggcgttgaacgagtacggcatcgaaggcatgggcatggtctcgacccgcgccgacgagggccgcgccacgatcagtgccgatggccggcacatcgtcttcgcccgccgcggcgaagccggctggggcctgtgggaggcgcgcgtggtcgatggccgctggcagcaggcgcaggccctggcggtgggcgtggccggtgaggcccgcgatccctacttcagccgcgacggccgctggctgttgttcgccgccggccgcgaaggcgcgctggcgctgtaccgggccgcggtggaagccgatggccggctgggcaaggcgcaccccatggccggcgacggtggacgccacgaagagcgcgggccggccctgagcgcggacggcacgcggctgctgtttgcccgccaacagggccgtggcgccggctggaacctgttcgtggcgacgctggatgcgcagggcatgcgcggcccggccaccgcattgacagcgttgaacagcgccgacgacgagaccgacggcgactggctgggcaacgatggcgcagtggtgttcagccgcggcaacggcacgaccgcacaggtgtggagcagcggctgcgcgtggagtggcgcggccctgcaaccgttgggactgtcgttcaaccagaccggcggctggaccggcgcgccggtgatcgacaacgccaagccaggcgaaatgatggtggccagcagcgcggccagggcaccgcgtgccggtggcgtggacgtgtaccggttggcggtgccgaaggtggcggcggtggccgggtgcgtgcagtag

SEQ ID NO: 534204 - DNA, 846 bp, Stenotrophomonas maltophilia
atgaccgaccgttacgccgtcttcggacaccccgttgcccactcgaagtcgccgcagatccacgcgacgttcggtcgccaggaaggcatcgcggtggattaccgcgcgatcgacctggccccggaggcgttcctggccggcctggaggccttcgccgccgacggcggtgtcggcgccaacgtcacctcgccgcacaaggaggccgcgttctcggtgtgcaccaccctgaccgcacgcgcgcgccgcgccggttcggtcaacacgctgctgcgcaagggcgaccgctggcatggcgacaccaccgacggcatcggcctggtgcgtgacctgaccgaccgccatggcctggacctgcgtggccgccgcatgttgctgatcggtgccggtggctccgcgcgcagcgtcgccccggcgctgcttgatgccggcatcaccgagctggtggtggtcaaccgcacgccggaacgcgctgatgaactgatcgatgcgatgggtgagccgggtcgcgcgatcagccgctactgggaagacctgcgtgatctgggtgacttcgaactgatcgtcaacgccacctcggccggccgcgatcgcgacgtcgagttcaagctgccgctgtcgctggtcaactcgatgaccaccgccgtcgacctcaactacggcgaagcggcgatcgccttcctggcctgggcgcgcgccgcggagtgccgcaatacggtcgatggcctgggcatgctggtcgagcaggccgctgagagtttcctgcagtggcacggtgtgcgcccgcagaccgacgaggtctaccagtcgctgcgtgagggctcggccgtgctggccggcgaggactga

SEQ ID NO: 534205 - DNA, 354 bp, Stenotrophomonas maltophilia
atggacggcacaaccctgctggtcacggtgctgagcatggtgggcgtgcgcctgccggtgctgatcgcgctgtgcgtgggcctggtctgggtggtcggcgcaccgcgcgatgccacccgcaccggtgccctggtcggcctgctgctgttgctgctggccagcctcggcggcatggcggcgggcatcctgccgatgtggatggtccgcagcggtgatttcagcgccgtgtcgagcttgagtgccatcctcggcgtgctgcatttcgcgctggcgatggtcgaggccatcggtgtggtgctggtggtgtgggcgctggtgcgcctgctgcgtacccgtacgctcccggccgcctga

SEQ ID NO: 534206 - DNA, 2103 bp, Stenotrophomonas maltophilia
gtgaccgaaaccgtcgccgctccgcgcaccctcgatgacaccttgaaggacgcgatccgcaaggcgtacacgacgctgcaggccaatacccccggcttttccacccgtcgctcgcagagccagatgatcggcgtggtgtcgcgtgcgctgtcgaaaagcggtggcgtcggcgtggtcgaggcgcccaccggcgtcggcaagagcctgggctacctcaccgcaggcgtgccgatcgcattggccagcaagaagaagctggtgatcagcaccggcaccgtggcgctgcagtcgcagctggtcgagcgcgatatcccgaatttcctgaaagccaccggcctggaggcgaccgtggcgctggccaagggccgtacccgctacctgtgcacgcgcaatgccgccgaggcgcagggcgagggctcgcagggcggcatgttcgaggatgacgcgccgctgttcgaccggccactggcgccgatcgagatggacatcgccaagcgcctgaccgacgccttcaccagcggcagctgggatggcgatatcgacaacgcaccggagacgatcagccccggcctgcgcagccgcatcaccacgccggcctcgggttgcgcggggcgccgttgtgcgtactcggcacagtgcgcggtactgcgttcgcgcaacaccgtgcgtgacgcgcagatcgtggtcaccaaccacgcgctgctgctgtcggcgctgtcgatcggcgacagcgacaacggccagccgttgatcgcgccgccctcggacatgctgctggtgctggacgaaggccatcacatcggcaacgtggcgatcgaccagggcgcggccagcctggcgctggacgagatggccaagcgtaccggccgcctgcagatcctgatcgccggcgcctaccgcgcggtcgacaaggatcgccttggcaacctgctgccgaacgaagcgatcgaggtggccagcaacgtggccaagcagctgcgcgcgttccgcgatcatatcgagcgggtgtggatgccggcgccggcggacgaagagccgatgtggcgcgcggccaatgggcgactgcccgaggcctggcgcgagccgatcgaggcgttggctgacgatacccgcagcctctacaactgggcgcacgccgccaccgcccaggtagccaagggcaagccggacgatgccgcgcgcgagcgcctgcagcgcaacctgggcatggcgctggagatgatcgagcagcagtacaacctctggcaggcctggcgtcgcgaagacaaggacggtgcgccgccgatggcgcgctgggtcaccgccacccgcgacggcgatctggtgctgcacggctcgccggtgtcggccgcgcacgtgctgcgcaagctgctgtgggatgaagtggactcggtggtgatgacctcggcgacgctgaccggcggtggcgacttccagtcgctggcgatcgacaacggcattccggaagaggccgagatggtctcgctgtcgtcaccgttcgacctgcccaaccaggccgaactgatcgtgccgaaattcccggttaccccggacgaccgcgaaggccacccgcgcgaagtggcgcgctacctcgacaccgagctggactgggccaaaggctcgatggtgctgttcacctcgcgctggaagatggagaaggtggctgggctgatgtcggccgcgcgccgcaagcaggtgctggtgcagggcgagatgtccaagacccggctgatcgacgagcacctgcgccgcgtggccgcaggcgagggctcggtgctgttcggactgaactcgttcggcgaaggcctcgacctgcccggtgaagcctgcaccacggtggtgatcacccaggtgccattcgccgttccgaccgacccgcagaccgccaccctcagcgaatggttcgaggggcgtgggctgaatgccttcaacctgatcgccattccgcatgcgttgcgcacgctgacccagttcgcaggccgcctgatccgcacttccaccgacaccggccgcgtgatcatcctcgattcgcggctgctgacccgccgctacggcaagcgcatcatcgacgcgctgccgccgttcaagcgtgtgatcggctga

SEQ ID NO: 534207 - DNA, 1839 bp, Stenotrophomonas maltophilia
atgcccgaataccgttcccgcacctccaccgccggccgcaacatggccggcgcccgcgccctgtggcgtgccaccggcatgaaggatggcgacttccacaagccgatcatcgccatcgccaactccttcacccagttcgtgcccggccacgtgcacctgaaggacctcggccagctggtcgcgcgcgagatcgagcaggtcggcggcgtcgccaaggaattcaacaccatcgccgtggacgacggcatcgcgatgggccacgacggcatgctgtattcgctgcccagccgcgagatcatcgccgacgccgtggagtacatgatcaacgcgcactgcgccgacgcgctggtgtgcatcagcaactgcgacaagatcacccccggcatgctgatggcagcgctgcgcctcaacatcccggtggtgttcgtttccggcggaccgatggaagcgggcaagaccaagctgtccgagcacaagctggacctggtcgatgcgatggtggtggctgccgatgacagcgcttccgacgagaaggtggccgcgttcgaacgcagcgcctgccccacctgcggctcctgctcgggcatgttcaccgccaactcgatgaactgcctgaccgaagcactgggcctgtcactacccggcaacggcaccacgctggccacccacgccgaccgtgaggcgctgttccgccgtgccggccgcctgatcgtcgaactctgccatcgctggtatggcggcgaagacccgagcgcgctgccgcgcggcatcgccacccaggcggcgtttgccaatgcgatgaccctcgacatcgccatgggcggctccaccaacaccatcctgcacctgctggccgccgcgcaggaagcggaggtcgacttcaacctgacccacatcgacgcgctgtcgcggcgcgtcccgcagctgtgcaaagtggcgccgaatacgccgaagtaccacatcgaggacgtgcatcgcgccggcggtgtgttcggcatcctcggtgagctggaccgcgccggcctgctcgaaaccacggtgccgaccgtgcacagcgccagcctggccgaagcactggaacgctgggacgtggtgcgcagtgacaacgacaccctgcacacgttcttcaaggctggcccggccggcatccccacccaggaagccttcagccaggccacgcgctggccgacgctggacgtggaccgcgccgagggctgcatccgctcgctgcagcatgcgtattcgctggaaggcgggctggccgtgctgcgcggcaacctggccgtggatggctgcgtggtgaagaccgccggcgtggacgaatcgatccacgtgttcgaaggtcccgcgcgtgtctatgaaagccaggacgccgccgtggccggcatcctcgccgacgaagtgcagccgggcgaggtggtggtgatccgctacgaaggcccgaagggcggccccggcatgcaggaaatgctgtacccgaccagctatctgaaatcaaagggactgggcaaacagtgcgcactgctcaccgatggccgcttctccggcggcacctcgggcctgtcgatcggccatgtctcgccggaagccgccagcgggggtgtcatcggcctggtggaagatggcgaccgcatccgcatcgacatccctgcccgccgtatcgacctgctgctggacgaggccgtgctggcccagcgccgcagcgacgccgatgcgcgtggttggaagccgcgcgcaccgcgcccacgcaaggtcaccagcgcgctgaaggcttatgcactgctcgccacaagcgccgacaagggtgccgtacgcaacaccgcgcttctgggcgattga

SEQ ID NO: 534208 - DNA, 573 bp, Stenotrophomonas maltophilia
atgaaacgttcccgcaccaccgcgctgctgctgatgagcgccgcgccgctgctgttcaccgcctgccagaaggagccggaggtgaaggtgcaggaaggcctgtacacctcggtcgaggcctgcaccgaggccaccggcgatccgtcgtcgtgccgcaatgccttcgccgaagcgcagaagcaggccgccaatgcggcgccgaagtacgccagcagggaagcctgcgagaaggattacaagccggagcagtgcgtgcagcagcacacctcggccggtacctcgttcatcggcccgatgatgatgggcttcttcatgtcgcagatgctgagcaaccgcggaggcctggcaccgcaggcaccggcatcggcgccggcctaccaggacaagaatgcgggttgggcgcgcccggcaccgggtggcaccggtggcctgaacaccgccagcggcatcggcgcgggcaaggccggcctggccccggtcaccagcgaaccgaaccgtgcggtcactgccagccgtggtggcttcggcaacaccagcgcgcgccgcagcagcagcggcagctacggcggctga

SEQ ID NO: 534209 - DNA, 648 bp, Stenotrophomonas maltophilia
atggcggtgcggcgttggcctggccggcatgggcgttcttcgcccgtgcctggccggcacttcgatgacgggcgcagcctgcaggccttcgcggaccgcgtcgcggtgcgttgccatcgctgcgacacccccggctgggtggtcgccagctgggaaccctaccggtggaccgcgcgattccgctgcaccggctgcagttctgcactggacagtggtgactgggtcggtgcggtctacatgctgggccgccaaccttgtggattctgtgggcatcagtggcagcacgtgcgtcgtcgggttcccgctggcgttcctgcaccggcgtccttcgctgctcgatgcgcgcaatgtgatcgtagtaccgatgtttcggtctcggtgcgtccgttgcgtgatgccgagcctgccgatccgcacttcggattgccgctgtgcctggtcgaacagacccgcgcaggcctgctctgggcctataacgctgaacatctgcacgcattgcacgagtacgcgagcgcgacattgcgcgaaagccgcggccatcaccgatccatgttctcgcgcctgccgcagtggatgaagctggcccgcaaccgggtgctgctgcagcgtgcggtggagcgattgcagcggcgattgctgcaggggtag

SEQ ID NO: 534210 - DNA, 351 bp, Stenotrophomonas maltophilia
atgcggctacgcgaagccgacaggttttccgacgaggtctgcaggttggccacgaccgaggtgaagcggttctgcacggcgccgagatcggcgcgggtgctgttgatcgcacccagggccttgtcgacgatttccatcgcctgctgggcgcccttcacggtgctgacgtccaggttgctggcgtacttcgcagccggggccgcagcagcggtcgtggcggtgaaggtcggcgcggtggcgccggtccaggtgcccggggtggcggtgatggccttgaacgagccgtcggcgttggtgctgtccttgaccgaggtcagggtcacgccagcggtgccgttcacttcagcgtag

SEQ ID NO: 534211 - DNA, 363 bp, Stenotrophomonas maltophilia
atggcatcgccccgcatctcgaagcatgggccggagaggtttgtgcccgccgtggtgatgatcgacagcaggggttgctcgcgcgcgcccatgccggtttccatggcgtcgaccatgtggtcatcgtcatgttcgtggtactcgtccaccagcgccgcatgcgggctggagccgtcgccgggcttgccgatcatcgtctcgaacttggacatatcctccatgacgaacagcgggcccgggttcttcgggttgcccgcctgttcgataccgaaccgggcgcgcagcgccggcagtttctggaccatttgccaggccgggcggaacacctcgtacgcctgcttctcgctggtagcgcccgaatag

SEQ ID NO: 534212 - DNA, 360 bp, Stenotrophomonas maltophilia
atgttccacgacgacatgctgaagctgatccgcaaggtgaaggacgaccagggccggccgatcttcgtgccgggttacgagcagggcaatccgggcggtgcgccggatcgtctgctgaaccgcgatatccagaccaaccagcacgccccggccccggccgcaggcgcaacctcgatcgcgttcggcgacttcagctactacaagatccgcgacgtgatggccgtgaccctgttccgcttcgccgactcggcctatgtcaagaggggccaggtgggcttcatggcctggatgcgctccggcggcaacctggtcgacgtgggcggcgcggtgaagaccttcaagcacggcgccgcggcttaa

SEQ ID NO: 534213 - DNA, 342 bp, Stenotrophomonas maltophilia; identical to SEQ ID NO: 533843

SEQ ID NO: 534214 - DNA, 756 bp, Stenotrophomonas maltophilia
atggtaacccgcagcgtccgcacggatatcccgggtagatccacgccatgcgtggatgagcctgccagcaggaacagcatccacgcaccgcggatctcccatgatgcatctggaggaccaagcccctctgttgaggggctgccccgacaggggcggggagaggccggcaaagggaggggcccacgcgttgcgcagcaacgtgtggggcgacgcgcgcaaagcgcgtcgtgtcccgcgccagatcaggacatggtcactacgccgcaattcccgatgtgcatccacgcatggcgtggattcacggaggcatctggtggaacaagcccctctgttgaggggctgccccgacaggggcggggagaggcccgcaaagggaggggcccacgcgttgcacagcaacgtgtggggcgacgcgcgcaaagcgcgtcgtgttccgcgccggatcaggacatggtcactgcgccgcaaatgccgatgtgcatccatccatggcgtggattcacggaggcatctggtgaaacaagcccctctgttgaggggctgccccgacaggggcggggagaggccggcaaagggaggggcccacgcgttgcacagcaacgtgtggggcgacgcgcgcagagcgcgtcgcgtcccgcgccagataaagaaaaagggctgcctttcggcagccctttttctttatctggcggagagggggtctgccatagaactgcccatggaagtccaacaggatctcaagaagttataatttaa

SEQ ID NO: 534215 - DNA, 189 bp, Stenotrophomonas maltophilia
atggatggccgcttcgcgtccggtgatgaccagctcatcaatccggaagcgcccgatcctgatgcccttaaggtgaagcgtgtcatcggcgtcgggattaaaagggaagtcttgaaggaagttctttactgtttttggcacggccctgtctccttggatgatgggagcagtgctaaggcctggctttga

SEQ ID NO: 534216 - DNA, 183 bp, Stenotrophomonas maltophilia
atggatggccgcttcgcgtccggtgatgacaagctcatcaattcggaaccgtccgatcctgatgcccttaaggtgcagcgcatcatcggtgtcgggatggaaagggaagtcttgaaggaagttctttactgttttcggcattgcgctgtctccgtagatgatgggagcagtgctaaggcctag

SEQ ID NO: 534217 - DNA, 516 bp, Stenotrophomonas maltophilia; identical to SEQ ID NO: 533848

SEQ ID NO: 534218 - DNA, 459 bp, Stenotrophomonas maltophilia
atggaatcatttcaaaaggtgctccgcgatgggctacaggtgcagcaaggtcgtgtggaccctaatgtctccttctattccgacagggaaactggcgcacctaggttcgtgtatacgtatctggaatccggagagctgaacgcctacctctgcttaaccccctatgagtatgagaacggttcgccggtctttgcagcgggctacgccgtcccggtgaagcaccggggcaaggggttggcgaagaagattttcgcagcaggcattgaagagcttagaaacgggctaagaggtcatccgcccttctttgttgaggcaatcatcgacctagacaacgttgcttcgcagcatgttgcgtcagctgtcctggcggttgaggcaaagcgcgtcacagatcaagcctcgggaaagccagccttccaatatctccgcaaatacgaaacagggagcgataggggatga

SEQ ID NO: 534219 - DNA, 483 bp, Stenotrophomonas maltophilia
atgcccgcctccccactccgtgcctttcgcctgctccgagcgtttggtgcccttgagttcgcattgaaacaagtccccgggttcaccggcgcttactcaaacggatccgccaaggtgaattggcaaggcgtagacgctgcactcgaagtgatgcaaccagagctactcacgtcgacggtgtctgaggcgaccaagcagaagatcctgggcgggaaccgggatcgtcccatggtccagatggtgatcgtgcacggaggccacaacatcgcctccttccgggccgaagccctgagcgcgtcagacccgagggcgctgatgcaagccgcccgccgggttcgtaacaacctctttcacggagggaaggaagatccacttgaagaggcgtttccgggcgatgacaacgagtggatatcggccgcaaccgatgtcgcccggggcgttcttgatctggtcgtgaatggaaggctccggcccctgccctga

SEQ ID NO: 534220 - DNA, 984 bp, Stenotrophomonas maltophilia
atggaatacgagcgtgtcgtaggtctgagagatgagctgttggatcgtttcgagttgcggccgagacctgtcccggaaatgcgcttctcacgaggtggtgcgaggtctcgttggagggcgccgcgtgcgcagatcgcactcggcatagcgccaggagcgcggcagggcgacttttatctggctgtgcgcccgcaaggcgagcagtctgtaattccgcaaatcgttggcgagattactgagatatgtaaaggcgaggttgatatccagcctatggagattcttaggccggaaggtgctgcttggttgagggggaagagcaggcccatgcgtgtgggtgtaagtatctctaacataaagggagccgcagggacccttggattgtttgttgagtccgaagagatggacggacaattcattttatccaacaatcatgtccttctggatcctgccgggcggggcgagtgtaggattattcaacctggtcgcaatgatctaattaagtcagctgatgtagttgctgatcttgtcctatggaaagatgtggtcgttggccaagtcaatgtggtcgatgctgcaattgccaggataagagatcccgaatccgggcatgtcaacaatattcctgggcttggatcaatcactcaagtttctaatgttcctggattattttcgggggtcgcaaagattggaagaaccaccggtctaacctacggccgaatactgggtaaaggaatttgcgccgtgagtgttgcgtgggacgggggtgttgctttttttgatgattgcattgaggttggggctttcccgcggaagttctcgaatggcggagatagcggttcagttatatgtgatttgaagggaggggcgtttggtcatcttttctgtggtggatggcggaggcgctttggtgtgcgggttttgaaggttacttatgctacgccattgacaacggtgttttctgagttaaagctgaggctattgtag

SEQ ID NO: 534221 - DNA, 1332 bp, Stenotrophomonas maltophilia
atggaccagcaagtcgaagcagcgtgtactgctctggatgaatttacttctgcggtggagcggacgtttaatggcgtgaccaatccgctccagcagcagatcggttggatggcgcctgcactcacgccacaggagattgccgccgttccggcgcggttggctcagcgtatcagggatgcggatctcgctttcgatgagactgaccccgacgagcaagatcaagcggacttgatcgccagccttcccacccagctcaccatactgactagcaatctgggcaatctttcgggcggtaacataggtcaggcaggttgggcgtactttgagacgttcaatcagtgggagcgcactctttttccaactggcgtgtgggccgagcccgatccagagacgctgccaggtcggctgcggcgtcagctgaagctgaccaagaaggcattggatgccattgttgtggatcgagaggctctccaagaccagttggacgagatcaggcagggggctcagctgatcggggatcttccggtcgatgctgagatgattgctaacgcacgcaaggacgttgcagcagcacatcagtctgcagttgaggcagcgtcgaagtcgaaagctgcagcagatggtgctgcgtcgtctttcacccggatggaggcgttagaggttgaagccaagagggtactggacgggatcgaggccgtgtatcgcgccacgaccagtcatgcgctcgctgaggctttcaatagcagggctaacgcgcttcgggtatcggttaggtggtgggtcggccttttgatcggtgcactcggcgctggcgcgtaccttggctacctcagagtccaagcaatctccgaactcacaaaggacccgacaagccagcagttcatgtcattgatctgggttcaggtcgcccttgggacgctttcccttgccgcgccactgtgggtggcttggctggctacgcgtcaaatagcgcagcgctttcgcctagcggaagactactcatttaaagcgtcccttgcgacggcctatgagggctaccgtcgcgaagcctcacgaatcgatccggaatttgaaaaggacctatttgggtcggcgctccgccaccttgaccaagagccgttgcgtttcatggcggagactgatcatggaagcccttatgcggagtttttcgcgtcgccaatgttccgtgaagctctgaaaaaggttccaagcctgtctgaagaccttaaggacgtagtgctaagggctgtcaggcgaactgagagtcctaacaagtttaggtcaaaggacccgcctcacgggcctcgcacggcggacgatgatcagcaatga

SEQ ID NO: 534222 - DNA, 369 bp, Stenotrophomonas maltophilia
atggccaaaaaggttgtttttgtcgctttcgcaatcgaagacgttgcaattcgagacatgctcaaaggacagtcgctcaacacaaagacgccctttgaatacgtcgacatgtcagttaaagatgcctacgacgaagagtggaaaaagaaggtccgtactcgaattcttcgttcagatggcgtcctggcgatcgtgtcggcgaactcgctgacctctagcggacagaagtgggaaattgcctgcgctaaggcggaaggcgtgccgctaaaagggatctggggttacaaggacgataggaccgcgctcgccggcgtcagcaccatgacctggacctgggcaaacctcgaagactggatcgacacgctgtga

SEQ ID NO: 534223 - DNA, 972 bp, Stenotrophomonas maltophilia
gtggtgggcgtggacttttacgctcacgtctctgaccttcatggatgcgtcaatgactcgtttgcggtcaaggcgatgctagatcggcatgctgacgggtcacccaactttggcgtccggcatctaacggcgactgggcctggcgactcagtgacccgggaggaaatgcgctctgcgatcgaagagctgtttgctggggaaggggaagttgcgttgctgtattttgcaggccacggacacatcgaagaaaccggcggctacctgtgctcgtcggagatccataccggacacgatggcctgccgctttcagaaatcatgacgatggccaaccggtccaaaatggccaaccgtgtcatcatcttggacagctgccatagcggggtcgcaggcggggcggcattgaaccagcgcgtcgcggaaatcagcgatggcgtcacgatcctgactgcttctacggctgagcaatacgccacagaagaagacggcgctggcgtcttcacttccctccttgttgatgcgctggggggagcggcttccaacctagttggtgacgtgacgccaggtggcgtctatgcccacgtggatcaatcgttgggaccttgggcacagcgccctgtttttaaaacaaacgtgaagacctttgtgtctctgcgcaaagtccagccgccccttgcactttccgacctacggagaatctcggaactgttccctagtaaggggaccaccttccaactggacccttccttcgagcctgagcgttccgccgactgggaaagggatcccaacggcattccccctcctgaccccgagaacgccgccattttctcagtcttacagaaatacaatagagtcggcctgctcgtgccggaaggagcaccgcacatgtggcacgccgcaatggaatcgaagtcagtccgactaaccgctctgggagagcactatagggcactggcggcaagaggtcggatatga

SEQ ID NO: 534224 - DNA, 288 bp, Stenotrophomonas maltophilia
atgaacaacgtagccgaccaaaatcttgaccgcgccatggaatatctcgtggagcagcttgcttcgattgaacacgagagatgggcccattggcaggcctacttgcacaagcagggccagcgccagaacgacggcagcatcgttctgcctgccgagctcgtgtcgaggtgggaacgccaaattgcgacctcatacgcagagcttactcccgacgagcagagctctgaccgcgaacaggtcatgaagtacttgccgctcataatgaagatgctgcaattaggcagctaa

SEQ ID NO: 534225 - DNA, 450 bp, Stenotrophomonas maltophilia
gtgccaattcgggcggtggcgtatgtgagtgaagcttcggatcttctgactggagacaagctggggctgcaaggttcgaagctggacgatctggtggatgacgctgcgcgcttcaaccgcgacgcgggcgtcagcggggtgttgctcttcgacggtgccaggtttctccaatacctagagggcccggcggatgggctcgacgttgccttctcccgcgtgctcggggcctcgagccacctccatctgattgagttgcaacggggcgctgtggcagaccggcgtctgccctattggccgatgaggtggctacccgttgaaacggacgaactgagccgggtggcggccagcgactggaccgcgttcaaggtacggggagatggcgaagcactcaacgcgacggcaattgaccgtctgctgttcctggtcagccggcgagcgcttgtcgactaa

SEQ ID NO: 534226 - DNA, 984 bp, Stenotrophomonas maltophilia
gtgagagctgcgtactacgaccgccagggcccggccgatgtggtgcttcgtgtcgccgagctgccgaccccgcaacccgggccaggcgaagttcgggttcgggtccacatgtcggggctgaatcccacagacctcaaggcccgcacagggttctcttcggcgatgccgtttccacgcatcattccccaccaagacggggcgggtgtgatcgatgcggttggcgacgcggacgaggtgggtcgtctagggcaacgggtctggatctatgaagcccagcagggccgggcgagcgggacggcagcagcgttcgtggtggtgccatcagggcatgccgtgccgctgcctgacgatgtctctttcgaggtgggtgcatccctgggcatcccggcactgacagcccatcgctgcctcttcgccgatggcgccatcgacggccgaagggtgttggtgcaaggcggggcgggcgtggtcggcaccgccgccatccttctggcgaagtgggcgggagcctgggtcgcggcaacggtgatgaatcccgagcaggcaatcattgcccgggcggccggagcagatctggtgctggaccgtctgaacgacgatgtcgccgacgcgattcaagcgactacccggaatgcgggcgtggaccgcatcgtagacgtcaatgtgaaggcaaacctcgatcttgacctcgcatgcctcgcttctggtggggttatcagcgcttatgcaaccgtaggggcaaccgatgcgctttcactgccgctgttgcgtgcgatggtgcacggttgcgtgctccgcttcgtgtacatctattcggtccctcaagaagcgaaagacaacgcgatcagggacatcaacgcatgccttgccagcggcgcctattcgccccatgtcggccttaaggtggggctggagaagatcgccgaagcgcacggggcacttgaagcgggatctgtcatgggtaaagtcctcatcgccatttga

SEQ ID NO: 534227 - DNA, 333 bp, Stenotrophomonas maltophilia
atgccccgtagcgcccctcccgagtaccgatgtgccgtagaaatcaccgtggacatcgcgggtggcaagtggaagccgttgatcgttcactacctgctgagcggaaccaaacggtttggggaactgcgaaaactgatcggcggagtgacccagcgctcgctgaccttgcagctgcgcgagcttgaggcaagcggcatcgttcgacgcgaagtgttcgcagaagttccaccacgcgttgaatacacgttgacggcgctaggcaccacgctggcaccgacgctggaagcaatgaagtcctggggggagcactatctggccagcaggaacgactag

SEQ ID NO: 534228 - DNA, 906 bp, Stenotrophomonas maltophilia
atggacaaactcgatcagtaccgcatcttcgtccaggttgccgagatgggcagtttcatcaaggccgcccacgcgctggacgtgccgcgcgcgtcggcgtccgctgccgtccagcagctcgaattggccatgggcacacgcctgctgcatcgaacgacgcggcaagtgcggctcactgccgatggcgttcagttgctggagcgggtacgccagttcctctgcgatgcagaagagatcgagcagctatttcatgccagccaacgtaagatctctgggcggctcaacgtggatgttcccagccgcatcgcgcgtcggctgattgctcccgcgctgcccggcttcttgcgtcgctatcccggcctccagctggcattgggttcgaccgaccgcgcgatcgatttggtgctagaaggggtggactgcgccgtgcgtattggggcgctgcatgacagcagtctggtcgctcgtcccttgggccatatcgccctgatcaactgcgccagccctggctacctccgtgagcacggcatgccggccaggccggaggatctgctccaaggccagttgtccgtgggctatgcctcgccttccacagggcgggaacttccttgggactacgtcgtgtcgggcgaagagcggctggtcgtcgttcccagtcgggtgatcgccaacaacgctgaaagctacatcgcctgctgcgtggcgggaatggggttgatccagattcctcggtttgatgtccagtatctgctcgacaggggcgaactcgtggaggtcatgcccgactttcgcgccgcgccgatgcaggtatcgcttgtctaccccaaccgtaggcagcgctctcggcgactcaatgccttcattgaatggtttgaggcgctgatgcggccccacctcgacctctga

SEQ ID NO: 534229 - DNA, 1188 bp, Stenotrophomonas maltophilia
atgtccagcaggcccggttcggagcatccgttactccgtcatcgcgatggccaccacgcgcgggtgacctacgaagagctgttctttgatctggtctacgtctttgcggtgacccagctcagccacgagctgctgcacaacctcaccggcgtcggcgtgctcgagacgcttatcctgtggttcgcggtctggctgggctggcagtacgcctgctgggtcaccaactggttcgatccggaaaaaccgcgtatccgcggcatgatgttcgtgaccatgctgctcgggctggtcatggcggccagcatcccgatggcattctccgatcgggggctgatgttcgccggcgcctacgtggcaatgcaggttgggagaacggctttcatcgcgctgcaattgcgcggcgggcatccgctggcgccaaactaccaccgcatgctgggctgggtgtcgatctcggcggtgttctggatcgccggggcactggcgcagcatgaggcgcgtgcgctgttatggctggtcgccgttctttgcgaatacgtctcgcccatgttcggctttgccgtgccggggatgggccgttcgcgcacgcaggaatggaccatcgagggcggccacctggccgagcgatgccagctgttcgtgattgtggcgctgggcgagacggtgctcgccagcggcgccacccttgccgctgcggccacttgggatgtaccggtggtgctggcactgctggccaccttcatcggcacattggccatgtggtggctgtatttcggcacgtcgagcaaggatgcgacggctgccatcacacgctcggacgaccccggacgcatcggcgcatatttccattacgtacatgccatcctgattgccggggtcatcgcctcggcggtcggcaacgacctggtgctcgcccatccccatgcccatcccggcctggcgcagacggccatcttgctcgcagggccggcgatctacctgctgggcagtgccctctacaagcgggtggtctatggcgtggtgccggcgtcacacctggctggcgtgctgatgctgctggccttggtgccggtggcatttgtcgtggatttgctggtcatgggctggctgaccaccctggtcgtgctggtggtgagtttctgggaggggcgcctgctgcgggagcgtcgccgcaacgacaggggatga

SEQ ID NO: 534230 - DNA, 270 bp, Stenotrophomonas maltophilia
atgcacgtactgatggtgatggccgcaggactgctcttgctgggcgtattcgtcctgttcggctggctctggggcgcgaacacggcaggcatggtgctggcggccaaggtcttcgtgccggcctggctggtcgtggccggtgtcaacatgtgggtgggcgtggcgcatgccggttacagcgtgcgcgatgagcttccgatcctgctgctggtcttcgcggtccccgcggttgttgccggcctcatcgtctggcgcctttcgcattcgtga

SEQ ID NO: 534231 - DNA, 756 bp, Stenotrophomonas maltophilia
atgcaagcgtctgacctgaaagttgaaacccgcatcggcgtgaagcgcaagccgcgccgcatcctgtcgatcgtctccaataccgcccagctgaagggctttgcggtgggcttctttggcgaagagatgacccgcgccttcctgatgttcacagaagccgggcatcgggtggacctggcgtctccggaaggcggggaggtcatgattgacacgcacagcgacccgcgcacgcccggcggcccctacgccgacgacctggtcaccttgggctttgtccatcacgccaggtttggcgcactgctcaagcagacgctgccgatcagtgcggtgaacgtggacgactacgacgcggtgtgggttgccggcgggggcgggccgctgctcaccttcaaggacgccccggcgttgcacgcgctgatcgccgacttctacgagaaggggaaggtcgtcgccttgatctgccacggcgcttgcctcctgctctggacgcggctgtccgatggcaggttgctggccgaaggcaagacctggaccggcttcagcgacgaggaggaggacgaggtcaacaaggcctttggcatgaccctgaacgactacaccatccaaggcgaagccgcccggatccagggcaccacctaccgctgccggggcgcgaacgaaccgttcgcggtccgcgatggccgcttgatcaccgggcagcagcagtacagcagtgggctcaccgccgagctggtgctcgatgccctggacgagtag

SEQ ID NO: 534232 - DNA, 327 bp, Stenotrophomonas maltophilia
atgacccaacgcattctcttcgtcctgagcagccacgaccgcaaggggccgactggcgccgccgacacggctcctggtggtttccgtgtttccaaagcctcgcatccgcatcgagtgctggctgacgcgcgctattacgacggcctgccgttcccgcttgccgatgccgtgcaggaacgcggtatccggcaatgcccgaaccgaatcttcagcagaagggggttagccagcgagaggctggtgctggaccagaacccggcttcggccaagggtgtggccgaggcgatgctgccactgctggcagcggcatccgtgggtcggatctaa

SEQ ID NO: 534233 - DNA, 264 bp, Stenotrophomonas maltophilia
atgaaaattgaggatttttggaatgccgctttccttgccgcgctacatcgactgcccgtcgcgcaggcaaaaaaagaggcggacctagcgaccgacgtttgcattgatcattggcatgcaaactgggagaaccgttcagttgctaacgcgccgaaggttcaagacatcgacattggcagcgtctacaagcctgtggacggcttgggtaacgcgatccgagatctcccacggctctggtccgccgatgaaaagcagggggtttag

SEQ ID NO: 534234 - DNA, 240 bp, Stenotrophomonas maltophilia
atggatgccgcggccaagcccccagggacgggtttacggcgtcccccgccaccggacccgccccgccatccctcagtagcccagcttttgacgttgcctctgcgggtgcagggcgcagccctgccggaatccaacacccctcagcaggcctcagccaccgcagtgcggggacgccccagccatgccagcagcaaccccgtggccgccagcaggccaccggccaccgggatcgccgcgtaa

SEQ ID NO: 534235 - DNA, 123 bp, Stenotrophomonas maltophilia
atgccgctgcgtacggaaaacccgccgttgatcggcgggtttttctatgcgcgcgtgaaactcctgtcccgaccgctagttacatcgattttcatgcggcggaacttcgtcacgcttgcctaa

SEQ ID NO: 534236 - DNA, 678 bp, Stenotrophomonas maltophilia
atggcgtctataacgaagaattggagtcaacctacgcatgctttggctcatgtcgcagctggacttaagctagttggctccatgatgaatctggtgaaggccggagcaggcaagccaaaggcaggagagcgcgctttgttcgcggcctcgatcgttttcctatacggcgtatgggagaactatgtggagcaactcgcaatcgaaacagctgaggttctgtctgcctccatccctcctgctaaagcgccggaaaagatcaagagggagttggagaataagagcgcttgggaactcagtgtttcgcctggctggcgagctgcgtgggtggaaatcgtcaagaagaaggcgattggggacgacgccgccgaaaggcagcacggaatcaacacagttcgccatggcaccgtcgtttacattctccagcttgcgggcattcaagatcccttcgctggggtcggggctgccccaccgcctcatttgtcgctagcgtcgccgtcggtgaaggacgcaattgaagcgcttgtcaggcttcgtggggatattgtacacaccggccaagtgccgaattcgctggtaaagtcacatgtaacggagtggacaacctttgtcgagcagctgactcagcaaattgacgcaacatgtcgcacccaatgcaaaaacctgttggcttcgtcttga

SEQ ID NO: 534237 - DNA, 762 bp, Stenotrophomonas maltophilia
atggcccagatcaggatcggggtcgaccccgacaacgcgctcgggcgtcagctgagcgacctggagaagtcgcagctgccctacgcagcctcacaggcggccaacaaagttgcctacgagatccgggagcggtggaaggtgcaggcggggcgggtgttcgatcgcccgaccccgttgaccaccaacgcggcgctctatcgcaaggccacaaaggacaagccgtacgccgagatctacatcagggacgaggccttcaagggcacgccgccggcgaagtatctgctgacggaggtcgagggtggccagcgtaggcgcaagggtttcgaacggttgctgcagggaaggggattgctgtcgccgagccagttcgcggtgatgggccgtggcgcccggccaaaccagtatggcaacgtgcccgccggccaggtcaccaagatcctgtcgcagctgggtgcccagcgggacaagcaccagaaccagaccgagacgagcgccaaacggcgcaggacgcgcgcgcccaccggtggcgagtacttcgtgatcatcaagcgtcgtggtcgcctccggcctggcgtctacgagcggatcagcactggctggggttcggccgtgcgctcgatcttcatcttcactaacaccgccgcctaccaacagcgctacgacattttcggcatggccgaagacacgtggaagcggctgatgccgttctacctgaagcgcgagttggataaggcgatggaaacagcgaggccattgccttga

SEQ ID NO: 534238 - DNA, 330 bp, Stenotrophomonas maltophilia
ttgaatcagaaggaattcatgcagcgtttcgacgccctggcgttcaaggcatttggagccgcaggcgttgccgatgccgctcatttcatcgccgacgatggaacggagacgccttgcaccgtgctgttggacgaaagcgtgcagcagttcggcgaagtcgacgccggcccggtaccggtcacgttcgatcgcatcaccttgcaactgagcgaggtcacgccccgcaaaggcgctgtggtccgtatcgacggcagcggtcgaaggttgaagcttgttcagccgctccgtgctgacgcttccactgcacagtgggaggtggccaatgcctag

SEQ ID NO: 534239 - DNA, 444 bp, Stenotrophomonas maltophilia
atgcctagcccccgccggcaactgctggaagcaatgggcgtcaccctgcagcagatcagcaaggcgaacggctacctcaccgacgctggcactggctggacgctggagccgacgcccggtgaccaggacacgacagctgtgctcactgctgtcatcgagaagcagcagcgggcgacggacccggcgaaggtcagtacgcaccggctgacgactgtcagcgtgatcgcccgagtgccgtcgcagatcgagaactaccaagccggcctcgatgacctggtcagcgacgtcgaggccgcgctggagagccgggagacggcccgcaactaccccgtgggcgtccaggtgccggtctatgtcggcatggagcccctgatgccggagaaagctggcgcgggctgggtgggagtcctgatcacctaccagaccaacatcccgaagaaataa

SEQ ID NO: 534240 - DNA, 753 bp, Stenotrophomonas maltophilia
atggccgaagattacagctacctgggcagcggcatcgtcctcatccgcgagtggaatagcggcctgccgttcgaggaggtcggaaacgtgtccgcgttcgcggtcgcgccgcagtcgaccacggtcgagctggccgactatcagaacccaggcggtggcatcgccaacagcgtggaccgcgtcaccggctacaacctgagctacacgttccacgacttcaacgcagccaacttcgcacgcgtgacgcgtggcaagtcgactgatgtggcagcggccaccgtgaccgatgaggtggccactgccgtggttggcgcgtatgtgccgctgtcgcgcattgcaagtgaaatcaccgatgtgaagccctcgaccgggtccacggcctaccaggccgggaaggactaccggctcgagcgcggaatgctcttcatccccgcgggctcgaccatcccggcaccggtagcgggtgcgcccaacgtcaaggtgaccttcaagcatgccgcgctggggcaggtcgaggcggccattaccagccagaagtactacgagatgcagttcattggcgccaatgaagcgcgcggcggcaagatggtgcgcttggtgtgccacaaggtcaccggcggcgtcatcgagagcatgggcctgatcggtaccgagtttggctcgggcagtgtgccgggcaagctggtgaaggacgtggccaaggcgacgggccctgacaagtcggcctacttctactggcagcaggagaagtga

SEQ ID NO: 534241 - DNA, 420 bp, Stenotrophomonas maltophilia
gtgcaggacatggacgccatcacgccgcccactcgctcggttccctttcgcggtgaggtgctcgtcgtggggccattgcggctcgagcagctggggccgttcattgcggcttgtcgctcgacgatcgggcgcatcgccatgatcgccggcctgcccgacggctccgcggcggttgacgtcggagccttggtgctggacctgctcgaacaggacagcaccgagattgccgcggctctggccgtggcagtcgaccgcgatccgaagtgggttgcgggaggcaacctggacgaggtggcccagcttctcgaggcggtggcgggcctcaatcgggatttttttgccctacggctgaggcgaatggtggtggcgatcagggaagcggtcagcctcccgcaaccgccgaccttgtccagttcctga

SEQ ID NO: 534242 - DNA, 2700 bp, Stenotrophomonas maltophilia
atggctgagccatctgccaacttgcgggtccgcatcagcgcggacctggccgacattcgtcaggggctgggtgtgctgactcggcagctgcgcgaagtgcgcagcgaggccggacggccgctgccagtgaagaaccagattagcgacctcggaatctccgctggccagaccgcacaggccatgcgccagctgcccgctcagttcaccgacatcttcaccagcttgcagggcggcatgccgttcttcaccgtgctggtgcagcagggtggacagatcaaggacagcttcggcggcgtggagccggcattgaagggggtctcgtcggcgctgctggggatggtgaatccgtacaccgtggccgcggcggctgtcggtgtcctggtctatgcctggtatgacgctgagaagcagcaggaggcctataccaaggcgctggtcctgtctcgaaatgaggcggcggccactaccctcacgctcgtgacgctggcgcagaacacgagcgatgcattgcaggtgacggcaggcgttggtgaggaggctgcggtagccatcggcgccaatggaaagatcgctgcagagaacatgcaggcggtagcaaatgccgctgtcgcgatgaaggagattaccggacaatccatcgaggaaacggttgccctctacgccaaactggcagaggacccagtcaagtacgcggccgagttgaacgagaaaatcgactttatgaccgtggcgctctatgagcaagtgaaggccttacaagagcagggtcgaaatcaggacgcggcaacggtcattacgcgggcctcagcaggtgaaacggagatggcgctcgcacgggttagggcaagccagaacccagtgattcagggatggaaagccatctggagtgaagcgacgaaagcatggggggccatgcaggcgagtaccggtgctggcccacaggcgatgcaaatgcagcagctgttgctggcaaaccagcgagacgttgcgacgatgaacaagggtgtcgcggatggcatgagtgccgcatgggtgtatgagtaccagcagcgcatcgagacccgcgccaagcagatcaaagaaattgcagcggacctttcgaaggagcgaaaggacgccgagttgaaggccgcacaggcagcgtctctggacttcgtcgccgagatggacggcatcatcgataagcaggaatccaagatcagtaagaagcgtgctgagattggtcggatcaatggcgaagctgagattgctcggaaaaaggccgaggcggctggccttacgaccgaagtcgagaagattgaagaacgccgtgcagccgcggtcgaagcgatcgagaagaagtacaaggagaagaccaaagccagcactgggtctgctgcccgaggcgcaggcctccaaggctacaaggacgacctggtgcaggaacaggcgaccatatcggcgagtacccagaccctgcgcgcggagtatgcagcccgtcagatcacggctgaggcctactacagccgcatgaaggaactgacgcaggccagcacggacgcggatgcgcgatcgctgcaggcacagatcgacttccttcagcggcagaacgtcgcgggcaaggaaggaatcacggtcaagcgccagttgggcgaattggaggcgcggctggccaaggtgcgcaccgacggggccgcgaagctgcaggtgctggcgaccgaggaagagcgcgccgtcaagacccgcaggaacgcgatcgccgcgtactcggacgcgctggaggccagcaacgacgccttgcggcgtcacctggagacgcgagttgcccaggttggcatgggtgatcgtgagttcgagatccagcagcgcatcaacgatgcctacgacgaccaggcggagaagctgcgccaactgacgctgcagcgcaatgccgaccagatcgacgattcgaccttcgaggaagagaaggcaatcctgttggccaagacgctggaccgagtgcaggccgtgcgcgatggctatcgggagctgcagcaggccgagggcaattggctgttgggagcagcgagtgcctgggaaaactataagcagcaggccggcaacgcggcgcagcagatgggggggctggtttccaacgtgttcggcggcctcgaggacgtctgggtgaagttcactgagaccggcaagatcagcttctccgatatgacccgctcggtcttggccgacctggcccggatcgcatttcggcaagcggcaatgggcatcgctaacagctttggcggaggcagtggatacaccggcaccttgggctctcttttctccggctcgtggggtttctccgccgggggctataccggcgacggtggaaagtacgagcccgccggcgttgtgcacaagggcgaagtggtttggtcgcagacggacattgcccgggctggtggcttgggcgttgtcgaggctatgcgtcgcggccttcgtggctatgttgacggcggcattgtcggtgctggatcgccggctcgtgcgctcgccggcgggccgtcagtcagcatcgatagcacgatcaacgtgcagaacggcggcgatggggctggcgatgccgctgccagccgtagctcagagagcgcaatccaacggagcttcaacgcaatggcggggcagtgggctatccagcagatgaagcccaatggcgttctgtgggcattgaagaatggcaggtag

SEQ ID NO: 534243 - DNA, 219 bp, Stenotrophomonas maltophilia
atgaaactgaaacttgagtcgttctccgcccaagagcctgtcggcgaagacggtcaatctgtgggcgctgtgttgcgcgttgtgtttcgcgatggcctgcccggaacgctgggtgtctctggcaccatcggcatttcgttcgagcaccccaacccggccggcctgacattcgccgaggtcgagcgcctggcgatcgatcgagtactcgacgcgatgtga

SEQ ID NO: 534244 - DNA, 348 bp, Stenotrophomonas maltophilia
atgaccgaaacattcggttggctggtctacagccaagagccgcaggtggagtacgcctacgcggagaaaacggcgcgctttggcgacggttatgagcaggttgcccctgacgggatcaacagcgagcgacagacctggaccatcgagctgtggggccatttgcaagcggatgacatggccggagttcgagcattcctgcgcctgcgcaagaccaggggcgagagcttcttctggacgccgcccaacgagcccatggctcagttccgctgcacaaagctatctgcaactgacgagcgcgaaggatacatccgcatcagttgcaccttcgaacagacgttccagccgtaa

SEQ ID NO: 534245 - DNA, 504 bp, Stenotrophomonas maltophilia
atgtccaggaaagtaatcgatatcgccaccgacaacggcacctggcgcggtgatctcgctccagtagcctttacgaagtgcaatgacaatttcgctgaggtctatcagaacgcggccaatgcgcagagttcagcggatacggccaagtcgaccgccgactcagctgccgccaccgcagcgacgaaggttagcaagggggcgaacggcacctggcctgacgcgattcctaccgcttcggcattgtgggggtatccggctcgtatccagaggtggaacagcaatacccaagatcgtccagttccctttggcttggcgatctgctggtcaacactcggccacttcaacaaggtcaacgacaactggatcagccagatggggtttggtactgacggcgaggtgtattacacgcagtcggtcaacggcaaccagttcatggcgtggaggaaaatctggagtaccggaaacaccacggtcgacgccaacaacttcatcaagcgagcctga

SEQ ID NO: 534246 - DNA, 471 bp, Stenotrophomonas maltophilia
atgcaagaccaagtggaggaaatgatcggctggatgcgccgacgaaagttggagtacggagcacccgtcctcgtgcagcacgcgatcgacgccttgaacttggcgcggctggaccggagcacagcaaccggcgtactcgaaaatctcaaatcccaaggagtcctgggcgatgctggggggcgttttgcactaacgacggctgggtttaatcgcatctacccggaaacggatgcccaatgcatcgagagtgttgtggaagaccttgtccggtacatggccgagcgctcgcccagttccgggtttcagttggctgagtacagcacggtcatgcgtcgtcgcctgaatccgaaagaggtagccttcataaatgctgctattgatcagctcgagaatgagggcttctggaaggtgagcgccagaggttcctacctgttgacgcaggccggtgccgatcgggttgcccagatttga

SEQ ID NO: 534247 - DNA, 312 bp, Stenotrophomonas maltophilia
atgacccaggaacaaatcagccacccggaagggttgccgaactgcgccgccggacaccgcgcgcgccacatccacgacaagcgctgcgcctccgccggcggtggacacctggtcgagtgcgcctgcaggtcgaccagcaagcatgccgatcccgacaaggctatcgcggcttggcgccggctcaaccgacccgagcgcagcgcgcgcgcaatgccaacggcgccctgcaacgttgtccagttcaagttgggattggccgaacaaacgtcgcgccaacagcgcgcggcaggaggtcgctatgggcgcagctga

SEQ ID NO: 534248 - DNA, 933 bp, Stenotrophomonas maltophilia
atgttcaaccctcagacctcgccggataccggcagtgccacttcttcgccggcatcgccggctggtcccttgcagctcgacttgctgggtggcccgacgaccgcgagctctggaccggcagcgccccgtgccagccgttctccgtcgcgggtaaaggcaaagcccaggatgacgatcggcacctgtggccccacttccttcgcctcatccgtgcccgacggcccgctgtcgtcatgggagaacaggttgcggcggcggttggcaagaactggctcgacggagtgtctgctgacctggaagcagaggactacgcctgccgggcggtcgttgtcccagcttgtgccgtcgacgcgccccatcgccgggatcgactctggtttgtggcccacgccgatggcgcacgaagcgcggctgggctaccagcgccgacgcggggacacgaaggggtcgcaggaatcgctcaccacggtggtggtgaatgtgtcggcgccgctgaacgatcctcgcgttgctggcctgtggccgacaccgaacgcctcgggcttcgaggcgaaggatccggaacgcctgcagcagcgcaggaaggagtgcaaggacagaaccgggaacgggaatgggttcggcctgaccctcgggcagttgatctgcttggagaaggcgcatgcggcaagcgtgtcgctgtatccgacgccgagggcatcggccaacgagaaccgcacgacgaagatcccgccctcgcagctggacggtcgacacggcctgtacctgtcgagcgtggccattgggatggagccagctggctcatcggccacgacggcaagttccggcgctttgaacccggcattcgtctgctggctcatggggttcctggccgagtgggacgcctgcgcgcctacggcaacgccatcgtcccgcaggtcgcggccgaagtga

SEQ ID NO: 534249 - DNA, 342 bp, Stenotrophomonas maltophilia
atgcgtccgaatcagctacttctgcgttgctttgccgaacgcgaggatgggttgtgggtggcgtattgcctcgatctttcgctcgttgcgcaaggcgacagcctgcaggaagcgcggcacaagctcgaaatgcaggtccgcgagtacgttaccgatgccctggttggtcaggaccgcgaacatgcggcttacctgatgacccgcaaggcaccgcttagcctttggttgcggtactactgggttggcttgcttgttgccaaagaccgtcttctccactctcagcgtcagcgcgtcggaaaggtgttcagtgaaccgcttccgatgaagcctgttgcctgctga

SEQ ID NO: 534250 - DNA, 243 bp, Stenotrophomonas maltophilia
atggtcaaggagcggccggtcacccacagggagttcaccgccgtcctcaagcacctagggttcaagcctcggccacagaatggcacctcgcatgtgcactgggtcaaagaggcaggcggcggaatccagaaagtgactgttgacgagcacaactcgccttatcaccgaaggatgcttaagctgatgatggcccaggctggtctcagcaagaaagacttcttcgagctgcttgaacaagtatag

SEQ ID NO: 534251 - DNA, 429 bp, Stenotrophomonas maltophilia
atgctggacccactacgcccatacgccgaccttcttaaggtactggcggccctggcgctggtcggcggcttgttcgtgaccggctgtcagcatggcgacgcccgccgtgcagcgagggatcaggcatccatcgccaaggccgacaaggcgcgcgctgcagcagagacaaacgcggccgagaaccttcgtgcggccactgcctgcggcctcctgctggaggacgtgaaccggcagacgcaggcatcgatcgatgctgccgcgcgtcagagggcggcagccgatgaagctgcgcgccaggcggaagcggcggcagccgagagcaagcgccgagccgacaaggctgagcaggcgctgcaggccgccaagagcaagccggcatgccggtcccaactggagatggccctgtgcgccgacataccgctgctttga

SEQ ID NO: 534252 - DNA, 255 bp, Stenotrophomonas maltophilia
atgctggtcgcggtcctgccgctgtgcgggttcggcagctgcagcaagacccagaagccggacatgccccaggtggtctacgtggcggtggagaagccggtggcgccgcccgctgcgttgacccagccgtgtccgatcaccagggcccaggaccggacggtagagcaggtggtgtcggcctacaacgccaacatcctgagcctgcagcagtgcaacaagcagctgggcgagatccggcagttgggagcgaaatga

SEQ ID NO: 534253 - DNA, 627 bp, Stenotrophomonas maltophilia
atgaagtacgcggtcctagtgggcttgttggttctagcgctgccagctgctgcgcgacaatcgcaagagcctggttacggcaagcctcccacctatggggaggcagtagaaatcgcattcacgtctatcggtggaatgatgcgtgatccggcaaacatgtatggatttgcgatatcgcgcccagaagcgacgtgtatgaggcgggggcaccctggacgatccgacgtgtgcggctatcgtatgtgcgttgtgttgaacgccaagaacgcttttggtggctacgttgggtttcgcaactacaccctgatctcaacgcccgagcgaggccctttcttttgggaagggggttgcaccgtgccgcagccttggctgggagatcctccagttgaggtcaggaacttttgcgtggacaacccgaagcacagcgcatgtaaggaagggttcaccgagtccttcgtggcacgaaccctggaggaaagtgttgcgaaacctgagtggatgactggtagcggccaaagcagcagcagtaagccagcagtggtggcaccgtgcagtgatgagttcaaagaccagttgagggcaaaaggaatgtcatacaaagacatttcggaagtctgtatcgactga

SEQ ID NO: 534254 - DNA, 792 bp, Stenotrophomonas maltophilia
atgaacggtcagggggacgctgtgattggatggaccgaggacgagctggccgccgctgttgaggcctatcgcggcatggaagagcgtctcgccagcggatcagacattggtaaggccaaggtctatcgagaactggctacccgatttgggcgctcggtcaaggcttgggagtaccggatgcagaacatttctcatgtactggaccaagctggtgagccctggttgccgggtctccgtcccgctgcgaacgttgggacgaaggttgagctgcagctggcgaagctgctagcggtttctggtgatgcgactacattcgtggccggccccacgaggaattcgttgcaaaggacggccagagatgccgaagttgcaggcgaattcgcttcagcggatgaggccgacgaactgcgccgggtggtcgccgcgatcatacagcgacgtggtcagccagcgttccgcaagtctttgttggcagcgtacggcagtcgctgcgcaatgacaggttgtgatgtggcggatgcactcgaggcggcccatattcggccctactctggccaatctagcaacctcgttagcaacgggctattgctgcgcgctgacgtccacacgctgtttgatctgtatctcatttcggtagatccggcctcactccgaatgtgtctggcccccgagttgcaacggtcgagctatggcgagcttgagggcaaagcgctagctgtcccggcgtcggtggaccagaccgctaacccggactgtctggcctggcatcattcgcagtgctggtggatttag

SEQ ID NO: 534255 - DNA, 1212 bp, Stenotrophomonas maltophilia
atggggcggcttcaggctaaggttcagggggccttgcttgccaaggggagcgagagcattggcgagaacttcactctgggcgtgcaagaagccgcggcgaaagtgctgaccagctcggagttccgtatcgtgcctgccgatggcgccaaggaggtgagtgaagacaagaatgccatcgagcgcttgacgcaccagcagttcagtgccctgaaggggctatttgagttgccttccgtcgccgtggttggacccgccggttccgggaagaccattctggccatgtggcatctgcagtcggcaatcgatgctggcgggagagggttctacgcctgttacaacaagaacctagctgaatcattgcggctgaagaatccaggtctcaaggagtatattcatagtgtcgatagcttttttggcaagacctgcccaggtgttgcgagagggagtgggaatttaagtgagttcttccgcgcaatacttccaaatgcagtattcgatcaggtatcggcatgggacgacgacgaaaagttcgatgccgttatcgtggatgaagcgcaggatctcagtgtggatcagcttatcgcccttcaggccttcaagaagaacaggggagggtgggcggtatttatggataagcaacaggatttgtacaagcgcaatgcggaagagcacgttgatgccgatgtcttgtacaggctatctcacaattgccggaataccgtggctatcaacaaggcgacgaatgcctatgtcggtagtgaagttgcgtcgatgcccggcatgccagacggagtcgctgttgtcgtggagaagatgggaaggcagcaaatggccaatcgtgctttccagttcgcaaaggaatggaaggaaagttccaataacagcgtcgctatacttagcccgagagtgatggcagattcagcgatgtctggtagttgtattggccacggtatcggtttgactgaggacataggagagcttcagcatccccagaaggcacttttctcaacggtcaaggcgttcaagggaattgaggccgactgcgtggttgtcgtggatgctatttcgccggaagtcggtgaaagatacttcgcgttagaagatctttatgttgcatgcacgagggcaaggacacgtctggtgatacttgtatctgatgaacagtcattcgcctactttgaacaaaagctggggaaggttcggtcaagctga

SEQ ID NO: 534256 - DNA, 6174 bp, Stenotrophomonas maltophilia
atggataacccggtcaaagcatacgagaaaatcaaggaaggaattcgcctttatatccagagcgcgttcaagaccaattctcgaagcttcgagatggatcgcgagacactgcttaagaagagtggagtcctgtttcaggacgcctatttggagccggttcccgcatatgcatccggaaagattctgaaagatcttgagactggagatcttccgggcatggacgaagcaggtgtcgatgcattcaaacgtatcgtcggtgccgggcttttcgatggcgattttcccttgtacaaacaccagcagcgcatgctcatggaatccatggcgggaaagcactgcgtggtggtgacgggtactggctcaggtaagaccgaatccttcctgttgccagtgctgggcacgatcattcgagagggggtagatgtttgggctggttgtaaatcctttgccagtccatggccggaaagaagtgtccggcatcaggtacaaagaaatcgtctgcgccgcgagtcgcgcgcagctgctgtgcgagcacttgtactgtacccaatgaacgcattggtagaggatcaagtgtcaaggttgcgaaaagctctggactcttcaccggtccgggcggccttggacgaggttttgggaggcaaccggatacgttttggtcgatacaacggtagtactccggtttccggccacccaatcgatacaagcggaaagaggaatagaagcaagatcgacgagtgcaacggcgccatagacaaggcaattgaggagagcgaggcaatcgatgccttagtcgtccgaaggaaggccgaatatgaatcgttggccgagaagctgggtgcactccccgttgatcatcaagacaggcccgctgaggatgaggtgaaggaggccaagtccagatacgagaaggcacttcaggctcgactatttgtgccaaaccttttgatcgattccggggagatgttccaccgctgggagatgcaacagaaccctccggatatcctggtcacaaacaccagcatgctatccatcatgctgatgcgtcataagcatgccgagtatgccaacgacacggccgatgcagatatctttgagaaaaccaaagcctggctcgccgcggacgagaagcacgtctttcaactcgtcgtcgacgaactccatttgtatcgtcaatccgcgggcacggaagtagcgtatttagttaggttgctattggataggctagggctttcgcctggccataagcaactgcacattcttgcgtccagtgcatcacttgaaggcgaggaggcttacgattttctcgggcagttcttcggtattggtcgcggcaatgaggctaaggctgtcttccacatcgagaggggcgaggccaagtttgctcctggtagctcggctgatcttggtgacgaagtcgcacgggaattgattggccttgtatctgcatacgaggctgggcaatggagggagccagcgcttgctgccagtgcattgcttaaagaatgggagtggcaagagcgattgcttgccccgttttttcacaacaacaggctaatagcgacttcgttggtcaatgttgcgggattctggttcccgcgcttgggggaggaggacaggaccaaggccgctgagggtctcttcctgatgctggccgaggtttcggagaaggaacctttcaaaagtgccctgccgcgcttccggttccattggatggcacgcaacatcgacgggctgtgggcaacgatcaggccagtagatatctcggaggacccgcaacggttggtcggcacgctttccccggagccaagcctgaacgccggcagccaaggaatgggccgggtcctagaggtcctgtactgcgaatgttgcggaacccagctgctttgcggaaacaagacggaattccgggagacaacgaaaggcccggcgaggaaaaccaggacgcgattcgagttaacggcgttgccatcggacattgatggcctgccggagggctctactgatgggcgtacggatgccaaatcgtatgactccctaggagttgtatggatgggcaaggatggctcgggtaccgatggggcttgggatcaagtcggcttcgagagaggctccgggatcaagcggaaggcagaatggaggatggctagaatccagcaggattctggcgtcgtcactctggatggaggcgaggcagatgggctgccttgctattggcttgatatgaaggctggggatcacgacatcattcctgccatgccgcagcgatgtccaagttgcggcatcgactattctgagaaacgtggcggacgcttcgctccgattcgcgcgttcgcgactggcttgtcgaaggtctcgcacatgttggcgacttcgctggtcggccagcttccggcaggggacaggcggaagctagtggcattttcggatagccgcgaatcagcagcgaagctagccttagacgtggagacagagcattggggccacttgctccgcaccatgttgcactccgagttgaggcaaaggtcatccttaagcctgaatcttctgaagaagcaattctgggatttgattaacgaggggcacgctaaacaggccgaccagatcctcgagaacctggaagttccgcaggatgttcgaagcacgcttgacgacttcattgggatcgctgaacggaagaagagtcggggcattgaccccgcattccagctggagctagacggactggaaagtgccaagccgggttgggtgcctctcgattccttgttcgcgcagcccaatcgcgatgaggtattgcctgttctgtggaaggtcttcgtgggacttgggacaaatccaggaggcgcctcgtatcacgatcgcatcgttggggacaagaacaagccgcgtgattggacgactgtcctcgatatggcgggcaatgtgcgccgtattggaggatcgcaaacccaggaggaagaggcgaaggagttgaatcgccgactcaagaagcggggttggagtgcactgtcaggtcgcttgctttacgacttggaagcgcgtggcattggtcatttgggcctgagtcctggcgttggaagcaaggcaccttccgggatgaaggccgagagcttcgcgcaggcatgtcattccgtaattcgtattctgactgagcagtacaggatcgacccaagcccttggggcaaccagcctgacgaagagtgggaagaagactctccgaatgacaagtcttggggcgcggcaaaaaagcgggttcgctcctatcttgaagctgtctccaagaagtctgggactggattcgagaccatccggggcgcggtgcgtggggcactcaagagtgctggtcaccagtggggtgtagtcaacttgatgtcgacgtacgtcaaggttgtcggcggtgttgatagcagttggcagtgcgagcgctgcatgcagatccattggcatgcgtctgccggcgtttgctcccgctgttgccatgacctggcagcggaggcgaaaggaccaaccagtgacgaaattcgctcgggccattactacggtcgcgaaggtgagcttttccggctacacgcggaagagttgactggtcaaacacaagaccaggcccagcgccagcgacatttccgtggcatctttcttgactgcgaaaaggtccgcgacattggcgagcgcgatgtcatgccactggtggatgagatcgacttcttgtcggtgactacgacaatggaagtcggcgtggatatcggctcactacaagccgtgttgcaagcaaacatgcccccagagcgtttcaattaccagcagcgagctggtcgcgctggtcgtgcgggtcagccctttgccgtggtgcttacctattctcgtggacagacgcatgatcgcctgcatttcgatcatccaggggagatgacggggggggtgccgccacagcccggtctagcgatgactaagggccagcaggttctagccgaccgcctgatggccaaggagctgttgcggcaatttttccttgaagaggatagggcagcttgggtagacacggctgaagacccggatacgcatggcgagatgggcatggttcccgatgatccgtctgccttggtgcgagagatcgcggtctggttgagcaaggagatggagcgaatccaaggcatcgcaagcgtattgagcgtcgcaagcgagatcagtccggaagacttgtcaaggcgcgtactggatttgccaggtagagttggtaaagcgtgcaaggatccggtttttacggcaatgactttggcggcacgcttggccgaggcaggcatccttccaatgtttggtatgcccacaaccgtcaagcccttgtattttgatctggaccggacgaacgaaagggccatggccttagataggcaggctgatcaagccgtggctgattttgctcccggctccgagcgcacttgggacaagaggaccctgcggcccctagcgcttgttggggatattcagaaacgaggcaaggagtggaaggctgtcaatcaggcggtacttggcgtgtatgagtacattcattgcgagaagtgcaaggttttgttcgttgagcgcatccgagatgatttgcaaggaaatctaaatcctggccaagttgattgccaaaattcagcatgtggtggagtggcgtggcgatacgccgccgtggtgccgagggcgtatgccaccgacctgaaatttcatgagccagggaaaggggatttctctggtcgatctggcagaaccacgatagcttcacctgcgctgctagatcccaagatagatgagtttgctggagcgtgcatttcgttcggatcacagcagcaggtcatgcgcatcaacacgaacgggaagagcaaggcgagcggtaatcgccttttctccttcgatttggctagaggtattcagtcatccagaggcgagtggttgaatcgatctgaggatgtggaatccatccttaagcttgatgagtctgggagttctggcgagtacaaggtggccttgtcatcgccaaagatcacggacattttggcgattagctcgaaagcacgtgatggcatcgagttctttaattggaacttggatacgcctcatgctgcgacacgccatcgagcggcgtggtactccgcagccaccattctgcagcgggccattgccctgaagctcgacgtggactccatggatatcgagatcgcgtccattcatggtttgcagccaggcgaaggcgagctatatcttgccgatgcccatgctaacggtgccggcatcgttgcttgggccagagaccactggatggaattgttggatgactgccttggcgagaccggtgaattcggccgccgagtcgtagaggagaggaaggcgaatgattcgggtgacagttggcgatcgccggaccgattactgaagggcttccgcaatcggcacatacatggcctgttggattgcgagcttggtctggatttgctccgttgcttgaaggacgaaaaccatgcacctggcatggaacctgcatttatgacgcaagctttggcattggcacgcagctattgcagtgcgttcccggattcgcgacttgaagaagggggcaagattgcaggatggaccacaggtgacatgttcgttggcgtcattcatccgctgtgggcgagcctcccagggcggctgaatggggtggccgaactcatcgctgcggccggtggtaaggggggcaggcaggtttgtctggtggacacgttcaacctgtcgaggcgcatggcatgggtgcgctcgcagcttttgggcgagaagcccccgtttctggtcgataccgcatctggcttgactgatgcatcttcaacgacggcgagattggccaggcctgccgtgcctacacagcctggcatgactttcgaagaaatcatggccttggcacccagcgatgcttttcaatggggcggcatgtcgtgggagagaataggtccgcaggacctcaattccattagcggtgaatccggtacttggttggctactcaggaaggtcatggtggcgtctatcgcctgcaggtgacggttgccggcccgaaccgccggatcaagcgcattggtgtggatgacggacatttgaagttggccgaagcggctggccacggcattgccgtcttagctagaaagaaagatgggagctaa

SEQ ID NO: 534257 - DNA, 2532 bp, Stenotrophomonas maltophilia
atgagccgcacggaagtcgcttgggcagacctggagaagtggacaaaagacaccggcgggcgttacggaaagttcacctttcgtagtttaggagcgcatcagttcgttggtctcgccaagtcccagatcatgattgccgcacgtgacatcctggtgctgcacgaaatattcgaacgacttggactggaagttgggcatggcaaggctgccaccagacttgaggatgttctggaagaggttcgcgcagatagctcgcgtgtgtcgagggggcttcgccaggcggcatttgatcctgactatagtgacgtactcgaggcgcggctggctgatgtcctgagtgagtggaaagggccccagattgatcaagaccaagcaaagggtggtcgagcaggcaagcgagctgagaatagaagcggagtgagattcgggctcacgctcggccccggtgaatcacttccgtggcgggtcattatcagtgttgaagacgaggcaatcgatcttgccgaggttgaagacgcccagtcactgaacgagcctagcgacaaggctacgctgacgggcgtgtcgatgcggcgccaccggttaggtggatgggccttgcccctttccgtcgaagagtcgaaatccttcctaatgcaggattcgttgactctgaagactcttcgaggcacgtttcctgtcgagctggcccggacagcccgagtgcttactgagaatggcgacgagaactacgagctgtgggacagcggatggcccgagtatggcgcagcggttgttttgtttccggacgtaagtgatgaatcgcatgcactgttcatttctgcttgccccgacgctagtccgtataagcctgacgagatggaaggtttgccgtctcactgggcgatgtactacttggaagcttgcgaacgcctaacggacgagcagcgcatgatcgtggagcccagtggcaggcgagtcaggttgctggtgttgcaaggtgggagcaagggtgagggcggatacttgcactacgacctacctaatgttctctatagagggcctccagagtggcgggttggagttgtagggcgtgacgatcttgagttggagcaagattcctacatccccctaacaagagccagcccgtcaggacgtgacgggaatgctgttgttaccaggtgctacggacttcccgctgcgtttgaggagggcggggaattcaagtttttcgtacgggatggaactggcaaggagagagggagctgctcgttgcgtgttcgcagtcgaactgccgcaaccacagcggaggatggagcagcttgcatggatcgattcggacggattgttaggggagtagaaggcctgcgtggaggattgccagaacatctcgtacgcgtgcacgagagggggcgaggtaacgaagtgatagcaagttcaaggtcgcgtctggatgtagggaagccagtggcctttgaagaatttaggaacagcccggctgtgcggttcctggattcactcgccagcacgggtggctattcatacgggcgtgccaagtcaaagctcgacaggtttttagcaagggcggggagcactcaggcgccgtggaaggtgcttctcgatctttggggtcgtggatatattgaacttgagcgtggtaaggacggcggcatcgaatacgtccattccgtgcccgcgaaagcctacctaatgcccttgaaggtcgatggatgggatgttctggggttgcttggtacgttgaacctaagccaatgggaggggctctgcgaggagtctttggcttgggaaattctcaagaacgatttcggcctgagtgaagagggcacactcccggtcttgaggctgaggagcaagatggcggcaaccttgctgaagcaacggctagatccgatcgggctgggtctgttgccgatgcaaggcttagccattgctgattgggccgccacggaacgcgacgtccgctccgcgatgctggccgagaccaaagagctcagtgaatccatccaatttatgaggctcaggcggttcgatccacatgcaattcgctatatggatatcaagtccgggcatccttcccctcctgaaggccgagatgaggctgttctttacaagtttgaggatgcgcggcgcaaggggtggcacagaagtatgtttgtctcgcggcaagggacgtcatttgcacttgacgagcagtggtcgaaatggatcgcgttgggttctgtcgcgcgaggctttggtcgtgcccctgtcttccatgatcaagaaaagaagtacttgtatgtgccagctaagttgcgacttcccgttgtgattgatcgcgcgcttcttctgtgtagcggctctcctccagtcgaatatcgcctagatgcatgggaggacggaacggacatcaagttcgggataaagtatgctgatacggtgctttttcaatttgatgaacgcttctgtcaaggcgttggaggcggagtctggttgcgttatgacaacgttccgactgccgtcatgaaggcaatttcttcgaaaggcaaataa

SEQ ID NO: 534258 - DNA, 1308 bp, Stenotrophomonas maltophilia
ttgcgtaaaaacttcttgagcgtcgtggatttgtttgcgggttgcggtggctttggccttgggttagaacaagcgggctttaccccgatattcgtcaatgaaataaacgccgacgcgcgcggtacgtatgtcttcaacagaatagatcgacatccacacttcgctcgcggtctggatgaagaaaaatggataaaccaattctgttcgaccgatgcgagaagaatgacgaagagggactacctcgaaagactcgaaagtagcttcaagtccgaattcgggattgcccacggtgagattgacctcgtagtcggagggcctccgtgtcagggcttctcaggtattgggcatcggcgctcgtattctgttgccaaggaagacttaccgtcgaatcatctattcaaagatatggcacgcatcataagccacctccggccgcgagccttcgtttttgaaaacgttcgtggcctgttgactgggcgttggacttctgatggtgaaagtggcgaaatatggaaggatgtaaagaaggccttcatcaatataggtggatataggctcgctgcggagttggtctacgccaagaactatggcgttgcgcaaaataggcctaggatcatgctcgtaggaattcgtgaggacatagcagggtccgttacgcgaaaggaagagatcgatttgatcgatgggactggcatatctagtggcttcctgccgaccggacgtcctggatcgtggccgtcactcgttgagctgttgggggatctcgtcgatccagatcaccaagaaagtggtgggaagacgaccgaatatccctcaagagtcatgagcgaaacgcagcgaaacttcagaacgtctgccgatggtaagagcgtggccggaaaaggatcgccagtaaccgagcacgaatacagcaaacaccacccaaaggtggtcaagaagttcaaagccatgatcgatggcatggacttcgaggcgacacgaaagttttcacaacgcgtgcttccgcgagagtggggggcaactggcccgtcgatcacggcaacttcgttgccggatgattacgtgcattacgagcagccacgcacactgactgtccgggaatgggctcgcttgcaaggatttcctgactggtaccaattcaagggcaagcgaactacgggtgggcttcgtcgcgcaggcaacccgcttgaaggaatccactttcgggaattgccgaagtacacgcagattgggaacgccgttcccgtgccaatgggacgggcaattggcgaacacctagccaaaattcttcgtgggaatagattgtag

SEQ ID NO: 534259 - DNA, 507 bp, Stenotrophomonas maltophilia
atgaaaacgcaagagcccagccgccatcccagccccgacccggccgagcgcgacgccttcttcccgtctccgtactcgctgtcacagttcacgtcggcgaagagcgacctgtccggtgccgactatcccgacgcgcgccgcgacggccgctggaaggtgctgatgatcgctgcggacgaacgctatctgcccactgccaacggccacctgttctccaccggcaaccatccggtggaaaccctgctgccgatgtaccacctggacaaagccggcttcgacatcgatgtggccacgctgtccggcacgccgcgaagttcgagtggtgggcgttcccgcgcgaggacaaggagatcggcggactgtacgaccgctacgaggcccgcttccgccagccactgccgttggatgaggtggtggcaggcctcgatgccgcatcggattatgcagccgtgttcattcccggtggccatggcgcccttatcggactgccgcagagtcgcgcggtaa

SEQ ID NO: 534260 - DNA, 618 bp, Stenotrophomonas maltophilia
gtgggtgagttggatgatcgagtaaaagaacttttgcggcgcacaaagataactaccaaatcaaggtatcgtgccagtgagaggcttgagcgccaccataaattctctcaatggacggtctccctaatttccgtcgcgctagttttcgtgccgatgatgcaggcatttaatattaagattggcgtcggtgcaatttatctcaatgcgacccaggcgattctcgctgttcttgtgcttgtttattcccttctacttgggcaggaaaacttcatttcacgttcggaggcgatgcagcgcaacggggtagagctgagtcgatacgcaagaaggctcgcgggtataagtgctcccgtctccgacgaatgctattcacagcttacagaggattactatgatattcttgagagatatggaaatcataagccgatcgactatctatatacccagttgaccgaaagtccaaaaaccttcggcgagagcgtggtgtattcctataggtgggttaaggcgagattgataactgttttgattttctcgcactatttcattgcaatggcctttgttgggtatgttttcattagcttgcttctttccatacaggagagctacgcgcgatag

SEQ ID NO: 534261 - DNA, 1821 bp, Stenotrophomonas maltophilia
atgcacacggaaaggtttcagcgattgaggaagaaggctctggatgctgcctttgagaaagaggctgctgtgaagatatggcgcagcacagtgcggagtcagttgcggaatatggatatcaaggatctctatgatcattatgatttcaattacaacataggggatcgaattcaagccataaaggcatcgatactggatgggacatactcaatcggcactccattaatttataagtccgaaaagaagtatggcatttgcaggcacatggttattcctcagcctgaggatgccttgatacttcagtgtctggtcgagaatatatctgcctctgtgctaaaaaggcagccttccaaaaatgcgttctattccagggacaagcacaacgtaaagaagcctcatgaagcggtggagtacgggttgagctttcgcgaccaatggaaagttctgcagaaaaagatatacaacttcactgatgacttcagctatttggtggttaccgacctcacaaattacttcgattcaatcgacctgagagagctaaggagagtgttctcatcgcaggttgaggcggaagaggtaatagttgatttgatctttaagatcgttgagggtctgtcttggaagccagactatttgccgtactcccatcgggggttgccaacggcgaatattgagccgatccgtttgctagctcacagtttcctgttcgaggtggatcatatattgaaggagcggactagtgagaacttttctcgctggatggatgatattacttgcggtattgatgataagcgcaaaggaatatctctgctcagtgacgtctcagatgtactaaagagtagagggcttgcgctcaatctttcaaagacgcaaattctttcggcggaagaggcgcaattccattttcagatcgataagaatttggagatagacaagtatgagtcaataaagcctggcacaaagaaggccaagacggtcgagcgtgaactttggtttgactataaggctcactttaaggataggtcgccgaaatcttgggacaagatcgccaagcggtatattacaacatttgggaaactgggtagtgatcgaatattgaatgatcttgctattcgctacatcgcaaaccctagtcttagaggtaattaccttatatatctgtcgatcaggggatatagtcgcaaggctgcgaattgcgtcctcactattcttaatgatattgatccttttgatgacctctcgctttttcagatatctagcttgatcactcaatgggcagtgccgctgaacaaatatggcgatgatttcattaagtgtgcccatgatggccttgtggctcattctgtgcgaaaaaaagatgcccaatcattctatgcacttctttggtttaagagtaaatatgatggcgcgaaggagctctacgcatttctaaagaagtacaggaatatatggcagaacaattcatttcttcgtcgccaagcgacggcgtccatggcgcgattcgggtttgcgcttgatgggaggaggcgggaacttctgggtagccaggttatgtctggcgtgccgacgacggtttccgttgcgaatcagatcgtgaatttttcggatctggagtcaattccatttggcctgagcgcatatctgtttccaaagactgcgtcgatgacataccctcattcaaaatttatcgtgctttgctctgttcttgcttccgaaaatattcggaatgattccagtgtggcgaagaaggtaatgaggcatgtgaccgatccccggcatttggaaattctaaagattgagtttaatttgtcattaagctaa

SEQ ID NO: 534262 - DNA, 759 bp, Stenotrophomonas maltophilia
gtgaccggaaagaagtcgatcgccgaggaactgattgacaagaacctgggctatatgcaactggcgctcacgtcggtgagtgtgctggatgttgccggcgacgtaacgctggatagcgcaaagacccgtgcgatgtggttcattgggctgggcaccggcggaccggccgttacggcgggcgccatgctattgctgtaccagatcgccatgtcattgttcattggttttggtccgctgttcatcctctgcctgctgtttgagcagacaaagtccctgttccaacgatggttgttctatggcatcggcaccatgttctcgatggcggtgttggctgcgatgaccggcattgccatggaaatggtggcgcgcgtggcggcttcgttctggggcgcgtctgcgctgggtgcactgctggggtcgaacctgaccgagggcatgagcagcatggcgctgcagcagggcggtatgggcctgatcctgacgacgctgattctgactgcgcccccaatggctgcgatgttcttccagggcaccctgggtaccttcatggcatattcgcagataggtggtagcccggtagcgcaggcgcccagctcaaacggccagccgccgggtagttacatgccgcctcagacttctaatgcggagaagcatgtttcaccaccagtaacctatgcaaccagtggaaggtctataggtgaaggcgggtctagcggaagtcttgggcctggtacgcatggcaaggctgctggaagttag

SEQ ID NO: 534263 - DNA, 654 bp, Stenotrophomonas maltophilia
atggctgacacacagcgcgaacgcgtgatgcacctggaaatcggcatggatctcgcagagcgtgtcgttctcgacctgctggaaggcggctggtcgcgccaggcgctgcggaagcacgagacggccgggccgacctcctgcggagccgccttctacctgctgcgggatggcgggatcgccatcgcccacttccccatcacggactttactgacgtgaacgggcgcggcctatgcttctcaatccgtgagttcttcccgccgatccacaagtctgcgcacggcgatgtcgagagcctgaagcctttcgaagtgggcgaccaggttctctcgatggaccacgatctggatggctcttggcactacgaagatgaagtgcgggccagcgactggcatcgtcggattcccgttttcacggtcgtttccgttcggccgcatcccgggcaccatacacagttcggcggcagggactactaccaggtgaaggtcaaggaccgcgtgggcggtggtggtggctgctacgaccttgtgcctatcgccggcagaccgtggcagatgcgtggcgaaggagagtgcctgatccgcatagggcccgcgcccttggcagtcgttgcaccacggcgggctctgccggcccaactggacctgttcgcatga

SEQ ID NO: 534264 - DNA, 681 bp, Stenotrophomonas maltophilia
atgagcaaagacaagacaaccctggcggacgtgcagcccggtgggagggcgaggctgggggatcaggctctcagcaccagcgaagaagcgcgccgctacgtcgccgaattcttcgccacgcagctgcgccgccatgacttcggcgactacatccgtaccgaactggcagctgacttcgcttgtgcgttggctcagcacctctccgcccagccctccccgggtggtcagggggatttaaagtcccgcttcacggaatgggcgaaggccaacagctacaacccggctacgttcgccagcggccgtttcatgggcgatggcgtacagattgcgtgggaggccgtgcaggcactcgccgcccgccagccggtgggggaggaatccgaataccttgccgagttgcaagcggccgtgaagctcggcggtatggaagtgaccgagcgcgcagacgaagacgggccgttcccgctgatgctggtgtgggaaggcaccatcaagcccgtgtccccgcccgcgcaggccgtggacctggggcccgtgcgcgtccttgctgatcacgccgcaggaagaatcaaccatgccaacaacggcctgtgccccgacgaggttgagggtcacgacacccgcgaccccgactgcccagtgtgtcgcgccctgatcgacagccaggcggtgggcaaatga

SEQ ID NO: 534265 - DNA, 342 bp, Stenotrophomonas maltophilia
atggtcggcggcggcgtcaccgcacaagcgccctggtgggcggccggaagcgtcgtcgcgctttggttgttccgtgaagcgtggacggctttgctggcgaggcgtaaggaccgcaccgaaaccgacgccaatgtcgatctgctcaatgggctcatccagcgcgtcaagtcgctggaagagtcgcaggctgcaacgaccttgaagctgactgaagagatcaagctgcgtatgaccgcacaggaggaagcccataggctgcggcttcgcatcatgtcgctggaggcggcaatgcgcggggttggcgctgtgatccctcccgaagacccggtggtatccgcatga

SEQ ID NO: 534266 - DNA, 492 bp, Stenotrophomonas maltophilia
atgatccgtgccctcgtcgtcgccattctgctgctgctgggcgtcgtcgtctggcagcgtgcctcggtgtccaacgcccaccgttcggccgaccaggccgcgtcgagccgagacgccatggagcgcgagcgtgacgcagcccgcgctgaggccgatgccgcgaccgaaaccctgaaggccgagcgcggcagcgccgccgccgcgaataccctcgcctccaagtacgaaaaggaaaaggacgatgcaaagaaagcttctgatcgcctcatcgctgatctgcgcgctggcaaccagcgcctgcaccagcgttggcaagcgtccgtcgccaccgcagagctgtccgcagccaccgctgccgccagccagcctgatggtcgagccgacgaccgaattgagagtgcgggcagagctattggcgccgcagcccagtgcgacgcacaggtgagggcgctgcaggcatatgcactgctgtgcacgggaggttccaagtga

SEQ ID NO: 534267 - DNA, 996 bp, Stenotrophomonas maltophilia
atgagtctggttccatcggtttatcgaagcactgatccgggcgcgccgcttctgtctggcgcgccgggggccctgatcgcgctactggacgcgctgctggtggatgggtatggcgtcggagcgggcagggtgaatggtctaggctggaccaaggaatttgggggagtgaacgttcgggcatatcgcaactcgcccgtgtccgggaccggctatttcctgcgggtcgacgacactgccgcacggtcggcactgctgcgcggctactccagcatgagcgatctcagtgcaggatcggatgcgaccccgtctgactcgctgaagtcgattggctccatgtgggagaagtcaaacgtggccagcggtgctgcacgacactggatcgcggtaggcaatgagcgcttcttctacttgttcatcgatacttccggcgcattcggatcccaaggcacccagggaacgcacgggcactacgccggcgatatgaactcgattcgtcccggcgatcgacacagctttgttatttcctacaagggaagtgacaccgagggcagcaacaacatcgggtatggattcaaggcccggccttggaacatgagcgcaactgtggatagcgaaacctgcgcgtttgtcgggcgctcgcattcgggggctcctggctctgtgcgattgttcctgtctgcgccagctgttacttccagtttgacagtgggggcgcaggcgaccttccccaactatccgtatgtcggtaacggcgggctgctgtatggaagtattgatctgcttgagggaccgttcacgcctcgcggttacctccccggcgtgtatgcgccgatacatcggcgccccttccccgaacagacgatcgtttcggatgttgatggactgccgcttggcacgagattgctcgccaagaatgtgactgctgacagcaccgctggatttgccgatacctggaccggccagatccttatcgacatcaccaattcctgggggtag

SEQ ID NO: 534268 - DNA, 177 bp, Stenotrophomonas maltophilia
atggtgctggagcgcggtagcggtatctgtgttgcgtcaacaatgagtaaggaagatggcacctggagagttgatcggctcaaccctgccacccggttcaccgtgatcggtttcgacgatcgcggactgcagaacgcggccattcaggattggattgctccagcagtgcgcgagtag

SEQ ID NO: 534269 - DNA, 234 bp, Stenotrophomonas maltophilia
atgtcgatagattccgaaaagaagcttgagctggttgcggggctcagaaagctcgccaacgaagttgaggctcacaactttgaaccgagccttcacgctaaaagattcattaggtatctcagcgagagcaatattgaaaagagcttcgaagaggttgtcgtgagcatggagagcttggtgttgctagcagctggaaagccttgctccaagtgcggcgggtcagggcgcgagtag

SEQ ID NO: 534270 - DNA, 1089 bp, Stenotrophomonas maltophilia
atgagtacccgattcgacccacccgagcgcggaccgctcggccctgacgtcgccgccgtcgtcaccgccccgatcgtcgcccctcccagcgaaagcgccgtttcctggggcgcgatcttcgctggcgccaccgctgccgctgcactctccctcatcctgctgatcctcggtgttggcctcggcctgtcgtcggtgtcgccatggtcgttcgaaggcgtcagcaaagagaccttcggttggtccagcatcatctggctcaccttcaccgcattggccgcgtccggcctgggtggctatctggcgggccgcctgcgtaccaagtggacgcagatccatggcgatgaaacctatttccgcgataccgcgcatggcttcgtgtcgtgggccgtcgccacgctgctgaccgcgggcttgctcacatcggcaatcggtggcgtgctgggcgccggcgcaaaggtggccggtgccgccgcgggcgttgccgcatccacggccggcgttgctgccgcgggcgcgggcagcactgccgcggcggccccggaaggcgacctcaactactgggtggattcattgttccgcaacgctaccgatgcgggtccggcagctgcaggcgcgccgccggccccgggcgcgcctgatgcagcgtccggcgtggcggcgacagatccggccccaccgccgccggctgcaagcgtcgggccgcgcgatgtgcgcgtaggcctgccgccgcgcccgatgccgggtaatggcccgatgggtgaccgccgcgaagtgcgtgccgaagtgaaccgcatcatcgtcaacagcctgcagggcgatggcctggatccggccgacacccagtacctggcgcagctgatcgcgcgcgaaaccggcatgagcccggccgaagcgcaggcgcgcgtgaccgatgtgcagacgcgcatgcgtgcggcgctggagaaggccaggaacaccgccaagcaggccgccgacgatgcccgaaaggcgaccgcctatgccgcgttgtggctgttcatcaccctgctgatcggtgcgttcttcgccagcctcagcgccacctggggcggccgccgccgcgatctgtaa

SEQ ID NO: 534271 - DNA, 1314 bp, Stenotrophomonas maltophilia
atgcgtatctggcagtggcaggcgttgttcggcgcagcattggtaatgtcatccggggggagctgggcgagcagcccggtcaccccgcataccgagtactacaaaaagatcaagagcggtgaggggctggcaccgctgacctcgagcctgttcggggatagcatcagccccagctcggggtcgaccgaatttgtcgttaccgacatcgacctgccaggcaacaatgcactgccggtgcgattgcaacgtcgtctcgctgtgcagtccttcaaggaccggcaaccattagggggattcggcagctgggacatcgaagtcccctacatgcacgccaccttcgactccatctggaagtggaacgagtcgggtaatggcgccacccagcgttgctcgcagaccttctaccccaagacgcgtaccggcgtgggcaccttcgagatttggaccggcgtgcaggtgcgtgtccccgaccagggcgagcaggagatgctgctgatcgccaacgcctccaacccgaaacccaccaacggtgaaacctatcgctggggtactcggggcaacatgcgcctcagttgcctgggctcgacggccaatggctatcccggcgaaggatttctgggcgtggatgcatcggggaatcgctacttcttcaatgtggggattgaacgaacggctggcttcatggagctgggccaaggcatggggtccaagctggtgcgtgttctgctgatggccagccgggtcgaagaccgtcatggcaactgggttgcctatgactatttgggcgacaagctggttggcattcgcggcagtgatggtcgcgccatctccattgcctatgccggggaccgcattgccagtgcggcagccaatggccgtacctggagctacgagtacaacgaaggttccggtgggatgggatttgcacgctggccctcgctgcgcgccgtccagcagcctgatggcgcgcgcttgggctacgaatacagctggcaggacggcgggttcggtggcctgaatccggaatatcagagctgggatggcgaaccgaagctctgcaccaagcccacgttcgagcagtctggattcagcctgatcgcgacccacccatctggaacgcgtggacagtttgagttcaagtacctgcgccgcacccgcctgggtgtaaaaaagtaccgcttgcgcagacatgggcggtgggcgctacgcgcaacgcgcctccaatgcgttcgacctcttcgcgatcaccagcaagacgctgacggggccagggttgggcaatctgacctggacgtacgagtcgggtggatatga

SEQ ID NO: 534272 - DNA, 810 bp, Stenotrophomonas maltophilia
atgcccgcagctgcccctgccgcccctgccattgaaggttccgcccggcgctggcggcggctggcctggtggtcgctgttcatcgtcggcaatgcggtactggccgcggcgattgcgctgggcaatgtaccgctgcgtgacaatccgggcggcggcgccggcctggcctatctggcggtcgccctgcccggccacctgctcgcgttcggtgcgctggccggcctgctgccgctgctgctgggcctgtggccacgcagcgcgcgtgcgctgagcatcagcgcggccgtgctgcagggcctgtggctgtgcctgctgctggtcgacgccaaggtcttcaccctgtaccgcttccacctcaatgccatggtcgtgaacatggtgttcggcggcgccctgcaggaccaggttgccctgtcctggaagacctggctgcaggtcggcctgctggttgccgcggtcttcaccgccgagggcctgctggcctgggcgtgctggaaactgctgccggccgcgccgcgccgtcgacgggtgctgcaggcctgggcggtggtcgcgctgctgatggccggcggccaggtcgccacggcctactacgacgcccgcggcgaccgtgatgtgatcgcgcagtggaactacctgccgtgggcgcagccgatcacggccaagagcttcatgcggcgcctgggcgtggtcagccaacagcacgccggcctgcccgacccgcgccatgcgcagctgctgtacccgctgcatccgctgcgctgccagagcccacatcgtcccaacgtactgatggtggtactggagtag

SEQ ID NO: 534273 - DNA, 546 bp, Stenotrophomonas maltophilia
atggacgccatcgagaagcgggcgcgggagctgctggctgctgaggttgatcgagacgctgcggcaatgcctggtgtcgaagaggtggcaacgagcatccgcgagggtggcaacggggatgtgcttttcgtacctaccgccctccgcgccatcaccgccgccctactgctgggtcggcctgttgacctgctggaccaggacggcgccagccggatcgaggcccaagaactccaggtagttccgtcgtccgcactcggggcagacgaagcaggtgccgtagggatcgaccaggtagccggcggtttcccacgggatatccagttggcagaggtcgcaccggaagtggtcgcatctgagcatttggccggtgtacgccctgaaggtgacggtcaggctacagcggaccattccattcgatacctcaaggtgattgctcctgaagccggagtcatgactgtgcaagtgtccagggacgatgctgaggcctatagcaagggccgcatcgcacgcagctttggaaatgccgctcacctggaggtgccgtga

SEQ ID NO: 534274 - DNA, 243 bp, Stenotrophomonas maltophilia
gtgagcaaacggaagatcatcgcagcagcaaagcgcaagggactggctgttgagtcagcgcattacggctggaccgcaacgccgggagagatggtgcctggttgggaggtgcagttcgggccggagatcgatgagctgttcgctgagtatgagatccagtacttcgacaactcggcagaggcggtcgaatggattgagagcttgcagtcgctggatgagccggccgacccggaggtggcctga

SEQ ID NO: 534275 - DNA, 261 bp, Stenotrophomonas maltophilia
gtgagcatcgacagcgagaaggagcggcgcaggctgcagcgcctgatcaaccgcacagccaaagcggccagcgcgttctacatggcaaacaaggccttgtgtgagttctgcatcgagaagtatggctgcgagccggccgacgttgactgcgaccagatcattgattcagtccaaggcggcgctggcgactctgcagggctgaccgctgacgagttcgacgcagcaatgcgcgaggcgatggagatgaagggatatggctga

SEQ ID NO: 534276 - DNA, 528 bp, Stenotrophomonas maltophilia
atgtacagcccgttccttagaaatctgcacacgggtcgcagtaaggcttcgctgatccacgatcacttcttccatcacgccagggcatacgctgatcggacgccaggggttcgatttgagcagttgaagaagctctgcatcctgcagttctcagagggtttcatcatccgcttcaagaaggtcgaccgcgatctcttgccctctggtcatctgacacagcaggtcgtaaagttccgcacccaccaagccttggacgggttgcctcaggcggttcatcttgacttgggatacgaggaagacatgctcggcaacctgcagagcgtgtttttgatctgtccttccggaccacgttccaacatgtgggtctccgaactcaatgacgaggcgcccgctacaactacggttgtgagcctgttcggggccagcaacacctctaatgaagagcccgccggcgcggtcatcgcgacgaaggcaaagcaggacaagtccaatgaagcccaatccggaaatggtgatactggcgcgtga

SEQ ID NO: 534277 - DNA, 594 bp, Stenotrophomonas maltophilia
atggttatcgagtgcgacttcggtggggtgcccatggacgctacatgcattcaattcgccgagttgccacccatcgttttcatcgacaaatctgtgcctggagatcgctggcgcttcactctggctcacgagctggcccacctcgtcatgcatgatcttccgcacccatcgatggaagacgaagctgatgactttgcgtcagaatttctcgtgccgagtgacgaaatatcaccaaacctctctcgccaatccgcatccaagttggcgacttacatgcctctgaaagagtactggcaggtatccattgcgatgctggtgcgcaagagtctgacgctcgggaagattgatgagaatcagaggaagtggctgattatccagatgaataagctagggatccgcaaggttgagccactgcccattccgcgtgagcagccatctttgtttccatcgctgatcaagcactttcgagaagagcttggtttcactgctgaggagttgggcgctgctctgatgtatctgccggagcgcctagacgagctttacgcagatgtcggtcaggagcgcgcccggccgcagctacggatcgtgcgatag

SEQ ID NO: 534278 - DNA, 795 bp, Stenotrophomonas maltophilia
atgaaatctcattcaatgaaggcgctgctggcgtctgtcctgttcttcgttgtcaccgtgccggcgcatgcccacgttcctgccggctcgatcgcggatgtccacggcaagaagccggggctgttcaagcggttgttccaccgccacacagatgctcctcagtgggacggcgtccaccccgacctgcgggccaagctggaaaggatccagcagcagatgaaagaggagggctatgacctgcgcctggccgagggctaccggtccgagcaacgccaggccgaactcctggccagccagaagggcgtgacccaggtcggcccgggtcgcagctgccacaaccatggcttcgccgccgacatggtcatccacaagcgggggcgacccagctggaacctcaagaacgaccacgttcgccagggatacgagcggtatggggaactggcccaggcggccggcttgcggtggggtggggcttggacggacttcaaggacatgccccacgtcgagcttcgggcgccctgccttctggccattcgttcttatagggccgggcaggaggtgagggtggcggccgtggtgcccgagcccttgccgcccctttggcctggactggacccgctggccatcacgccagctgaggagtgcgtcggcttcgtgtgccgccgcccctggcagtggagtgtgtccacgtcgcgtctcgactggagcgcgtggtggtcgttgccaatgcccgtgttcgagggtcctcaacagtgcccggtgagcaccgatttcaggacgccgtggcgggcttga

SEQ ID NO: 534279 - DNA, 585 bp, Stenotrophomonas maltophilia
atggacaaccgatggatgcgcgcggcccgcgtgggcgacaccgacgaactgcgccagctcctgcaggcgggcatggatcccggccgctacgtgctggtcgatgaaggcatggtgtctcccacggcagaacaggtgaccgcgcttcacctggccgcgttcggggggcatgtcgaggcatgccgcttgttgctgagggccggcgctgaggtggactcgctgaccttgccgatcgaggacaggggcgggggagacgcgccgttgatgcgcgcggtgtggggccgctcgattccggtggccctattgctcctggaagccggggccgacgtggacaacgtcgacgggttgaccggcgacacgccactgttagccgcggcccgatcgggccagccgtcgatgtgccagctgctcctgacgcacggagcagacctggaagcgttcaaccaggacggcgagggcgccatggatctggcggccgacaccgcatcattggacgtgcttcgagcctggcgagcggccaagaaggccgagcgcttggagctggcgtgggccacgcctctttccgttcccgcccggccgaggctgtaa

SEQ ID NO: 534280 - DNA, 765 bp, Stenotrophomonas maltophilia
gtggacgccttgctgcatgaattcggcaacgagccacagcacacttccgtagtcctggcccgtgcccatgctttgagcttggcccccgttgaggggcgacgcggcgacctggcttggcaggtgcgccaaggtaacgccgaccgagctctccaggtggatctccggtggggccttcaccgcttgaccttcgacactcccgagaacgcctcgacccgagacatggttagggccttcgagcggcggctgggtgacaagaacgaacccatgtcgttcagtgccattgccgatcacgtggcccgccttacccctgcccagcacacggggttgttccatgacctggccatggctgctgaagaggccagtgcacaacaggccgacgcccaacacttcagagacaacgctccatggcaagcctggctcaccggggcttcgcgtgcggggcacgaagcggccttcctggcctgcatcgagatgggggccgacgtgcgcatggccgatgccagtggcaacacggcgctccaccatgcgtcccgcttcgggcatgcccacctgatcaagcccttggtggatgccggggccgacgtttcggctttaaacgggcagggctgggcaccgctccacctcgcatcgctccacaagcacgcccgggcctgcgaccaactgatgcgcaacggtgccgacgccgagcagcccggctggcgaggacgcacccccacgcggatgcaccagcgtgagcgcagctatgagcaagcccaagcactatga

SEQ ID NO: 534281 - DNA, 141 bp, Stenotrophomonas maltophilia
atgagcatttatcggcgttgtcgcatctacctccggcggagcctccgccggttcgatggcgacgagttcatgttctggcttcaccccctctgggtcatcacagtgatggtctggatgatcttggcacccatcccgggatga

SEQ ID NO: 534282 - DNA, 519 bp, Stenotrophomonas maltophilia
atgagcgacacccttacccaacccatggaaaccctggacgacctgcggaccctgcgggcacaacgcaacgaaaagctattgggcgatcgaccacccgtccagaaggaagaggccagagcggcctacgatcagtccgtcagcaaggaccaacaggccatcgaggagcgccgccagcggttgctggattgggccgagaaggccagcccggagcagatcgaggccctgcagaagaagattcaggaggccgacaagaccaaggctgaaagccaacccgacaaccagcacgaacaagtggcctttcagacggtccagcagtggcgccagcagcgtcagggggaagagcagcgccctcccatgctgacccgtgaacagcagaaggagaacgggccggggcgcttgggctacgccgagtatgcccgcacggctcagaaggaagctgagttcatgaaggactatgagaagaacttcgactgggataagcacgagaagcagcgccagcggaacgtcttcagccagtaa

SEQ ID NO: 534283 - DNA, 2952 bp, Stenotrophomonas maltophilia
atggcattgaacatcaacattctgagcgccatcgactggacgaccggcctgggacgcaagttccaccgcaaggacaacgagggcgcgaccattcgtgaatctatcatcgtccagtcgaatgcgcagttcgagaacctggtcggacgtttcgatctgagcgatagggtgcgtagccgcgtcctggacgttccgtcggaggacacccaactcgctgccgaatgcggcgcggtttggaacgaggagcagaacgcgttcatggttcctgaaggcatgagcgaggacgacttccgtgtgtggtggcccaaggtccccgaagacctgcgcgacagccagtcccggatcaccatcaccaaggacgggcgccgggccgagggcttcctgcagggcaacgacatggggcagggcaatgacagcattgccactcccctgatgtatctcgcattccccgccatcggtgcgctgactctgttcctggtctcgatgatcggctgggcgggctgggccttcctgctgacgagcattccctacttcatcgcactgaagcagggcgagagcatgaaggaagcactgaaagcgcttgtgctcctccagtggattccgatgggaatgtccagcatgtcgaagatgagcgctctaggaatgggaggcgcagctgccggatcggcaggtttccaggcttacatggctttcttcaccaaggccctgatgatcggctttggcctggtgggtgtgatcttggtggtctgctgggtcgctgcagcatctcatcctcaccgtggggtcatcggcggcaccgccgctcggttcatccaggccatgaagtgggtgggcatcattgtggtcgcgctgctggtttccaaggtcctcccgtggggcctgggcgccgccgtgccattcgtcctggcctgcatgtatgccatgcaattcaccgagggcaatttcgttcagaccggcgcacgcctctgtctgcagaacaacgacaacaacctgggcacccaaggcgcattggtcaattcgcacgtcaaggcgcgcgagcagcaggcccagaacgccttgaaggacacgactccgctgatggccgtggcccgtgccctaggtcacctgactgacaaggggtttggctactcccccgacctgggcaccgtgatgatgctgtcttggaaagacgccacccaaggcttgatcatcttcggcgccatcggttcgggcaagtcctacagcctgatgcgcccgctggcgaggcgataccgtcgtgcggcggaggccatcgctcgcaagcagggcaagaagagcacggcgggaggtgcgctcatcgccgacggcaaggacggcgcgatcatcaccgacctggaaggcttgttcgacatcgtggtgaagccaggcctgtccgtcggaccttacgagggattggagccggatcagatcgtgaaggcgttgcgtggtgcgtccggtggcgtcgtggacgagaagtccaaattgtggtccgacggtggcgatgcgttcctctaccacacggggatcatcctgaaggctctggtcgagcacgagaaggtttaccgtgcttggtgcatggccaagatctccgggttggaacaatcccacctgctcttgcagctcgaagagcgcaagctccgcaagctggggcaggacaccgccgaggtggaagaacggttggccgaggtggtccaagagatgggactctactcctgcgtggtcgaatccgatcgcggttgggcctacacccccatgcatcacgccaagctgctctctagcgtcgagcgtgtcatcccgacggggacgcttcccaagcccaacccgaagatcatggaagtggtcaagtatctgggcctggaagagccagacatcagcatggacgaggagggccgtgctgcgcatgccgcttatctggccgctttccggaagcgccagcagaacgaaccgcaaacgatccacccggatcttaagcgtcccatgtcccagcttcagagctccctcgaatgggcgttgctggaagtgccggccatgaacgccgagcagcgtcagtcgttcacgctgaactcccgtgggttgctggaaaagctgttgcggggtgaaaagctccgcgacgccaacgacatcccctggcactcgatcgagaagggcgaggtggacgtttcgaaggccctctacggcgcgatggtgggcctgttcctgccacccacccaatacggtgaagcgggcgagatgatgatgcgcttgctgaagcagcgggtcacgaacggcatccaggcgcgcggtgcgcatggcgagaagtggcgagaagcattgcctggccaggtcgaggtcatgctgatgatggacgaggcgcacctgctgatcaccgccgacgacacgaagctcttctccatctcccgttcgctggggctgttgcccgtgttggcgacgcaagggtttgagagcttggaggacgcgtttggcagccgcacgcgggcagagttgctggccaacaccatgcagtcgttggtcgccctgaagtgttccttcaacaccgtggagtatctgatcaagcggttcggcgaagccatgttgaccaccttcaagcagaagacgcgtggcatcgactacaagggcgggctggacaactaccgtcactcggtgttgaacgaccctaaccacccccacgcagctgtcttcgacaagatgcgcttggaaggtgcaggccgcctgaccgcactccgtgtggacccggctaccggtcacacgtggcgaattggcggcgaagacgtcatcgggcaaggggagttggcccgtgacatcgacatgcctacgggtggcaagcgcgaagtccaacccctcttccgcaaggaagagtatccggccctgctggaaccccgcggccacgccatcgttgccttgaaccgtgccggccacaagcgcatcgacctggccgagttggttcccgacctggactga

SEQ ID NO: 534284 - DNA, 336 bp, Stenotrophomonas maltophilia
atgttccagtggcttttcacgcaataccgggaaccaggaaagctccacttcggctcgaagtggatgagccttcatgggcgaatgttcattggcagcccggagtcgctgggcatgggtcatctgagtgagcccgtgaggcgctcgttttattacctgcgcgccgatcgcgtgccgccggtggacaacgatgcggcttacgaggcctggaccaaggaccggctctacgcgagccaggtggagcaggtggctgagcgctgggtagcccaagcggggttcctggtgatggcgccgttgtgtgcggtgctggccgtcctggctcattggcttggcaactaa

SEQ ID NO: 534285 - DNA, 1323 bp, Stenotrophomonas maltophilia
atgacccccgaagaactgatccgcaagcgcaagcgcgatgagctgctcaagcgcgccaatgccgcgcaaccaaccacgcccaccgatggggagcagttggtgtccgagaacaccaaggaggcattgaaggccgccggtcactgggcaggggtgatcggcaagcgcgctgccgagttgacccagaaaggcgttgctgctgctgcagagaaggcgaaggaagccaaggcacaactggacgcgaagcgggcaaagaccgcagaggagcgggctcaggctacagaagccaactcgagcaccctgacagtccagccggccaaggtcgatgtggcgaaaaagtttttgaagaccgagacggccggttctctcgtggcggacggaatggctcgggacctaatttctgtcgatggcgaaggtcgggaaggcaaagctcctttcgctgaaatggcagtcgaggacttggtcgaagcattgtccgaccaggtgccagcagcaatggtcggtgaaggtgaagcacccttggccaacctgttgcagcgggacgtggcagataacctgtccgttcaatcggaatcggattctccatctttcgagggtgtctcgtccgaagtcatcgaggaagtgctggcccagttagtggaagctggaatagatgacgaacgcggatttctctccccagagccaccgggcgacacagcgcgggagatggcccgatcagttcttgaagaggccggttacgccaagacgtcaggtgcacgtgtgtcggatttggccgatgactccaagttcgcttcttctttggaagaccccttgggcgaacccgtgccgccgccggatgacgcctacagcgaggaagtgacgcagccgtgcattggaaccgacgacacaaccccaagactcaaggcttggccctggctcgtgggcggcgtggtggcggtggcattggtcgctggggcgacctatgtcctacaggggaagaacgaccagtcgccgctgagcacgcctgctcccgtagcaccagttgccacaccggccgttcccgagaagttgcccgaagtgatggaagcccccgtggtggcgcccgctccagcagtgcttcccgagaaggtcaggacagaacccacggttgagaagccccaacctgttgccgctccagtggtaacggcgccagcgccgattgcgacccagtccatgccgtcgcggaaacgcgcgtccgcccctttgccgaagaaggccccggcaccagccgcggcgcagaagaacgactggcagcaaaaggcgagcaacgatttggatgcctgggcggagaagtccgggatcaagtga

SEQ ID NO: 534286 - DNA, 645 bp, Stenotrophomonas maltophilia
atgaaacgtcactccctccccctgaccgtgtgcctggtcgcctgccttccgttggcagtcccgctccaggccttggcccaatccactcccactgaactcggcaacaccgaggacgccaaacctaagtccgacaagaagcgcttgttcaaggccggtggcatcggctgcgtggccggcggtgcactcgcttttgtcaccggcaagaaggacaaggccctggccgcttgcgctgcaggtgcagccgtgggcgccaccgcgtcttacgtgaagcagcagcgcgagcacgccgaagagaccgctgacgccgcgcgtgctgctggcatgaaggccgaggtcatgacgaagaccgagaccgtcgaaggcaagcaagaggcggtgctggattcgctgcgcttgaactacgaccccaccgacatgaagcggctggaccgcaacacccaggcgttcctcgacaagttcgccggcctgctgaccaagtcgaccaacgggctcacggtcgtgttccagggcaccgacaaggtcgcctgccaggtccccatcgtggagctcgccaagcgcggtgcgctctcgaaggtgacgttggacgaccgctgcggcaagggtgaacacgtcatcaccgtcacgccggtgcccgacgtccgttga

SEQ ID NO: 534287 - DNA, 399 bp, Stenotrophomonas maltophilia
atggcgttcgttcgtcaaaacgtaaatctcgaccgcgagcaactgagactggctcgccgtcttgcccgcgaaaacggggtggcgttcagcgcatacatgcgcgatgccctggagcggcacaacgcaagcgtcaccctgacgggcgcgctggagaactcgaacgcccacctggagttcctgcttgatcagctgcgggaggagaacgcgacgttacgccgctcccttcagctggaccaccagcggctgcgcgacgagatgagggccgagcaggcccaggccatcgaacgctacgaagaagcgcttcgccgtgtcctctccgctgcgatcgcgcccacagcacccagcaaggccgcggcaaaggcgcccgcggccaatcccatgctctccccccgcgtctga

SEQ ID NO: 534288 - DNA, 369 bp, Stenotrophomonas maltophilia
gtggtcgtggaacaagggaagtatttccaccccgtgggcggcagtgatcgcagcgggtggccggttatcccgccgtcctacatcgggttccgctacctggctgaattccgcagcgtccatttcatcgagcgggtggacgtgaccgaccatctgcaggacgtggacccgcgttggcccgaaaccaacgcgccgaatttcgtctacaccttggggccgccgatgaaaccggccaggcccatggccctgggagccatccacccgagcatgcgcaattgggtagcgttggacctgctgctcagcggcaaggcgagcaactacaaggacgccattgatcgcatgcgcgagcgcgttcaacagcagggcggatga

SEQ ID NO: 534289 - DNA, 408 bp, Stenotrophomonas maltophilia
gtgcgcggattgtttccgaagaaaaagagtcggctctccgcgcaaggcaaggccatcgcggccgcccacgtgctgctcgacagtgccgagggaacgctggacgaaaaggccgccggcaggcgcttgcgcgaggaggtggggctccagtggacctacctcacgtgtattcaatacctttcagggaaggaagccctgggtgccttgaaggcgttgcccaacggttggactgagcaaggacgcaccaagcttcatctgctgggtgcagccgttctggccgcgcagaccgtggccaacctgcgttccgatggcaccatgttgtgcgccagtcacctggccgaggaactcaagggcaaaacgatcgagcagtggctggccgaaaagaccgacgcagaacgggaagaagtctga

SEQ ID NO: 534290 - DNA, 945 bp, Stenotrophomonas maltophilia
atgagcctgtccaagcgaatgatgggattggacggcgagttgccggaggttgattcggaggccttcagtgacccggtcacctgcgaggtcgatgacgactggcttcgtgcagcagaacccgaacagcaagcggctgccatgaggcactggctcatggcgcgctattgcgatccagcccttgaaacgccctaccactccgaggtgggttacatctacacgcgaggtgggccctggcatccccacgatgtgctcatggaacgcttcgaggggattgctgacttcgacacgattgaagcgttggtcacggacatttcttccgagatcggcgacgagctggcaccgacggcactcaccgccgaagaagactgggatgtcgaggtcgaaaccgccgacagtcccatccaggatctgcggaagcgggtgggcgacctcatgctggtgttgcaaatgcaagggcccgaacccgctaagtttcaggcaaggaacttggtttacaccgcattgatcaccgcactggaaaccttcctgtgggaaacggccgtgtggtggctggccaacgaagatgacagcgtcgaacgtctggtggctgctcgcccatcgttcgcgagcgatcgccgcttgaaagacatggtgggcggtgagcagttggagctggaggtgcggcggcagcgaattcacgagggcctgaaggacgtggtctggcaccgctggcgcagcaactggccgtttctcgctgccttgttgggcatccagatgcccggctatgaccaatacggactcacggcggtggcgacgaagcggcacgacatcgttcatcgatttgggcagaacaaggaccggaccgaggccgtctatgcgaccactgccgaggtggaggccttggcggatgccgtgctggccttcgcagaagacttgaacgcccgcattgcggctagggggctgtga

SEQ ID NO: 534291 - DNA, 228 bp, Stenotrophomonas maltophilia
atgactaacctagaccagctcacggcccagctcgacgccctggaagccaagcttccggacctgctcgcggcctgtcccgccgatggcgacttctggatggcgtttgccggggaggccgacgcgatcgaagaccaggccggggaacacgtgggcttggtgagccagcggatcaacgcgatgctggcccggcacgggcgctacctggtggaagtggagccggacgcatga

SEQ ID NO: 534292 - DNA, 315 bp, Stenotrophomonas maltophilia
gtgattctccagcccaagccacccctgacggttgtcctgcccaaggtgccgctcccggcagccctgcgtgcctcgctgatcgcacatgccagggccgctggggtgggtgagagtgaggccgtgcgccagtggctcaccgcctacctggcacggcctcgcgcactcgctccggcgccctcgggctcccatgaggcacggctgccccccatccgggcttcccgggacctggtcgacgcggtgcgttccgaagcgctgcggcaaagcatgagtgtggccgaactcatccggcgggtcgtggcgacgcacgcggtttga

SEQ ID NO: 534293 - DNA, 636 bp, Stenotrophomonas maltophilia
atgtctgagtcgatgacgcgcgacagaccttccaccaccttcaagctggcctgctcccgccgggaagacctgttgggcgacacgttttcgttcgtcgaactgctgggcgcgccccttgccgcattgcgctggggcggttcgtggttgactcaactacagcttgatgggccggtaactgaggaggtcatgcggcgcttggctatgggccaggacctcgatgggcaacagcggttgtgggagggcgaggaccaccacacctgcgcggcgggctaccgggtttcgttgcgcctgcccgacggtttcgcggccttgctggacacggacgctgagcagagggctggcttacaagcggcccaccgccacgccgtggaccacgcactgtcgtctctaccgttccagcgggatcaccgggtgctctacgtcgcgtccgatcggctggagggcgagtggacgcatcactggttgttcgccatggcttgcgcaccaaacgggacatgggaacggctgacgcagagcttgagacagccggccagcgaggcggcctacgtgcacgccatggacgcgttggtgaagagcgccaggctggatcgcctgttccgcccggcgcctgcagccccttcgaggctacgattgtga

SEQ ID NO: 534294 - DNA, 1740 bp, Stenotrophomonas maltophilia
atgaaaagccgaaacgccattggctatgtcgtccaaatcgacggcatcgatatcacgcttaacctgatggatgttcacaagggacacctggcagcccatggtcagggtgtgtcggccatcactgaggtgggaagcttgttgggcattgagtcaggcgggcgtttgatggtgatgaaggtccagtctctgtcattcgcagagcctaaggaagttcaccggcacggaatttctggtgcatcggtgtcttcagagccattgcggcacctgtctggggtggttgtgggtaggcttgtgcgtgagggcgcgaaactatcgttcgtggctgattcgcttaccacgccctctctgggtgctgaggtttacccccttacggacgcggagttgtcagccattctgggtaatacgcagatatctccggcatctattcacttgggagacgatctgcgcggtgggggccgcttgatggtggacctggagcagctgatttcacgccacgtcgccgttctgggaagctcaggtcagggcaaaagctgctttaccgccgccgtgcttcaacagatcgtcaagatgcctaaggcgagggtagtcatcttcgatatcaacggggagtatgaggacgcgtttcctgccgctgcctatccccctggggtggtcaagaccacgcgaattggtggggccggcgcagacacctatcgcattccttactacgccctagggcgcctgggccttcagcgcttactgcttcccagtgacaagacccagcggcccgcgctgacgtttgctctggatcatctgaacaaagtcaagtggtttcagagtgggggcgctggtctagaaggtgacacgttgccatctctcttcgacgactgccgagtcgatcgagtagtagaagcagatcggattatcaagcagttgcgcgctaatcaagccgggcttgccactcaatggccgcccatgaaagcccttggccccctgattgctgacagccacgctattgctccgaacaatcgctctggtttggagcgcaattcatggaactacggaaacattgccccactcatcacccgaatcgcgcgattcgtggatgacgccatgtttcaggatgtcgtcaatgtggatggcggtccagggtgtggcggtccgttgagttggccaaatgaatcaaaggccgtcgttgagcgtctcttcggcgggacagaggtggattggcgcgttcacatcattgacttgcgaagggtttcgcatgacttgactcccttcgtgttgggggcgctcttagagctctatgcttacgagctgttcaagcgagggcaagagcacaagattgaaaccttgctcgtgctggaggaagcacaccattacctccggcagatgggggcgggcgaagaggcggtcaacaactcattggcttacgagaggcttgctaaagagggacggaagtttggacttgccctttggttaagcacgcaacgaccgtcagagatctcccctacggttctctcgcagtgcaatacatgggtgtcgtttcgcctgtcatcggaaaaggacttgacggccatacagttcgccagcgaatgggccgacaaacgcgaggttcgaaggattgcggggctggcaaggcagaacgcgctggctttcggcgggagcctgcagatggcaacgttgatcaaggcggccgcagcatcacctcttcctaggtccgaggacggtcggttcaatcagtgggtcagcgaggactaa

SEQ ID NO: 534295 - DNA, 1257 bp, Stenotrophomonas maltophilia
atggagatcgttgcctttcgtggggggaagaagatttccgaagaagcagagcttcgggcctatctggcgtccctgcttcggttggagaacgttgggttgctgctgggtgcaggggcttcgtgccatgcaggtggccaaaccatgcgtcaactttggacctcgttcctgttcgccgcgcccgacgatgccgattggctgctggaacaaggcttcatagagcaggaagagaggaactcgccgattcccaggccaccaccggcgcccccagtggtttccagagttcccaatatcgaagtgttgctggacaggctggagattgcacttcttgagtgggagcgaaagggaagctccatcctcaagagagcgcaagacgtgcgtctggctttctttcgtgccgtcatgcaagcggcgacgctcaaggaggattggtggaggtcttcgttgggagccgatctcgccgatgaactggcaccacaccgctccattcttcagaagctcacctcagcacgtcagcctggtcaggcggcgccatgggtattcacaaccaactacgatcttgccgtcgaatgggcggccgagtccgtggacctccaggtcatcaatggattcttgggcgtccatagtcggcgattctcgcctcaaagcttcgatctggggttccgcaacacccaggcaaagggagaggctcgttttggcgtttacaacatttacctggccaagctccatggatcgctgacgtggaaggaagtggatcaccaggtttttgaagtctccgcagctgaggcttggcgtgaattggagacgttccgcactggcttctccgactcgttgaagtatttggtccttcctcgggcggccaagtatttgcagaccgtaggctatgtgatgggtgagctattccggcggttcgcggaattcatggcgcgacctcaaacagccctcatcgtcagtggctatggatttggagatgagcacattaaccgcctgatacgctctgcattgctcaatccaaccctacaggtagtcatctatttgcccgagtttcaaggtgatccagtcgcgctctcgttgcctgaaactgtccgacgactgctcgcactacagaaccctcgcttgacaattgttggaggaggcgaacgcgcgttcacttccgctctggccgctgatctcccagaccccacgatttacgatcaggacttggccgagctgcaacggaagctgatgcctcagcggcctgatgacgaggacttggcatga

SEQ ID NO: 534296 - DNA, 888 bp, Stenotrophomonas maltophilia
atgttgagaaaacccgtcttggccaagtgcgacaaccgagcgcagttggccagaaccaatcccacgtatggagagccggatcagtggatgacctccaccaacctggcgtctttgggattggccgctgtctcgtttgacttcttcattgactggaacggaaacccgctgatggtgggcgacgagttgtgggtcaagcggatatccgatgttcccgttggcaatctccggccggaagatgtcaggcagggtgcgttggcttgcggcgatgacctgaaagccttagaagctttctccaaccgctacggcttcaccccacgttatatggttttcgaagagggtgtgaattgggcgaatgcgcccactccattgttggtcactaccctgaatggagcgcagttcttgaagggttccaaaaggacattgaacgaagtcatgggcgctattcgtcaattttctggtgggccggtgtcgatcggcgggaaggggttgttctacggcacgtcatcgctggagtgctacctctccaagaccaactcgttgtggcctggagatgccgattgcgtgctgtgggactccaatcagcagtgtgctgtagctctattggagtttaagaagcacaacttagacaccccccttgcccaagagggtattcagaactatatggccaaagacaggcggaagtgggagcgccttggattgcttcgcgaccatctcaatgttcctctttcgtgcatctactactcgaccgatccggctgaaacgcaggtcaagatcgagcgcctggtggggccatacaacagccttcagtcggggagcgaattgatgctacaaattgccggaatgtcgcacgctgcgctggggcaggccatcgcgcaagtggtggtctaa

SEQ ID NO: 534297 - DNA, 2637 bp, Stenotrophomonas maltophilia
atggccctctctctcaagatttatcagaagcgtgccttggctagcttggaggcgtttctggaagacgcgcgcctcaaggggccggctcaggccttcgaagacaacgtcgataagggcttggtgaatcaatacaagcccatgccgggccaaccggcggtgccctacgtgtgtctgcgtattcccaccggtggcggcaaaaccgttatgggcgcgcacatcatcaaggccgcggcagacacggtcctggagcggacccacccactcgttctttggatggtgcccaccacccagatcaagactcagaccctagacgccttctgcaacccgcgccatccctaccgtcaggaactggacgagacgtttggtggccaggtggctatcttcgacgtggccgattacgcccagatccgtccagcggacttgggcaccaaggtgtgcgtgatcatcggcacggtcgccgcattgcgcgtgaccgacaaggaagggcgcaaggtctacgagcaccacgaagacctggaagcgcacttcgccggctccactgccgatctggattacctggacaaggggcagaatgggaaggcgctggcgtccttcgctaacatgctcaagctccacggcccgttggtcatcatggacgaggcgcacaacgccaccacgaagctctcctacgaggtctacgagcgcttggcgcccaaggcggtggtcgaactgaccgctacgcccgacaccaccagctccaacgttctagtcagcgtgtccgcgttcgagctcaaagacgaaaaaatgatcaagtttcccgtggtgctcaaggagcacaacgggcaatgggaagtcgcggtcagcagctcggtggcccggcgcaacgcgctggccaagaccgcgttggcagagccggactacatccgtcccatcctcctcatccaagccgagaacgccaagggcacggccacggttgaggaggtcaagaagcacctgctggaggtggagaagatcccagagaaggccattgccgtggccacgggcgaccatcgggggatcgacggcgtcgacctgttcgccaaggactgtccgatcgagatcatcatcaccaagcaggcgctcaaggaagggtgggactgttcgttcgcttacgtattctgctcggtggcccaagtcaagagcgacaaggacatccagcagttgctcgggcgggtgctgcgcatgccctacgccaccgctcgcaagcaggaggcgatgagcaaggcctacgcccacgtcaccaccgaaaaatttggtgccgtagccggagagctgaccgacgcgctgttgaagatcggcttcaatcccatcgaggcagccaatggcattcggcccgaccccaggccgggtgatgatctaaacttgataggcggtgagcacaacccattgcccactcctgtgctgcgcctaacggtggcgcaggagccagacctgaccaacgttcccgcccgcgaccaggagcgcgtggtgttcgtgcccagcgaggacggcaagggcggggtggtcgaagtcaccggcgaggtggacgacgttacgagcgaagccatcgtggaggccatccccgccaaggcgcgcgaagagggggaggagaagctgcggcgccaccagcaggtggccgtggctgtcaaagcccccagtgagaatggggtggtgttcagcgtgccccgcctgtgcatggtggagcagggcgagctggaattcatcgatcgcggcgtggtcaccgccgacttcgaatgggacttgctggccagtccaccgaacttgtccagcttccgcttcaatgaagaaagcatgaccttcgaggtggacctggacggcgagaaggtgaattaccacaaaatcaaggacgacgtcgccacctaccttccgggattcgctcaggaccggacggtcaccgacttggtgggctggctcgatcaggaggtgcgggaccacaccatcaagcagccggtgctgcgcgagtggttgcgtaagtcggtggatggcctgttggatcggggcttttcgctggaacagctgctcaaaggccagttcatcctgcgccgcaagttgtccgaacagttgggcgcggcgaaggcagcggcctacaagcagggcttccagcaagcgttgttcgaaggtgggcttgaggtgttaaccagcaacagtcctgatcatgccttcacgtatccggcggacatgaccacctacccagcgcgctactactaccagggcccgtatcgcttcaagaagcactactaccccgtgcccggtgatttgagctggaagaccggtaagggcaaggtggccgaagagttcgattgcgcccaagccatcgacatgctggacgacgtcgagttttgggtgcgcaacctggtccatccgtcccagttctggatgcctacctccaagcagcgcacctacccagacttcgtcgcacggctcaccgacgggcgactgctcgtcgtggaatacaaaggcggtgaccggttcacagctgaccaggagaaagaaaaacgctcggtgggccagctgtgggcagagcgcagcaatggtaagggcctctacctgatggcgcaaaaggccgacgagaagggccagggagtgagggagcagttgctggaaaccatcgatcaatag

SEQ ID NO: 534298 - DNA, 1521 bp, Stenotrophomonas maltophilia
atgccactgctttcttggttcaaccgcgacgctgacctgacacgcgccgccctggctccctaccggctgctggagccggtcgccaagctttcctatggggacgaagattccccaaacatgctcatcgagggcgacaacctcgatgcgctcaaggccctgctcccgtattacgcaggccaggtgaaatgcatctttatcgacccgccctacaacacgcggaccgacttcgaacattacgacgacaaccttgagcattcgcaatggttgtccatgatctacccgcgtcttgaactgttgcggacactcttgcatcaagaaggcgtgatcttcgccaccatcgatgacaccgaggcgcactacctcaaggtggtcatggacgaaatctttggtcggtctaatttcgtcgccaatgctgtgtggcaaaagaaatacacagttgcgaacgacgccaagtggttctcttccacgcacgaccacgtgctgatttacgccgtcaacaagaacaaatggttccccaaccggttgtcgcgtccggccgaaatggacgcgcgctacaagaatcccgataagcatcccaaagggccttggaaagctacgccactgcacgccaagagcgggagcgcggcgggggccaaactcaaataccgattcaggaacggggtggtgtggtcgccgccaccgggcaccttttctcggtattcggaggccaccttggcggccatggatgccaacgacgaaatctggttcgggaaggacggctcggccatgccctcgcgcaagacgttcctggaagacatttccggtggaggcgtggtggctccaacgttgtggctccattcggaggttggccacaaccacgaggcccgagacgaggccaaggccgcggtgcccgatgacgcgtttaagacgcccaagccggagcggctgatacagcgaattcttgcgcttgccacgaagccgggagacctagtgttggacagtttcttgggttcaggcaccactgccgcggttgcccacaagatgggccgccgatggatcggcattgaaatgggcgaacacgcgcgcacgcactgccgaccgcgcctggtgaaggtggtggatggggacgggggcggcatttccgcgtccgaggactggcgcggcggtggcggattccgttttttcaagttgggggtgcccgtgttcgacgagaacggccacatccgggatggcatccgcttcgagcaactggccgcccacgtgtggttcgctgaaaccgggacggctcgctctacccgtgcgcccaaggaagcttttatgggcgagcaccatggggtgggctactacctgttgttcaacggaatcctgggcgacctcaccaagacgggtggcaacgtgttgacccgatccttgctgcgaaagctgccaaagttcgacggtcccaaggtgatctacggcgaggcctgcgctctgtccgatgagcagctgcacgaactcaacatagtcttcaagcagacaccctacgacatcaaggcgcgttga

SEQ ID NO: 534299 - DNA, 480 bp, Stenotrophomonas maltophilia
atgaagcgagcgaacgacatccgggcccagtatcagctgacgatggacgaggagggcatcctcctagccgcctcgcaaatcctggagcgccgcctgcagcgccaaggcgccatcaccgaccccagcgacgccgccgacttcctcaaggcccgctgcgccagcctgccgcacgaggtgttcggtgtggtcttcctcgatacccgccaccgcatcatcgccaccgagcatctcttccagggcaccatcgacggttgcgaagtccatccacgcatcgtggccaagcaggccctcgaccacaacgctgccgcggtcatcttctttcacaaccatcccagcggaaacccagagcccagcgcggccgaccgcgccctgacggcccgcctgaagcagtcgctggcactgctggacgttcgagtgctggaccacctggtggttgcgggaacctcgcacgtgtcgatggccgcacgggggtgggtgtga

SEQ ID NO: 534300 - DNA, 519 bp, Stenotrophomonas maltophilia
atgagcagacttgcccactcacggatgaaagccgccatgcccggcatgaccgatcccaccgctgccctcgtgtcctttcaagaagccctgtccgctgggaagctccgcctggagcgtggacgtgtcgatcccaccatctacctgcacgtggatcaggcccaaggaaagacacgattcacctacgtccatttggacggcaagacggtgacggcgttcgtgagcttcgtcatcaacgggatgttcgaaggacatcccaactttgctgcgggatacgccgttccagagccctatcgcaaccaggggaaggccaaggccatccttgcggcaggcattgcagagatgcagaacggctttcgcggccacccaccgttctacgttgaagcggtggtgagcgagagaaacactccgtctattaaggtggccgaagcggtgctgggtggggaacctgagtcaatcagagacagcatttcgggagaacccgccctccgatacgcaaaacagttcacacccgtcgcatag

SEQ ID NO: 534301 - DNA, 816 bp, Stenotrophomonas maltophilia
atggccattttttcagaacgacacaattacagcgcaccagatgcggagatcactgtccgagaagacgcccctgaggtattgcggggcgcgatcgtcatcttggccagcaaagctggaatgggatacgaaacccttcgaaaagaggtctgcggactgcttggcgttgctcccgacacccggggcaattggagcgagcccaatgtcctttcagaagttcagaatcatctggaggagtgcgattggttcgaggtgtatgacgtcatcgaggggatcgcaacatctcttcagggtcgccctcaaatctatggacaatcaaaatcgcctgcagatgttttcgtggacggaatcaacaagatctttcgcaagaacgggattggatggcagttgcttggcaaccgaattgaattccgtggatccgaggcatttgaggtagctgtcagggagggcacaaaggaactgcggagcgctgggaagaacacgacggccaacgaacttcatgaggcgcttcgcgacttgtcgcgtcgccccagtcctgagctcaccggcgccgtccagcatggcatggcggcattggaatgcttggctaaggacctgacaggggagcgcaagctaacgctgggggatcttatgaagaagcgtcccgaactattcccgccacccttgggccatgcggtatcccaggtctatggatttgcgtccaacaacgggcggcacctcttggagggtggtgaaccatcgctggaggaggcggagctgatcgtgggattgtctggggtgctatgccgatacctcggccgaaagatccctaaggcgtga

SEQ ID NO: 534302 - DNA, 492 bp, Stenotrophomonas maltophilia
atgagcctgtctgcctaccgtgttgctgtgaatgacatgcgagcacttcgacgccagacgttggccaaggtattccgtcccgggatgacggccattgaggcatcgcacgcgctcgccatgaaactgggctacagcttcacggacactaccgttcactccgatctgaaggcgcttgggcttaccccagtttcaggcaccgaaagggtgaggacgatgacccaggctcgccgactggaggtgaagaacggcgtgctcgcgggggaatcggtccagtcactggctgagcggttgaaggctccggtccacaccatcaagtccgactgtcgtgtgttggttgaagccggcgatctccccgccgatatgctcgcgcggggtcgagtcctccgtctcttagccgaaatggaacgttatgcgtctcgcttgagtgccgaagaacagatggcttatgaagcgctgaaaagcgctgtaaggttgaccgggttcacgccttag

SEQ ID NO: 534303 - DNA, 381 bp, Stenotrophomonas maltophilia
atgatgaatagagccctttcccacggcctctccagccccgacccgggcggcgtgcgagactctgcagatctcctgttcctgcccgacggaaaccgcgacccgctgcttcaggccctctacacggaatcgctggtcaaccgccgggacgtggacaccatcgaccgtctgctggacgaccaccgactggcctacggcgagcccgagcaagtggcctacgccatgctcagggacaaccagcacgatcgaccactgccgctgttgagcggcgacgtgatggtggatgcaggcctgcaacgctacctggcggaacaccgtgcgtggaacccggtcacccagcaggagcgcactctgtccttgcagacagtggggagggatccatga

SEQ ID NO: 534304 - DNA, 207 bp, Stenotrophomonas maltophilia
atgacgttaatgtggaggatggcggttgatatcctgcgccttctgttcgtcttgttcgtcgtttcatactttgcctttaaggcgattgcagtgggaactacttacgctttcattgcagtagctttcgcagcattgatgtttttcacgctcttcatgatggccttcagcgccgccatgaatgagcccctccgcagcgccgtccgatga

SEQ ID NO: 534305 - DNA, 312 bp, Stenotrophomonas maltophilia
atgagcatccgccacctactcaattcacttctacgaaaggaagccacccttcccgtaacgattgaatccttcaagcgtgcgcccggggcagtggtgatggacgaaaacggttacgccggactgtcgcccgaggcggtggatcagattgaacgcctgagaaagagcaaggggtggggtgtccggatctatgaaatcccagaactgaccgataaaagagtgctcaacaagatgatgaaagcagcactcaagtcagccaaaaggttgggtatcaaaccccaaaaatctgccctgaagaaaggagtgcgaaagtga

SEQ ID NO: 534306 - DNA, 216 bp, Stenotrophomonas maltophilia
atggaccatcccgacgctctccacgaaaccgccctcgatcgccaggatgccttggcagcgtccccccgtttcgtggtcctgaagccccccggcggcatccgcttccagctccaggacggcgatggcgaccccgatgcccgtctgaccatcaaccgagtgttgaccttgctggagagcgcgttggaggaaggccgcgccgttaccctccacgattaa

SEQ ID NO: 534307 - DNA, 246 bp, Stenotrophomonas maltophilia
atgaaatcgaataaggaacgaacgacgaagggtcagaaactctttcgcttcggcgtaagtggaaccgtgctcggaggaatcgatggagtggcagcagttcctgccaaaactcgggaggaggctgaagccaagctccatatctttggctggcaagaatacgttgagtgggactttgacagcatcgactacgatctgggtatgccggacgagttgtcgaatgtgtatgacatggagggcgtttcgtga

SEQ ID NO: 534308 - DNA, 192 bp, Stenotrophomonas maltophilia
atgacgagcatcaacgctcagtggcgcaacggcttcaacaccgctcttcagtcgcacttcgccatcaccatcggcgacgctggcctgaccgacaccgagctgtcccgctacgcggatctggagccgaaagccgcggcccttcagttcggcgaggactacgatctggaccgcgtcgaccagggttggcgctga

SEQ ID NO: 534309 - DNA, 372 bp, Stenotrophomonas maltophilia
atgttcatcggtttcagagtgacacgccgttgggtggtcaacatcatcgtcgcagccatcttggcccggctgtttttcatgggcatggacggagtcgatcggttctccagcgattggaatcgcgtgaccggagccagcatgcccggttcaagtggggtgcgcgatgtcgtcactgacatgcgctccaccttgcccagcgagctggacgagttcgtggcgcgtgcggaggccgacgcccgcaacagccgatcgctgatggacgtgatcaagagcgtggcaggcattgctgacacgtcttccgacacgactcaacccttgccctacggcaccactcaacagctggagagcccctatgaccgcttcgccgattaa

SEQ ID NO: 534310 - DNA, 243 bp, Stenotrophomonas maltophilia
atgaccgcttcgccgattaagcccctggcgcccattacattgcgcgactggcgcgaccttgcccttttcctggcaacaggtttgagtgggtgggtggtgctcaagatctgcgcccagacgctgaccgatcctcatgccaagcttccggacctggccatcggtttgggcgggatgctcatcacctatgccgtcatctctgcctggatcatggtgccgacggtgctgctggcaggtgccgcgtga

SEQ ID NO: 534311 - DNA, 192 bp, Stenotrophomonas maltophilia
gtgatcaccctgggcgccatcgtcaccaccgccctggtgatcctgttcctcgccctcgtcttcggcatcgctggtatccagtgggtgagcgccaagcataagcagggcgtggaacgccgccgctatctcctgcgcgctggaatccttggcgggttggccgtggcagtggtcctgtccctggcatggccatga

SEQ ID NO: 534312 - DNA, 171 bp, Stenotrophomonas maltophilia
atgacccggccggcctacgttcaactggctgtgagggtgcccccggagctcaaggagcggctggagagggtggccgatcaggagcaacggccggtgtccgatgtggtgcgcgagctggtcagggaagggctggctaagcgccatttcggttcgaagaatcaacgcccctga

SEQ ID NO: 534313 - DNA, 1383 bp, Stenotrophomonas maltophilia
atggaaggcagggattacggcgaggtcgtcagggacgggcgattggcggcagaactggagtcgcttgatgggaccccgcgtttcgtctgcccccactgcaaggatgcgatgggcgtcaggtccaaggccatccgggcgcgcaccgaggtccggttctatttcgatcacctaaccgcccgcttccgtgagagctgcacgggacgcaagggccaccgccccaaggccatcctcgcccgcaagttcgggctgaacaaggaaggtgccctccacaaagcgttcaagcgatgggtgatggaaagcttggatgcagatccaaccttcaccgacaccaaggacgaagagcgctggtgggacatggagcactacaagtggcgccagcccgacgtgcaaacccagcgaaatggccagcggtgggccatcgaaatccaattgtccaccacgtttgtccacgtgatcgccgagcgcatgaagttctaccgggacggtggcgggcgcatgctctggttgttcaaggagctcgatctggaggcctttaagctgtcggaagacgacctgttcttctccaacaaccgcaacgcgtttcgggtcaccccggagacggtggcccgatcgcagttggaaggccgcttctacctcgaaggtgcctggctggaaccgcgcttggagaacggtgtcatcgaggacgtggaggtgcgtcgcgaagtgcccttcgacgaactcacctttgacacctgctgcagaaacatcccgcgggcgtatgccttcgactacgagggacacaaaatccaggccgagaaggagtttctggtctggcaggaggaacagatctggtcccgtcgccgagaggccttcgaaaccttctacgtggccatgcttcggggggagttcgaggactacaaggaacgggatcgctgctgggaagcggtgaggcaatcctttgcccaagtggggatgatgctgccggtctaccccaaggaagataccgatctggagcggttgctggtcgtggggtattcggccaagcacgggcagggcaagcccatcggcatcgggtttgaaacgctgaccgaactgggacaccacgcccacaaggtgtggccaaaggccctgtggttctaccgctgcatgctccgcgagcacggccaactaaagaccgtggtggagcaggataggaccggcaagctgcgggggaagatgagagatgtgttgatcagcctggccaagggcgaggctcagtttcgaccccagcgcgtttgggacccattgctcgtgcgcctgtttcccgaggtagcgaacgtctgggtgacggatccggccgaagtggccagggctgccttggaggcgccctcaaagcgccgaggctccgaaaggacaccttcatga

SEQ ID NO: 534314 - DNA, 783 bp, Stenotrophomonas maltophilia
atgagcagtgatgcattgaaagcagggatccaagccgcgctggccacccagcgccatcgtcggccgccctcggccgaggacatcgcccgcgaagccgctgaggctagggtggccttggaggccaacatgagcggcatcgcccaggttgccatcccgcccgacagcgagcgccaccgggtggcgtttcagctgctccgggcctcgatggactacgggcgcgccctgttgttcctgctcgaaaaccatcccatcgacttgccggcggtcgcgttgggactccatcgttcgcagaccgagcaattcttgcgagcggtgttcgtccagttcatcgccgacgaggagcagttccaggatttccttaaagtggacaaaggacccaggcgaaagaccgcgaaggggaagtgggaggccatctccttgaaggatctggcggtcgaggtcgaaaccgccattgccgccatcggccaggacagcgggccgcagaagctggcccgcacggtgagcaacgcctgggatcccctctgcggactggtccacgggggcaaggccatccgggtgctgtatgaggaccccaacgggcagatcggggcgcacgtgcccgccgacatcctgttccagaccacggtcaatgcggtgctcacgaccaacctctgcgtcatcgcggcgctgacggccaccggggggggcgcatacgatcgaaacgagatggtcgtccagacggccgcccacgtgtcccaatacctccagcaacgtaaaacccggatggacgggttggcgttgtag

SEQ ID NO: 534315 - DNA, 354 bp, Stenotrophomonas maltophilia
gtggtggccgcgcgcctgcgccaggcccgccagttgcggggctatagccaacgcgaggtcggggtgcgcatggggctggacaaggacaccgcgtccgcgcggatcagccgttacgaaagcgagagcatggctataagcctggaatcgctcttcgaactggcccaagccttggatgtccctccggcctacctgttggccaccacgccggccatggccaatgccatcctcgccctgggcggtgaaagcgaggcccaacaggcgaagttgtgcgcggttctggagagcctcaccggcttgccggtgaagaagcgtgaggccctgattcaagcgctgacaacccctccggaagattga

SEQ ID NO: 534316 - DNA, 858 bp, Stenotrophomonas maltophilia
atggcgagcaaagggtgggccggcacggtggcgctggctttggcgttccaggcccaggccggtgacggaaaaggcttgctggaaacaatcgggcgggcgctgggcaacacgcctagggtggcggcggagaaggcgcgcagcccctacctcgacccggcggggacctactgggatctggacaaagacaccctggaaggagcccagcacctccgcgtgggacagaccgcgaccggtggggcaggctcggacatgtgcgacatggacctgctcgcgatggcgcactcggactaccaacaagacgccaagcggcggcagtggtgcctctaccagtggtgggtggccgacaccaagatcaacggtcccaacgggatcgagaagacgcaaacggacgccatcgaaagccggtatgggcctgcattcgacgcgcgcctggagcggttcaagaccatccgtcggttcgccgttcgcccgcagttcgtgtcgctgggcggcatcgactacaacgctgcccgtggtgtcatggaggtttacgtccccatgccgcagatctccgcctctgggctttcggtgacgggcaaaggcttcgtgccgtggtttcagcgaaccgacaggatggtattcagtccaaagtgggccggccgataccaaatcttggtcaggatggattcggcggaggcggctaacctcgctcggcaaggccgtgacgcccgcgatgacctggtcgtgttcaccgtcaaccgggtgtgggtcgagaacacggtcccgaaaatggacgtgacggttgagcgggtgcgcatcggctacaccaaagaaacgatcgaagtggacctcaccaacaagcaaggagcaggcgcatga

SEQ ID NO: 534317 - DNA, 498 bp, Stenotrophomonas maltophilia
atgaagattcatcacctcgtcagcgacggaacacaagcggtggccatcacccaatctgcatcgagtggtggcggatacgcacacccggtgaagctctctgccattcgcttcgacgtgaaagacgccgaaaccgtgctcaacgagctcaacaagactgggcaccgctatgagaagtccttcgaagtgattgagcgttgggacgtcgatgctcgcaatcaggggccgaactcgaagttcggtcgaaccctcaaggcccttgtggatgaggcgcgtgatcacctgaaaggtgccgtgaccttgcaagccgagggtatggaggagggcaccatggcggcgctcaaggccatgacaaagcaggtcaagctttcgcaagccctgccgaaggtcagcgcacccagcatggtcatcggtggccaggtgtggagcccacgcgaagaagcgcagaaggaaacgccagtggccagtcaggaaatcccccagcaccgcatgcgcttctaa

SEQ ID NO: 534318 - DNA, 204 bp, Stenotrophomonas maltophilia
atgaacgtccaaatcgcccaatcgatgaacaacgccaccgatgaccaggagcgctacgccatcctggccggcttcgcccgcggcaacgacgagttgcgcgccaagggcgctgcagaagaactggtggacgcgctctactacgcgggcgccgctctcaaccgctggaaggccatcgccactgtccgcgaagccgcggcggcctga

SEQ ID NO: 534319 - DNA, 345 bp, Stenotrophomonas maltophilia
atgctgcccttgcgcaacccccgcttggacaaccccatggggcgcctgccgacgtccttcgtcaacaccggcgatgccgacgagatccgccggttggccgagaagcacggcatttcgttcaacgaagccgtgcgacagattgtggcgctctacttccgccagccattccccctatcaagcaagcgaatgggcgacagcaagacagatcggctgcccgagatggtggccccgcgccaccttgtcgaaagcattggtgttctggcgtcttcgttgggccacacccgcggcgaggtgttgcgacagattatccgtggctcattgaggaagcgtcatggtcgtcattga

SEQ ID NO: 534320 - DNA, 441 bp, Stenotrophomonas maltophilia
atgttcgaaccttccgatctcatccattcctacacccgagctcaggcaattgaggacggcgtcctggtggacgtgtccgacgtggcgaaggaagcaggcttcaagctgcccgtggccatcacccacgccgcgtgggcacgctacgtcgaagtgcccgcggggctggagatgcgtgggcagtccgtggagggccggctctgggacgtgctcttcatgctccacgtggcaatccagctggagagcggctctgattcggagattcactaccagctccacgtggcgttgccagatgccggcgactggcagaccaatgaggcggttccagatgaacgttcgggactgacccggtcgacgcaccggctggtcaccctgaaagccttgtgtgggccgggggacaaccgggaacccgtggtgacgatcttgctgccggacgaagattga

SEQ ID NO: 534321 - DNA, 765 bp, Stenotrophomonas maltophilia
atgacgcacgaagaactggaacagcgggtcaggcagatcgacggtttcattcgagtgctgacgcaggagtgccacatcctggacgaacgccggcacatcctatcgcccctcatccaagacccggagatccaggcgggcctgaaggccaagctggacaagactcccggcgcaaacgcctggaaccatctggcgcctttgctggggcaggacttggtccgcgacctgtcgcggctgtttctcgacaacgatccgaggtcggggagcctgaccaacctctggcgcaagatccatgcggacccgggtatcaaggaacactttcggggcctctacggacgaatgttcgatcacctccacgacgagcctattggcgatctgtcgccggagatgtcagccatcttccaggagaagttccgggaacaggacagggttacgaactacgcgcagtttgatgagcgttggtcgaagctggaggccgacatggaggtgctgaaaacgcacccggtggtcatcaagatcaagaccatacgcgacaagcatcatgcgcacctggagatgagcaagttagatgaggagccccgcgctttcgacatcagcaccatcgggctgacgttcacggaactgctggacttcagcgacgaatgccaggccatggtggcagagctcggcttgctcttgaccggaacgaactgggatccgaagcagtttgcatccgtccacgaaaagaacggcaaggccatgtggcgaaccctcgcaggcctcaagtag

SEQ ID NO: 534322 - DNA, 1107 bp, Stenotrophomonas maltophilia
atggcgctcggcccattgaccgcagagcaggaggatgcgatctgggctcaaacctggcgcgtcgaagggctgatggcgcagccgttgaccggctggctgcttcactcaatagggttgtgggcggataggcgcgcgtattcagagcggctggtcaaggcactcggggtgacatccaagacgtgggaagtgggcctccctaggcggttccgtaagaggcaacaggtctttgagaatctggcctcctacatacatcaaagccaatcggaaatgatgccagagtgtgcagagcgcagagcccgagcaatggagcgtggtgcgcgcgcattggctgattatccaactcttcccccctgtaacttgtttcacctcacgcttggaattgccggaggggggcggctggaagcgttggcggttgccttagacaatgtctccacggcgaccgtgcatggggtcgtccaacgaaacgagttgccggcggcagtggtaaaggtcgcggaaaacgcggcctcagttttgccgcagatgttgcagcctcaacccgatctggacccaggtttggacgcgttgctgcttctgatggcgcagatggaccacgacctcacggctcctatgatggccaacgagggaaagattggtagcttgataaggttgctgatcgatgccccgggagaaccgaagcgaaagcgggttcagcaccgcctgctggacatttattacgccttggctttcgcggcagcgggtcgtgaacttccggagcggctgccaaccgttcgcgaactcgaagacgcgctgctgggagggccgcctgagtccggagggcaatcgttggttgtgcgttggcgcaatgggaccaaggcccttcgtgaagaagacgtgcagtcgatgatcgcccacgtcggccaggccactggcaaagacctgtcgtggactttccgccggctgtatgccgcagcccaagtgtgggggcgcatcgaagaacatggggcgggcgccgtggggatagcaggaagacgctatatccagtggtggaacgcgctgtgcaaccagggaagagcgagcaccatgtgggtgcagccctactggtcgctgttttccgcccctgcgtga

SEQ ID NO: 534323 - DNA, 147 bp, Stenotrophomonas maltophilia
atgaacaacagcaagaagaccccgatgacccaggcggctcagcgtcgcatccagagcgcgttggatcgcctacccgccccgtctccccagcaacgtgcattcaaagccaaaacagcctcggtggtggccaagcggaacagcaagtga

SEQ ID NO: 534324 - DNA, 1056 bp, Stenotrophomonas maltophilia
atgaccttcgccgacttccaggcatttgctcaacgggtgttggagaagcaccgcgcccgtgccgccgattctccccggtgggcacttgacctcctgcggcgacaagacagcccgacgtgtgcgttctgctgctcgcccatttacgtgaaccggcggcaatcgtgggggctctcacccctcgttccgttcaaccagggcggccccgtcgaaccggacaacttgcggctctcatgcaaaccttgcgtgaccgaacggggcgcgcgcgacctgttggcttgggaagagctggcaggccgggtgcccgccgaccacctcaacgcaatgaaggaagaacgcctgaagttgctcaaacgctcggagaaccacctgacctctgcagggcactacgccaagccttcaaccgtccttgcccttctccaggagcggtggaagcaccccaggttcctggcctacgtagaacggcatgggggcgggtggttcgtgggctggccgctggcccatcgcgatcaaccctcacgcaacggcgccgccgccctgcttcgccaggttcaccgggctcggtggctggaacacgaaggagtggtggcgttcgacgtgccggacgatgtttttcaagtggctgtctggcagctcatcgagaaccacgcgttggtcgtagacctggccgaaggcagcgccgccgacggcgatcgaacctggcaggagagctggcgggtgcgctaccccagcttccaccaattgcgccgccggcggactttcccacatgagaaaccttggccctcccatcgggatagcaacccgttgtcgttcagcacgaaggccagcgcggttcgaatgcgagccaagcgccagactgcccgggaggaggaaacgaaacagcggtggctggacgcccgccgtcggttggcaacgcgggacgaggacgtggacgctggccggttgcggccttacctgccaggggagcgcgacgccttgcaggcggaagtggacgatctggcatcgacttggttgaaagcccgccagcggaaggcgcaaggtcgctcaaagcaggcttga

SEQ ID NO: 534325 - DNA, 345 bp, Stenotrophomonas maltophilia
atggaagctttcgcaatcacagagcgcggttaccgggccatcagcaaaggcgcgccgcttgtagctggggagcgcgaggtcggcgagatcccggcgtcactgctggcagcaattcgactcgcgcaggcacgcgggcagcgcaccacactccttcgtggatgcgattggacccaggcacctgacagtccgctggattctgatgccaagctggcgtgggcggtctatcgccaagagcttcgtgatcttccgcagaaggcggggttccctgactgcgactggcctgcgccgccggcattgccagagggcgccaccggcatgtccttgcccgacatccctacgaactag

SEQ ID NO: 534326 - DNA, 204 bp, Stenotrophomonas maltophilia
atgcccagcgtggcgcaggtctccagccccagtgccttcaccccggcgatcatcgccgccaccttcggaatgtcgcggtccttcggcgatcgccatgcggcacccatgcagaagcgcgatgcaccggcggccttggcctggcgcgccttggccagcaccgcgtcggtctccatcagcttctgcgcattcaccccggtgctgtag

SEQ ID NO: 534327 - DNA, 915 bp, Stenotrophomonas maltophilia
gtgcatatcaagactccgttggccgttgccatcaccctgaccctggcgatgggggctgctgcaccactgcaggccgccgggcagcaggcggtcgccgccaccggtgcagtggccgccgatgcggtcgacctggaccgcattgaagtgcgcgcccagcttgaatcgcagatccgcgcggtggacctcaagcgcagcagcaacgccatcgaggatgcggtgtcgtccgacgcgctgggccagtacccggacaagaacgtggccgagtcgctgcaacgcctgccgggcatcagcgtgacgcgcgaccagggcgagggccgctacgtggtcgtgcgcggactggatgccaacctcaacagcgtcagcgtcgacggcatcgccatcggcacaccggacaactccagccgcgccgcaccgatggacgtgatcccgtccgattcgaccgagcgcctgcgcgtggtcaaatcaccgaccccggacatgccgggcgacgccattggcggcgcgatcctggtcgagaccgcctcggcgttcgaccgcgagggccgcagcctgcgtggcaagatcgaaggcagccaccagcagctttcgggcgagaccagcccgaaggccgcgttcaactacagcgaagtgttcaacgacaccttcggcatcgccgccggcgtgaactaccagaagcggacgttcgaatcggacaacagcgaagtggagtacggtgatgtcagcgggaacaaggatccgaccaccacccgcccgggcgaaatcaccgcgctgaacctgcagaaccgcaagtacgagatcgagcgcaagcgcatcggcgccaacctcaatttcgactggcgcccgaacgaggacagccgttactacctgcgcacgctgtacagccagttcgacgatgccgaacccgccagcgcgtga

SEQ ID NO: 534328 - DNA, 240 bp, Stenotrophomonas maltophilia
atggacgcacttgttctcgccgtgctgctggggtgtatcgcagccgtgtcgcttgggttagccaaactcgtgatgtggtgtgttgatcggcgtgtgttttccgctggtggcgctgcacgcgagaaccaattcgttgcgcagtcgactgctgatcttcgccgcctggaaatcgaagccacgaggcgcggcaacctgctcgctgctgccgagctcgccgaagagcaggagcgcgccgcatga

SEQ ID NO: 534329 - DNA, 171 bp, Stenotrophomonas maltophilia
atgagcacgcaccctccgttcttcaccgaattggccgaattcgatatgggcctgtgggcctgtgccgtgtttgtgtccctggtgctggggctcgcgatcatttccattgtcattaagcaggcttggctcgcacttcgtcgcttgttcaaggatcggaaggggggtgagtga

SEQ ID NO: 534330 - DNA, 312 bp, Stenotrophomonas maltophilia
atggaccgcctcgatctggaattctgcactctccgctatcagcacagcgagcagtgcgcttcgcgcgtccgtcgtgctgaccacgcgatggagcttgtgcatcaggcactggaaacggtgtttgcactcaagcgtgatcgcgctggccgtttcgagcagatggaccttttctcgcaggcatccgacgaggaactgattgcgttctggtggggcgtgcatcgtgcttgcggcgttgagttccgccgcctgctcaacatcttctggaccaggtgcccacataagtcgtcgcatggacggggcaatgagccatga

SEQ ID NO: 534331 - DNA, 246 bp, Stenotrophomonas maltophilia
atgaatcgcatgaacgctgctcgccgtttcgccgcatcgactgtcgccaagatcggcgtcggcaccaccgccctggttgcttcgggtgctgcactggcctccgggggtggcacgtcgcccggtgccgccatcgcggcggaagtctccaagggcaacgctgacatggcaatcgtgatcggtgccatcgctctgctgctgggaatcctggtggtgtgggctttcaccaagcgcgccgccaggggctga

SEQ ID NO: 534332 - DNA, 1347 bp, Stenotrophomonas maltophilia
atgcgccagttaacggtgttgccaggagttgttccgctactggttgcgctacttctgatgctcgggccaattggcgaagcaaaggcgggatcgacggtggcgcaagcattcgattcgtgcatgaacagcgctcagttcggcgcgctcaactcggctaagcaatgcgtggaccttggcaagatctacgatggcacatgcgctgtagggcttgcggcaaagcagggcggttacatccggtttgatgggtacgactgcgacaagacgtgcgacaaagagccgagtaaaacaacgccgttctttccgccctcgggttcagtgcgatgcgtcaaccattgcgaagtcacttaccgcgataacggggacgacaccaccacctactcacccaacggcaagtcatgccaggacaagcccgactgcgagaagcaaggcaagaacatggtgtggaatgccatgctcggggtgtgccagcccgttgagcccgaatgccctcaggggcaggtcaaggtgggtaatgcgtgcgagaaggagaagccttgcccggatggcatggcgctggttgcaggtagctgcaagaagaaggatgaggagtgcccggcgggcatgatccgcagtccactgggaaactgcattccaggcgatggccagtgcgctgcgggcgaggtgcgcggacctgacggtacatgtaagcaggataaggatggcgatggaaagccggatgatcccgatggcagtgaaggcggtggtgacgggaagaatgattcattctctggcggcgatacgtgcactgcgccgccatcttgcagcggctcccccatcatgtgtgggcaggctcggattcagtggcggatcgactgcaacacgcgccgcaacaacaacgttagcggcggtcattgttctcagtccggcatgccggtttgcactggtgagaagtgcaatgcgatggagtacacgggcctcctgatgcagtggcgttccacttgcgccctggaaaagatggctggcgagaagtccgagacgcctggtggcagcaagacggatgcgaatggcaacggcgtgcccgacgcgctggagggcaggggcgaagttactgggatcggtgatggcgcggcagatgttgccggcgcgaagaagtggggcattgggctttcagcgagcaatctcgacacgagcaacatgttcggcggtggcggaacgtgtcctgagcccccagcaatcacgatcatgggcaagacggtcaactctgccgacttcccgtacttctgccgcattgcggcgattctgcgtgctttgattctgatttttggcgcgtacacggcaattcgcattcttatgggagcggccttctga

SEQ ID NO: 534333 - DNA, 1248 bp, Stenotrophomonas maltophilia
gtgagcgagcctgccacagccgaagacaccgcgctgggcctgctgtcccggcccggtttcgccaagctgctggcctaccgcatcttcgcgatgctgtcctaccaggtggtggcggtcaccgtcggctggcacatctacgaagtcacccgcaatccgttctcgctgggcctggtcggcctggccgaggtgctgccgttcttctgcgtggcgccgttcgccggctatctggtcgaccacctgccgcgccgtcggctgggcatggtcgcctgttccgggctgatcgccacggcgctggtgctgaccggcgttgcgacgggttggctgccgttcgagggcgtgtggcccatctatgcggccatcgccctgaccggcatggtccgtgcgtttctttcgcccatctacaacgcactgttcgcccgcgtgctggcccgcgatcagttcgcgcgcggcgccggcctcggcgcggtggtgttccaggccggcatggtggccggcccggcgctgggcggcgtgctggtcggcttcggcggcaagggcctgtcctacgcggtggctacggcctttgccctggtggcgatggcctgcctggccacgctgaaagtggaggagccgatgcacaccggtccggccgcgccgatcttcaagagcatcgccgaaggcgcgcgattcgtggtcggcaaccggatcatggtcggcgcgatggcgctggacatgttctcggtgctgctgggcggcgtggtggcgatgctgccggccttcctgcacgaaatcctgcaccacggccccgaaggcctgggcatactgcgcgcgatgccggcgctcggttcggtgtgcgtgggcctgtggctggcccgccacccgctgcaccgcaatgccggccgcgtgttgctgttcgcggtgggcgggttcggcctgtgcgtgatcggcttcgggctgtcgcagcacttctggctgtcggcgctgatcctgctgttctatggggccttcgatggcgtttcggtggtgatccgctcgaccatcctgcagttggccacgccggaagaaatgcgcggacgggtgtcgtcgatcaacggcatcttcatcagttcgtccaacgagctgggcgcgttctatgccggcacgatggcccgtctgctggggttggtgcctgcagtggtgctgggtgggtttgcggtcctgagcgtggccgggatcaccgcgtggaagaacccgacgctgcggaaactgaatttgcgtgatctgcagtga

SEQ ID NO: 534334 - DNA, 453 bp, Stenotrophomonas maltophilia; identical to SEQ ID NO: 521760

SEQ ID NO: 534335 - DNA, 1377 bp, Stenotrophomonas maltophilia
atgaccctgcgcctgcacaacaacctgactcgccagctcgaaccgttcaccccgctcgatccggcctgtccgaccctgtatgtgtgcggccccacggtctacaactacgtgcacatcggcaacgcccgtggcccggtggtgttcggggtgctggccgatctgctgcggcggcgtttcggtggcctgcgctacgcgcgcaacatcaccgacgtggacgacaagatcaacaccgctgcacgcgagcagggggtgccgatcagcaccatcaccgacaggttcgccgccgcctaccgtgaagacatggccgcgctgggcgtggtgccgccggacatcgagccggaagtgactgcgcacatgccgcagatcatcaccatgatcgagcagctgatcgccaatggtcatgcctatgccgccgaaggccatgtgctgttcgcggtggccagcttcgacggctacggcaagctctcgcgacgcgatccggaagagatgctggccggcgcccgcgtcgatgtcgccccctacaagcgtgatccgggcgatttcgtgctgtggaagccgtccagcgacgacctgcccggctgggaatcgccctggggccgcggccgcccgggctggcacatcgaatgctcggcgatggcggccgcccatctgggcgagaccatcgacatccatgccggcggtgtcgacctgcagttcccgcaccacgagaacgagatcgcgcagagcgaatgcgcgcatggcggcaggatctttgcccgctactggctgcacaacggcatgctcaacttcggcggcgccaagatgagcaagtcgctgggcaacatcgagcgcgtacacgacctggtgcgccagcatccgccggaagcgctgcgtctggccctgctgtcggcccattaccggcagccgctggactggtccgatggcctgatcgagcagtcggtgcgcaccctggaccgcctgtacggcacgctgcgcgagctggcgtcgatcgaagccagcgcggtgatcccggccagcgtcgaggcgaccctggatgacgacctgaacaccccgcaggcgctggccgaagtggcccgcatcgccgccgatgcacgccgcgccaccgacccggccgaacaggcacggctgaagggcgagctgctcggcgccggcctggcgctgggcctgctgcaggccgatccggcgcagtggttcggtaccgctgcgggcgacggcggcgacgatgcccgcatccagggcctgatcgacgagcgtgctgcggccaagaaagcgcgtgatttcgcccgttccgatgccatccgcgaccagctggccgccgaaggcatcgtgctggaagacaccccgcagggcgtgcgctggtcgcgcaagcgcggctga

SEQ ID NO: 534336 - DNA, 1011 bp, Stenotrophomonas maltophilia
atgtcccccaagcacttcctgaacacccaggactggagccgcagcgatcttgacgcgctgctgacccaggccgcgctattcaagcgcaacaagctcggcgaccagctcaagggcaagtcgatcgcgctggtgttcttcaacccctccatgcgcacccgcaccagcttcgaactgggcgcgttccagctcggcgcccacgcggtggtgctgcagccgggcaaggatgcgtggccgatcgagttcaacctcggcacggtgatggacggcgataccgaggagcacattgcggaagtggccaaggtgctggggcgttactgcgacatcatcgccgtgcgtgcgttccccaagttcatcgactgggcctacgaccgccaggacatcgtcctcaacagcttcgccaagtattcgccggtgccggtcatcaacatggagaccatcacccacccgtgccaggaactggcccacgtcatggccctgcaggagcacttcggcacccaggacctgcgtggcaagaagtacgtgctgacctggacctaccaccccaagccgctgaacaccgccgtggccaactcggcactgaccatcgccacccgcatgggcatggacgtgaccctgctgtgcccgaccgccgactacatcctcgacgatcgctacatgggctgggccgagcagaacgtggccgagagcggcggttcgctgaagatcagccatgacatcgacagcgcctacgccggcgccgacgtggtctacgccaagagctggggcgcgctgccgttcttcggcaactgggagccggagaagccgatccgcgaccagttcaagcacttcatcgtggacgagcggaagatggcactgaccaacaacggtgtgttcagccactgcctgccgctgcgccggaacgtgaaggccaccgacgcggtgatgaattcgccgcagtgcatcgccatcaacgaagccgagaaccgcctgcacgtgcagaaggcgatcatggcggcggttgccgggcgctag

SEQ ID NO: 534337 - DNA, 1197 bp, Stenotrophomonas maltophilia
atgagcaacaaagacgtcgttctcgccttctccggcggcctggataccagcttctgcgtgccgtacctgcaggagcgcggctacaacgtgcacaccgtgttcgccgacaccggcggcgtggatgatgaagagcgcgatttcatcgaaaagcgcgccgccgaactgggcgtgaccagccacgtcaccgtcaacggtggcccggccatctgggagggcttcgtcaagccgttcgtgtgggccggcgaaggctaccagggccagtacccgctgctggtctcggaccgctacctgatcgtcgatgccgcgctgaagcgtgccgccgaactgggcaccaacatcatcgcccacggctgcaccggcatgggcaacgaccaggtccgcttcgacctggccgtgaaggcgctgggtgactaccagatcatcgcgccgatccgcgagatccagaaggaacacacccagacccgcgcctacgagcagaagtacctggaagagcgcggcttcggcgtgcgcgccaagcagcaggcctacaccatcaacgagaacctgctgggcctgaccatgtccggcggcgagatcgaccgttgggaagccccgggcgagggcgctcgtggctggtgcgcaccgcgcagcgagtggccggagcaggcgctgaccgtcaccctgaagttcgttgaaggcgaagccgttgaactgaacggcaaggcgctgccgggcgaccagatcctggcccagctcaacaagctgttcgccccgtacggcgtcggtcgcggcgtgtacaccggcgacaccgtgatcggcctgaagggccgcatcgtgttcgaggccccgggcctggtctcgctgctggccgcacaccgcgcgctggaagatgcggtgctgaccaagcagcagaaccgcttcaagccggacgttgcacgcaagtgggtggagctggtgtacgaaggtttctaccacgacccgctgaagaccgacatcgaagccttcctgaagtcctcgcaggccaaggtgaacggtgaagtggtgctggaaacccgcggtggccgcgtcgatgcagtggcggtgaagtcgccgcacctgctcaacaccaagggtgccacctacgcgcagtcggccgactggggcgtggaagaggccgaaggcttcatcaagctgttcgggatgagctccactgtctatgcgcaggtcaatcgtggttga

SEQ ID NO: 534338 - DNA, 1089 bp, Stenotrophomonas maltophilia
atgcttgaacagacgctcgatcacctgcaggccctggtgtctttcgacacccgcaacccgccgcgtgcgatcaccaccggtggcatcttcgattacctgcgcgcgaacctgcccggattcaatgtcgaggtgatcgaccatggcgcgggcgcggtcagcctgtacgccgtgcgtggtacgccgaagtacctgttcaacgtgcacctggatacggtgccggactcgccgcactggagtgccgacccgcatgtgatgcggcgcctggacgaccgcgtggtcggcctgggcgtgtgtgacatcaagggcgcggccgctgcactggtggctgcggccaatgccagcgatggtgatgccgcgttcctgttctccagcgatgaagaagccaacgatccgcgctgcatcgccgcgttcctggcccgcggcattccgtacgaagcggtgctggtggccgagccgaccatgagcgaagcggtgctggcgcatcgcggcatcagctcggtgctgatgcagttcgccggtcgtgcagggcacgcctcgggcaagcaggatgcggctgccagcgcgctgcaccaggcgatgcgctggggcaatcgcgcgctggaccatgtggaatcgctggcttcggcgcgcttcggtgggctgacgggcttgcgcttcaacatcggccgcgtcgaaggcgggatcaaggccaacatgatcgcgcccgctgccgaagtgcgcttcggcttccggccgctgccgtcgatgaacatcgacgcgttgctggccaccttcgccggtttcgccgagccggaagcggcggtattcaccgaaaccttccgtggccccagcctgccggccggcgacatcgccgaagccgagaaccgccgcctgctggcacgtgacgtggccgatgcgctggaactgccgatcggcaacgcggtggacttctggaccgaggcctcgctgttctcggccggtggttacaccacgctggtgttcggcccgggtgacatcgcccaggcccacaccgccgatgagttcgtgacgctggagcagttgcagcgctacaccgaagccgtgcaccgcatcatcgccgccggcgcctga

SEQ ID NO: 534339 - DNA, 1329 bp, Stenotrophomonas maltophilia
atgtctcctgccctccagccccatcgccagacccgccagaccatcgtgcgcctgctttccagcatggccagcgcgaaggagatcagccagtacctcaagcgcttctcgcagctggatgccaagcgcttcgccgtggtcaaggtcggcggcgcggtgctgcgcgacgacctcgacgcgctgacctcttcgctgtcgttcctgcaggaagtcgggctgaccccgatcgtgctgcacggcgccggcccgcagctggatgccgaactgtcggccgccggcatcgagaagcagaccgtgaacggcctgcgcgtgacctcgccggaagcgctggcgatcgtgcgccgggtgttccagcagtccaacctgcggctggtcgaggcgctgcagcagaacggcgcgcgcgccacctcgatcaccggcggcgtgttcgaagccgagtacctggatgtggatacctacggcctggtcggcgaagtgaagaaggtcaacctggcaccgatcgaggccagcctgcgcgccggctcgatcccggtcattaccagcctgggcgagaccgccggcggccagatcctcaacgtcaacgccgacttcgccgccaacgagctggtacaggaactgcagccgtacaagatcatcttcctgaccggcacgggcggcctgctggacgaggcgggcaacgtgatcgattcgatcaacctgtccaccgagtacgaccacctgatcgcgcagccgtggatccacggcggcatgaaggtgaagatcgaacagatcaaggatctgctcgaccgcctgccgctggaatcgtcggtgtcgatcacgcgcccggccgacctggccaaggaactgttcacccacaagggttcgggcacgctggtgcgcaagggtgaaaaggtgctgcgcgccaccgcctggaacgaactggacctgccgcgcctgaagggcctgatcgaatccagcttcggccgcgcgctggtgccggactatttcgagaagaccaagctgttgcgcgcctacgtcagcgagaactaccgcaccgcggtcatcctcaccgacgaggcagagggcgtgtacctggacaagttcgccgtgctcgacgacgcgcagggcgagggcctgggccgtgcggtctggaacgtgatgctggaagagacgccgcagctgttctggcgctcgcgccatggcaacccgatcaatcacttctactacgccgaatccgacggctgctacaagcaggaccactggaaggtattctggttcggtgccgatggcatcgaccggatcaagacctatgtcgatcattgcgcgcagcgcaccccgagcctgcagggctga

SEQ ID NO: 534340 - DNA, 603 bp, Stenotrophomonas maltophilia
atgagcaacctcgatgcctggaacacggttcctaccctgcgcggccagcacgtaaccctgcagccgctgcagatggaacacgtgcccggcctgcgcgatgcgcttgaaggcagcggcctggaccagctctggtacacccaggtgccgtcgccggaacaggccgagacctatgtgcgggccgcgctgcaggcgcagagcgaaggcatggtgctgccgttcgtgatccgtgatgcggctggcggaatcgtcggcagtacccgtttctatgacatggatgccggtgtgccgaaactcagcctcggctacacctggtatgcgccgcgcgtgcagcgtaccggcgccaacaccgaagccaagctgttgctgctgcagcacgccttcgaaacgctgggctgcatcagcgtggtgctggaaaccagctggttcaacgccacctcgcgcactgccatcgcccgcctcggcgccaagcaggacggcgtgctgcgcaaccacaagcggcatgccgacggcacgccgcgcgacaccgtcatcttctccatcatcgatgcggaatggcagggcgtgaagcgccacctgcagttccgcctggacagtcacgcatga

SEQ ID NO: 534341 - DNA, 954 bp, Stenotrophomonas maltophilia
atgaacgattcgacctttacccttggcatcgtcggtgcccgcggccataccggcgccgagctgatcaagctggtggccgcccatccgcggctggaactggctttcgtctcctcgcgcgagcgcgccgggcagcgcctgtccgaccatcacccggaattccagggcgatctgcagtacgagaacctggacgccgacgcggtggcggccaagggtgtggacgcagtgatcctggccctgcccaatggcctggccgcaccgttcgtggctgcgctggaagcggcgaagccggacaccgtcatcgtcgatctctcggccgactatcgcttcgacaacagctggtactacggcctgccggagctgacccgcggccgctacaacggccagaagcacatcagcaacccgggctgctatgccacggcgatgcagctggcggtgcatccgctgctggacctgctggccggtccgccgcagtgcttcggtgtctccggctactccggcgccggtaccacgccgtcggacaagaacaacgtcgaactgctggccgacaacctgatgccctacgcgctgaccaaccacgtgcacgagcgcgaggtgtcggtgcagctgggcgtggctgttgaattcatgccacatgtcgcgccgcatttccggggcatcacgcttaccgccaacctgtggctgaaccgcgtgcagacccgcgaacagatcgtcgagcgcttccagcaggcctatgccggcgaacccctgatcgacgtggtggatgaagcgccgtgggtcagccgcatcgccggccgacacggtgcccaggtcggtggcttcacgctcgcgccgggcggcaagcgggtcgtcgtggtggcgaccctggacaacctgctcaagggcgcagccacccaggccatgcagaacctcaacctcgcgctgggcatcgatgaactgatgtccatcccgcactga

SEQ ID NO: 534342 - DNA, 1296 bp, Stenotrophomonas maltophilia
atggcagaccttctttggcagaagcccggcgtcgctgtcgacgcccagatccagaccttcctcgccggcgacgacgtgatcctcgaccgcgagttcttcctgcatgacatcgccgccagcgccgcacatgcacaaggcctgcagcacatcggcatcctcagtgccgacgagctggacggcctgctgcgcgaactggaggtgctggcgcaggacttccgcgaaggccgcttcgtgctcgatacccagtatgaggatggccactcggcgatcgaagcccgcctgaccgaacgcctcggcgatgccggccgcaagatccacaccggccgcagccgcaacgaccagatcctggtcgccacccgcctgtggctgaaggagaagctgcagcgcgtggcacagctcagcgccgaagtggccaaggtcgcgctggaccgcgcacaggccgagaaggacctgccgattcccggctacacccacatccagcgcgccgtagtgtcctcggccggcatgtggtgggcgggctgggccgaggccttcatcgacaatgccatccgcgcgcgtgacacccatgcgctggtcgatgccaatccactgggcacggctgccggctacggcgtgaacctgccgctggaccgcgagcacaccacggctgcgctcggttttgcgcgcatgcagatctcgccgatctacgcacagctgtcgcgcggcaaattcgagctggccgcgctggaagcgctcggtggtgccacgctggacctgcgccgcatcgcctgggacctgtcgctgttcaccagcgccgagttcggcttcgtcgcgctgccggcgcagtacaccaccggcagttcgatcatgcccaacaagcgcaacccggacgtgatcgagctgatgcgtgcgacccacgccagcgtcgccgcagcgcgcaccgagatcgagcagctgctgtcgctgccgtcgggctaccaccgcgacctgcagtcgtccaagggtgccatcttccacggcttcggccgtggcctggccgcgctggagctgctgccggcgctgctggccaacctggaatggcgtgacgacaagctgcgttcggccatcgattcgggcatgtatgccaccgacgtggcggtggaagcggccgtggccggcgtgccgttccgtgaggcttacaaggccgctgcggccggtgccgacagtgcagggcaggggcgtaccccggaaggcagcctcgccgcgcgcgtgtcgccgggttcggccgccgacctgcgcctggacgaactgcgcgcgcgctggcaggcgctgtcctga

SEQ ID NO: 534343 - DNA, 264 bp, Stenotrophomonas maltophilia
atggcgggcactgtctacctggtgatggcgatgcgccggccggacttcaacgatgcagcggtgcagccgcaccgcgatttcctcgatgcgttgcaggcgcagggcaagctgcagctgactggtggtttcgccgacggcagtggtggcgcctatgtgctgtgcaacgtggacagcctggcgcaggcgcaggccatcgtcgccaccgatccgctggtgacgatgcaggcctccgagctgaccgtgcacgaatggaacacccgctga

SEQ ID NO: 534344 - DNA, 1158 bp, Stenotrophomonas maltophilia
atgatccagcacgctgccaacgtcgcctcgccgttccccgaacaagcgctgccgccatggcggcgtgcggtgctgaaggtcggcagcagcctgctggcagccgatggcggcggcctgtcaccacgccacgcgctgggcctggcgcagttcgtctcggccaatgtcctggccgggcgcgaggtggtgatcgtgtcttccggcgcggtcgctgccgggcgcgcgatcctgccgcgggccgatgagcctggcgcggcgatggcggcgcggcaggcgctggctgcgctcggccaggcccagctgatcgggctctggcagcgcttcttcgagcgcccggtggcgcaggtgctgctgacccatgacgacctgcgcaaccgccgccgctacctcaacgcacgcgccacgctcaacgaactgctgcggctgggcgcgttgccggtggtcaacgagaacgacaccgtgtcggtggacgagctcaagcttggcgacaacgacaacctggcggcgacggtggcggcgctggtcgatgccgatgcgctgttcatcgccaccgatatcgatggcctgtacagcgccgacccgcgcaccgtggccgacgcgcggccgctgcacgacgtgccggaactgagtgacgaggtgctggcgatggccggcggcgccggctcgcgcgccggtaccggcggcatgcggaccaagctggaagcggcagcgaaggcgggtcgtctcggcatcgaaacctatctgttcaatggccgcagcggtgacgtggtacgcgcgctggcccaggaccgcctgttcggtacccgtatccacgccgcgcgcagccgtgaggcggcccgcaagcactggctgcggcacgcgccgctggtcgagggtgcgatcgtgatcgatgccggcgcggcgcaggcgatgcgcgagaagggcgcctcgctgctgcccggcggcatcaccggcgcggagggcatgttccgccgtggcgacatggtgcaggtgtgctggaacgcgccacagggccgcgtctgcgtggcgcgcggggtcagccagtacgcggccgatgatgtgcgccggatcgctggccgccattcgcgcgacatcgaggccgtgctgggctacaactacggtggcagtgtcgtccatcgcgacgatctggtgctgccatga

SEQ ID NO: 534345 - DNA, 1272 bp, Stenotrophomonas maltophilia
atgaccggtttgaaggactccccgatgagcgaaatcgaagcgcaggcgcgtgcctgccgtgacgcggcccagatcgttgccggcctcgacagtgcggcgcgccgcacgctgctgctggcaatggcccaggcgctggaagtgaatgccgggctgatcctggccggtaatgcgcgcgaccttgccgctgcgcgcgagaaaggcattggcagtgccatgctcgaccgcttggcgctggacccggcacgcctgttcgcgatggccgaagccgtgcgtgaggtcgccgcgctgcccgatcccgtcggccagatcacccgcgacgatgtgcgtccaaacggcatccgcgtgcagaaggtgcgcgtgccgctgggcgtgatcgcgatgatctacgaggcgcgcccgaacgtgaccgccgaagcggccgcgctgtgcctgaaggcgggcaatggcgtgatcctgcgcggtggttccgaagcgatccactccaacaccgccatcgcccaggcgctggccggcgccctgcaggccaatggcgtaccggcggcggcagtgaccgtgctgaccgacctgcgccgcgaagcaatgctggagctgctgcagctgcatgaactgatcgatctggcgattccgcgcggcggcgaaggcctgatccgcttcgttgccgagcatgcgcgggtgccggtgatcaagcactacaagggtgtctgccacctgttcgtggatgccagcgccgacctcggcaaagccatcgaccttctggtggacggcaagtgcagccgtccgtcggcctgcaactcgttggaaaccctgctggtgcatcgtgatgtggccgaagccttcctgccgcgcgtggcgcaggcgctcggtgagcgtggcgtggagctgcgcgcggacacgaacgcgcagccgctgctgccgggcagcaccgccgccagcgaagacgactacgctgccgagttcctcgacctggtgctggccgtgcgcgtggttgatgacctcgaggcggccatcgcgcacatccgtgcctatacctccgaccataccgaagtgatcgccaccgaagacgccggccatgccgagcgcttcgtcaacgcactgcgctcggcggtggtgatggtcaatgcctcgtcgcgcttctccgacggtggacagctgggcttgggcagcgagatcggcatttccaccacgcgcctgcatgcgtacggcccaatgggcctggaagcactcaccgtcgaacgattcgtcgtgcgcggtgaagggcagacgcgcaagtag

SEQ ID NO: 534346 - DNA, 1053 bp, Stenotrophomonas maltophilia
atggtaggtgtaatcagtcaccacgccgttggcgtccttgaccgacaacggccgcccgaacgcgtcgtaggccaaggtctcgaccgtctggccgagcgcattggtcacactgcgcaggtcgcccttgcgatagctgcaggcaccactggtcgcgcatcccgcgtcgtccgcggtgtagtaggcataggtggagacatccgccacatcgcttcgcgggccatccacgctcttcagcagtcccaccagcgggcactccgggccctctgcctcacagtagacctgcgtggtgacgcgggtgttaccggtcaccatgtcgcgcacggtaatggtggttggctgaaggcgcgcattgcgtgtgatgcggatctcacggttaccgacggtctgctgcaccagccgattgctgtccatggccacgcgcgtttcgctgatgcgctgatcctgagtaccggccgcttcggtggtggtggtcacgctgacggcgcctacggcagcatcgctggcctcggcataggcgtagctggtgacgacaccacggcgatcggtcaccgactgcagccggcgccggaaatcggtgccctcgggcagataggtgcggcttatgctgccgttgctctcggtgatgccattgaccttgcgcggaagtccactggagccgatggcggtcaaggcgtaggtgctctgcttgcccagtgcgtcggtgacgatggtggttcctgccggggtgtactccaggcgcacgccatcaatgcctacgtcggcctgactgcagtcaccggaatggcggctgcaggtgacccgcccctcggcgtcgtagccgtaccaactgtagcgctggttgccctcggcggtaatgccggtcaggtagcccgggaggcgggcgtcctcatagtgatacgtgcggctggcaccgtctgcgtaggtcgcactgatcaattccccggccggggaataggcgtagctcaccacgggctggccggcaatcaccagggccgagatcagcgaatcgtcacccggcgcgagatactggacgtccacgcgccggccggttga

SEQ ID NO: 534347 - DNA, 1146 bp, Stenotrophomonas maltophilia
atgattcgacgcactctggcctgcatgctcaccctcggcctggtcgcctgcgcgacccagccgaagtccccaccgtcttcaccccaggccagcagtacgccgcgccagcccgccaccagggcccatgggccggccgaggctgcacccgaagcaactgcggctaccgcgccgccggtggatctcacaccggtgccgttcgaggtcgcgcgggcccgcttcattgccgataccgccaagcgctatggcctgaagccggagcagatcagcagcgtgctcgaccaggcgcaggtccgccagccgatcatcgcggcgatgtcgcgcccggccgagcgggtcaagccgtggaacgaataccggccgatgttcatcagcaaggcacgcatcgatggcggccgcgcgttcctggcccagcaccgtgccgaactggatcgcgtgcagcagcgcaccggcgtgccggccgaagtgatcgtggcgatcatcggcgtggaaaccagctacgggaagaatgccggcagccatcgcgtgctcgatgcgctgtacacgctggcgttctactacccgcgcagcggcgatccggccaagctggaacgcgaagtgcgccgcgagctgttcttccgcgacgagctggccaagctgttcgagctgggccgcgaagaaaagctggacatcaccacgctcaagggcagttatgccggtgcgatgggcatgggccagttcatgccgtccagttacctcgattacgcagtggacggcaacggcgatggtcgtcgcgatctgttcaacagctacgacgacgtgttctcgtccatcgccaactacttcgtgaagaagggcggctgggtgcgtggtggccaggttgccgtaccggccacgctggcgccgggccgcgaagagttcaacccgaccgaatggatgcccacctggtcgctggccgacctggcacagcgcggctaccagcccagcgcgccggcgcagccgggcgccacggccacgccgatcacgcttgaaggcagcaccggcaagcagtactggctgggcttccagaactactacgcgatcacccgctacaacctctcgaagatgtacgcgatggccgtgttccagctgtcccaggccatcgccggacaggagctgcccccggcatga

SEQ ID NO: 534348 - DNA, 1269 bp, Stenotrophomonas maltophilia
atgaacatcagatggttggtcccgagcttgatcgtcttcgcgctggcggcctgcagcagcgcgccgaagcagccggccacggccggccatggtggcaagtccagcggcacgctggtgcaggggcgtggttcgcgaccggcgcactgccctgaaggttcgccatatgcggcggccaaggaagacctgagcacccgcggcaactacactgccggtggcctgtacaagccgggcgtgcgtgacagcacgccagactacgttcccaacgtggcctgcatccccgagccggaagtgaccgccgaggaacgatcggcgatcggcaacaagtcgccgtacgtggtgctgggcaagtcgtacaaggtgctcgacgacacccgcaactatgtcgagcgcggcacagcgtcgtactacggcgccaagttccacggccgcctgacctccaaccgcgaggtctacgacatgtaccagttcactgccgcgcacaagacgctgccgctgcccagcttcgcccgcgtgaccaacctggacaacggcgagtcggtgatcgtgcgtgtcaatgatcgtggtccgttccatgacggccgcgtggtcgatctcagctatgccgccgccgtgcgcctgggcatcacccaacgcggtaccggcaatgtcgaggtgcgcgcgctgcaaccgggcgagagcaacctgatggcgcagaagccgtcgcgtcgcgagcgtcgcgcggctgaagcggctgccaccactgcagtggccagcgcgcgcccggtgccggcgccacgtgcttccaccgacagtgatatcgatcgcctggtcaaccgcttgccgaccgatggcgccccggcgcgcggccagccggccaccacccggggcgtggccagcaccgcgccggacgtggcggtcagcagcctgccgccaagcgcgccggtggtgcgcacctccgcgccggctccggccgttgtcgccagcacggccccgcgcgcggtggcaccggcaccggtgcgtgccgccgcggcggcgccgagcctgtcgcagcagatggtcggcgcggtgatggtgcaggtcgccagcttctccaaccgcgacaacgccaaccgcgcgatgggccagctcagtgccgccggcatcgtcggcgcgaccatcagcgacatcgccgccggtggccgcaccctgttccgcctgcgtgttccggcaagcgaccatgccagtgcggcggaacttgtcggtcgcatcgccggtctgggcctgggttcgccccagatcgtcaaggactga

SEQ ID NO: 534349 - DNA, 1218 bp, Stenotrophomonas maltophilia
atgaatttccgttccgccgccaccgccctggccgccaccctggtggtgggcctggcttccgcccagacgccgctgccgactccggccacgccggcgcccgccgccgccgccgccccggccaccgtcgccactccgccggccccggcgccaagcgtgtccaaggcctgggtgctgatggattacgccaccggccaggtgctggctggtgaaaacatccacgagcagctggccccggccagcatcaccaaggtgatgacgtcctacgtgatcgccgccgaggtcaagaacggcaaggtccgtgcggatgaccaggtgatgatgagcgagcgcgcctggcgcgaggggggcgctggcaccgatggcagctacagcggcttcccggtcaaccagaccgcgcgcctggaagacatggaaaagggcatggcgatccagtccggcaatgatgccgcgatcgccctggccgaacatgtggctggcagcgaagaggcctttgcctcgctgatgaacagctacgccgccaagatcggcatgaaggactcgcacttcgtcaacgcccacggcctgaccgcacagggccaccacagcaccgcctacgatctggcgctgctgggccgcgcgatggtccgcgattacccggaaacctacgcgtacaacaagatcaaggaattccaggtcggcaacatcaagcagccgaaccgcaacctgctactgtggcgcgatggcagcgtggacggcatcaagaccggccacacctccgaggcgggctactgcctgatgagctcggcccagcgtggcgaccagcgcctgatcgcggtggtgctgggcggtgcgtcggagaagcagcgtgccgatgacagcctggccctgctgaactggggcttccgcttcttcgagacccaccgcctctacgagccgggcaaggccgtggccgagcacaaggtctggaagggcaccaccgacaaggtgcagctgggcgtggcccagccgatgctggtcagcgtgccgcgcggccgctacaacgacctgaagccgagcatcgacgtgcccaagaccctggaagcaccgttcaccgccgggcagcagatcggcaccgtgaaggtcaccctggatggcaaggtcatcgccgaggcaccgctggtggccgtggctgccgtcgagcaggccggcttcttcaagcgcctgtgggacagcttctggatgtggtgggaatcggagtga

SEQ ID NO: 534350 - DNA, 987 bp, Stenotrophomonas maltophilia
atgcaccatcatccacatgcgtttcgcatggcattgggcatagcaattaccgcatgtgccaccttctcgaccactgcgtcggctggcgatctggttgagcactggatggagacctcacaggaagaggtcctcgcctactggacgaatgaaagactcgctgccgtacccgacaagggagaagctgccatcaagccaccggggccggatccactgcagaccgacggtgacccatggcggggcacaggcccacaccctgctggtgtcgggcggcttttcctgacccgcccggatggcgaggacgcttcgtgcaccgccaccgtagtcgacagccttggtggcgacatcctggtgacagcatggcattgccttgcgcagctggacgagcacggtgccgtccactggagtcgccaccttctcttcgcaccgtttttcgagaatggcactgcgccgctgggaaagtatccagtacggcggatcgtcgcaccgcaggcctcaatttccggcgcactcgacaccagtttcctgcagacccacaccgatgcatccggccaggggcccgcgcgccacgctggcagccaggccattcgcttcgatgagcgccccgcaaccggtccccgcgttacgttcggctaccccgtttcagccaatggcatcggcctcatcccgccaacaccctggtacgaattcggaaatcccgaatacaccggccagcaactggcttattgcgccacttcacgcgttgaactgtcaccgtgtcgacccttcggttcggagaagattcttcagtggggccttgtctgcgtgcagggcccgggttccagcggcggaccggtgctggaagcgtttgatttcgacaacggccatggaatcgttgtgggagtaaacagcatgggcgtggtcaacgacggccgcgcccatctgtgttcggccgagaccgaggcgctggccgaacgtgcctactggtacatccagcagcgcaccccgtga

SEQ ID NO: 534351 - DNA, 1059 bp, Stenotrophomonas maltophilia
atgcgtagcgtcgcagtcatcgggctttccggcctgctggccgccaccctcccccttgccgcccaggcggccgaacaatgtggcccggacgcgatgcgcgaccacccgccgcaggtcaacttccgcgtcgacaacgacctgtttggtggccgccaccaggaccagggctataccaacggcgcgcagctgaccctggtctcgcccaacctggtcgactacaccgacgacccctgcctgccgcgcatggcgcgctgggtgaaccagtacctggaaggcctgcacccgggcaggttcgagcagcagaacatgatcttcagcatcggccagggcatcttcaccccgaccgacccgacccgccgcgacctgatcgaggatgaccgcccgtatgccggcgtgctgctggccagcttcggtttcaacgcacgcagcggcgaccgcctgcagaccacccagctggccgtgggcgtggtcgggccgtgggcacagggcaagcaggtgcaggatgccgtgcacaacatcctgggcgacaagaagttcgagggctgggacaaccagctgcacaacgagccggtgttcatgctgacccacgagcgcatgcgccgctggccggccgatgccagcgtcaatgccggcggctggggctgggatgcgatcagccactatggtggtgcgatcggcaacctggaaaccaaggccaacgccggtggcgaagtgcgcttcggctggaagctgcccgacgactttggcagcacgccgctgcgcccggccggcgagaacaccgcgccgacccgtggcggccgccccagcggctggtcctggcacctgtttgcgaccaccgacgcggcatgggtgatccgcgacatcaccctggacggcaacaccttccgcaacagccacagcgtggacaagcgccacgtggtggcccaggggggctacggcgtcgcagtgatgcgcgggcgctggaagttcgcagtggcgcgctaccacagtacccgcgagttcaatggccagcgccagtcgccggtgttcggcagcttcaccatcagccgctcgctgtaa

SEQ ID NO: 534352 - DNA, 453 bp, Stenotrophomonas maltophilia
atgcgtgcgatcggtgccatggccggatctggcccggagcgcgccggttccagtcagctggcgtttggccaccaggggcgccgccgctcgctgcaacgcagcggctcgcccgtgccgcctttgactttgatgaatactcttgggtttgttgccctgcggcccgataatgggtccatggaaatcaagtccgacaaccccgaccacggcttccagttccccggccagttcgagctcagcgccatgggcccggccaaccgcggcctggaacatgagctcccccgcctgctgctggctgccggcatcgatgtcgtcaatgaacgcatcagctggaagcattcctccaacggcaagtacgtgtccgtccgcatcgtgttcaaggccgagagccgcgaacagtacgacctggcgcaccaggcgctgcgcgaccacccggaagtgaagtggacgctgtag

SEQ ID NO: 534353 - DNA, 711 bp, Stenotrophomonas maltophilia
gtggacgctgtagccgacagctgcccggccgacgccgccccggaagaccgtgcgccgcgtccggcgctggtgcgtgacctcggccgccaggcgtacgagccggtgtggcgcgccatgcagcgcttcaccgaccagcgcagcgacaccgatgccgacgaactgtgggtcgtcgagcacgacccggtgttcaccctgggccaggccggcaaggacgagcacgtgctggcgccgggcgacatcccggtgctgcatgtggaccgtggcggccaggtgacctatcacggccccggccagatcgtggtctacccgctgctgcgcctgccgcgcctgggcatcggtgtgcgcgattacgtgtgccgcatcgagcaggccatcatcgatacgctgggcgagtggaacatcggtgccgaacgtcgcgaaggtgccccgggcgtctatgttggcggcgccaagatcgctgcgctcggcatccgcgtgcgtcgcggctgcaccttccacggcctggccttcaatgtggccatggacctggagcccttccaccgcatcaatccctgtggctatcaggggttgcaggtgacctcggtggtagacttgggcggtccctccgggatggaggccgtcaagccggtgctgctggaccacctggcccgccagttcggcctgctgctgcagcacacccccgaactgcccgatctttctgcggccgcctga

SEQ ID NO: 534354 - DNA, 1011 bp, Stenotrophomonas maltophilia
atgactgaaaccaccgcccgttccattcccctgcagatcgtgcagggcgactccccgtccgccgcgccgttgcaggccggggtcaagcagctgggcggtgacaagatcaaccgctcgccggtgcagttcgccgacgcgccggtgctgcgcaaaccgtcctggatccgcgtgcgcattccttcgggcaatgccgtgcagaacctgaaggccaagctgcgcgaaaaccgcctggtgaccgtgtgcgaggaagccagctgcccgaacatccacgagtgcttcggccacggcaccgccaccttcatgatcctgggcgaggtctgcacccgccgctgctcgttctgcgacgtggcccacggccgcccgaagccgccggatgccaacgaaccggccagcctcggccagaccgtggccgacatgggcctgaagtacgtggtggtgaccagcgtcgaccgcgatgacctgcgcgacggtggtgcccagcacttcgtcgactgcatcaccgccattcgcgagaagtcgccgggcacccgcatcgaagtgctgaccccggacttccgtggcaagggccgcatggagcgcgcgctggagatcctggcgcagaacccgccggacgtgttcaaccacaacatcgaaaccgtaccggacctgtaccgcaacgtgcgcccgggtgcggactaccagtggtcgctgaacctgctgaagaacttcaaggcccagcacccggacgtgccgaccaagagcggcatcatgctcggcctgggtgaagacttcgaacagatcaaggccaccatgcgcgacctgcgcgcgcatgacgtggacatgatcaccatcggccagtacctgcagccgaccgcacaccaccacccggtgctgaagtactggaccccggaagactacaaggcgctggaggactacggctacgagctgggcttcagccatgttgcttccggcccgatggtgcgctcgtcgtatcacgccgacgtgcaggccaagagcgccggcgtctcctga

SEQ ID NO: 534355 - DNA, 2178 bp, Stenotrophomonas maltophilia
atgaaattcaaagcccccgcattcctgatggccctggcgctggtcgcgccactggcgttggcggccaaggccgactcgcccgcattgcccgcggcggccaccgccgaccaggtgaccacctccaaactggtgtacggcctgctgtccgacagccgctacgcctaccgcccgcgcgcgctggacgaggccacctccaaggacgtgttcaagcgctatctcgaaacgcttgacggtggcaagcagtacttcacccaggccgacgtggcgcgcttcgcaccgttcgaggccaacatcgcctcggccatccggggcggcgagctggagccggcgttccaggtgttcgctgtctacaagcagcgcgtcggcgagcgcgtggcgtacgcgcgcaagctgctcaagcaggagccggacttcaccaccgacgagcgcttcgagtacgaccgcaagaaggtgccgtgggcggccagcagtgccgagctcgatgagctgtggcgcaagtcggtgaagaacgattggctgcgcctgaagctggccggcaagaagccggatgacatccgcaagacgctggacaagcgctacgcgacgctggagaagtcggtcaatgaactgaagggcgaagacgtcttccagttcttcatgaattcgtacaccagtgccgttgacccgcacacggattacttcaccccacgcaccgccgagaacttcaaccaggcgatgtcgctgtcgctggaaggcatcggtgcgcagctgcagcgccaggacgatgtggtggtcatccgcgagatcattgccggtggcccggccgcggtggatggcacgctgaagccgggtgaccgcatcgtcggcgttggccagggcaagtccggcctggtcgaggacgtgatcggctggcgcatcgacgatgtcgtggccaagatccgcggcgccaaggacacccaggtcaagctggaattcatcccggctgccgaaggcgccgatggcaagcaccacaccctggtgctgacccgccagaaggtgcgcctggccgaacaggctgccaagggggagaccatgaccatcccggctgccaacggcgagccggcacgcaggatcggtgtgatcaagctgccgaccttctaccaggacttcgaaggccgtcgccgcaatgccgccgactacgcctcggccacccgcgacgtggccaagctgctggccggcttcaagaacgacaagctggacggcgtggtgctggacctgcgcaacaacggcggtggttcgctggatgaagcgatcgaactgaccggcctgttcatcgagcaggggccggtggtgcaggtgcgcgaatccggtggccgcgtcaccgtcaacagcgaccgcaaccagggcgtggcgtgggatggcccgctggcggtgctgatcaaccgtggttcggcctcggcctcggagatcttcgctggcgccatccaggactacggtcgcggcctggtgatcggtgaaaccagcttcggcaagggcaccgtacagaacatcgtcgaccttgaccgctggccgagcggcgagacccagcgcttcggccaggtcaagctgaccattgcccagttcttccgcatcagcggcagcagcacccagcacaagggcgtggtgccggacctggcgttcccggccagcgtcgatgccaccgagttcggcgagagcacctacgacaacgcactgccgtggacccgcatcgccgccgtgccgcacacccagtacggcaacttcgcgccgttgctgccgaagctggaaacccgtcacgacgcgcgcatcgccaccgacaaggagttccagtggtggaacgaggacgtgcagcagttccgcaccgaagcggcgaagaagtacatctcgctcaacgaggcgacccgtcgcgctgagcgcgagcgccaggatacccagcgcaaggagcgccaggtgcagcgcaaggagctgggcctggccctggacccgctggccgatgacagcagcgatgacggcctgaccggcaacgagcgcgacatcgtcaaggatgccgcgcgcgagaaggctgccgaaaagcgcccggacccgctgctgcgcgagtcagcctcgatcctggccgacgcggtgaacctgctggccaacgaccgcccgctgtcggcgcaggtgctgccgcagtccaccggtgccggccgctgggcggactga

SEQ ID NO: 534356 - DNA, 585 bp, Stenotrophomonas maltophilia
atgcgggcctcccgtctttccagtgttgccgtggcgctcgccagcgccctgatcctgtcggcctgtggtggccgcgccgctgacagcacgttgcttcgcgaatcctttgattccggcgacaccttctcgcgcaccgttgatggccgtcccggtgacgcctgcgaggccgcacggcgcaccctgctcagccagggctatgccatcgcccgttccgacgcggcacaggtggaaggcaacaagaacttccagccgcgcgaggacgatcacgagcagctggtgctgcgtatttcctgcgcaccgcgcgggagccagacactggtattcgtcagtgccgtgcaggatcgctatgcgttgaagaagagtccgacctcggccagtgttggcgtcggtgcgctcggatctgtatcgctgccgttcggcagcaatgacgattcgctggtgaaagtggccagcagcacggtcaccgatgccgagttctatcgacgcttcttccagcgcctgcagcagtacctgcctgcggacgctgccgcgcccccggcggcgacaacgcccgaacccgcagcggcccccacggacctggggtga

SEQ ID NO: 534357 - DNA, 1260 bp, Stenotrophomonas maltophilia
gtgagtgtgcgtggcaggctgatgggcgtggcgctgctgctggtgcccgcgctgggcgccgcgtccacgtctgtcgactgcgtgcagggcctgttgcagcgattgggctggcgcttcgaagacgcggcggttgccttgcccgaggtgcagggcggccccgtgtgcacgcgtgcctcgctggcggcggggcaggcagctggtgacctgcacgtgcgctggcccgtggatctgccggctgcctcgcgccaggcactgctgcaacaactgctggacgatccggccacgatctgcgcctacgcctttgagctgggggcagccacgcaacgtgccgcgactgcactgcagggcaatccaggattccgtttctctggcctgcagctgggctggatcggcttcggcctgcacggcgcacaggcgcaaggctggcagcgcacgcgaagcttcggccgtggtttcgtgcccactgcgggcaacagccaggcgctgcaggcgttctacagcggcaatgtgcgcgctgaatgtggagtcggtcgccaggtcgcacaactggccacacagcgcgagctgtatggcgatgcggccttcgacgctggattctccgcagaagaactgtcgatcggtacgttcctcgcgctgcacgataccgacagcatcctgcttggcgcacacgccggtgactactttgccgatggcaaggcggtgcgcacctcggcgatgggccgccaggccttcgtcggtgtgcctggtttcatcgaacatgtgtacgacaagggcatgctggacgacctgagcaaccaggccgaaaacttcgtggtggtgtcggtgggcgaggaggccgcgcaggcgttggccgcgcacggcggccttgcctggtacgaccagcgcaatgccgagctgtgggcgctggcgcaggacatcccgcgtatcggccggcgctacttcgaacgcctgttgttcgagcgcgacccggaccttcgtgcacggctggaaccgcgctaccacgccacgctggcacgcatggaccgcctgctggacgatccgttctaccagcagttcgtgatctatgtgcatccgcgcggtatacgtcccatcggctaccacatcgcccgcctgcttgaccgcaacccgcgaacccccttttcgatcgacctggcggtgcacaatctgcataccacgctctaccggcgttggcgcgaggcgcagctgcgccactgcgcggctaccggcaggccaggcagcctgaccctagaccccaactga

SEQ ID NO: 534358 - DNA, 906 bp, Stenotrophomonas maltophilia
atggatattgcaatgatcggcctcggccgcatgggcgccaacatggcccagcgcctgcatcgcggcggccaccgcgtggtcggctacgacccgggcgaaggtgcccgccagcgcgccgccgaggccggcctggaggtggtcgattcgctggccgccgcggtggccgcgctgccggtgccgcgcgtggtgtggctgatggtgccggccggcgaaaccgtcgaccagaccctggctcagctgactccgcacctggccgagggtgacatcgtcatcgacggcggcaactccaactaccaggactcgatccgtcgcgccaaggcgctggccgaagacgacctgggctacgtcgactgcggcaccagcggtggcgtgtggggcctgcaggaaggctacagcctgatggtcggtggcgaagcgtcggtggtggagcagatcgcaccgctgctgcgcacgctggcaccggccgaggatcgcggctgggcacgtgtcggtccgtctggcgccggccacttcaccaagatggtccacaacggcatcgagtacggaatgatgcaggcctacgccgaaggtttcgcgctgatggagcgcaagcaggagatggagctggacctggcccaggtggccgaggtgtggcgccacggcagcgtggtgcgctcctggctgctggacctgagcaccgaagcactcaagcggaatccttcgctggatggcatcgcaccgtatgtcgaggattccggcgaaggccgctggaccgtggccgaagcgatcgcactggatgtaccggcgccggtgatcaccctgtcgctgctggaacgcctgcgctcgcgtgaatccaattcgttcaccgaccgcctgttgtcggcgatgcgcaatgaattcggcggccacgcgatcaagaagtcgtaa

SEQ ID NO: 534359 - DNA, 1044 bp, Stenotrophomonas maltophilia
atgcgccccgacctgcaactggccctgatcggctacggcctcgccggccgtgtcttccacgcaccgctgatccagcacacacccggcctggtgctgcacagcatcgtcagttcgcagcgagacacgttgctgcgcgcgttcagcgacgtgcacgtgcgtgccacgccgcaggaggtgttcgacgacccggcggtggatgccgtagtgatcgccacgcccaatgaacagcacgcgccgctggcgatcgcagcgctggccgccggcaagcacgtgctggtcgacaagccgttcgcgctggatgccgctgaagccgaagccgttctggctgcggcacgcgatgccggacgcatcgccaccgtcttccagaaccggcgcttcgatgccgacttcctcacgctgcaggcgctgcttgcggacgggacactgggcgacatcgccgagtgccatgtgcatttcgatcgctatcgcccgcaggtgcgtgaccgctggcgcgagcaggacggtcccggcagtggcctgtggtacgacctgggcccgcacctgctggaccagatgctggtgctgttcggctggcccgaagcgatcgatgctgatctggccgtgcagcgcgatggcggcagcgccatcgattacttccacgccgtgctgcactacccgcggcatcgcgcgatcgtgcattccggctccctggtggcagctcccacgccgcatttcagcgtgcatggcagcaaggccagttggaccaagcacggcctggatgtacaggaagcgcagctgcgccgcggtgtggcgcccggtgcgcccggctggggcatcgacccgcggcatggcgagctggtgcgctgtgatgccgaggacaacgtgcagcgcggcaccgtcgacaatctgcccggtgactaccgtcggttgtatgcgcagttcgccgcggccatgcatggcgactgcgaagccacggtcgatccggtgcaggcgctgcagctgatgcggctgctgcaggcaggcatggacagtgcgcgcgaagggcggcggatcgcgttggggtga

SEQ ID NO: 534360 - DNA, 384 bp, Stenotrophomonas maltophilia
atgagcaatacgacccgcacgctgattgcctccgccctgacgctgggcctggcgctgtcctcctcggccgcattcgccaaggatccggccgcgaagagcccgccgaccagcgcgcacccggcgacccatgctgatcgccacgattccaacgagccggtgaccgatacctggatcaccaccaaggtgaaggccgacctgctcgccagcagcaacgttccgggtaccgaaatcaaggtggaaaccgtgaacggcgtggtcagcctgagcggtgccgtagcgagccaggccgagaaggacaaggccgtcaccaccgccaagggcatcaagggcgtgacccgcgttgatgcagctgcattgaaggtcagcgctgccgccaagcgctga

SEQ ID NO: 534361 - DNA, 1818 bp, Stenotrophomonas maltophilia
atggcgctggttttcagtgacgacatctgggaccgctggcggctgccggccctggcgctggcggccgcagcgatcatcgtggtgccgtggttgaccctgcgcaaactgcagcaggacaacgagcaggcaatggcctgggtcaaccatacccaggcggtgggcgtggccctgcagcagctgcaggctgatgtgcgcgacgtcgaatcggccgcattgacgctgtccaagggcgtggacgcacccgggctgcgcgagcgcatggccgcagccaacgacattcccggtcgcttggccgaactggggcggatgacccgcgacaaccctgaccagctgatccgcatcggccgtatcgaatcgatgctggaagggcggatggcgcttgcccgcgagctggccagatctgaacccaacagcgatcaacgcgagctggtgaaggacctgagcacgcgctatccgatccgtggcctggtggaagaactccaggccagcgaacagcaactgttgacactgcgggccgagcaggcggcgcgccagcgcaagcagaccgagctggtgtcttggagttcgctggtgatccagctgggactgctcggcctggtgctttggctcctgcagcggcagatcgggcggcgcctgcacgccgaacgccaatcgctgcgctcggcggcacgcgcggcatcggtgttgcagaccgtgcgcgaacccatcgtgctgctcgaccgcgacctgcgcgtgcagttgcataaccccgccttcgccgagctgtacgggctgcaggacgaacgcgccgatggcctgctgctggaaaacgtcggcgacggtgcctggaaggacgctgtcgtgcgccaacgcctgtccgacgtgctgctgcgcggccgcgagctgtgggatttcgagcacgaacagcgcaccgccgacggcatggcgcgctacatgctgctgaacgcacggcgcatgccgctgcccgataccgatgatgaagtggtgctgctgacggtcagcgatgtcaccatgcaacgcgcagtccagctgcgcgttgaagagctcaaccgccagctggaaggcaaggtcgcgcaggtgtccgaggtcaaccgcgagctggaggccttcagctactcggtctcgcatgacctgcgcgcaccgctgcgccacgtcgccggattctccgacaagctgtcgcgccacctcggcgacgccgccgatgacaagagccgtcattacctggacgtgatctccagttcggcccggcgcatggcggcgctgatcgatgacctgctggtctactcgcgcctgggccgcgcggcgatgcgccagcaggcggtggacatgcagtcgctggtggccgatacccgtgccatgctcgattccaacctgcaggccgaggcggagaacagtggccatgtgcaccaggtggagtggagcatcgcgccgctgccgatcgtggtcggcgatgagaacatgatccgccaggtctggctgaacctgctcggcaacgcggtgaagtactcgggcaaccgcgaaccggcgaagatccgcgtggactaccagccgcagcctgacggcggtcatcagttcacggtcagcgacaatggtgcaggctttgacatggcttatgccggcaaactgttcggcgtgttccagcgcctgcacaaggccagcgactacccgggtaccggcatcggcctggccagcgtgcgccgcgtgctcacccgtcatggcggccgtatctgggccgaggctgaaccggacgtcggcgccaccttccacttctacctgcctcccgcgatcgatgcggacaaacaagggccttctgcatga

SEQ ID NO: 534362 - DNA, 441 bp, Stenotrophomonas maltophilia
atgaccactttgcgcaccattcttctcgccgaagacagcccggccgatgccgaaatggcgatcgacgccctggaagaggcgcgtctggccaaccccatcgtgcacgtcgaggatggcgtggaagtgatggactacctgttgcgccgtggtgccttcgccaaccgcgaggaaggcctgccggcggtgctgctgctggatatcaagatgccgcgcatggatggcctggaagtgctgcggcagatccgcgaacacgaagagctcaagcgcctgccggtggtgatcctgtcgtcctcgcgcgaggaaagcgatctggcccggagctgggacatgggcgtgaatgcttatgtggtcaagccagtggacgtggaccagttcttcggcgccgtacagacgctgggcaagttctgggcgttgatcaaccaggcaccggaactcgagtga

SEQ ID NO: 534363 - DNA, 1512 bp, Stenotrophomonas maltophilia
atgcccttgaccggtcccgccctgggggcgctgcgcatcctgctggtggaggactcaccggaagatgccgagctgatgtccgaacagatgctcgaagcgggcctggaggcccgcttcgagcgtgtcgagagcgaggccgaactgcgccaggcactggccgcgttccagccggacatcgtgctgtccgacctgagcatgccggggttttccggtgatgatgcgctgcgcatcgtgcgcgagacctcgccggaagtacccttcatcttcgtctccggcaccatgggtgaggagaatgcggtggcggcgctgcagaagggcgccaatgactacatcatcaagcaccagccggcgcgcctgccgtcggcggtggcacgtgcgatccgcgatgcacgcagcgcgatcgagcgcgcacgggtggaaaccgagctgatgcgcgcacagcgcctggaaagcctgtcgctgctcgcagccgggctcagccacgacctgcgcaacatcctgcagccgttgctgatcatgccggacctgctgaaggcgcgtaccgacgatccgcagctgcaccacctggccgatgtcatcgccgagtgcggccgccgtggccatgagatggccgaatcgatgctgtcgttcgtgcgcggttcgcgcaaaccgagcgagcgcatcgagatcgatggcctgttcgatgcggtggcactgctgttgcgcagcaacgtgcctgatgcggtgcgcctggaattgcaggtgcaggacgaaggcctggtggtcgacgccaactacaccgaactgcagcaggtgatgctgaacctggcgctcaacgcgatacaggcgatgcccaacggtggccgcctgagcctgactgccagccatgccggccatcgcgatggcgtggactggatgcacatacgggtcgccgacgaaggcatcggcatggatgcggacacgctgtcgcacctgttcaatccgttcttcaccaccaaggccgacggcactggcctggggctgatttcctgcaagcgcatcgttgaaggtgccggcggcagcattcacgtcagcagccagccggggcagggcacctgcttcgaactgcgcctgccgatgcacgacgccatcgatggcagcgagccgatcgaacagctggtggccttgggcagcggccaatcgatcctggtggtcgatggcgaagccacgcgtctatcgctgctgggcaatgcgctgtccagccagggctaccagctgcagttggcttccgatggcccggcagcgctgcgctggatgcagcaggaggcgatgcccgcgctggtgattgccgatgccggctccaagctgctgccggccagccagctgctgggcgagatggcgacgttgggctatcgcggcccggcactggtactggaagacccggcagtgccggtcgcggccgatgccttcccggacggcgtggaggtgcatgtgctgcacaagccgcagcagatgcagctggtcttccgcgcagcggccgaagcgctgggctga

SEQ ID NO: 534364 - DNA, 186 bp, Stenotrophomonas maltophilia
atgtttggcatcgaggaattgaagtatggacatctgaacaaccccacgttgtcctacacagcagtgacacgcgccaagacggcattgaatgcgtatagcaccgggacaacaaaccctgagctggaacatgcttttgcagaacctaagcatatgactatcgatgaattatttccgggcgcgcactga

SEQ ID NO: 534365 - DNA, 291 bp, Stenotrophomonas maltophilia
atgacctacgatgccttccttgctgagctggccctggctggactcacagtgcgtgcgtttgcagaactcatagggatgaacaagaactccgtgtcgaactactccagtgccggcagggtgcccacccatttagcagtcattgccacgttgctgtcggagttgaaagggcgcggcatcgacttcgaagaagtgctggcaaagatcgaccggacgcccaagaagccaaggggcgcggccaagcctggccgtttcggcggcgacaagcaagagcaattggagctgccatcgtga

SEQ ID NO: 534366 - DNA, 3156 bp, Stenotrophomonas maltophilia
gtgatcaagcagcctgttttcaccctggactggctccatgcaagtctaggctggaaccgccccgagcagatcctgcgaccggacggcgcgggtgccgcgaagtttgcggctttggtgcaagagaaggtcggccgtgctttgactggggaggacgcgggccaagggtatcgcattggtgtgctcgccgccgtgccgagcgctgcgagtaccgaaccacccatcgcgatcgtggtcgagttttcgcaaccggcttcggaggacacgctcagtgagcttcaccggttggcctggaacttctctcattgtccggccctgatcaccgtcgaacctagcctagtgcgcgtgtggacatgctgtgaggcgcctgtctccgatcagcgccccacggaccgggtagtccacacgatcacggcggacgagcttgccggatcgcaggccctggcgcttgagcgcattgcagcgcagtccttacattggatcaatctggtgtctggggtgtttttctctaaacatgccgggcgtttcgatcgggacggacgcgccgatcagttgctgctggggaatctgaggcacgtcagacaacttctggcagagatcggcttggacgacgacgacgtctgccatgatctgctggcacggatcatttttgtccagttcctgtttgatcgaaaggacgtggacggcaaaccagcccttactgcatccaaactcgctcggcttcatatggaaggcgtgctgagcaagccccatgcaggcttcgatagtattctttcgagctacacggacacctacgcgttgttcgattggctcaatgaacgcttcaatggcgacctcttcccagggaagggcgatacgctgcaagcccgcgcagaaggctgggctgcggaaaagcgcatcgtcaacaagaagcatttgtcattgttggccgatttcattcggggcaatgttgacatgccttccggccagcattgcctgtggccgaagtactctttcgacgtcattccgctggagttcatcagcagcatctacgagaccttcgtcggtgaacgcgcggccgacggcggcgtgttctatacgccgccacatctggtcgatttcgtgttggacaaggtgctgccctgggacgggatggattgggacctgaaagtgctggacccttcgtgcgggtccggaatctttctggtcaaggtcttccagcgtctggtccatcgctggaaactggccaacccaggtcagccggtgcgcaccgagctactgcggcgactgcttgagcgcaacctgattggcgtggacatcgacccacacgccgtgcgcgtcgcttgttttagcctctatctggctatgtgcgacgaaatcgagccgcgccactactggacacaggtcgtgtttccgagcatgcgaggccgacggttgctgtgcagcgacttctttgcagagcagaacccagccatcaacacgcagaccagcgcacagggctatgacctcgtggttggcaatgcaccatggggcgaggatctcgtgactgcacaggcaaaggaatgggctcataccgacgggaggaactggacggtcgcgaacaaggacatcgggggactcttcctgaccaaggcagcgcagctgttgaaaccgacggggcgcgtggcgatgattcagtcggcaagcgccttcttgttcaacacgagtgtcaagtcctgcgagttccgccgtcagctgttccagacataccgcgtcgaggaggtggtgaatctggcagcgcttcgattcgaggtatttaagcgcaagtcacacacgaccaagacgtccatttcgccttcgtgcatcgtagtcctggcacccggccgaccggcatggagtgaccgcatctcgtacgtcagtccgaagcggctcaaacccctcaccgacgagttcaccatcgtggttgaaccccaggattgtcgtaccttgtatgtccatgaagccctggaagatccgaccatctggacggtactcatgtggggctcccctcgcgaccgcgccctgctcaagcggttggtgggataccccacaatttccaatcctggcgagtcgatcgaggtgctgacgcggcaaggcttcatctatggtgaccggacccgactccagcctgacttggatggacggcctctgtttgaccaagttacgtttcccgacggatctttgatgtacctgaacacggaccggttggctccggcgcgcgatcttcgcctgcattccaaggactccaccaacttcgcagccttcgaatggccccagctcattctcaagaaaggtctgcagaagggacatgccagattccaggcccgcttggcccaatcgaacaggagagcggcggccgtgttcaatgacaactacgtttcgatccatggcccccaagcgttccttgacgccgcctgcctcgccgtgaacagcctgctggccgtttatttcctcaagctcaccagcggacggattgccgcctaccgtcccgcagcactgaccaacgaactgctggatatcccgatcccttacccactgccgcctcggaccaagaaggcagaaaactatgaggacatcgacgagatcgtgtaccgcgcgttcgcgctgaaggatgcggagcaggtgctcgtcgaggatctttgcgaattggcactcgccgattttcaagagaagaagggacgtacaaaggtcagggggcagcgtatggaagagcgaatcccgtcagctgccaacctccaggattactgcatctacttcatgcgtgtgctcaaggcgggttttggtgccaacaaggccgtgagtgcgaccattttctgcacgccggacgacaaggcattgccgtatcagatggtatccattgaactgggccgttcgtccgtccctcccgtcgagttgcggaagatgaccaccctggcgcttctggacgaactggaacgccttgatctgcaggacggtaaagacactggcggccgattggggatctataccaagcgcgtggtgcgcctatatgacgccagccatggcgttccgatgatcatcatcgtcaaacccaacgtgcatcgctactggacaaggtccacggccctgaacgacgcggacgaagcctcgctggatttgtttcgaatgcagcagcaagacggtacgaagcgatccatccaatga

SEQ ID NO: 534367 - DNA, 597 bp, Stenotrophomonas maltophilia
atgcaagcacccgcagacacgcttctagccctcgtctggacggcttacgacgacatgcgggcgtcgccgccaactattgacacgcgcgatctggaacgcagcatcacccagcgactggaagcccgcatcaacgatgcgatgtcgggtgatgaaccctttcgagttcagcatggcgcctatgaacacgagaccatggctgcgccaccggcgcaaccgccccagtacgacatcgcgtttgtgctgcggtcggacgaacggttgatgtggcccctggaggcgaaggtgctggagaccgctggaaggatctcggagtacctagaggacgtcaggaagcagttccttacctgccggtacgcgcctttctccggctcggcagccatgctgggatacttgctgagcggggacacatcagaagcactggatggcatcggcaagaagttggggtgcacgctgcacccggtgggtggcccctcgtcgacgcgggcgcacaggatgtcctatcacgttcggatggctccccccggaaaaccatatccccaagacttcacctgccaccatttgatgctggagtttgtggggctcaagcgccacagctga

SEQ ID NO: 534368 - DNA, 324 bp, Stenotrophomonas maltophilia
atgtcttcgccagtctcagagatgctcaacgttcccagctacatcgcgaagaatgggctcgagttcaacatcaccctgaacaagaagcagctcagctctgctcacgactactggctttacttcatcgtctgcaaccgcaaaggctgggggaatattaatttcacgctttttgctacaaagaagtcgttccctttggagcagatcgcggatcaccttgcgaagactctcggcctcgacgaggttaagacgaggctcgatgcagtagatgatggtggaaagcagcttctcttccccagttttgtcgagggttgggctcttatttga

SEQ ID NO: 534369 - DNA, 3837 bp, Stenotrophomonas maltophilia
atgggggtaggtatgagcgttgttgattcgcgttacgacaagctctttccgcgagcaaggattgttcaagatgaggtcgttcttgctcaggcgtggaagaagactcacaccttcgtgcggcgttacaactggtacgccgatgtgttggagctcgacgtgtccggggtctgtctgccggagaatctggccgcttggtccgcagatgttgcgggtgggaattacgcgacagatgccgcgtggctagttccggcacccaagaacggggtgtggtgcttcgcaccagagtcggagggggggtggcagccgcagcgcagcgatggtgatcaagcccccgtcatgcgccctcttgctcatatcggagtgcgtgaacagtcgattgcgaccgccgtaatgctatgtctggcggattgtattgaatcggcacaaggggatacgtcccttccagcggagagtgctgcggaaatgggtgtctttagctacggcaacaggctattttgcaattggtcgaaggatcacgcttacgcatccttcgcgtggggaaattcaaatacatacagcaggtattttcaggactaccagaagtatgtcgaacgaccactaacaattgcgaagaaagttgaagctggcgcagatgccaaggtgttcattgtcagtctggatctgagtgcattctttgacaacgtggacattgctttgctggtagagaagctgaaggtcgcatataaagagttctttgataactctgagggtgatttgcagcctgcggacgatgcgttctgggatattgcactgagggcattgagtttcaagtggcgtgatgaagacttggctcttagctcgctgttccgggatggtgtactcccgattggccttcctcagggattagtcgcgagtggattttttgccaatgcatacttgcttgattttgatcgtgagattggctccttcatcggccgtaagccccgaggtggaagcttccgaattcacgactactgccgctacgtcgatgacctgaagctggtgatctcagtcgggacaaacgacaagatgcctcacgatctcgccaggttgggtgaggaaattactggttgggttcaggggcttctaaagaagcacaccacgccaatcgagccaagtggtacgtatcttcggctcaacgcgaagaagacccagctggagacgctcgttgagattggagctgagtccggcacaggggcacgtatgaagacgcttcaacggcaactgagtggcccttttgatcttgattccctacggcacgctgaagccgggttcaatggccttctctcgttagctgagcttggactcatggagggcgccaggtccgcacagggaaatcttagtctggcaacggtggcaacgttgaagcatgaagttagggatgacactcttacgcgtttctccgcgtaccgattggtgcgctcacttcgcgaacgtaggaggattactgacctgacggagtccagcgatggtgagcgggcggttgatgcgttgcggcatgattaccaagcagctgcacggcgcttggtctctgcatgggcactgaatccttctcttgttcaggtgcttcgatatgcgctggatatctggcccagtatcgagcttctggagcctgtggagcaggcgctattgagcaagctgggggactctggccacaactccgagctggggcggagggttgcctattatgttcttgccgacttgtttaaagctggcgcaactgaaactggtagggaggctctgcgggatcctaacttcgaaatttctgacgtggaagcataccgagttgcactcgcggacctcgcgtcaagaatgctggatgaatgggagaccccttggtacgtacagcagcaggcaagtcttcttctggcatcagttgggcaagtagctagagttccacggggtgcacctgagcttcgattccatagggccctccatctcttcgctcgaggaaggtcgcctgctgtgggcatctccttcgaggaggagatcgtggtgtccttagttggccaccagatttttaaggatgccgggcgctacacgcagtggttcataaattttggcagcaagaggagcagaaggcaggtgtcaaaggcttgggagatagtggctggagcttctcctgatctgcttaggcatcttcttggttccaagcggaatgggatgcagtcgttgatcgcttgtgcacccaggcatctggtccggttcgcggagagccgatggtcagccggaagctcgcctctgcctttgaagaagtggttgccgcttctgactgttgtgacccacccgcgtcagatcttcagtcaggagaattctctgctaaagctcgccgaagcgttaggtagatcaaagacagtgcgagcctttgatgctgagcttctcactccattgaacgtcgaagtcaggtccgatgactgggaccagttggacaatccactcttcgctacgctggaggcgcgtgctgttgcttcacttaagagaacagatggtacgtatgacactcctccttggtgtcggggcgaagatgcctggatgtatgcgtttgggcgcttgctgcgcgctgcggccacaggtgagcccgacttcaccacgcgtcactggctctccagcgagggcgcgggttggtatagtggcctaaggagtacgtggcagaagcgtcgcttgggcatgcttcactccgcagagggcctgagaggcaccacggccgcaattacgccgtggttttcggatttgctgatgcacttgttgaggtggccgggtgttgcggaacggaagaatttaagggtagcgacgatttcaactcggcgagagtttgaggacgcaattagtaaacgccttgagttccaaggcagactctatggtgtcagtagccgcttgcccatataccgctatccagtcgaatggcccttaaacaaagagcgcggactgagagttgcaatggttcagggtctcatgccgcttcatcatcacttcaatgatgggctgtcatgccttgatgatccaggttaccgggagaagcaccggaatcacactgcagctttgctgcatcttaccagtaagcacttggcagcacgcgagtatgtattgggagcttcggagaagcctcatatcgatgtcgtgttgttccctgagctcagcatccatgtcgacgaccaggatctcatgagggccttctcagactcgactggggcgatgctgttctatggactattgggggcgaaggagccgaccactggcgagcctatcaatgcggctcggtggcttgtcccgcagcgacatgcaggccgccgctcttggattgaggtagatcagggtaaattcaacctcactcctgaggagcgtaggctaggtataaggccgtggcggccttaccaggtcgtcatcgaacttcttgactccggtagggcgatcgaaaggtcctaccgagtgacaggctcagtgtgcttcgatgctacggacctttctctggcctcggatctacgaaatgaaagtcacatgtacgtcgtcgcggctatgaacaaagatgtaaagacttttgatggaatggttgctgcgcttcgatatcacatgtaccagcatgttttgattgccaacatcggcgaattcggcggctctacagctcaggcgccctacgaaaaggagcataagagactaatgtctcattctcatggcggtaatcagctggctgtgtcggtcatagatgtgcgcttggaggatttcgggcctgagcttgaggcagcgctgcccgcagtggcgaagatgaaggaggtgaaggagcgcataggcaaggcgccgcctgcgggactagatcgcgcctag

SEQ ID NO: 534370 - DNA, 5085 bp, Stenotrophomonas maltophilia
atgacaaagaagaaactcacccctcgcctgcctctacagggcactcaagtaacgagcaccattgccactggcggtggtggcggcgtctttcaggcccgggttggtgcgctctacttagccaacatgcttacgggcataccaacagccttctgcctgcatggcatccgggtttcggagctgcgctttgaagctcgctataaaggtgcccacaccgacgacatatactgccggctcagcagctcggcagagggttggctacagctaatccagtgcaagcgcggcctcaacgccacggctggcaacaaggactttatcgatgggctgcagggcgcttggcgtgatttcctcggcatcgagaaaagcccctttgatcgctcctgtgatgtcttggttcttgcggcagcgtccccggcgacgtccgcaaaccaggcagcaaagcgtctttgtgaactttctcgtgcatcaacggatctagctgactatctacagaagctagattcaaacaccttcggcaagatctacaaggatgcctgggaagcattcaaaacgatttcgaagagtacattgaccatccagtatagcgaggagcttctctttcagctgctccagcgccttcgcattgacattcatgaccttggaaccgattcctcccaggagctcagcctcgttcaggccctgctaacctccgggcatccaggcgactcaggtgagttgatttgggatggtcttgtctcctatgtacaagagcaaggtatttccgtcgggactatcacttcgacgacgtggcctcacaccgccaaggagggacttagggcagcggtgagtcgcttgtcccctcaccatggattgagcagtgttcctgatcgactgacgcaacgagcgctgcttcagctcgctctcatctcgacaaggctacccaatggcaggcacattccccgaggcgaatgcgtgggtcgcgtgctgtcagcacttgatgaaaggcagcttgccatcattgtaggtggtccaggagctggaaagtcagccttggtgtctgagctatcgtctctgcttcgcgagtctggccagttgcttttcttcagggctgatgaactggacgcccctaccttggcagcagttcagtctctgcatggactgcaggatccagtccagagtgttgacactcttctacgagcaggcacccccactataatcatcgattctttagagaaggcactcgaagcacagaatccaggcgcacttgaagagcttctcgcacttgttcgcaagaacaagtcatcgcggctctgcgtcacgacccgagcctacgctttgaacggcctgtacacaaatttcctctacagcttttctagccaagttgtggacgttccattgctcacagaagccgagctcttcactgcgatagcctcaagcccactcgaggctgtcgctgccaacgaccaaggcgtaaagacggttctgctcaccccctactacctgcagcttgcttttaagtacgtactcaagggagcggcccttccaagtgcctccggcaatgaccttaggagggcactctggacagagcggattgcaccgaccagggggttgtcttctgccctccgcgcacgacgccaatcgacattcgatcgaatttgctacctacgcaccgagcgcttttcacagttcgtcaatccccctcctgacgcagaagctgttgcatcgcttttgcaggacggcgtactcgcaagcgatgaagcttctcgagtagcccctgcacacgatgttctagaggactggtccctgttctttcaagtagaacgagaggtactttctgcggagcgcgattggaccgcgctattcaccaagcttggagtacatgcaggcatgcgtcgagcactgcgctcttggacggcgcagcgatccgccgagggcgacgatagggcttatgcgctgctggaggaagcaatccaacccgaatcggctataacacagctctggagggatgagattgtcataggactcctgcgatctgagcgggttgaggaactagtggcgaagttaggaagcgatggcttgttcaacggcactgctcttcttcagcgtttgagccacttgctgagagttgcttgcaagggaccgacccccgtcaactactcgcacctgggagacgacgccgcaaacagagagattctcgccagaatcggaatggctgcaccagtaggaaaagcttgggacgtgatagtgcgtctggtcgctgaggcattcccgtctatgccgcaggaggcccactcgtgggtagctcagctagccgaggacgcggttgcgcacgatgacgactggcagaacccgacccctcgggtcaacgccatatttagcatggctgagcgctactgccggcaagacaaagaaacttggtaccgaggtaacactctagggaagcgattctaccaactcctgtgtcgttgctctggagccgcgcctgcaaagttcagggcattcatcgacgccttggtgaaacaggtcgcagacgaccgagcggaccgtgacgcctacgcagaagatcgcctggaattcattaccaacatactgcactcccgggagcctgcgtacttcaaccctgaattggtacgcgcttcattttgggcgctgtacgtcgaaactttgcctcagaacaaacggcaatttgacatgagcggttgggaagcagctatgggactcagtcagagggcagcccactcgttctttcctccgtctgtactgcaaggacccttccggtggcttctgcttttctcttttctcgaaagcgttcattttattgtcgatctctgcaatcacgcagcagcgtcatttgcccagactcatccggaggaagtgattattctcccaccggagcaaagtccaaacggacgggcacacgtccacgactggcgactttgggcggcctatcgcggacagtccgtctcgagctatgttctagactgtgcattgatggcgctggaagagaggctactgaatgcagcggctgcgcacccagaaatcatctcggaagttcttgaattcatcttggaacgcggagaatcgagcttcactacgggactagtggcaggtgtcctgatggcacatccgagcctagcctcgcagaagctcctggcgctattccgctccccgcagttcttcgcagacgacatggcgcgttacgtgagagaaacgagcaccctggccatccgcggagggcacgatggcttagatatcgaaaggcagaaagagcgtaccgccagcaaccgacttccgcacagaatgcagcacttggagatgctggcgctgaggctgcaacttgagcgccccgaccttcgggacgagatctttgcgatcctcgataagcacattgaaggccttagccatgcaacagacgtccctagcggctggcggatggcaatcaagcgcatggacagcaggggcatgaagctcggcgagccagtcggcgatggtcagtctgtgaaactagagatcgcggacctagagccagagttgaagcaagtaagcgaccaagcggaattgagaggccaacttttgaaccgcgcgtccatgctgcgcctgtgggcgggagccgtgacccagccaaccttcgcatcatcacgaggggcagcaagtcggtttgcctccgcatctgaggcgtacgaagagtttcagcgcctccgtgaagaggcgaagggtgaggaggagaccctactactgggactggaagacgatctcccctgtgcgttgattctgcgctggccggccgagaactcggaaggcctacggtgggcaaaggactatcttttcgaagtcacctcgaagtatctggacagcgataattggatccggcgcaaccctgcgacgggcgagctgagggccaagacgcttgtcttgctggcaagtgcagacccaacacatcccaagcttccacggtcactcgccaatatcattacggagcccgtctggtctgtacgtcgtgcagcagccgttgccatctcagaagctctgcgccccaaacaacctattctcgccgatattctgacaacggcgttggcggagtatgccgaagcaatcgaaatcgccactggcgacgcaagaaggcgcgggaatggctacattgatgatgcacgacaagccatcaacaagcgcttggtggcggcaattgaggccgggacggctgcaaccagagcgagtccaaagcgactgaccgccgttaaggaatggaccatagcaatcgacgcatccctcagcgaagcttcagaagcctggaggatccaggcacttacgacgcttgctcgtcagatggcccaccaggaaagcaagctgcgcgccgatcgttacgcgccggactatgtagactttgaggcgcgcagggaagtgggatcccttctagccgctgagctgctagcgcaggacaacaacaacgctcctatctttgcgctcctcgaatactgcatcgaccacggaccggaactcagtgaaaggctgctggaatcaacgcttacggaatgcatgaagcgagattacgctaacgcggatgcgttctggcgagtctgggacagagccgcagcgaagattctgcccgacgagtcattgcgcacgagctcccggcgtgtctatagcaggaatgagaagctactggctgttctgctgtttcaatccgtgccatggcacacgaattttcatgacttgccgcttctgcgaagccgcccgcgcttcgtcgccacctgtctggtcgctgctggggacagcctgcacgcgcttgaccgaatccttgcgctgatggcgggtgtcggtagggcaacggcggtacccaccgcattgggccaaatgagagacgccatagcgaaggcgccggcagccctgttcgacgatggtgacagcctttggcacgccgagaccatctgccagactgcggttcacgaacatcgccaagcgcttcttcaggatgtaaacctcaggctcgccactctggaggtgcttgacaggcttgtagattccggttcgtccctggcctttcagttgcgcgactacctagcgacgtcgccaatcgctacaccgtccacacctcaggtctcaggtaattag

SEQ ID NO: 534371 - DNA, 780 bp, Stenotrophomonas maltophilia
atgcgaatcattctcccctgcccaacatgtactgaagagctcatagcagatgggggcgggattccttccgacggcgtagtcgttgaaagcagaacagcgcctgttcaggacgatggcatctatcgcaccaaatgtccgaatgaccatccactcctcgtagttcttggaaacctgccatttgaactcctgttcgagagcgggctagaggctctcgtggatggctactttcgtgaatcaatcagcagcttcgcctcagcactggagcgactctatgaattctccattcgggtacaactgacttcttgctcaacttccaatgcgtcgattgagacgatgtggaaatcagtagccatgcagtctgagcgccaacttggcatgtacatagccttgagaacatctctggatggtagcccacctccacttctagaccagaagctcactaagcttcgaaatgcggtaattcacaagggctacttctcatcgagtcaggaggccgctgagttcggcaacgcaacgtatgaattgatcattcatgaagccgagcgcctgaacactcgcttccctaacgcggttaacatcacgaaagaggcacgccgtgtgaaggcgtttagcgcactgcaggagggggatacgccacagtatctttggctgggcttagccgtggccacgccaacagagcggccgttcgctgaaatcttgcgaaatgcatcaatcgccatgacaggacgacggaccggccaagcgccatgcgcgccagattcttcttcgctagattgctaa

SEQ ID NO: 534372 - DNA, 486 bp, Stenotrophomonas maltophilia
atgaagaacaatcccgctgtaaggctgctgtgtctctcgctgcttcttcaagcctccgtgctgcagatggcgtgggcaggcgacagcgatcatggggcatggacaggcagctattcgcaggcgagcgatctgtgtaccgaaccgggcagcgggcgcagttgccgcgatgggttcagggacagcctgtcgattgtcgaagaatcactgggctatagggttgagctgcacagtacccaggcgatgcagcacgtctgctccttcgtgctgtatatgaagccagaaggcggaaagctgattcatcagtccgaactaggcacagtggctatcgagcaacatgcaggtgtgctgagaatctcatccggcgggatcgacccgacggcaatgggcttgggcttgtgcggcacgcatgctgatattgatggtctggagtttccttctgcgggcaatcgtacgcattccaggcaacgcgatggcgcccgctcctga

SEQ ID NO: 534373 - DNA, 132 bp, Stenotrophomonas maltophilia
atggcgtggatctactgggtgcagctgcggtctttgatctgggtccgccttgagcgagccgagcatcgcaggggaatcaggggcgaagaggcgccggtgtttgagcgcagcgagttcggcgccgtcccctga

SEQ ID NO: 534374 - DNA, 681 bp, Stenotrophomonas maltophilia
atgccggccagcggccggcactaccggggcgtcagcccagcgcttcggccaccgcgcggaacacctgctgcatcggcagcggccaacaccagccacgcatctccagagaaaccggggaccggtagtgccggccgctggccggcaaccgcagtgatcccatcgcacggcgatgccggccagcggccggcactaccgggcatcagcccagcgcttcggccaccgcgcggaacacctgctgcatcggcagcggccaataccagccacgcatctccagggaaaccggggactggtagtgccggccgctggccggcaaccgcagtgatcccatcgcacggcgatgccggccagcggccggcactaccgggcatcagcccagcgcttcggccaccgcgcggaagacctgctgcatcggcagcggccaataccagccacgcatctccagggaaaccggggaccggtagtgccggccgctggccggcaaccgcagtgatcccatcgcacggcgatgccggccagcggccggcaccaccgcggcatcagcccagcgcttcggccaccgcgcggaagacctgctgcatctgcagcggcttgtgcaacacatgcacctccacaccggccgggaacgcgtccgccgcgactggcaccgccggatcctccagcaccagcgccggaccgcggtag

SEQ ID NO: 534375 - DNA, 1086 bp, Stenotrophomonas maltophilia
atggggcatcagatttcggtgttgactttgcatgagggtaaatccttggaggtcgcgtccgagggcggaatcaagatatttcgatttcccttgaggaacgcttactggccgtttggtgccaagcagatgcgtgctccctggcggaaggccctttggcacgcgagagacttctataatatggaggcgagcagggacttggctcgagtggttaaagagctccggccagatatcatgcatactaacaatatctcagggttctcggcttctgcgtggcaaactgctttcagtttgcgtattccgatcgttcacacggcccgagattatcatctactgcaccctaactctaccctattttccggtgggggagctcaggattcccgttccttcagtgcaaggctgtgggcggctggcaagcggccttttgtcagaaaggtaaatcatttcgttgctattagtgagtacgtaagggatatacatgttcgctcgggattgttcaatcactgctccgcgagtgttatatacaattcagtaagcccccccgatgcgaactattgtccggcacttctcgatggtcacaaggtatacggcttcatcggccggttggatccatccaagggagttgagagggttattgaggcagccagaatgctgcccgggcgacgttgggttattgccggtgatggcgaggctggctatgtggattcgctccgccgctcggctccgcccggtgtggaatttattggtaaagtctcgccttcttcgttcttttcccggataaatgtactaatcatcccatctttgtgggcagagcccctcgggcgggtggcgattgaggcctatgcgcacggtgttcctgttgcttcttccggattgggagggctcggtgacattgtcagggatgggcagactggcttcatctttgatccgctcagtactgagagcttgcttgatgccttggtaaaaattgatagaacggattttaagtttctggttcaaaattgcagggattacgcaagtagttttactgagctggcagttgctgcgcattacgttgacgcttacggccaagcgcgggcggaattctga

SEQ ID NO: 534376 - DNA, 1050 bp, Stenotrophomonas maltophilia
atgagcgcccgaaagtcgcctcttgcctcgcgaactagccggattgtctacgatgagcgttggtttggggatacgggtattggccgattcagtagagaggtcggcgtgaggctcgtgaaggcttcggcattaccattaactggaaatcctgccggtgcctgggacgtaatgcggctttccctttacatgctgttcaactggcgttgtgttgttgtgtccccggggtttaactccccaattgtggggctttcgcgctttattttgacagtccatgacctgaatcatatagatgttccgcataattctggattcctgaaacgtgcgtactatcattttgtactcaaacgtgcatgcaggaacgctgcgcgagttcttacggtttcaaattattcccggcggagaattgtagaatggtctggggccagacccgaacaggtcgtggttgtggggaatggagtctcggatgccttcttgaaggcgggaatgaatgatgtcagtcgcgatccgtccgagggctacctgttctgcgttggtaataggaaggctcacaagaacgagggggctgcaattcgagcgcttgcggcattgagggattatccgaagattcgcctagtgttctccggagagcgctctgatgagttggattcactggtcaatgaatttggtttatctggtagggttgttttcgcgggaaggcttagtgaagtgcggctagcggaaatgtatcagaacgcggttgctctcgtgtttccgtcgctttatgagggtttcggtcttcctgcaattgaggcgatggcagttggttgtcctgttcttgcgtctagaacgacttcactgggcgagatcgcgggaggcgccgctttgctatttgatcctgaatcggatgctgagatagctgcgtgtgtccaaaccgtggttagttcttttgaggtgcgacgggaactgcagcggctcgggctggagcgtgtcaaatcattcaattggggcgaggttgctaggctagttcgacatgttgtcgaggacagtggtgattttggagaatctccatag

SEQ ID NO: 534377 - DNA, 1284 bp, Stenotrophomonas maltophilia
atgatgaacttgaattccaatgctctgcggcgtcgattggctttgctgctttgcgccgtctcggcattcttcctgattgccggcaacttgcctcgtatgatcccggccgttggaggggcgataaacggcggcgaagtcgtatggctgttgtgcatcggcacgtttgggttggcgtttcttgggtctgctctgtctgttcatgcgctggtagctgtggtgggggcttgcattctttcatttgtagtcggcctttcgaaatttggttttagtggagaggctcttgcgtacaacgttaggctttgcgggcatttggtgggtggagttgttcttgcaagatcattgtgggagctctatcgcgggaactatcgggcgctcataaagtcggttgttattacttatacggcgttagctgtcgccgcatttgtgttgtttgcaatatttccggatacgtctcaattgtggaaagtaatgcaggattccggtgtcgactttcagggggatccgcataatggtaggttgatatctccatactttgatccaaacttctattcatgcataatcgtgctgcctatttttctttcctggtacacgacaagctactggcggaagggttggttatgtatggcaattctggtggtgagtttgcttatgacagtttccaggagcgggatggcgcttctcggtcttgttcttattgtaatctcgcttgtgaacgctcggagggtgcttagaaagaaattctcctacggcgcagcggctgcggcattgttcgcgattgctggcatcactgtttcaggattggtgttgtcgccctttgttgagagaacggcttccagattcactggtgttaaggaggatggctccgctctttctcgggtgaggtcttttgagatcggaaactcacttattgctgagcaaccggtactcgggttcggatacaactatgtgaacgagcctgctcgtaagatgcggggtgggaaggtcggattggattccagtatccaggttttctttgcgagctttggcttgcctggctcactagtgctgatcgcggttgttttcaactggctctggaacgtaggtagaaggcttagttcagatggattgtttctctatcggggtgctgttatttacagtgtgataacaatcatgtttgctggcaacttcaatcagattctgttctatcccttttggcttgtcccggtacttgcattcctggcatatttccacttcttggcatacagagggggaggcattgacccacccccgctgaaccgggagtag

SEQ ID NO: 534378 - DNA, 267 bp, Stenotrophomonas maltophilia
atggcggtcggtgaggtgtgccgcaagcttggcattgcggaggcaaagttcttcgtgtggcgcatgaagtacggcgggttgggtccctccgaactcaagcggctgcgattgctggaggaggggagcggcaaggtcaatcagctggtggccgacccgagcctggacaagtcgacgctgcaggagctggtctggtcacaaagaatctctgaggcctacgcggaagcgagcctgagtggggcggctgcaggagcaatttggcagcagtga

SEQ ID NO: 534379 - DNA, 195 bp, Stenotrophomonas maltophilia
atggaatttgtcagtgacgcgctgttcgatggatatcgcttccgtttgctatcggtgctggatcacttcatgcacgagtgcctagagatcgttgtggatcattcgttgcccgcaggcaatgtggccgaagcggtggcctggctggtcgctcaagccgggcaggccggacgcgatcacgggggacaacggcagtga

SEQ ID NO: 534380 - DNA, 144 bp, Stenotrophomonas maltophilia
atgagcatggcgcgtagcgaggaaatcaaacaccggagcaccccaggcaagctgacctgggaacctgaaatcaggctgagacctgaccaggaaacggcggctaaccacgagttcaacctagcgccggcgaagatccaaggctag

SEQ ID NO: 534381 - DNA, 948 bp, Stenotrophomonas maltophilia
atgaactacagaagcattgatgacctctcgctgttgatcagcaggaacctgcacagaattccgcaagacactgaattggtcgtggcgatacccaggagcggcatgcttgtcgcgagcattgtcgccctgaaactcaacttgccactgacagacttggcatctttcgtccgcaatagtgacattgcgaaaggaagcagtcgcgcgtacaagatgaaccacctgcttcggactggcgatgcgcgtcgaattctgctgatcgacgacagcgtttcatcgggaaatgcaatagcatcggccaaagctcaactggccacctatgtcgagaacggcggtcgagtcacgacgctagccgcatatgcagaagcaaagagcagagatcacgttgacattcactttgagttgctgccgcaaccgcgcgccttcgagtggaacatcatgcatcatccccgcctttccgaggcgtgcctggacatcgacggagtactatgcgtcgacccaacccacgaacagaacgacgacggtccgaagtatcttgagttcattgagaacgcagatccgttgattctgccgaccgtcgaagtcaagcacctggtgacaagcaggcttgagaagtaccgccctgccaccgaaaaatggctggaacgccacggggtcaagtatggatcactgcagatgctcaacgtggccacagcagaagagcgcagaaggctgaatctgcactccaagttcaaggcaagcgtatacgcaggcgatatatcggcaacgctattcgttgaaagcgagttgcagcaggcggttgagattgccaactcagcaaagaagccggtcttctgtacaggtgacaatcgcatgtaccttccaggagcgagtcttggccgagccatggttgccactgaacagcttctttcgaagataaagcgcaggattcggaaggcactgtcggcataa

SEQ ID NO: 534382 - DNA, 1494 bp, Stenotrophomonas maltophilia
atgaatctgcgcgcccaagcattttccgcaggcagatggacctctgcatcgctgctacttagagcgctcctgcagtttgcgcagacgatgatccttgccagattgctgacgccagccgatttcggcgtgatggccattacgctagccgtctatggcgtcatctcgcttttcgtcgacctcggcctgtcgaacgcccttattcacttccccgagaggacagcgagaatcctatcctctttgtactggctgaatcttggcgcggcactgattatgatgcttctgctgatgattgcagcgtggccattggcaaaattttacgatcaaagcgagttgataccagtgatactcctgatcagcctggcgatgcccctgagcgctgctggtcagcagtttcgcgtgctagctgagaaggatctccgattccatacacttgctggaatcgaagttgcgtctaccatcgccggttttgcatgcgcaatcctggtagcaatgcttgatggtggcgtctactcactggttgccgccatcgttactacaagcgcgatcagcagcctcctggcatgggcatgcttgtcgaagggactacgtcctggatttcatttcaatcttcaagagatcaagccgcatctcggttttggctcctatcgacttgcggacactctgcttatcagcgcacagatgcaggtagacatactgatcggaggcgcggtcgccggatcagcagccatgggcgtatacacacttccacgcgacctgacgcttcgcctggccaacaccgtagtgaatcccgttgtcacccgggtcggcttgccaataatggcaagagtgcaggcagaccgctcagccctgaagtcgatttatctgcaaacgatgaggctgacctcatcaatcaacttcccgatctacgcggctacagcactttgggccgagctcatcgttgccgtggttctggggccacagtggcacgaggcggtcgatttcatgcgcgtgttcgcgatctggggcctgctccgctccactgcgaacccagtgggaagcctattgaacgcaactggtaatgtgcgccgtgcattctggtgggatctggcattgctagcaatcgttcccgcgctcatgtacctgggagcatttgctgcggatctgcatggtttggcgatctcgttgctcttggtgcagtgcgccgccttctacccccactatcgcttcttggtacgtccagcctgtggagcaaccttcctcgaatacgtcggcgcgctcgcccccccaatgatctgcaccacgttttcggtcgccgcggcttgggcggcaatggcgctgccgatcgggcaagtatatatacttgctggtatcagcatgacagtcggtgcatgcgtgtatctggtcggcagcatcttaatcaacaaggcctggctcagggcaatgatggaactgctctctccattgcgtcgttcgccgggcgctcagcgctcagtcaagcctgatcacatgcaatga

SEQ ID NO: 534383 - DNA, 954 bp, Stenotrophomonas maltophilia
atgagcctctataccctcaccgtcgacctgctgatgaagacgggttcgtttgaaacgggcatgaccaaggccgagcggctggccagccagaaagccacgcagatccacgcctccatgactcgcgtcgctaccgtggcgggtgcggcgctgggcaccgctgccgctgctgttggcacggccgtgttcacctggaccaagcaggttgggcagctggcagtggagtacgaccggctcggcaagctttccggcaccacgtcgcaggacttccagcgcatggccgcaggcgcccgcacggtaggtatcagccaagagaagctggccgatatcttcaaggacgtgcaggagaagatcggcgactacgcccaaacgggcggcggcgagatgaaagacttcttcgacaacatcgccaagggcagcggcctcaccgtcgagagcttccgcaagctgtctggccccgacgccctgggcctgtacttcaaaagcctggagaaggcgaacctgtcgcagtcggagctgaccagctacatggaggccatcgccagcgattcggcgatgctgatcccgctgctgcgcaacaacagcgccgagttcaaccgcatgggcaacgcggcggaggccgcaggcagcatcatcgacgtgcagctgacgcaggcaatgctgggcatgcgtgatgtgaccaaccgggcggagctgtccctgcaaggcatgaaagtgcaggtggtatcgggcatcatgcctgccctgcaggacttcaccgaccagctcgacgcggtggcagtcaacggcaacttcgcgaaggaagcggccgacgctctctccggtgccatccggggcgtcactgacgcggtgcgagacggcggcgccgtcgtggacttcttcgaccgcgtccggggcggcctggtgggtgtggagaagcaaggccacgccgcgttcaagctggcgaccggtcaatag

SEQ ID NO: 534384 - DNA, 435 bp, Stenotrophomonas maltophilia
atgtccaagcgggcaaagttcactggccgagggaaggggccacccttcctctcgatcctccatgacatatccgactcgccagagttcggaagcctaagcgcctgggcgtgcaagctcctcatcgagcttgcacgccagtacaggcccggcaggaacggggatctgagcatcccctggtcgatgctcaaggagcgtggctggaacagcaaatcaacggtggtcgcggccaagcgagagctactggagtccggctggatcatcgagacccggaagggcaccaacaacgtatgcagcctgtacgcgctcacctactacgccatcgatgagtcagacaagcacctggagccgccaaccacgacgccgccacacctttggcgagcaaaacgaaaagaggggtcgctatgtgtaccgacagcgagcagcagcagtgcgtag

SEQ ID NO: 534385 - DNA, 255 bp, Stenotrophomonas maltophilia
atgaacgtgacccggatcaccgcgaaggctcaggtggagcgagatctcctgctcccagcacatctgcgagagcaagggttcggatttcaaatcgatgccctgctcggctatgcgtcagcggtcatcaactgcatccaccacgcggggccagattgtgcggatgagcgcgcgctggaagtggtgcagatgctgatcggatttgctcgcgatctttccaaggagcgcgacggccacgagctggaagagaacgtgtga

SEQ ID NO: 534386 - DNA, 213 bp, Stenotrophomonas maltophilia
atgcatcgcaccaaattggcttacccgatcgaagaggcattcgacctgatcggagtaacccgtacccgtggattcgagttggtgaaggccggagtgctgcgcagctacaaggacgggcgccgccgcctttgtagccatgcggccctggtcgagtgccagcaggctatggagaaagcatcccttgagggcaagcccgatgcagtacccgcctga

SEQ ID NO: 534387 - DNA, 618 bp, Stenotrophomonas maltophilia
atgaacccgcccaagacgccggccaagcgcggccgtaagcccaaacatccgtctgaaaagcctgcacagctcacgatccggctggatccacgaacgctgttcgggctggatgtagttgcccgggatcggcgcacgtcactcagccaggctgctgaacacctgatcgagcagcagttgagggactaccaggtggatggagtggccgcgtctaagctggtcagcggggtcgccgcggtaatgaccgaaagctttcaggctggaaacccgctagcgctccaggtggcggacgccggggcggagcaaatggcgacacagctgctctcatctgctgccggacgtgcgttcttcatgcccgagtccctgcaatccccatcggagcgctatttccgtgaggtttacagggttctcctccagcgcgcgcgcgatgccgtggctaacggcgaagacgttggccccgtgacaccggtcatggtggtgatgaactcgctgggtaatcctgagctgctcgagtacttcagcgggaaagcggccgaagccgaacaggccggcctatctgtggccgaggcggcggagcaactacaccaagaactggttgctgatattgcggcaaacccctga

SEQ ID NO: 534388 - DNA, 342 bp, Stenotrophomonas maltophilia
atgacgcgctggccgttggccaacgccaacgcgtggatcgcctgcaccggcctggatccccggcctaacgagtctggcggcagaacgggacggcgtcggctgtccaaacagggcgcgccagtgctgcgccagatgctctacatggccgccatggggctcaagcggtgtcgccgggggcaaccgctctacgacgagctgtcaaaacgcggtcaccccagcaccgccgtcttcaacatcctggccagaaagctggccaggatcgcctggggtgtcttcaaaagcggccgggacttcgatccggccatgctgaaggtgggtcaagcctgcttccagcaggcttga

SEQ ID NO: 534389 - DNA, 585 bp, Stenotrophomonas maltophilia
atggctgagcgcctgcgcaccatccgcctatacggcttgctgggtgctcgcttcggccgcaagttccgcctggccgtcagtaaccccgctgaggccgtgcgcgctctgtgcgtgctgctgccgggcttccagcagtacctcatgggcgccaaggccaagggcatggagttcgccgtgttcgtcgggcggcagaacctgaccaaggaacagctgcacgatccgcccggcgctgacgacattcggatcgctccggtgctggtgggttcgaagcgcggaggcgtcctgcagacaattctcggcatcgtgctcatcgtggtcggcgtctggacccagaactaccagctcgtcttccagggcggcgtcatggtgctgggcggcgtttcccagatgctcgcaccacagccgacagggcttggcgccaaagacagtgccgagaacaccccgaactacagcatgaacggcgccgtcaacacgcaggcgcagggcaaccctgtgtctgtcgcctatggcggccacgacaccaagggaatgttcgtgggctcggcagtgatcagcggcggcaactacgcagaggatcagcagtga

SEQ ID NO: 534390 - DNA, 843 bp, Stenotrophomonas maltophilia
atggcgcagatcacggcacaacaagctggcggcgtgaacgtcgtggcctttctcgacatgctggcctggtccgaaggtacggacaacggcaagcagccgactaaggaccgtggctatgacgtgatcgttggcggccagctattcaacggctacccgcgcgagtgctgcggcctgatcgtggccggcgccgatggcgagacctacatttcctgccgcaacgtggccaccacccccagcgagcacttccggttgccggctgaggactacgccgacgcggaggaccagggcgaggtgctggccgtcgtgcacagccacccgaacgcctctgcggctgcctccgacgctgatcgggtcatgtgcgaggccagcggcctgccgtggcacatcgtgagcgtgggccagtgcaccggcgcagagccggagtgtggcgacctgcagactatcgagccctgtggctacgaggcgccgctggttggccgccagttcgcccacggggtgctggactgctacaccctggtgcgggacttctacgcccgcaagctgggcatccagctcagccagtacgagcgcgaggacgactggtgggagaagggccaggacctctacagcctggaccggctgcgcgccgaaggcttcgagctgatcgatggcgagccacagcgcggggatatggtgctgatgcagatccgctcgccggtgccgaaccacgccggcgtctacctgggcgacggccagatgctgcaccacatgcacggccgcctgtcggagaaggtggtctacggcggcatgtgggccgagcgcactcgctacatcgtccggcacaagggggcccgtcatggctga

SEQ ID NO: 534391 - DNA, 177 bp, Stenotrophomonas maltophilia
atggccgggtattgtccgaaatgctcaaaacctgtcgagagactcgagacggagaacgttccgttggatccgaagaactatctcggaggtgtcacctatagctgcccggcctgcaagaccgtgttgggcgccgggttcaacccgtggcacttgctggagaggatcagaaacggttag

SEQ ID NO: 534392 - DNA, 312 bp, Stenotrophomonas maltophilia
atggtgcctatgtgggcagcagatccgattcgcgcgtccaacgacgcggatcaccctcacgacaacccagagatcgcggtcgatgtcggcgttccggatgagctgcgttggatcgaccgggcgctggcatcgatggagcggcagtatccggtgcgcgccctgatcgtccggaccgagttcaccgtgccggccagccaggcagtaaaggcgcgaatggtggccgagcaatatggcggcgtgctcacgctgaggcagtatcgatacgagttggcgaaagcgacggactggcttcgcggcagcattgcggcttag

SEQ ID NO: 534393 - DNA, 1083 bp, Stenotrophomonas maltophilia
atggaactgctggacggttggcgcaagatcgaatgcatcaataggaaagatacgcttgagttggtcaaccgattgcttctcttccaagcactctttcagcatctgtgcccgccgtcgatatgcgtcgacgaaaggttgcaatgctccggctgtgttgatagcgcgttgtcgctgatcctcctccttcgacttaacctctttgcgtttctgccaggcaggtacaccaagtgcgacagctatagcgagaatgctacccactgcttgaatccaagctgcctgagcctccggcttcagcgcacaccatccaatccattcgcagtccatgcagtcctccattgtaattgggataagcatgaagcttgggcgctcaaccggcaaggaaactcgtgcgcagcaggccaggctggcggcgatcaaggatgtcgggcgcctcgtctgtcatcacaccagcgtgaggctcgacgacgtacgcgccgagttctggaggatggctgggcagaaccggagggtggcgtgatcctacgtaaaagccagagagagccagtgcttgcggcgccagcggtccaaggcaacttggagcgcaaggcagtgggtttggattcgcgtgtgatgctcgcgggcctgctgcactgtgaacttgttctgacggtagacgctgtcgctggctgcgcgcgtccagtctttcatcatcttttcggtcgcatctactgcgtggcctatagtaggcagcgtttctggcggtgtgtcggggttttgcaggtgtgcgcgagcggcagtgagcgctgctgtgaggtcgacaaatggagtgccaaggacgttctcgagctggtcgatcacggttgcatagtaggtggcaatgcggtccagttgttgcaaacagccaacagcactgcgtcgccgatcaagatcgtcgatcctgcgcattctgattggcacatagattgccaagaagagcgcgaccattgcgccaatgacctgaatccaagcggcccattcggactggccaaggcatggccagtcggagggcaaaagacagtaccgcgcgtccatgtgcattcctcgagaactgaggtgccagcatga

SEQ ID NO: 534394 - DNA, 657 bp, Stenotrophomonas maltophilia
gtgccgctggtggccccgtattacggcggtggctcaggcctgaccgcgtcgtcggtaggcgagccggtaccgtccgtgactaccagggctcgcttcggcctggccgagccagtgctgatgcgcgccgggcacggtgacagcgacggccgcaatcccgtgagccgcgtgctggacgctgacgcgccgatgccggcgctgaccggatccaacgagatggcgctggccgaatccatcgtcatgcgcggcaatgtcggcaccggccggacgggcgatatgcggccggccagcgagcccatgcccaccatcacctgctccgaatccctggctctagctgagccgttcaccatgccggtcacccaccacggcggcgagcgcgtgcgcggcatcgatgagccgctgccgaccatcacctgcgccaaccggggcgagctcggcctggctgccgctgcagcagatgtcgccgacgaggtccgcatcgacatcaactaccggatgctccactggcgcgagctggcacgggccacgtcgttcgatgacgagggcgaggtgtacgacttcgcaggaaacgccaccgagatcaccaagcagatcggcaacgtggtcccgaaccgcaccgccaaggcgctggcccttggcctgatgagggacgcggcatga

SEQ ID NO: 534395 - DNA, 219 bp, Stenotrophomonas maltophilia
atgaagccagagatccagattgattcgttgagcaccagctactacggccaagatatctacgtcgaggcctggcagccgaccggcgggaaggcatttgtgcacctggtgcaagccggtgatctcccggatattgaaacccccgactgcggggagcacgacacactcgaccaggcgctgcaggccggtctgcgcctggcgacgtccttgatagacaactag

SEQ ID NO: 534396 - DNA, 381 bp, Stenotrophomonas maltophilia
atgcgcatcctgatcgtcgacgacttctcgaccatgcgtcgaatcgtcaagaacctgctgggcgatctgggcttcaccaataccgccgaagccgaggacgggcatgccgcgctgtcgctgctgcagagccagccgttcgatttcgtggtcaccgactggaacatgccggtgatgaccggcatcgagctgctcaaggcgatccgtgccgatgccaagctgaagaccctgccggtgctgatggtcacggcagaagccaagcgcgagcagatcatcgaagccgcccagagcggtgtgaacggctacatcatcaagccgttcaccgcgcagacgctggaagagaagctcggcaagatcttcgaacgcctggcggccagcgtctga

SEQ ID NO: 534397 - DNA, 426 bp, Stenotrophomonas maltophilia
atgtccgcgcttcccgctcgttcccgactcgcccgctgggcaccgctgctggtttccgccggcctggccgtgggtgccacggtggtgctgcgcaacgtcaatccgtatgtcgccggcaatcccctgccgagctgcccgctgtacgcgctgaccggcctgtactgcccgggctgtggcagcacgcgctgcctgtattccctggtccacttcgacctgcccggcgcgatggcgatgaacccgctgctggtcatcagcctgccgttcctgttgttgatgctgctgaacatcgccggcatccgcccgcgtgtgctcgacccgctgatgcgggtgctggccaatcccgtgttctggctctgggtgctgcccgggtatgcgctgctgcgcaacctgccgtgggcaccgttcaccgcactggcaccgatctag

SEQ ID NO: 534398 - DNA, 279 bp, Stenotrophomonas maltophilia
atgaatactgctactccgcaggtcccgaacaacctggtctgggcgatcctgaccaccctgttctgctgcctgccggccggcatcgtgtcgatcgtctacgccgcccaggtcaacggcaagctggcggccggcgacatcgccggcgcccaggactccgccgccaaggccaagaagtgggccatgtggtcggccatcgcctgggtcgtgctggtcgtgctgtacgtgctgttcttcgttgtgctcggcggcatgggcgcgatgagcaacggcaactactga

SEQ ID NO: 534399 - DNA, 288 bp, Stenotrophomonas maltophilia
ttgaatcaaccaccaccgctcagccgtccggtctacatccccaaccatctggtctgggcgatcctgacgacgctgttctgctgcctgccgttgggcgtggtgtcgatcgtgtacgcctcccaggtcgatggccgccgcgcggccggcgacctgccgggggcctacagtgcgtcgcgcaaagcgggctggtgggcggtggcttcggccgtggccctgccggtcctgttgctgttgtggttcgggctgttcggcggcttggccgtactgggcgctctttccgaccaatga

SEQ ID NO: 534400 - DNA, 1890 bp, Stenotrophomonas maltophilia
atgtccggtcacaaccagttcgccctgctgcgccagcgccgtttcctgccgttcttcgtcgtccaggcgctcggagcgttcaacgacaacgtgtaccggcaggcgatcatcggcctgttgttctatctgggcgtttcggaggagcagcgttcgctttacaccacgctggcgccagccatcttcatcctgccgtacttcctgttttcggcgctggccgggcagatcgccgacaaactggagaaatcgcggctgatcgtgatcaccaccaccatggagatcgtgatcatgtcgatggcggctgtcggtttcatcaccgagagcctgccgttcctgctggtcgcgctgttctgtaccggcatgcagtcgaccctgttcggcccggtaaagtactcggtactgccctcggtgctgaaacccgaggaactgacgggcggcaacggcctggtcgagatgggtacttcgatctcgatcctgtccggcatgatcatcggcggctctgtgttcctgcttgcgggcagccacggtccgatcgtggcagccacagcggtgatcgctctggccatctgcggcaacatcgcggcgcgcctgattcccaaggtcgacgccggcgatccgaacctgaagatcaactggaaccccttgccggagtcgcgggtcgtgctgcgcatggcacggcagcagaaggcggtgcgcaacgccatcctcggggtatcctggttctggttcgtcggtaccgtgctgacatcgcagctgcccaattacgcgttggccaacctcggcggcgaacccaagctgtatctgttcgccctggccctgttctcggtcggcaccggcgttggctcgctgctgtgcgagaagctgtcggcgcgcacggtggaaatcggcctggtgccgctgggtgcgttcggcatgaccgcgttcctgctcgacctgtatttcgcccgcagtggcgaagcgaccgtgcacggactgaccatcgggacgttcctgcagcagccgggcagcatccgcatcgtcatcgacctgatcggcatcggcctgttcaccggcatcttcgtggtgccgctgttcgcgctgatccagagccgcacgccgaaggcgcagatgtcgcgcgtgtttgcggcgctgaacatccagaactccggtttcatcgtcggcgcagccctgctgtcgctggccgcgcacaagctgctgcactggaccatcccgcagcagttcctggcgctggccatcgccaacgcactggtggcgatctacatcttcaccatcgtccccgaattcctgatgcgcttcctcagctggctgatggtgcgcaccctgtaccgcctgcgcccgcacagcatcgaggccaacgtgccggacgagggcgccgcgctgctggtctgcaaccatgtcagctacatggacgcactgatcctgtcggcgacgatcccgcgcccggtgcgcttcgtcatgtactacaagatcttcaacatcccggtgatgcgctggatcttccggaccgccaaagcgatcccgatcgccggtgcgcgcgaagacccggcgctgatgcagcgcgcgttcgatgacatcgacgctgcgctggccgaaggcgagctggtctgcatcttcccggaaggcgcgctgaccaaggatggtgcgatggcaccgttcaagtccggtgtcgagaagatcctcgaacggcggccggtgccggtggtgccgatggcgctgcgcggcatgtggtcgagcatgtggagccggcgcgacagccgcctgggccgcatgcgcgtgccgcgccgtttccgcgccaccgtcgaggtggtggcggcagcggccgtggatggccacagcaccagcgcgccggtgctggaggcccaggtgcgggccctgcgcggcgatcacgcctga

SEQ ID NO: 534401 - DNA, 795 bp, Stenotrophomonas maltophilia
atgaagatcgaactcaccggccgtaccgcgctggtcaccgcctccaccgccggcatcggcctggcgattgcccagggcctggccaacgcgggcgcgcggatcattctcaacggccgcagcaccgacagcgtcgaacgcgcccgccagcgcctgctcgccgccgttccgggtgccgacgtgctcggcgtggccgccgacctctccgatgcggccggcgtcgacacgctgctggcaggcctgcccaaggtcgacatcctggtcaacaacgccggcattttcggccccgaggacttcttcgagaccgaagacgcgacctgggaacgttactggcagaccaacgtgatgtccggcgtgcgcctgtcgcgggcactgctgccggcgatggtcgatgccggctggggtcgcgtgctgttcatctcgtccgaatcggcacgcaacattccggccgacatgatccactacggtgtcagcaagaccgcgcagctgtcgctgtcgcgcggcctggccaagcgcgtggccggcagcggcgtcaccgtcaacgcggtgctgcccggcccgaccctgtccgacggtttcgcggcgatgttcgaagatgaacgccagcgcagcggcaagccactggagcagatcggccgcgagttcgtgatggctcaccggccgtcttcggtgatccagcgcaccgccacggtcgaggaagtggccaacatggtggtgtacctggcctcgccgcaagcctcggcgacctcgggtgcggcgctgcgcgtggatggcggcgtggtcgacgatatcgtctga

SEQ ID NO: 534402 - DNA, 2178 bp, Stenotrophomonas maltophilia
atgcccgcccgcgaatcccgcctcagccgcctgtgggcccacgaaaaggccagttatggccttcgggtgttcatcgccctgaccgcagcgcttgccgtgtgctggcagctggacgcgctcactgccctgcccggcgtgttcctcggcatcatcgccagcgccatcgccgagaccgatgacaactggtggggccgtaccaaggcggtactgctgtcgctgctgtgcttctgcctcgccgccgcttcggtgatctggctgttcccctggccatggatcttcatcggcgcgctggcgctgtccaccttcgggttgaccctgctgggtgcgctcggcgagcgctatgcgtccatcgcccaggccacggtaacgctggcgatctacaccatgatcgggctggagcagcatggcgccagcgacctgcacagcgcgctggacgcggtcagccacctgctggccggtgcggtctggtacggcctgctgtcgatcctgtggaccgcactgttcgccaaccgtccggtacgcgaacgcgtggcgcgactgtacgttgaactgggccgctacctgcagttgaaggcaacactgttcgagccggtgcgcgaggccgacctgcagcgtcgccagctcgacctggccgaacagaaccggcgcgtggtcggtgcgctcaacgaagccaagaccgcgatcctggcccgcttcggccgctccgggcggccgggcgtcaattccggcctgtacctgcgcctgtactacatggcgcaggatttccacgagcgcgccagctcctcgcattacccgtacggcgcgctggtcgatgccttcttccacagcgacgtgctgtaccgctgccagcgcctgctcgacctgcagggccaggcctgcgcgcgactgggcgaggcgatccgcctgcgccgtccgttcgtgtatggcgaaagcaaccagcaggccgggcgcgacctggccgatgcgctggcctatctgcgcgaccagcagcggccgcagtggcagcgactgcttggctcgctggatctgctggtgcacaacctgcgcagcatcgagcgccgcctgctggatgccgagcgctccgaggccagcctggacaacgtcgatacccgactgcgcgacagcaacccgcacaccctgcgcgagatgggcgtgcgcgtgcgccagcagctcacgcccggctcggtcctgttccgccacggcctgcgcatggcattggccctgatcgccggcttcgcggcaatccgcttgttcaatgcacagaacggctcgtgggtgctgctgaccatcgtgttcgtgtgccgccccaacttcggcgcgacccgccagcgccttgcacaacgcatcgccggcaccgtggccggcctggtgctgacctgggcactgctgcagctgttcccgcaactgcacgtgcagctgctgatcgcgctgctgtcggcgctgctgttcttcttcacccgcaccgaccgctacctggtggcgtcggcggcgatcacggtgatggccctgacctgcttcaacctgatcggcgacggcttcgtgctgatcgtgccgcgcatggtcgatacgctgctgggttgtgcaatcgcggcggcggccgcgttcctgatcctgcccgactggcagggccggcagctgcaccttgtgctggcgcgcgtgctggacaccgccgcgcgctacctggattcggtgctgggccagtaccgcagcggcatgcgtgacgatctggcctaccgcatcgcccgccgcgacatgcacaacgccgacgccgcgctatccaccgcgctgtcgaacatgcttcgtgaacccggccatgtgcgccgcaatctggatgccggcttccacttcctggcgctgtccaacacactgctcgggcacctgtcggccctgggtgcgcaccgcgaccaggtggacagctacgccggcgatccgctggcgctggctgccggtgagcgcgtgcgcaaggcgctgcagcaactggcgacggccctgagcgctcggcagccggtcagcgaggacgacaacgacgctgatcgcgcggtggcggccgaactggaacagatcgacgaggcgatgccgccgaagctgcagctgatccgcacgcagatggcgctggtgctgcggatgctgccgaaggtgcgggcggcggcgaatgaggcggtgaccagcctgacctga

SEQ ID NO: 534403 - DNA, 2058 bp, Stenotrophomonas maltophilia
atgctgccttcccgttccccccgcctggccctgctggccatcgccctgtcagccgcctgcgctgcccatgccgaagcgccggccgtcagccgtaacgccaccgatctggatgcggtgaaggtcaccgccgaacgcacccataccgacgctggcgcactgggcgaccgcgccctgcgcgacactccgttcgcgatcaccgctgttggccgcgagcagatcgagcagcgccaggtggtctcgctgggcgaagccttcctgctcgacccttcggtcagcacccaggtcagcgcctatgccagtggctggagctcgcccatccgcaaccgcggtctggagctgaactacgacagctaccgggtcaatggcctgcaggtctcttcctggggcaccgaatggccgctggaagtgatggaacaggtcgatctgctgaaaggcccgggcggattcctgtatggcttcggcacccccggcggcatcgtcaactacatcaccaagaagccgacggacacgcccaccttctccgcccagctgggctggcgcgaacaaggcatcgtcagcggcggcatcgacgttggcggccgcttcggcaacgagcagatgttcggctaccgcttcaacgccttccaggaaaaaggcgagaccttcaatggcggacacgtcgatcgcaaggtgggcgcactgtcgctggacgcgcgcctgagcgatgcgcttacctggaccttcgacggtgtgttccagtcgcgcgacctgcgcgaggaatcgccgcagtactacttccgtggcctgacctcgttgccgcggccgatcgccggagataccgacaacagcgtgcccggcacctactacgacacacgctccagcctgctgtcgaccggcttgaactggcagatcaacagcgactggaaagccagcctgagttacggcgtcaccacctcgtggaatgacgtcaacaagatcttcgcctacatcgacgatctcaacggcgactacgacgtcaacgtctacgaactgggtggcaagagcgagtggaagctggcccaggcgatgctgcagggcagcttccgcaccggcccccttcagcatcaggtggtggcgggcatcagccaccagaccggactgggctgggaccgcccctacgagtggaacctgattggccgcgccaacctgtaccagcgccatgccatccgccacgacgccgttggttcgcgggtgatgacccgcggcgacgagacggtgcagcaggcggtgttcgcaagcgatacggtgaacctcggcagcggctggtcggtgctggcgggctggcgctacaacgacttcgaaaccaaggggcggtaccacacctacccggtcaccccgacctacgccgtgatgttcaagcccagcgaggcggtcaccctctacgccagctacatcgagtcgctcgaagcgggcagccgcgtaggcaacagctacatcaacgccggtgacgtgctcgatcccaccatcagcaagcagtacgagatcggggccaaggtcgaagcggcgcgttggaatgcgaacgtggccgcgttccggctggaacgtggtgccaacatcgatgagctcacgccggccggcaagcgcctggtgcaggacggcatcacgctgtacgaaggcattgaagccagtgccgacctgcacctcaacgatgcactgaccgtcggcggcggcgtcacctggctggatccgacctacgacaagctgtccccgggcagcgccgcacaggaaggcaaccgtaccgccggtgctgcgcgctggagcggcgtactgcacgccacctaccagctgccgtgggtagacggcttggagacctatgccgccgtgcgctactacggcgatgtctggtacgacgccgacaacaccctgaagctgcctgactacacgctggtgaatgcaggcatcggctatcgcctgctggcgtccggccatccggtgaccctgcgtgccagcgtcgagaacctggccaaccggaagtactggtccaacgccggcgccggcctgccgcgcacgttcgcggtgagcgtgcgctgggagatgtaa

SEQ ID NO: 534404 - DNA, 3123 bp, Stenotrophomonas maltophilia
atgaacctgtccggccccttcatccgccgcccgatcggcaccgcgctactggccatcggcctgttcatggtcggcctgatctgctacctgcggctgggcgtgtcggcgctgccgaacatcgagatcccggtgatcttcgtgcacgccagccagtccggtgccgatgcggcaaccatggcctccacggtcaccgcgccgctggaacgtcatctcggccagctgccgggcatcgaccgcatgcgctcgtcgagctcggaaggcagctcgctggtgttcatgatcttccagagcggccacaacatcgattcggcggcactggacgtacagaccgcgatcaactcggcacaggccgacctgccttcgggcatgggctcgccgatgtaccagaaggcgaacccgaacgacgacccggtgatcgccatcgcgctcacctcgcagacgcagtcggccgatgagctgtacaacgtggccgactcgctgctggcgcagcgcatccgccagatcagcggtgttgcttcggtcgacatcgccggtgcctcgacgccggcggtacgcgtggacgtcaacctgcgcctgatgaacgcactcggcctgaccgccgacgacctgcgcaacgccgtgcgcgcggccaacgtgacctcgcccaccggcttcctcagcgatggcaacaccaccaccgcgatcatcgccaacgattcggtggcacgcgccgccgacttcgccgacctggtggtcaagacccagggcgatggccgggtgatccggctgaaggacatcgccaacgtctacgacggccagcaggatgcctaccaggcggcgtggttcgaccacaagccggcggtggtgatgtacgtgttcacccgcgccggcgccaacatcgtggagaccgtggaccgggtcaaggcacagattcccgccctgcgcgactatctgcagccgggtacaacgatgacgccgtacttcgaccgtacgccgaccatccgctcgtcgctgcatgaagtgcagatcactctgctgatcagcctggcgatggtggtgctgaccatggcgctgttcctgcgccggctggcacccacgctgatcgccgcagtgaccgtgccgctgtcgctggccggtgccgcgctggtgatgtacgtgatgggtttcaccctgaacaatctgagcctgctggcgctggtgatcgcgatcggcttcgtggtcgacgatgcgatcgtggtgatcgagaacatcatgcgccacctcgacgaaggcatgccgcgcatgcaggcagcgctgaccggcgcgcgcgagatcggcttcaccatcgtctcgatcaccgcctcgctggtggcggtgttcatcccgctgctgttcgccagcggcatgatgggcgcgttcttccgcgagttcaccgtcaccctggtggcggccatcgtggtctcgatgatcgtctcgctgaccctgaccccggcgctgtgcagccgcttcctcagcgcccacgaccacacggcgccgccgtcgcgcttcggccgttggctggatgccggccacgagcgcatgctgcgcatctacaccgtgttcctggatttctctctgcgccatgcgctgctgctgtcgctgacgccgctgctgctgatcggtgccaccgtcttcctgttcggcgcggtgaagaagggcgcgttcccgccgcaggacaccggcctgatctggggccgcgccaactccagcgccaccgtatccttcgaggacatggtcgcccgccagcgccgcatcaccgacatgctgatggccgacccggcggtgaagaccgtgggtgtgcgcctgggcagcggtcgccagggctccagcgcacagttcaacgtcgagctgaaatcacgcaaggaaggccgccgcgaaaccaccgcacatgccctggcgcgactgagcgccaaggccgaccgctaccccgacctgcagctgcgcctgcgcgcgatccaggatctgcccagcaacgatggcggcggttccagccagggcgcgcagtaccgcatctcgctgcagggcaacgacctggcatcgctgcaggaatggctgcccaagctgcaggcggagctgaagaagaaccccaagctgcgcgatgtcggtaccgacgtggacaacgccggcctgcgccagaacatccagatcgaccgcgccaaggccgcacgcctgggcatcaccgtgggtgccatcgacggtgcgctgtacggtgcgttcggccagcgccagatctccaccatctattcggacatcaaccagtacagcgtggtggtcaacgccctgccctcgcagaccgccacccccgccgcgctggacgaggtgtacgtgcgtgcgcgcaacggcgacatggtgccgatcaccgcggtggccacgcagatgcccggcctggccccgtcgcagatcacccacgagaaccagtacacgacgatggacctcagctacaacctggctccgaacgtgagcatgggtgaggccaaggcgatcatcgacgcgaccgtggccggcatgcgcatgcccggtgacatccgcctggccgatgatgcgggcttcggcttcaactccgaccccagcgacatgctgatcctggtgtttgccgcgatcctgaccgtgtacctggtgctgggcatgctgtacgagagcctgatccacccggtcaccatcctgtccacgctgccggcggcgggcgtaggtgcgctgctggcgttgttcggcaccaataccgaactgtcggtgatctcgatgatcgcgctggtgctgctgatcggcatcgtcaagaagaacgcgatcatgatgatcgacttcgcgctggtggcgcagcgcgagcacgggctggcgccccgcgacgccgcccgcgaggccagcatcgtgcgcttccgcccgatcatgatgaccacgatggtggcgatcctggctgctgtgccgctggcgatcggcctcggcgaagggtccgagctgcggcgtccgctgggtatcgcgatgatcggcggcctgctgttctcgcagagcctgaccctgctcagcacgccggcgctgtacgtgatcttctcgtgcctggccgagcgctggcgcgcacgtcgcgcacgcaggcgcgaagcgaagctgctcaagcgcgcgcaacgggcgtag

SEQ ID NO: 534405 - DNA, 3234 bp, Stenotrophomonas maltophilia
gtgggcttttcgacgatcttcatccgccgccccatcgccacctcgctgctgatggcgggcctgttgctgctgggcatcctcggttaccgcaagctgccggtgtcggcgctgccggaaatcgatgcgcccagcctggtggtcaccacccagtaccccggcgccaacgccaccaccatggcctcgctggtcaccacgccgctggagcgccagttcgggcagatctccgggctggagctgatgacctccgactcgtcggccgggttgtccacgatcatcctgcagttctcgatggaccggaacatcgacattgccgcgcaggacgtgcaggcggcgatccgccaggccaccctgccctcgtcgctgccctaccagccggtctacaaccgggtgaatccggccgacgcggccatcgttaccctgaaactgacctctgacacgcgcccgctgcgcgacgtcaacaactacgccgactcgatcctggcccagcgactgtcgcaggtgcagggcgtgggcctggtctcgatcgccggcaacgtgcgcccggccgtgcgcatccaggtcaatccggcgcagctgtcgaacatgggcctgaccctggaacagctgcgcagcgcgctgacccaggccaacgtcaacgcgccgaagggttcgctgaacggcaagacccagtcctacagcattggtaccaacgaccagctcaccagtgccgccgagtaccgcgacaccatcatcagctacaagaacggacgtcccgtgcgtttgtccgacgtggccgaagtggttgatggcgtggagaacgaccagctggccgcctgggccgatggcaagccggcggtgctgctggaagtgcgccgccagcccggcgccaacatcgtgcagaccgtcgagcgcatccgcgcgatcctgccgcagctgcagggcgtgctgccagccgacgtgcacctggagatcttcaacgaccgtaccgagaccatccgcgcctcggtgcatgaggtgcagttcaccctgatcttgaccatcggactggtggtggcggtgatcttcgtgttcctgcgccgcctgtgggccacgatcattccctcggtggcggtgccgttgtcgctggccggcaccttcgcggtgatggcctttgccggcatgtcgctggacaacctctcgctgatggcgctggtggtggccaccggcttcgtggtcgacgatgcgatcgtgatgatcgagaacatcgtgcgttacatcgagcagggcaagagtggcaaggaagcggccgaaatcggtgcgcgccagatcggcttcaccgtgctgtcgctgaccgtttcgctggtggcggtgttcctgccgctgctgctgatgcccggcgtcaccggccgcctgttccacgagttcgcgtgggtgctgagcatcgccgtcgtgctgtcgatgctgatctcgctgacgctgaccccgatgatgtgcgcctacctgctcaagcccgacgccttgcccgaaggcgaggacgcacatgagcgtgcggcggcggccggcaagcagaacctgtggacgcgcaccgtcggcctgtacgagcgcagcctggactgggtgctggaccaccagcgcctgaccctggccgtggccggcggcgcactggtgctgaccgtgctgctgtacgtgctgattcccaagggcctgctgcccgaacaggacaccggcctgatcaccggcgtggtccaggctgaccagaacatcgccttcccgcagatggagcagcgcaccaagcaggtggccgaagcgctgcgccaggacccggacgtgaccggcgtgtcagccttcatcggcgcgggcagcatgaaccccacgctcaaccagggccagctgtcgatcgtgctgaaggaacgcggcgagcgcgacggcctggacaagatcctgccgcgcctgcagaaggcggtggccggtattccgggcgtggccctgtacctgaagccggtccaggacgtgaccctggatacccgcgtggccgccaccgagtaccagtactcgctgtcggacgtcgatccggcgaccgtggccacccaggccacacgcctgaccgaagcgctgcgcaagcgcccggaactggccgacgtcgacaacaacctgtccaaccagggccgcgcgcttgaactgaacatcgaccgcgacaaggccagcgtgctgggcgtgccgatgcagaccatcgacgacaccctctacgatgcgttcggccagcgccagatctcgaccatcttcaccgaactcaaccagtatcgggttgtgctggaagtggcgccggagttccgcaccagcaccgcgctgatggaacagctggccgttgcctccaatggtgccggtgcactgaccggcaccaatgccaccagtttcggccaggtcacctcgtcgaactcatcgacggctaccggcatcggcgcgcagaacaccggcatcaccgtcggcgcgggcagcatcattccgctgtcggcactggccgaaggcaaggtcagcagtgcaccgctggtggtcagccaccagcagcagctgccggcagtgacggtctcgttcaacgtggcgccgggctattcgctgtccgaagccgtgcgtgcaatccaggagaccaaggacagcctggacatgcccacccacctgcatgccgaattcatcggcaaggccgccgaattcaccggcagccagaccgatgtggtgtggctgctgctggcctcgctggtggtgatctacatcgtgctgggcgtgctctacgagagctacattcacccgatcacgatcatctccacgctgccgccggccggtgtcggcgcgctgctggcactgatgctgtgcgggctgagcctgtcggtggatggcatcgtcggcatcgtgctgctgatcggcatcgtcaagaagaacggcatcatgatggtggacttcgcgatcgaggcgcgccgcgccggcgccaacgcgcatgaagcgatccgccgcgcctgcctgctgcgcttccgcccgatcatgatgaccaccgccgcggccatgctcggcgcgctgccgttggcactgggcaccggcatcggttcggaactgcgccgcccgctgggcatcgccatcgtcggcggcctgctgctgtcgcagctggtgaccctgtacaccacgccggtgatctacctgtatatggagcgcttctccgaatggctggcccgccgccgcgagcagcgcgcactgcgcgacggttcgctgcaggagccgcaggcatga

SEQ ID NO: 534406 - DNA, 1242 bp, Stenotrophomonas maltophilia
atgtcacgtgtttggaagatcgtgctgctggtcgtggcggtactggtgctggccgtggtcggcctgcgcgtactcggcgggggcaaggacaaggccggtggcccggcggcagctgcgcgccagggcggtgaagacccggatgccggcccggtgccggtgaccgtggtggatgcggcacgccaggacgtgccggtctatgccagtgcgctgggtacggtgaccgcaatgaacaccgtcaccgtcagcccgcaggttggcggccagctgatgagcctgaatttccgcgaaggccaggaagtgaagaagggcgatgtgctggcggtgatcgacccgcgcaccgcccaggccagctacgaccaggcggtggcatccaagcgccagaacgaggcgctgctggccaccgcgcgttccaactaccagcgctcgaacgcgccggagtatcgccagttcgtcgccaagaccgatctggatacacagcgaaatcaagtggcacagtacgaaagcgctgtcgcggcgaacgaggccagcatgcgctcggcgcaggtgcagctgcagtacaccaaggtcaccgcgccgatcaccggcatcgccggcatccgcgcggtcgacgccggcaacgtggtcaacgccggcaccgcgctggtcacgctgacccagatccatccgatccacgtgctgttcaacctgcccgagcgccagctcggcgatgtgcgccaggcgcaggccgccggtgcggtacccgtcgcggcactggaccgcgccgattcgcacgtgctgtccggcgacggcaagcttgacgtggtcgacaacctgatcagtgccgacagcggcacgttcaaggcgcgcgcgatcttcgacaacaccgacaacggcctgtggccgggccagttcgtcaacgtgcgcatgcagctgcgcacgattgccggtggcgtggtcattccgacccaggcggtgctgcgtggcccggacggcgagtacgtctatgtggtgcagggcgacaacacggtgaagatgcagaccgtgcgcagcggcgtggaagtgggtgacagccaggtgcagatcgccgagggcctgaagggcggcgagcgggtggtcagtgaaggccagttccgcttgaagccgggcagcaaggtcaccgcgctgaagccgggcgaaaccccggcggtgccgagcgaagccgagctgaaggccgccgagcagaagaacggcggcggtggccgtcgtggcggcggcccgcgctga

SEQ ID NO: 534407 - DNA, 1416 bp, Stenotrophomonas maltophilia
atgggacgggcgctaagaccggatccggccgcggaggttcccgtagcggcggtgttgccctacattcagctggaaccccctgccgtggagatcgtgatgcgccgttcgttgctgctgtccgccctgctgctggccctgccggctcttgcccacgcccaggacgggcaacgcccggaggtgaccgccgccgcgcagcggctgcaggccaaggtggtcgaatggcgccgcgacttccaccagcatccggagttgtccaaccgcgaggcacgcacctcggccgaggtcgccaagcgcctgcgtgcgatgggcttgaagccgaagaccggcatcgcccatcacggcgtggtggcgatcatcgaaggcggaaagccaggcccgaagatcgcgctgcgcgccgacatggacgcgttgccggtgaccgagcagaccggcctgccgttcgcctcgaaggccactgaccagtaccgcgggcagacggtgggcgtgatgcatgcctgcggccatgacgcgcataccgccaccctgctcggcgtggccgaagcactggtcgcgatgaagaaggacctgccgggccaggtgatgctgatcttccagccggccgaggagggcgcaccgccgccggaagagggtggcgccgcgctgatgctgaaggaaggcctgttcgctgatttcaagccggaagccgtgtttggcctgcatgtgttctccagcgtgcaggctgggcagatcgcggtgcgcggtggcccgctgatggccgcctcggatcgtttcgggatcaaggtgatcggtcgccagacgcatggctcggcgccgtggaatggtgttgatccgatcgtcgccaccgctgacctggtcggcacggcgcagaccatcgtcagccgccgcgcgaacctgtccaagcagccggcggtgctgaccttcggtgcgatcaacggcggcatccgctacaacatcattccggacgaggtggagatggtcggcaccatccgcaccttcgacgagggcatgcggcagcagatcttcgccgacctgcgcaacgtggccgaacacaccgccgccgcgcacggtgcgaaggcggtgaccgacatctacgaatcggagggcaacccggccacggtgaacgacccggcgctgaccgcgaagatgctgccgagcctgcaggcggtggtgggcaaggacaacgtgtacgagccaccgctgcagatgggcgcggaggatttctcgctgtacgcgaaggaagtgccggggatgttcttcttcgtcggttcgaccagcgcgggcatcgacccggcgacggcaccggcgaatcattcgccgaagttcctgctggatgagaaggcgctggatgtcgggttgcgggcgttgctgcaggtgagcctggattacctgcacggtgcaggtactcccgcggggtga

SEQ ID NO: 534408 - DNA, 612 bp, Stenotrophomonas maltophilia
atgtcgcaatcagcacgtttctggcaagcacagttcggcagaggaagccccgccttccttgccttgacgtggcaacacgccttgcaaccggccccgcaccgcgcgctcgtccacgctcctttcgctggccttgacactcacgaagagcactttgttcttcttgtcgggagtcaggctctacgggtgggtcgggaccggatagatcgccaccttctggtagctagcactgctttccgttctagccgtgcccgcatcgtggttgggcacgaacaggcacgtgccgcccagtccagtgtattggcagaacgtaagatctcgggagaactgaagctccacgccagaagttcagacctgcgacacatgttgtcgcaacttcacacagaatggacttcgatggaatcgtttgaggcagggacgcctactcccctcaaccaagaagaggaagtgcgatgttcagaatcattggagcagttgttgtatacggatttgcgctctatggcgttggccactggttggccaatcgcgatgacccgtcggttttcgatcaggaaccgcgctgatcagcccctggcgaagcctgtgcctgcagaaagcggcatgcctgcacgttga

SEQ ID NO: 534409 - DNA, 573 bp, Stenotrophomonas maltophilia
atgcagccagagaggcccattgactactccaatagccaagtctctccagatatcctcaaagccagcgggaagacacgagagcaattcctggccgatcagcaattgagctctcttgctttcactgaagaaaagctcaagcagtgcgagggcattccaggcgacgcactaaaggaaacgtcacggtggctgagggaggcagcggaagggggggacacctacgcgaggctggcctactacaactaccaggacatcatcgttggtgatcagcaagaacaaatcgtatcggccgaaaaagttaagcagttcaatgaagactcatatcgctacataaaaagtgtagctgacaccggcaacccggatgggcttttcactctgggaactgcgtatgagcgcggcatcattacgccgaaggacccgatccttgcctatgcctacaagaaagctgcggggcagctgatccctatcggtggcaacgaccagatattggacatgatggcgcagtccatgactccgtctgatctaaggaaggccaatcaactggccgctacgctggcacagaggagcaggaaatga

SEQ ID NO: 534410 - DNA, 342 bp, Stenotrophomonas maltophilia
atgacgcgctggccgttggccaacgccaacgcgtggatcgcctgcaccggcctggatccccggcccaacgagtctggcggcagaacgggacggcgtcggctgtccaaacagggcgcgccagtgctgcgccagatgctctacatggccgccatggggctcaagcggtgtcgtcgggggcaaccgctctacgacgagctgtcaaaacgcggtcaccccagcaccgccgtcttcaacatcctggccagaaagctggccaggatcgcctggggcgtcttcaaaagcggccgggacttcgatccggccatgctgaaggtgggtcaagcctgcttccagcaggcttga

SEQ ID NO: 534411 - DNA, 198 bp, Stenotrophomonas maltophilia
atggcttacgtggatgcttacgtgctgccgtgcccacaggacaaggtggcggcctaccgccgccttgcccgcaaggccggtgcggtgtggaaggaccatggcgcgctgcagtacatggaatgcgtggctgacgatgtggatccgggcaagagcacctcgttcccgcggcggtcaaggcaaagcccggcgaaacggtga

SEQ ID NO: 534412 - DNA, 207 bp, Stenotrophomonas maltophilia
gtgaaggaaatcctcggctacgccatcacccgtggcggcaccacgctgcgcgatttcatcagccctgacggcgcaccgggctacttcgaacaggaactgctggtgtacggccgcgatgggctgccctgcccgaactgtggccgcgcgctgaagcacgccaccatcggccagcgcgccagcgtctggtgcagccactgccagcgctga

SEQ ID NO: 534413 - DNA, 1368 bp, Stenotrophomonas maltophilia
atgttcgagtcactgacccagcgcctttccggcaccatcgagcgcctgcgtggccgcggccgcctgaccgaggagaacatccgcgaggccacccgtgaggtccgcatcgcgctgctcgaagccgacgttgcgctgccggtggtgcaggccctgatcgagcgcatcaaggtgcgcgcggtcggccaggaagtgctgaagtcgctgaccccgggccaggccctgatcaaggtcgtgcgcgacgagctgaccgcggtgatgggcgccgaagccagcgacctgaacctcaatgttccggccccggccatcatcctgatggcgggcctgcagggcgccggcaagaccaccacggtgggcaagctggccaagcacctgaaggaaaagcgcaagaagaaggtgatggtggtctcggccgacgtctaccgtccggccgcgatcgagcagctgaagaccctggccgagcaggtcggcgtgctgttcttcccgtccagcgccgaccagaagccggaagccatcgtccgcgccgccatcgacgatgcacgcaagtcgttcgtcgacgtgctgctggtcgataccgccggccgcctggccatcgacgaagcaatgatggccgagatcaaggccctgcacgcggcggtgaatccggccgaaaccctgttcgtggtcgacgccatgaccggccaggacgcggccaacaccgccaaggccttcggtgatgcgctgccgctgaccggcgtggtgctgaccaagaccgacggtgacgcccgtggcggtgccgcgctgagcgtgcgctacatcaccggcaagccgatcaagttcgtcggtgtcagcgagaagccggagggcctggacgtcttccacccggaccgcatcgccagccgcatcctggacatgggcgacgtgctgtcgctggtcgagcaggtcgagcagcaggtcgacaaggacaaggccgccaagctggccgagaaggtcgccaagggcaagaagttcgacctgaacgacatgcgcgaccagctggagcagatgcagaacatgggcggcatcggcggcctgatggacaagctgccgggcttgggcaacatccccgaccatctgaagcagcaggtcagccagggcaaggaagtgccgcgcatgatcgccatcatcagctcgatgaccaagaaggaacggcgcaacccgaacctgctcaacggctcgcgccgcgcgcgcatcgccaagggctcgggcgtgaccccggccgacgtcaacaagctgatgaagcagtacatgcagatggaaaagatgatgagcaagatggccggcggcggcatgaagggcatgttgcgcagcatgatgggcgccatgggcggccgcggcatgccgttccgttga

SEQ ID NO: 534414 - DNA, 828 bp, Stenotrophomonas maltophilia
atggtcggggtggccgaactcacgcgccgggccggcatcggccgcgcgtggacgctcgtgccagcctgcggcaagcagctgctcgatcaccacgtcggcacgcaggtggtggcgctggaaataggcttcgttgtcgccggtgcgcatcagctcgatgaagcgcacgctgaaaggacggtcacgcaggtagtccatccactgcggcagctcgtcgtcattcaagccgcgcagcagcaccgcgttgagcttgatcgccggcagtcccaacgcctgcgccagggccaggccctgttcgatctccggcaggcggtcatgcccggtgatggtcctgaagcgttcgcgctgcaggctgtccatgctcacgttcagcgcggtcaggccggcgcggtgccagcccggcaggcgacgcggcagcaacgtgccattggtggtgatggccaccttgcggatgcccggcgccgccgccacggtggcgatgatctcgtccagatccttgcgcaggctgggctccccaccggtcaggcggatcttgctcatgcccagcgcggcaaacgcacgcaccaggcgcgcgatttcatccacctgcaggaagcgcgggcggccatcggcctggtaaccgtcgggcaggcagtagctgcaacggaagttgcaggcttcggtcaacgacaggcgcaggtatggaaagctgcgtccaaaaccgtcggtgagttggctcatggctggtccaccttgttgctccaccgtcttgcctgtgcccggaacggcccggaaaccctcgtctgctggaacgattgccagagtacgcggcagtcagttccatgggcatga

SEQ ID NO: 534415 - DNA, 366 bp, Stenotrophomonas maltophilia
gtggccaagctcatcggggaaacgatcgacgccaagccggtgcgtgccgccaaggctgccgcggggcccctcaagggacgcaaacttggcaaggtggcgccgaagtatcgcctcccaactggtgagacgtgggcgggccgtggcttggcccccaaggccttcaccgtgtgggccaagtccgccgagggcaaggcgtgggcgcaggccaacccgggcagcaagttcccgtcggccgatgggacggtcaagaaagctccggccaaggcggccaagacggcgggcaagccggtgaagaaagccgcacggaaggccgtcaagaaacctactaaaaagcccgttgccaaaaaggcgagcaagaaggcctga

SEQ ID NO: 534416 - DNA, 210 bp, Stenotrophomonas maltophilia
atgagcgagaaaaccaaaatcacggtgaatttgtctgaggaagtcacctcagcgctcaagagcatggcccaagagcgcagcacaagcgtcacagaggtgttgcgtcacgccatcagcaccgaaaagttcttgctcaatgaggtcaaacagggcggcaaggttttgatcaaggaccgcgacggcaacatgcgagagttgatcttccgatga

SEQ ID NO: 534417 - DNA, 381 bp, Stenotrophomonas maltophilia
atggaacataacttcgctgggcgcaccggatgccagtgcaatcagcgtaaacccgcaaacgaaaaccagaagccaaataagcaaataagcgacattcttccgcgcgtgatccaacgctttgtcagggttataaggctcagtttgctgggtcggcaaatccgaaatatcgaccggctgcggaggtgcgattatctcgcccaggtgaagctcattgagttcagtgagctctacaaccgtgccatccgcgtcatccgttacagggaggccatcgtcgatcatcggaagatcaactctcgcatgttgccgtcgcggtccttgatcaaaaccttgccgccctgtttgacctcattgagcaagaacttttcggtgctgatggcgtga

SEQ ID NO: 534418 - DNA, 762 bp, Stenotrophomonas maltophilia
atgctaaaaatcatcgtgtgctcattgcaagcgagaggcagcaaagcgcaacaactgtcacagggtccatcatcgcgcgcgcaccgttggtgcaacttaggttcgaggaaggtggaccgggcgatgtcgtggggcctggtcggggaatgcggatttttcggggtaaggaatcacctcggccagttgagccttctgatagctaacccttgcgatctcggcattcgcgtccgccccgatagactcgaaagagttggcacggcagatgatcatatcgtgtccttcaacacggagctcaaagtaagcactgacgctgcgtccagtgctgttgatccagttcacctgaacaatctggacacccgtgctcgggtcgtggaacctaatcatcgcactgcaaaaaatcagtgggtcatcggggaggttggcaagaatgttgcctgcgctttgtgggctttcctcgaacgaataatcctgagaaccctctttaaaggacgcgtctttgtcaatggaaatataaagacccagaggaatccggctttccttcgaaccaccaaaaagcccagcggtccaatgtttgatgtcacgtcttcgctgtgcggccgggctagggcagggacggcagccacgagagcgctcgtgagctgctgggcgctagccacggcgtaccggtatctagccgacttgttaccccgcgcacaacgttgcatcagcgtttacatcggccgtaggctccaaggacacttaccagggcacaatccggtttga

SEQ ID NO: 534419 - DNA, 768 bp, Stenotrophomonas maltophilia
atggaaattgaagcggagacgcccacgtcgcgaccaactgtccaggttgccgagatggaggagggcaccaagaatagcttgcggatgttgcccgtggtacaaggctgcttgagggccgccgaggcggctgtaacgggcggacggcctcgatacccaagcaatgcaaagcttgccacgctcatggatgtcacgtggaacggcttggagctaatgctggctggggggaagctgatctcaaagcgtttggggctcgctttgctattaggcgtcgcgtttctcgtctatgtttccgtgatggaaggtgccacgacttggtctttcacgccgctctgcttgctctttgggggagcgtgcgtcgttctgtctccgccgagccggatcgcactgttggacgtgaaggagagcgccgttgaccgagtcgctgacttcattggagagcagagacttaatgaaaggtcactaaccacactggaaggcgcgcttgaggctgccttggccagaagcacggcctggaccggaaccttgcgcggcttcatggcgattgtgtgggcggtactgttctggatcttgtgcgagcgggttttcgggctggatctcaagccagagatccgctcgtacgggttgacttgggctgcggcaggttcgctaggactgcttgcgggtctcggtgccctggctgcctacagcgccgccgccagcgctatccatttcacccttcgacttggcttggcccaggcaaagattgacgtggcttctagtcaagaatga

SEQ ID NO: 534420 - DNA, 396 bp, Stenotrophomonas maltophilia
atgaccaagccgacgctcgattccattctttccgcgaaacagaagcttcaagacgagctgcaagcacttgacgcgcaggaggctcagctgcgccaggagcagacctctgatgctcacgctgagatcgtgagcctcatcattcaatacgccaagaacttcaacgctaagcaaagagctgagatttcatcctcgctcgcggcgagcaccggtcagccccggaagggtgcgggcccgaagaaagccgtcgccgccaagtattggctgcctcacacccaagagacttggtcaggccgaggccgcacgccgaggtcatttgctgcttgggaaggcacggccgcatacaaagagtggaagtccaagcaccctgacgagaagttccccgcttatccgggataa

SEQ ID NO: 534421 - DNA, 315 bp, Stenotrophomonas maltophilia
atgtccaaggcccgctttgcagtcgttggagcgctgatcgtctgtctggccgcctgctctggtggtggtggtccctcgcatgacgaccgtcagaacgcgttcttgcaatacgttcaagacaacagcaatgacaaagccaagatcagggatttcgagagcggtaagtgcgtcaaggccgaaggcacgccgagctacaactgcgccgtgtcgagccaggtgatggcgatggatcgcgactttgggaaccagatggatggcgtctacaccttcaccgaaatcggtgacacctggaagatcactggccgggtccaatag

SEQ ID NO: 534422 - DNA, 894 bp, Stenotrophomonas maltophilia
atgactatcgaacacacacgcatcaaaacgtacagccgagctaggggccattccgccctcgccgccgccgcctaccgaggcggatttttgctcattgaccccaaatcgggtctcaagcatgactaccgagggcgaggtgggatcattcaggcgtgctgcttggcaccgccaggttcgcctgcttgggttaatgacccgcaacgcctctgggcggcggctgaagcggcagagcgtcgccggaacagcaccgtctgccgcgacttcaccattgccttgccgcacgagctcgatgaccgcgagcgttggggccttgttctcgacatttcgcatgcactgatcgagagatacggctttgcgctacaagcgagccatcaccggcccacgaaagacgatcctcgctacttctacgcccaccttttagcgactactaggcgcatggaggcctctgggctggcagccaagacgcgcgtcctagacggaagaatcaacgggtacggcgaggtgctttggatccgagcgatgatctccgaacgcatcaatgcgcatctcggtctaggtgagccccaggttgagcccaatcccgatagcctggccacgcgcctcgaattgcgtcgtggagagagcaatcttggcgacgggcacgcgagctttgagcgactcctggatcgctatcgcaaggaaggcaagcttctgcccgtcccagtgggtcacacggcagggcgagcccgagacgaacagtccagggcgctccccatggttgccggtataccttctcattcgctcccgtacagccctgctactgacgcactcccggtgctacccagtgagctgtctggtgccgctctagagaccaatagacaggtaggggaagacctaccgcgcaaagcggggtaa

SEQ ID NO: 534423 - DNA, 2430 bp, Stenotrophomonas maltophilia
atgtctgatgtgctccataagtgtgtcctgacgattcgtcgtcacttaacgagactgacagcctggtcgatcgcaaggcacatcaagctgatccggagaattgcctacagacagggtgaaagagaaggtctgaaggcgggctggttggccggaaaagaagagggattcaatgaaggtcggcttgtctacgaagtggttgaggctcttcctttagagccaaaacccgttgatcagggcctatatgggccggcacgattaggtgactcggcaacagcggcccggatgcgacaagacgtagcagccaaggtgagggcaggcctcatcaaatcgccgactgatgagcaatgggagatgattcttacggatcatcctgcaacctgcgtgtcagctggcgctgggtctgggaagtcaacaacgttggtcctgcgtgtcatttacatgctggaatatcttaaaatcccagatcaagagcttaccgtgatttccttcacggttaactcgtgcgcggagttgcggaagaagttgatcgaaaccctcggcctttggcgtgccggagtgagtagtgctgattggcagcggtgggctaaggaccgggttcgtacctttcattccttgctctaccacatggcaaagagcgagctgccaggcagatcgttcttcgagctattgaagaagaccgaatcggataaattatccgaaagtgattctggtggcgacatcgacaacccagcaagcggcatgaggcttggcgaggtgcaggtcgcatttctagcggaggcatatcgtactttatttcgatcagatgagacgtttcgcaattccgtgatcgaaatcctgaaggtcgagctttgcactaaggcaaaaaagtccgctgaggtgatcaagcccggcctagtctattactcaggtcttagggaccttgaagtggtagagaagtgcagcgattcttggcgtggcagtggctggccgtttgatggcatcgtggacgagccggttgaacttgcgacggttgaaggcggacataagttttatgccaatggctaccaccgggatacgctgcttcctatcgtattgggtttcgcgccgagccttagccaagcgcagaaggaggcacaagtagggtcgggtaagggggctattggcttcgcagcagctctcgccagccggaaccgaattcttgcgaattatgctgcgcgtgaatacatccacataaaagatgcggctggtgttgctgcttatcagggctgggcagagtacgcggcaggttcggtagagatttcgccaaattctaatgtaccgatgttcaaggtcaagctccagggcgaaaagacgtcttcgatgatttacgaggctctctttgctcaaggatcatttattgagacgcttgggtgggaggtgaccgacttgctcgataagctgccctcccgccaacatatagataccacggcgaacttctatcatgctcttaggcggttctggccgcacctcaatagtcacttggggaaaagcaaagttcatacgtttaatcgtgcgttcttagcgcttacccgcacatctgggaagggagggtggtctccgcagagcccgtctgcgatgcgacatcttctagtggacgagttccaagacatctcgcctcttatcgttgcttggcttaaggaagctcaaagaagcttgcttgtaagggatcaggtcaagggcgttagcatcatggccattggagatgactggcaatcaatctatggttggcgaggaagcgcgccacagctcttcattgactttgacaaacacttcccagttcatggtgatttgggttcgacaaagcagctattgttcaaaacgaactttcgttcagtggatttgattgtttcagatgcagcacgcttgctggggcgggtggaaaagaaggttgagaaagatagcgtggcagtgttgcaggcacagatcggagatcacggcgtgaagctctctacctacggggaccctaagaaatcgatgagcgtcgaggagtctgcaaagaggctcttgccttttatcaacgctgaatacaatgcggctgccactgcgaagggagctaagcctgagttgcttatcgtcatgacccggcgcggaaatctccgaaatgtcctggcaaaggagttgcccgcaaagaagtttgtaggactgaaggtctgcacttaccaccaagccaagggcttagaagccgacactgcgatcctcattgaagactgtgtggtggaagagtcgcacacgttgcggaacatgttgtatgcagcaagtgggatgtatggcggctacacctatgacgcggcttcaagagatgaggcaatgcgcttggcgtacgtcggcgtaacacgaggtaggcgaaaggtcttctggaaggttccaacgcttgtgcccgatggggctgcggctacttataagctgaactag

SEQ ID NO: 534424 - DNA, 870 bp, Stenotrophomonas maltophilia
atggacgaggttgctgttaggcagaaagcgagatcattcattgctcggattgatctgacgacgattcgcgatgatctgtctccttacctgacggcggccaacgccaagctacgaaccgaagagcttggcgttggtgagtctggcttcacggtcacaaaggctagcggtcgaagcatcgtgactgtaaacagccaggagaccagagagcggcaacgcttcacgatctgccatgaagttgcccacatcgtccttgggttgccttcatcgcatgaagaggttcctgcctggtcctatgccaagcggcacatcaacgaaattgcctgtgacacgttcgcgtccgagctcttgatgccataccagctctggcttgcacgcgtccccaaagaagagccatcgattgacgttgttcaagagatggctgagtactttggcacgtcattcccagccgcagcatctcgctacgcgagcctcagcgagcggccctgcgcgtttgtgacgatggagcgcggaggtgtcagatacgcggcgcgatcgacgccgctgaggcaggtcggcgcgtggatttcgcctagatcaaccatcccatcaggttcggtagcccataggctccgaggggcaggaaagagcgcgtcagagtccggcgatgtctcccaagatatctggttcgacaactgggagaggggcctggaactgacggaaatcagtcgccatttcgcgggctcggacaccacgacctcacttctatggttcgacgctgatgaacttccgaccagagaggttgatcgttttggggcgcgggtcgatgaggaagaggcgctctcagagctcaccggtgagctgtcatggtccaagctagatcgtcgtcgctga

SEQ ID NO: 534425 - DNA, 225 bp, Stenotrophomonas maltophilia
atggcaggcaagaaccaacatgttgttccccaccaggacggttgggccgtcaaaggcgctggcaatcagcgcgctacctcactgcacgacactcagcagcaggccatcgacgctgcgcgggagattgcacgcaaccaggagtcagagctggtgatccaccgcccgaacggccagatccgggacaaggatagccacggccccgactcctacccgccggagggctaa

SEQ ID NO: 534426 - DNA, 1005 bp, Stenotrophomonas maltophilia
atggtcagcccccctcctacctaccacgtgctcgccctctctgggggcgggtatcgcggcctctacaccgccacggtactggcagagcttgaaaaggtgatgggcaggccaattgcctcgcactttgacctgatctgcggcacgtcggcaggagggatgctggccctgggcttggcggcggatattcccgctgctgagcttaaagggctctttgaggaccatggcagcaagatctttggctgccgcagtctacgtcgccggctgctcgggttctggttgaaagccaagcatgattcggccgggctcaagggcgtgcttcaagaccgatttggcgacaagttggtcggcgaccttaagcaccgggtcctcattcctgcggtgaactattccaccggccgcggtcagttcttcaagacgccccaccacccctcctttgagctcgaccaccacatgtcggtggtggacgtagccctagcgaccgcagctgcacctgtctacttcccactttcacgcaacagtcgaggcgtctatgcagacggtgggctcgttggtaatgcacctggtctgtttgggcttcatgagatcagaacgttcttggcgcctgacccacaagcaatcatccgcgtgctgtccattggcaccatgaccattggcgccaccgttcgcggcggggcggacctggatcgaggctttggccgatggggtggaggattgttcgaccttgtgatctctgcccaagaatcatccgtcgactacatgctcaagcaatcactgggcaagcagtattaccagatcgatgaccaggctacgcccgaccaaagccgggacgttaaggcccttgatcgcgtatctatcggcgcaaccaacacgctgcgcgatcgcggcgtccatgcggcccagagggcattgggagatgcagatttcctgcccttccggaaccatcatgctcctagccccatcttctatcacggccccaacaagaatacgccggagacgtcatgctag

SEQ ID NO: 534427 - DNA, 1140 bp, Stenotrophomonas maltophilia
atgctagacctgagctcactgttccacaccactgttgatggcaactcgtgcctgcgcgaagcgcttgatctcactcccgctcagcgctctgtgatttccgacgctcgtgttgaggttcggaactgtctccgcgccggcattcctcgggtgcttcgcgaaagcggctacaccaaagatgtcccggaaccgcgcttctttacccaaggctcctgggcctacaagacgatcaatgccccggcgcagcctccccaacaggcggacttggatgacggctgctaccttccgctgagctttgtatctgagaccaaaaggccaagcattgcggcccgcgtgttcttcaatgccgcgaaggaagcccttgcaccgctcgccgatcgtatgggttgggagctcacggaaaagcctacgtgcattcgcatggtgatcgccgagcacgcccatatcgatgttccgctctacgccattcctgacgaagagttcacctccctcgccaaagcaacgatggagcattacgcccttgattccattgctgaggctgctatcaaggccgagcgtgacgcctggtcagcactgcccaaagacaaggttctccttgcgcatggtgtcgatgattgggttgcctctgatccgcggcctatcaaggcttggtttctgaacgaggtcgaggaaaagggtgagcaattccagcgcgtggttcgctacttgaaagcgttccgagactggcactggccgaccaaaggcccctcctccattctgctcatggcagcggcggcgccgttgtttgagaagcgggagcgtcgagatgaccttgcacttctagatgtggtctctgccctgccggatcgactacgcgacggcgttagcaacccagttgagtcgtccgagtctttcaccgcccgccttggtaaggacggggttgaagaggccgccaaggcgtttgaagccttggaggttgccctgcgcggctcgatcgacgcgtctaacgccgcgcaagcatgctcgtggctgcgcaaggaattcggatcgcgcttccccgacgagcctgaccgcgtgaaggtcagcagcgttaaggcgaccattttagctaccgccccctcggcaggcccgagtgagcttgttggcaggacgaaggctggatga

SEQ ID NO: 534428 - DNA, 1626 bp, Stenotrophomonas maltophilia
atgaagcgggcgcgggccagcgaagtgattgaagccctcaaagaaaggggcttccattactcagggaaggatgctgacgggtggttcaccttgaccggtgagctcgcccggaacgcatccgaacaaggtatccgctgcgaagttgcgctggatcctgacttctttgcacttcctcgtgttcgcttgctggacattccgaaacacttcccggccgcggtgccccacattggcgcctacggggatctttgctacctcgccccaggctccatcgtcctcaacattttcgacccagtgggccaaacgattgcgtgcttggaccaggccgaccgtgtgctttgccaaatcacaaaaggcgagctggtcgaggatcttgtggaggaattcttcgcctattggaatggagctaactgcttgttcgacgtcctcggagctgtccccgggcgccagcaatgcctagtggcagaggccgacggtagcacgcattggtttatcaccgacaaccaagagcgaaccatcaagaagatcgagcttcttggtttaaaggtcactgacctcagcccacccgcctaccagatcaaaacggatgcagcgccccgccccaacccccgcgcgtggccgcccaagaccgtcaatgacatcttggagtggcaaagtcagcttgatcggagttgccgtcgcaagatccatgaacgcatccagcagggtgaacgagagaagcggatctgcatcctcatcttcatcgactcgccgctcttgacctacggttttgctgtcatctatgaacgcagcaaggtgaaggtcaagctcgcggaccgacgagacaccacctttggcctcaaagtgctgctcctgaccgcaatgcgcatcgatgaccagtacctggctcagcgcaacattcctaggatgaagaccctcgctggaaagcgcgtcggactgattggatgcggcacaatcggcggctatctcgcggagatgctctgcaaggcgggcgttggcacagttggcggcaagttgacgctggtcgactttgacaagttgctccctcagaatttgggtcggcatcgcctgggtttttcacatcttctgaaaaacaaggctgttgccatggtcgatgaacttcaacgcctctctcctgggattgaagttgaggccgtccaaagagatgctcggcaggttgtgctcgatgattttgacctgttgatcgacgcaactggcgaggagtcactgggccactggctctgcgatacgacacctcgcaccgttcccatgatctctgcttggattgagggcccggggactgccgtccgagcaatgatccggacggaagacgtcagcgcaggctgctatcgatgcctgtggcacggcaaccggcggggtgaacttcgttcagtggtcggggacgtgcccttgcttctggcaggacatggctgcgaggggctctatgtgcccttccccgcctctgtttccgtgcaggcggccagcctggccatggacttggtgctcgactgggtcaatggcaaatcgtcgcccacgctgcgcaccagagttctggatacgacccaaactgccgccgccgcagattgtgaccttcaaccggatgcagagtgcccaatatgccgttcctga

SEQ ID NO: 534429 - DNA, 864 bp, Stenotrophomonas maltophilia
atggttgactcttcatccgctgatccactgcgagttccccagcgggaggtgcagcggctcttgggccgttgccttcttcgcattcagcagtacgagcggttgatcaaagccatcgtggcgcaccatgagatctgtggacccgtatcgtccttggatgcaatccgggccgctcgtatcgctgacgcgtcgacaaagagcctggggctcttggtcgggaaacttgtagggtcctatctggtcaatggctctggtcgcgacaccgacctgcccgaccctggttctggcgaggtcgcaacggttcgaatgcagctccggcttgaaatgggcgctgaggactttgagcggacccaagcggatctcaaagatctggtaaggctccgaaacgacttggtccatcactttattgatcagcacgacatttggactgtgccgggctgtgcgcgcgccgagcaagcgttgctcaccgcctactctcgtattgataatcatttcgaacagttgcgtagctgggctgagcacatggagcaagcgcgccagcttgctgccgagttcgtccagtctgaggtcttccgcgacttggtgatcaacggtattggccccgatggctcagttgactggcccagttcaggcatcgttcgactgcttagagaggcgatgtctgagttgtccgtggatggttggacatccatcgccaacgctgagattttcattcaggagcgagatcccgaacaatcgccagaaaagtacggatgccgcaccttgaagcaggtcgtgcatcaatctcggctcttcgagcttcaataccaggagcgatatggcaggcgtgaggcctactttaaagatcgtgcacgcagatcgtcttga

SEQ ID NO: 534430 - DNA, 993 bp, Stenotrophomonas maltophilia
atgacctacgcgattcgacagtggttggacattgcgtctaactatcgaggaaccgccattctgggaaacggcgcaagcattgcagtaagccccagtttctcctatggatcgctactcggggaggcgagctcaagcaagctcatggcgtctgatgtagagcagctattcactttcttcaagacaacggacttcgagttgatcctgcgcatcgtatggcaggcatcgaatgtcaatcgatcattgagcattgaggacagccgaacacgtaaggcgtacttgggggtccgagagtgtctcattcaaagtgtgcaagcaattcaccccgagttcgaccaggtcagggaacacttgcctgcgatttaccagtttctcaagcacttcgacacggtcgcgtcgctgaactacgacctaatcgtctattgggccctgatgcatggctatgagcaagatgacgagcatgccattaaggactgcttcggtgcgggcgggctatttcaagatgattggcgcagattgagaacgcctattcgtgggcagcgttctacaacactagtgttctaccctcacgggaatctgtcgttgtgccgcgacagcgtagaggaggaattcaagatccacagcaacgatgctggtctgcttcaatcgattctaacgcactggcgcagcgaagaagtagtgccgctttttgtgagcgaggggatttcggagcagaaggtggctgcaatcaagaacagctactacctttctacggtgtatcgggaggtgctgcgttgcgagcgcgagacgctcgtcatttatggctggggcttgggtgagcaggacatccacttgttgcggcggatgcgggatacaggtatccgccgagtagcggtctcagtgtatggcgaagaccaaatttattgcaatcgggtttttccgatcatccgagacgccttaggtgcggtgcttgtggattttttcgatagtcaaagtatcgggtgctggaacaactag

SEQ ID NO: 534431 - DNA, 912 bp, Stenotrophomonas maltophilia
atgaccagtcacaggctgatatttctgctcggttccatcgtcttgccgttcactgcggtaggttcccagctgttcgctgtaactcccagcggtatgccggaggcggtgttctcaggcaaggcgtcggtggcggtttcgcgcttgtcgagcaaatgcatggacgtccagtggacggtcgtaagcagcggtgatacagaagttgtttgcgagtcgccattgagcaccgggcagtccatcatggggcagatgctgctcgggaacagctactccacaccaccacggcgtttcttccgctttaacgtcagtgagatttccggagtatcgcgcgtccaggtgtcgggttggctggagacccagatggcattcggccagatgcagcgtgctcctttctccggggcggattttcataacagcatcatgaacttcctggttagcgctggaggctcgtttcccgcaggaacgacgttccctaaccacgccatgctaggagtcttaggacaagtcgctccgcgcggcaggcacgcgggctacgtggtgagtgaggtgacgccgggtgcagctgcggaccgagcgggcgtcaaggcaggagacgtcattacctcagtggccggaaagaagttcaagaccgaaagtgacttcttggacggcttggaaaaagccaccaaggcaccgacctatcagctcgatgtgacgcgcagcgactctgcacttacgttcaccgtcgagcgtgactaccgccccgcggctactcaggtcgtcaacgcggtagaggagcccgcaaaggcaacggtccctatcgcaacacccctatcggtcgctgacgaactggcgaagcttctgaagctgaaggagcaaggcgtcttgacccaggccgagttcgacgctcaaaagagcaagctgttgagccaatga

SEQ ID NO: 534432 - DNA, 423 bp, Stenotrophomonas maltophilia
atgaatgaggcactcaaacgaggcgcctggattgcattctgcgcaacggacgagcaagttcaagtgttcgtgactgaggacaagctccccaagatcaatctcgccgaacagatcgaacagattccgccctttgataagttccctttgtttagcaaacagcacgcaaatgcctgggacaagttccatagcttcactcacgcgggaagccagatggttggtgcctatacgcagggggaaagcattggccctgcattcccgccggagctcatcatcgaagtgctaaaccacgctgaagccattgcgatgatggtggtccaaattatggtaatgattgctggagattttgaccctgacctcgggcatgctgttctcagggagcttaacgagatcatcccgactgcgaaaaggccgcaggaaagctga

SEQ ID NO: 534433 - DNA, 480 bp, Stenotrophomonas maltophilia
atgttcactccggagcaaaccgaccgcatcaaggaagtccaagctatccttctttttccgctcgatcagccctatcaattcctttcaacaagcatgctggactggaactacacagcctttcagacggcgttgacgatctcatggctgatcaaaggacgccgcgaaggacaattgatggagcatacggaagcgttggcatctatttcagaccaattggatttccatgagcacgcgacagacaatttaaacgtgattgaaaatcatctgtcttccttgggcctggacgactacaaaggtgtgtcactcccgaatgactggcctccctacgatgaggataacctgctcgatcccgactcgatctcccagcaagtctcagatcttgcctcaacactaggcaatgccaagcctgatgacatgttggagagttttaacgaagcgccccagacccgttcaccatggcgttctagacccggcaggtaa

SEQ ID NO: 534434 - DNA, 816 bp, Stenotrophomonas maltophilia
atgaactacgccgtctttgaacaatgccattgcacgcctgatcgtctgcctttcgtcacgggatttagggtcggtatgccatcgctcgcccggacctcctgcacgcatgccaagactctaaggtcgcccgcggcccgctgtatagccaacgatcagttcgatacgcctgtacgggccgtcagacggcgtgacctcgcggcgctcatcaagatgcttgaccaattgcatgaggctgcccgctgtgatcgggcgttaaccgaagcatgcgagataggatttcttgacggcgtcaagctgctgtatagccgggccagctcgttttgggccggcggacatgctttcctgttggccgtaaaaaatggtcacacgcgcgtggctctatttctcctccgcacaacattgccagatgtcgttcgccgttgctcaagaggatctgcactagcgttgtcatggggtcatatcggtacggcgaaagcactggtccgctttgctctatcaagaaagcctgatgatgaaggcgcctttataggactgctttccgtcacgagcaggacgggggatgcccgcctaagtcaggcgatcctagatagggcactggttcctaatgcggcatacgcaatgcgcgcagcactcctgacggggcgctgggagtgcgcagccgtaacctggcgctatctcaacgaccagggtaaagcttatatcgagcgatattatggccgtgagatggcccagatggaagcttggttggcgcgctcacttttgttgcaaagcacgcccccgtgcgacccaaaagaaccctttacctgccgggtctag

SEQ ID NO: 534435 - DNA, 1320 bp, Stenotrophomonas maltophilia
atgaaatttgatcagctttatctgtggtgcgtagttgacccatctcaaccgagatatgtcggtgaactgcgtctgatgaacgtcgggaaaggcgtttctttgaggcatggcgaggagtggagaaaaagtggctttgctctcagtgaagatttacctctcgagcgcgacatggagttcgtgccacccacacgattgcagggttctgcgagggctgtaggtgcagtggacgatgccaggccagatcgttggggggagaaggtcatccgctatgtggacaagcctgatcgtcattcgctgatggagtacttgtatctagccggtgacgataggttcggcgccttgggagtttccactcatcccggcgagtaccttccacacagacagggccctcttcctcgcctagaggacgcgcagacgttgagtgaggccgcagcgaagatcgagaatgctgagtcgcttagcgttgtagagcagcgaatcatagcggccgggggaagccctctgggcggtgccaagcccaaggcagtcatccagatcggtggtgccgagtgggtgatcaagttcttcaacaatgaaccggtggacgcgccgttggttgagcacgcttcgatgacactggcttcgcgtgctgagataactgtagccgagacaaaggtcatcccgctggacggaacgaacgccgttgccatacatcgctttgaccgcgagatgggcaagcgaattcatagcctatcggccagtacggcaatccgtgcggcaacaaccggcgtcccagacctgggctacccggcattggctcttatacttcgccgaaaaggagtgtctcggggaaacctccatgaggccgacgcgagggagctttttcggcggatggtgtttaacatcctgatcgacaatacagacgatcatgagaagaaccattctctattggttccagatcctggtttaggtcagcttcgactggcgcctgcttacgatgttttgccaacgaactccggtcaagggatgcaggagttccgctgtggaacctctggccatgactcaacgctggacaatgcaatgtcggaatgttccgctttcggattgaccgctgaggctgctgctgcggaggtgatgaaagttattgcagttgtcgatacctggcaggagcacttccaacaggctggggtttcagctcgcgacattgatgagctggctcgaagtgtggataggccgcatctcctcaatcagaggcgccagttcgatccgcttgtattcacatcgaagttgaaaaggaagagaaagcgtagctccttccaggatggggtcgagcgaacctaa

SEQ ID NO: 534436 - DNA, 705 bp, Stenotrophomonas maltophilia
atgacccaacgcattcttttcgtcttgaccagccacgaccgcaagggaccggccggcgccgccgacgccgcgcccagcggtttctatctgtccgaggtcacgcatccgcatcgggtgttggccgacgccggccatgcggtcgatttcgtcagccccaagggcggcaagacgcacgtcgatggactcgacctggacgatccgatcaatgccgcgttctggaacaatgcggcgctacgcggtgccaccgagaacgccttggcacccgcgcaggtcgatcccgacgcttacgccgcaatcttctacgccggcggccacgcgacgatgtgggacttccccgacaacgccgaactgtcggccatcgcggcgcgtatctacgaacgtggcggcgtgatcgctgcggtctgccacggcctggccgggctggtgaacctcaaactgtccgatggtcgttatcttgtcgcgggcaaggacgtgtcggccttcaccaacgacgaggaacgcgcggtcggcctgtacgacaccgtgccgttcctgctggccgatgccctgcaggaacgcggtgcgcggcatgtgcccgcgccgaacttccaggcgcaggtcgtggtaagcgacaggctggtgacgggccagaaccccgcttcggccaagggcgtggccgaagcgatgctgtcgctgctggaagcggcatccgtggggcgggcctga

SEQ ID NO: 534437 - DNA, 1092 bp, Stenotrophomonas maltophilia
atgcaaggagaggttctgtctcgccgtggcgagccgccaacgaactcggccgcgcgccttcccaccggattctccacgaaagtcgttgcaggcaccgagtggaggatctacgtgctccgagacgatgcgtatcaggtcaccacagccgatcgaatcgatgaacggtcggacttgactgatcggatgctgattgccgctggtctgccgttcctgatcgcggttatcggtggacttggtgtgttgtggatcggcatcagccgtggcttggcaccactgaccaggctatcccaggagctgacatcacgagacgccgacagtgtcgtcccggtcgacgctgcgcattacccaaccgaacttgagccgatgctgcaatccctgaacgcgttggtggcacgcctggtgaagacggtaaacaaccagcgggcattcacagacgccgccgctcatgagctacgcacaccgctaacgatcatcgacacacacctacaggtggctcgccagtcaacaggcgatgcggtcgcccccgcattggacaatgcccaacatggcgtgcggcgcctgcggcacaccttggaccaaatgctcgcgttggtgcgtgccgacagtcctgacatgctcgaacaatcgtctgtctcgcttgccgatgtcttggccgacagcgtgcttgctgtagcgccgcagcagagatcgcggatcgagctgggcgatcacggcgaggacatcaccgttgccatgccccggcccttgctgcaaaccgccgtcaagaacctgctcgacaacgcgcttcgctactcgccggtcgataccaaggtggctcttcgaatgtcctgggataaggatcgccgccgctgcctgctctcagtgttagaccgcggcccggggctgagtgccgaccaagcggaacagattggtcggcgtttctggcgtggcgatcacgaaagggcgggcgccgaaggctcgggtctaggaatctccatcgttcgcacgatcgtcgagcgcttcggtgggcggttggagttcgttgcccgcgacggcggcggcctagaggtgttgctggacctgcccgcgcacgcgccgaccttgccgccgtga

SEQ ID NO: 534438 - DNA, 834 bp, Stenotrophomonas maltophilia
atgaagccatctcagtttttcagcctagccgccgtggcactcggactcggcctgctcagcgggtgctcgcaggcggcgccagtgggatcaggctctgatgcgcccccgcaaggcatcaatcgtgaggccaagcccgctggagctggtcgtcctgaggtgctgtctaccctcgaaggccagggtatcaatatcgtcgacggtttcgatgcaggccctgggcttcgggcgttcgccgggtcggctggtgatcgtccaatcggcgtctatgtcaccgccggcggctccgcgattgtgggcacccgactcacgccgcagggacagccggctgacgaagagacgttgcaagcgctggttgcccgtcccatgggggtgaaggcatgggcggagctgggcaagtcggcatgggtgctggacgggcaggcagatgcgccccggatcatctacaccttcagcgatgccaactgcccttactgccataagttctgggaggcggcccggccttgggtgtccgccggcaaagtgcagcttcggcacatcatggttggcatgatcaaggccgatagcccagggaaggctgccgccatcatgggggcaggcgatccgtcggcggcgctcctggagaacgagcaaaactatgatcgcggcgggatcaaacccgtcgctgcggttccagctgggatcaaaaccaagctggacgaacatcagttgctgatgtttgcccaggggttccgtggcacgccaggggtagtcgtgaagctgcccgatggcagcttgaagaagatcaacgggatgccgcaaggcgaagatcttgtggacatcttggggccacgctga

SEQ ID NO: 534439 - DNA, 822 bp, Stenotrophomonas maltophilia
atgaagatcctgctggcggtggcgggcattctcgcgggatggtgggtggcgcgacggctcgggcgctcgccggcgtcggcgccgccacgtgccgcaacgtcgctattcttcgatgcctttttggtcggtgcactgtcggcacgactggcctacatcgttcgctggtgggacgagtatacggcggcgccatggagcatgctgaccgtcggcgatggcggattcgtgtggtgggtaggcgcacccatggcgatcgccttcattgcgtggcgcgcgagacgcgcgcgctccaccggaattgcagcgggagcgggagtaactgccgcgctctgcgtatggctgatgctctcaggcgttcacgggctgctgctgcgttcggcgccgccgctaccagagctgaccctcgtcgatgtttccggacagccggtgtcgctgcgcgaccacgtgggtgccccggtggtggtcaacctatgggccacctggtgcccgccttgccggcgtgaaatgccggcgttccacgcagcgcaggcccgccatcccgaagtgaccttcctgatggtcaaccaaggcgaatctgcggctgatgcagaagcatttctgcgcaacagcggcctgcatttcccgcatgtgctgctggattccagctcctccacgatgcaggcgttgaatacgcgggcgttgcccaccacggccatgttcgaccacgacggccgcttgctggacatccacctgggagagatgacccgtgcaggcctggagggaaagctacagcgctatttcccctcgcattcccgttcaactaccacctccaaggaatccaaatga

SEQ ID NO: 534440 - DNA, 1977 bp, Stenotrophomonas maltophilia
atgctgttgttccgaaccatcgtcgtagtgattgtgctcgtgtctgcgagcatcgccgccatgggcgcccctggcctgggttggcaacctggccaacaacaggcggacttcctgcctgcggagtcagtttttcgggtgcagccggcaacgaccgatggagtggccggcatcagaaccctcgcccgggtcgcggaagggtattacgtctaccgcccctcgttgaagctgatcgacagcgctgggcaggagcagaccctgcggttgccgaagggcgtgacgaagcaggacgagttcttcggcgagaccgaggtttacacagcgggcgatctgcacattgagttgaccggcgccgcacccgggccggcgaccttgcattggcagggctgtgcggaccagggcatctgctacccgccgcaggcagtggcgcttgaggtgcccaagacatcgcagatgcccgctgcagcggtgggtaagagcgtctcagaagcagtcattgcaccgccgaaaggcaatcgcgtggcatcggccccgcccaccgccacggcgcccacagcagctgtccaggattcgtcgcagcagacagccccgagcttgccagcggccgatggcaccccggtccccgttgatgccgcagcggatagattgctcacaacaaccgtgcaggaccatgacggtgctgccgaggaccagcagactgcctcgcgccttgcgtcgctggggccagtatcggctgcggcgttgttcttcgggcttggactgttgctggcgtttacgccatgcacgctgcccatgattcccatcgtctcgaccatcgtggtcggcgtgcaggccacgccacgtcgcgccgcgctgctgtccagtgcctacgtcctggcaatggcggcaacttatgcagcactgggggtcgctgccggtcttgccgggtcaaacctacaggcaacgctgcaatcgccgttgttgctgggcgccttcgcgctgctgtttgtggtgcttgccgcgtcgttgttcggtgcattcgaacttcagctcccgacctggctgacgcgtcgccttgaccgggcggggcagcggcccggaggcagcgtgcccggtgctgcggtgctcggacttctgtcggcgctactggtggggccgtgcatgaccgcgccacttgccggtgcgctgctctacatcggccagactggcagcgccttccacggcggccttgcgttgttcgcgcttggcgtgggcatgggactgccgctggtgctgatcgccgcgttcggcgcccgcattctgccaacgcctgggccgtggatggagcgcgtcaggatagcgtttggttacctgatgctgggcatggcgatcagcatgctttcgcgcttccttcctgcgtggagtgcgctgattctgtggggtctactcgcggtcgccgtgaccgtggggctggtcgcctggggcgcgacgacgcaacgcccgcggctcgcctggctcgtgaggtcggtcgccgctggtatgggcgtgtgggcggtcgtgctggtggccggtggtgcctcgggtggcacatcggtgctacagccattggagcaccttgccggcgaccggagcggggctgtagtcgccggcagtcgcctggagtacaaacaggccaagacggtgcaggacgtggaggcacacatcgcggccgccggtaggcaaggacagtggaccctgatcgacttctacgccgattggtgcgtgagctgccacgtgatcgagcgcaacgtcttcggcgaccccgtcgtaggcacgcgcttgtcgtcgatgcagatcgtgcggccggatgtgacccgcaacgatgcttccgaccaggcgctactgaagcggtggggcgtgatggggccgccgacactcatcctgattgatccggatggtcaagagcgacgcgcgcagcgcgtggtcggggagatctcggcggccggcttccttggccgcctggatgcggcgggcgtgccgtga

SEQ ID NO: 534441 - DNA, 666 bp, Stenotrophomonas maltophilia
ttggtcgaagatgacgtgctgattgccaacggaatttgcagtgggctgagagtcttcggcattgaagtgacgcacgcggccactgcgtcagatgctgaagccatctacgttgatgactcctttgctgcggtggtgttggatctgggccttccggatgccgaagggttggatctgatcagtgtctttagatcggtggagacgcacctgccggtgctgatcctgtctgcgcgtgatgccatcgagtcccgcgtttccgggctacagggcggtgccgacgattacctcgtcaagcccttcgacttgcgggagctcgctgcgcgcctttatgcacttgtcagacgcacgcaaggtcgcacctcgcagaccgtcgctgccgggcccctcaaactggagcccgcaagcggcttggcgtggctgcacggcaacccggtcaccctgtcgcggagggaaattgacctgctcaccgagctagctagtgcggacgggaggtgggtctctcccgaagcattggttgagaaactcttcggtttggcaaccgagtccggcacaaacaccctcaatgttcatattcacaatgttcgccgaaagctgggaagcgaagccatcagcacagccaggggaatgggataccggattgggtgggcgctggacagcgatcctcgctaa

SEQ ID NO: 534442 - DNA, 1194 bp, Stenotrophomonas maltophilia
atgtctggtgtgcccaattcgagcccagaaggtctccactattctggtggtgttcggcagggcaccttccgcctacagagcatcgatacgctccgcggtttcgtcatggtcctcatgttgctcgatcatctccgagaaacctggttccttcatgtgccggtcgccgatcccatagacgccaacacagcgctgccagcgatgtatctggctcgcttggccgctagcctctgtgcaccaatcttcgtcgcgctgacaggtatttcggcatatctgttcagcacgaagcacacgctcgccgagacacgggtctacctggtcaagcgcggccttgtgctcatggtcttggaagtgcttttcatctccgagctgtactggggcgtcgccagtcctaccttctggctccaggttatctggtgcattggtgtttgcatgatcatcctggcgatgctgataggtctaccgcgcaagccgctgttgcttggcggattggcgatcgtgtgcgggcacaacctgctcgatgtcattcgattggagccgggccagccgttcttcgccctctgggcgctggtgcaccagcgcgatgtaatcgagttgcccttcggcttctatgctaagacgacctacccggttctgccgtggatcggagtcattgtcctaggctatgtgatgggtccgtggttccttccgagcgtggataccgaaactaggacgcgacgcctgcttgcacttggtggcgcgatgttgctcgccttcttcctgctacgcatgtggaatggctacggtgacagcccgtggtttgttgtcgagggcgatctgatacgtacgacgatgagctacctagcgctgaccaagtatccgccttcaatcctgttcctgttgctcaccttgggagtgggagccctgttactggcaggggccgagcatcttcgcgaagggcgcctggcagctaccttggcgatctttggtggtgcgcctatgttcttctatctgttccatttgaccgtgctacggctgctctaccacacggccttggccatctggggacccacgcaaggagctgtgttcggcgtcgagaactacgcttgggtgatggcttggtatgtggcgctgatcatcccgctctacatccccacggcctggttctccaatttcaaagcggcgcggcgcgacatcacttggctgaagtacttctaa

SEQ ID NO: 534443 - DNA, 1224 bp, Stenotrophomonas maltophilia
atggtcaaagcggcgctttgccgcagccccgactaccggcttgcagagctcaacgtgcgacttgcccgggcgcaggccggccagagcaacagcgcgcgactgccgcggctggacggtcaaatcgtcaaaagcaagcagcggttcggagatccagcgctggaccagcgctaccagcaggacctatccatggcgaccgtcggactgtccgagttcgatcccgacttcttcgagcgtctcaggtcgttggccgccgtcgaagggcttcggtgggaggcctccgaacacggccgcgacgcggcccggggagcgctcattggcgaaacacttcgcgcctatgcgctttactcggcagccaaagatacggaaacccaagcggcgctgatttccagcagcgcccaggaacagcttcgactcgcagaacgccgacaagcgctcgggatgattgcacacgacgagcttcgtgacgcggaaagcttggccgcacaagcagacgccaactcggccaaggctgcggaggccgccaaggcccaagagcgcgcgctgcggttcttggttggttttgactcggcgctgccagatccgaacctgtcgcttttcctcgacggctccggcgacatcgcccgctacggtagtttggattcttctgtcctctaccagcgccctgaggtgcttgaggcagaagcccagttgcgtgcagctcacgctgacatcggcgccgctcgcgcagccttctttccatccatccaactcaccacgtcccttggttcggccagcgagagcttgggcggtctcttctcggcctcaaaggcgtggacgttctcgcccaccctccggcttcccatcttcgacttcgggcggaacaaacacgcgctggatctcgcctgggtccgtcagcagcagggggtcgttcaatacgagaaggcggtccagcgcgcatttgtcgatgtcgccgatgccctgggcacccgggcccaggccgaacggtcctatggcgctgctcggacgaaggagctcgctgccgtcggcaggacagagcgactggtccgccgcgttgatgctggcctgcaagacgccttggacggtccccaggcccgcatcgacgcggccaacgccagcgccgaccgaatcgccgctcagcaggacttcgcgctttcccggatcgctctgtcccatgcgttctatgcaactgctcccgctctcccttcttcttccaatccccactga

SEQ ID NO: 534444 - DNA, 729 bp, Stenotrophomonas maltophilia
atgttcaaggacggcgccgtggcgcaagtcagcctgacccaagcccgcgccgcgctggaggcctccaaggcggaactcaacagtgcccaggccgacttggcgctagcgcagcgctcggtcgatcacagcgtcatccaagcgccctttgacggccaagtcatcgcgcgccacagcgagccgtctgttgacatcgccgctggccaagccatcgtggatgtgcagggtagcgggcagaccgaggtcgccgccgatgtgccggccaacatcgcaaagaccctccaagcaggggccacggtctccgcgcggcagcccggaaacgtcctcatcccgctggccctgcgttcgatagcgcagcacgagtcgacggcagggaccgtaccggttctgctaaaagccgcagacggtgcggctcagctgcttcccggctcactgatccacgtgttggtccaagccgacactgacggcaaggcactgtcggtgcccgtctcaagccttgtccccaccagcgtcgccgggacggctgacgtcttcattttttcgccgaaccatcaaaccgtgaagaaagtgcgcgtgcgcgttggtagctatcaaggaagccaagtggagatccttgaagggcttgccgacgacgccttggtggtcaccgcgggtgccagctatctcacggatggccaaaaggtccggctctttaaaagccagtcccagctcggacaaggggaagcgcgatga

SEQ ID NO: 534445 - DNA, 1911 bp, Stenotrophomonas maltophilia
atggccgggaacaagatgcgcgtcgctgccgtcctgttcaccgcgcttttgagcgggtgcgccatggtcaaaatgaagaacgtggctccggaacgctacttcgagcagcgcaggggcgacatcttgagcaccggcgatctgagccctgcgacccggcaggagatgggcctgctgtccttggacgcgaaatcctgcgtgtcggcgcctgagccctgctcgggcaccctcatcgggtcagaggaaatcaagaccggagactccttggcggcctcggcggaactgtgggtcgcctacgcagcggaactgtcccggacgtcgcccgacagtgatcgaacgatggacgcttggctaaaggccgcccgctattcctatgcctacttcttggtgttccagcaaggcgcttcacgtttggcgccccgcgatcgcgatactcagatccgggactattacaactactcagtggagaacgtcacagccagcttgttccgacgctaccgacagggagatcacgccaacctgacgagtgagagcctgcccacccctgccggatggcgcgtgaagctggacatgtcgggccttcgagagaacggagaggtccccatacccaaagaactcctggctgcgtccagtattgggtttgggggaattcgaaacgcctaccgccgcgatggctttggggcagaaatggtggccgccctgcccgcgggggcgtctggctcccaaactccgcctccgtccggctttccgttggccggcggctacagcgcgatgccgacgccaaacgtcacgtgcctgttggacttcgaaggcaataccgtgcaggaggtgcttgcatcacgctcggccacccttcgggcgttcgatcctctgctcgagagcacggccgcaatcaagggggagaacgtgcccttggccgcgaacttcaccgccggctacggcgtgtggctggcacgctccaacttcgccaccgaggccatccgcacgctcttggacatggataagagcttggacaagccacacctctacatgctgcagccgttcgacccgaaccgtcgcgtagttctgatgttgcacggcttggccagcagccctgaagcgtgggtcaacaccgccaatgatgtgctcggggacgatgaactcagggcccgctaccaagtctggctgatgtattaccccaccaacctgccgcttccctacaaccaccaagcgatcaggcagacagtcttggagacgctaagagccatggaccctgctggcaccgcgcaggcgtctcatgaaatggtcttggttgggcacagcatgggcgggctgttggcccggctgatggtttcctcgagcaacggcagtcggctgctcgaccaaaccctgcaggagctcaagggcaacgaggtgaatgccgtgcgccaagagctgtccccactcctggtatttgatccgatgccccaagttcgacgggtgattttcattgctaccccgcacttgggaaccccgtccgctgagggcgtgcttgccgcgatcgtctcaaggttgtcctcgattcctcaaggactttccacacgttacagcgctagcgcggcggtcatggcggccgtgtcggggcgtcttccacttagcatcgacaatctcaaggaaagcgacgcgttcgtgaaggacgtcgccaagcttcccatctcgcctgacgtggtcttgcactccatcattgcagtgaagaacccaacggacttggccaacgcaacggatggcttcgtgccctaccgaagcgctcacctggccggcgctgcatcggagaaggtcatcctcagcggccatagcgtccagcagacgcccgaggcggttctggagctacggcgaatccttcggatcgatgcgggcttggaaacaccgcagtccaactcagggcgcctggactga

SEQ ID NO: 534446 - DNA, 861 bp, Stenotrophomonas maltophilia
gtgctcaaggactcaaatcccctcagctctcaaaccccactcgacgactacatccttcttcgggaatacttggtcggcggagggacaatcgatcgcgtgctctcggcggcttggaagatcgagcgcgacctaaaggcgtcggacgcacttgcgtccgatgagacgcgaaggactctggacttggcggccatgctcggatatgggctgacatccattgactactttgaactcgacaaaaagctcgacggcctgaggcaggattacggcgagaaggcagccgatgcattgcccgtgtgcgatcgcgtggacacgtgtgcagccaaagttctctccgctttcgccaccatggagagctgctgtgagtatgacccgggcctagttcccaaccaaaccggaatccagagatttcagttctcgcttgcctttacctggctgtctgaactcaagaagctgagtgacgcgcgggaagagtcggaggcctacgacgttcgagcgaaacgctgtgcagcaattgcaaaggttctgcaggacagcctgcctgaaggaaaagcccgggcacactcgatgatccagcgccgcttccgcgccgatgtggcggttgagaaaaacctgaacaactatcaggttgctgcggggaagaccggggcgtatgtcgaggctctcggcgaattggacgcgatcagcgccgatgaggtcgcccaggccattgaccggctttctatgtggagctcttacacggcagggtggtggaatcggttcaaccagaccctcgaccacgcctacgcaacccatgctagatgcctggtcgctgactctcagttttggcgcgaacagatccagccgttgctcgagactgaataa

SEQ ID NO: 534447 - DNA, 663 bp, Stenotrophomonas maltophilia
atgcatcaagcttcgaatcccgttagatcattagctccatctaatcctgagagagatcaggacgaggaaggacgccgccgtctgttgattgcggtgttgagagatgacatgtctgctgtgcggctggcgctggcaaccctgtcggatgggaagagcgcgcagcacgcgttgagagtggccgcaggtttgggtcatggcgatattgcttcgatgatcattcaaagtgctcttcccgatgctgccgatgccctggacggggcgttggcagcagccattaaagacagccagactgcgacggtccggcaattgcttcttgaggcgtcacggttcgctgagcgtcctgcattggtgaaatcgctttatgccgctggaagcgtcggcgctgtggatttcatcgatgagatcatgtcagcgtatcgcccgttcaacaagtcgcttgtcgccgtttttcgtgtcttgctgactgagaagagatggccggctgccgtgcatatcttcgacgcgggcgatgccaggctatttgatcggtggataacggaggctgaccggagttgcatggatgcataccgcgcacttcggcgatctgatgttgcccgggaagagttggaacgatgcaccaagtctctggcagcgaggcataagttgccagagcggagaatttga

SEQ ID NO: 534448 - DNA, 1188 bp, Stenotrophomonas maltophilia
atgtccgaactggcgcgcttcccctgtagatgcctctgcgaagcacagttccgcaagccaagaagcgctcatcttgacgatgagtcgatctgccctatcttgataacgggggtagatatgaagaatttatttcagcagaaaattaggaggtcagttcaggtcggtagtgcattagaaacgatccagctgtgtcaggcgcagtctgatgtcgatgaggcggctcgagtggcgatagtggaggcgattagggctggccaagacgcgatgatcgatcttctttcacctttgttgacggtgtcttggaagcaagagccgttaacgaccgccgctaaagtgggcgccgcagaactggtcaaaaagctcatcccgcattgcgatgccgacgatgatgccgcgctttgcttggcggcaaggaacggccatctcgagtgcgtcaaggtgcttcttgggacgtgtagcccctttcagcgtgactctcaggcgctgtatgaagccgcgctccatggtcacgcggatgttgtgttccagctaattctattctcggaccctaaggccagagacagtcgagcactgttcgctgcttgcagggcgggtcatctggaagtggtcaagcaccttctaccgttttcgtccaagatccaatgcgcgcagcggggatttgaagctgcggcagaacataaccatgaagccgttatcaagttcctgatcggcgccggacttcccgatccagaggatacgtacagcttagggttgaacattgcagctgctagagggcatgtctcattggtccgaactctgctttgggccatcgttcgaaccggctttgccccgcgcgacttcggccaagaggccttgttcgcggcggccaagaacggtcatgccgaggtggtgaagtcggtaatggaatttgcgcataaaactgcttatcccgaagcggccctatacgctgcattgctcggcgctcacgatcccgtggccgatctattggttcgccgggtcaatctggaccacgtgcgtgaactgatctcagacgaggatgtcgaggttagactggatcgatcaatcgccagggctggtgccgcagcgcagaacaaagaactgaggtccgacgcgaaaactcgggagagggaatgcgaagcggcggcgggaagtccgtctaaaaagtcgcatcctgcgcgccggctatga

SEQ ID NO: 534449 - DNA, 1410 bp, Stenotrophomonas maltophilia
atggatcgctcgggattcgagcacgcccaccgcctcaatagcatgacgttcgatgcctttgcgcgtcgaatcattgcgatctatcggccgcttctgacaggaagagaccgcttggaccaaggcttcaaagtcggcaccgttcgcgtgaagaccgtccagattgcgttcaaggagctggtgccgttggcgcaaagtctcatcgagcagcatccgatgatcaagcgatcaatcaacatggcttatagccatgttttcttggatgagttccaagactgcacaggtgcgcaatacagcctgatcaagacgttgttcaaggatacgcccacctcaatcaccgctgtgggagacgcgaagcagaagatcatggggtgggcgggggcgctcgatggtgtgatgggcaaattcgctgatgagtttccagcagccgttctgagactcgttcagaactggcgatctgccccggccatacggcgcgtacagaaccgaatgatcgtccagatggagccggcttcggctgtcccggagaatgatattgttgggggcgagggcaaggtctatttagctcgctttgctgatgaacaggccgaggctgcgcgcatcgcagagaagattgaggagtggatcgctgacggcattgcgccgcacgagatagccattcttcacagtcgccagagcgttttgttcaatcaagctatcgacgatgagctggatcgtcgtgacatccctcgccgtaacgagcaggagctgcaagaactggcgtctgagcccgtcacagagtttgtggtcaacctgctgcgcgtttttggtcgtaagcctgcgccaagcgcttatgcatcggtggtatataccttgattggtcaagaggatgacgagcggggcgactggttaaggaggttgagcagtgcgcgcgatcgtgtcgctcagggccaagacggcgaacaggcgcagcttgctttcgagcagttgcaggaggtcatggcggcagttccgattgcgacattgctgtcgctttcttccgactacgatacctcacgcatcgccgaaatcctggctaaggtcgatgagatccttggtgcgttcatccgccagcacaacgacttggaccaggctttggcgagattcttggatgaaggggctgtccgggtgatgacgatccataagtgcaagggcatggagtttgattgcgttgttttaccttgcacggagcgcgaaacctggtggagcaagggaaatcaagatgagaacagaagcgcttatttcgtgggtgtgagccgcgccaagaagcacttggtcgtgacctatgctgaccgaaggagcgagcctgagggggctggcccgtattggaatgtggtgcgacatccacaggaagagttcattgggtatgtccgaactggcgcgcttcccctgtag

SEQ ID NO: 534450 - DNA, 1917 bp, Stenotrophomonas maltophilia
atgcagttggcagtcgtcaggattagtaatttctggtccttcggtccggacccggttgaaattaagctcgattcgatgacttacctacttgggcctaacggtgcgggtaagacggctgtgctgacagcattggcccggatgtttggcaccactgggaccatgcggacagtgctgccctccgacttccatgtggcgataggtggggcgccgatggacggcaaagctgccagcctatggatcgaggcagacttcacctttcccgaagtgaaagagggtaaggacactgctgcggttcccattttcttctcgcacatgcagctacaaggcgtaggcgaagttcccggtgttcgcattcgccttagcgcagagatcgatgagagcagagagatcgatcagcgcctggaatacgtactagctgccgatgaggacggtgtgcccacacagcttcgtggcatgcccaagcttgatcggcaagccatccaggtgcactacctcccggccaggcgcaaccctgccgaccacattgcatatagcgcggcctctctcctcggcagggcgcttcgcgcggcggattggaccgctgagcgcaacaaggccaacgatctgtcagagcaactcggtgaagcggtcaccgagaacgctggcgttgcagccttcggtaaggcacttacggcagggtggggaaagctccacaaggggaagttcttcgcttcccccagcattgcctttggcacagggggcttggctgaggtgttgaagcaggtgagcgtccgcttctcgcccggccacgaaacgccctcagtggattttgagcgccttagcgacggtcagcagtcattgctttacatctcgctggtgctggctgctcatgcagttgatgtcgcggcgttggccgacgcggattcaccctttgatctagctcggctgaggccagcggctttcactttgcttgcggtggaagagcctgaaaacagcctctcgccccagtatctagggcgggtcatccaggcacttcgggatctcaaagacgagtccggcgggcaagcgattgtagccacgcactctcccgccatgttgcgcagagctgatccagatcacatccgacatctccggcttgacgctgaccgcattacacaggtcagtcaaattgttcttccggatgaggcgggggaggcggggaaatttgttcgccaggcagttatggcctatccggaagtttattttgccaagctggtcgttttgggtgaaggcgatagcgaagacatcgtcctccatcgaatgctcagcgccatgggcgtccaagcggatgcgtccagtgtctgcgtggcgccgcttggagggcgtcatgtcaatcacttctggcgcctgttgtccagtttgcgagtcccctacgtgactctccttgaccttgactatggtcgcttcggtggaggatgggggcgcgttaaagtggcacatggctatctgcgggagtttccaaacggccacccagtgcgcactgctgcccacgttaaagcgctcccgggatggaaagcgtcttgcaaaggggatgcattcattgaagaggtgcgtttcctccaaggggccggggtgttcttctcggccccgattgatcttgatttcgctatgatgcgtcggtttccagatgcctacggcgccactgagcacccgctggaagacggcgatagtttgtcggtctcagtcttggggaaaagtggaatcgtggatcaccacgtgccccaagctcaaagctatttctacgactaccaccgtctctttaagcttggtagcaagccgactgcgcaccttcaagctctggccatcctcaccgacgaagagctgatcctggaggcacccaaggcgttgagagcgctttgtggacgtgtaattgccatactggcggcagacgcggaatga

SEQ ID NO: 534451 - DNA, 669 bp, Stenotrophomonas maltophilia
atggtttcgcgctcttcgagcacaaacagacagaatggactcattatggccgcaaacatccaagaatatgtcgcagagcgcggcatcaactatctcgttcacttcactcgagaagcgaacctggcgtcgatcctagaaaatggccttctgcgccgcgacctcttgaccccgggcgctggggtggtcttcaatgacgagcttcgactagatggaacttcagccgtatgcttatccatcagctttcccaactataagctgttttgcaggctgcggaatagcaatcctgacgagaagtgggtagtgattgtccttcacccttccgtgctctggatgctacgctgcgccttctgcacctccaacgccgcctccaatgcagtcaccggcatcaatattgagcaacgcatggacctaggtgctctccaagcaatgtttggcgactgggaagacagagagagggtagaccttggcctgactgcttcccttccgacccaccctcaggctgaggtcctagtgctcgattcgatcccaagaaatttcattgtcggagtcgcagcgagcaatgaacccacagcacaacgcctccgagtaagtcacccgggcgcgaacaccttgtcgttcccgaactttttctatccgcgcgcagactaccaacattggcaggccagctag

SEQ ID NO: 534452 - DNA, 480 bp, Stenotrophomonas maltophilia
atgatcaagacagtcaagcatgagcgggagttcagcttggagtgcgcgtttcaagcaagcaaggtcttcgaaaatggcggaccttacaaagatttgctcaacgcgcgatcccttgacgccaagcgcgacccgcgcttgaaagaaagcggccgactgataaagttccacttcttcaatgttgattggggactagaaccaagaactgccttctatgactggctctacatcaacgcgctgcacaagcaatcggaccttgccaacctggtgctcacataccgggctttttcggacatcgccttcaacccggacaaatcaattaactgccaagcctacgcggcggcactttatgtctcgcttcatgagcgaggattgctgagcgaaacaatgctcaaagataaggacctatacctgtcgaccatcaagaccggcgccattagtaacgcgcacgaagatagcaccatccaaagcccattgatttga

SEQ ID NO: 534453 - DNA, 855 bp, Stenotrophomonas maltophilia
atggatagagcaaaggatcgtcgaagtgaccaggaatacacggcccaagaggtggcggacctggatccgcttgctcgtcgtgcattgaaaccgcatctgcgttgcccctattgcgaggcaactgctcatttcagatcggcgtcaagacccagcgcaggacggcgcagtaaagttgcgcatttctatgcccttccccacggggacgagtgcgacatcactcgaagctacggtgacccttgggaggacgacaacagcgaccagacggtggctcattgggagcagcagaacacaacgctgatcgttcgaatcgttactgatcaggaagaggcgtcagatgaaagcgctgctatcggtgagcccgaagacagcgaaagtcgatctcgcagcggcggcgaccgaacacgatcaacgaactccgtgtcgcgcggcccccagaagctcctggaacagctggtgcattggccaagcttcaagacaagcccgctagcgcttcgcatgcctgatcccgatcgcacggaagtggccgtgcatgatgctttcgtgcgctttgaagatgcacaggtggagcgtcatacccagcaatggcatgggttctggggaatcgtccgcccttggaacttttggccagcgcataattcatactactgcaacttcggcctggctcatcagagctttcgcatagcacttttaagaacccggattcagcccattcttgatcgccacgggctatccagcatcgacgatatggtcggacactatctgctgcttttcgactttgccagagagtcaggatctgggcgcttcatggccgacatcaattcggtgcatcatattggcttcctgcggcagagctag

SEQ ID NO: 534454 - DNA, 1002 bp, Stenotrophomonas maltophilia
atgtctatccctgtccgcatctcatctaccggcatatcgacgcgcatgtcgcttcccgcgaaactgttcacttcgctggcactcctgctatccgctggtgccgtggttgcctgtgagcagtactcagcgaaaccggacgtggtgctcgacaccgtctatacgtctgctccgactgggccgaatgtcttcatggctgaggagagaggtcgcgtcgcctatagaaaatgctcattgcccggcggcatcgtatcggtcttcgtgcgcctggacgttcctgggttgacctatgctggggacatccaataccaagggcggacctacgcgtcctatgtcacgtcgcatgactcggctctactggcatttgacgctttttcgaatttcaatgatcgcaagccacttcgcttggatgaagaactggagctgcagtatcagactgtccccggagacggcgagcagaacaccatcaactacacggcgctggtcttctcgcgcggcgggcgcatgcgcacgtccagcgtgcggaccgggcaggtgtcgctgcgatcgccggcacaccctgagcttgatgtgacatccccttactatcttgctccccagttcccggccgtcacctgtccgttgctggatgtctcggaaacgcttcaggatgtccagtgggcagagttgcccacgccgggcagcactgccaaggagaagccggtggcggtccgcctgagttgcggcacggatgcaccgcgggcgcagatcaccctgaccgacgctggtgacccgaccaactcgggaagccaactgacacccacggctgattcagatgccaaaggtgtgcgagtgcagctactgcaagcgggtagtgaagtgaacttcggacgtatctgggattttgaaccgggtgttggcggaacgcatgatattgccttcaccgcgcgctacattcgcaccagcgaggcactggtgcctggtctgatcaagggagaggcggtgctcaacgtcgactactggtaa

SEQ ID NO: 534455 - DNA, 528 bp, Stenotrophomonas maltophilia
atgttcgaactgcgcgatgcgaccgccaaggtcgccaacttcaacccccgtgcggagaagcacggcgacgaaaacaagctggccggcgacctgaagttggtcgtggccgtcagcagcagcgtgctggactacttccagaagggtctgcgccaggccctgtaccgcaaggctacgcagggcgagcagcaggacctgatcgagggcggtgacggcctgacggcggtcaagttcccgaagctgggcgcgctgccgtgggacgaagagtacccgggctattccctgctgatcggaagcggccttggactgtccgagccgctggttatcagcgacgtcaccctgaagaagctgtccttcgaacccctggaaggtggaacgttgcagctgaccttcagcgccgtgttccacccgaccaaggccgaagccggtgccttgtgcgagcagatcaagaacgaggtgcagctgaccctcgtttcgccgctcaacaccagcaagggcgacaagcccgtgcaggaagacctggccgcgtaa

SEQ ID NO: 534456 - DNA, 219 bp, Stenotrophomonas maltophilia
atgagcgtgtgtccgcactgcaagaagaacttcaccaccgccacgatcggcgaggtcagcgccagcgttcccttcgggagccggacgttccgggcgatctcgtacaactgcccgcacgtcggttgcggcgtgtcgctgggcgtggaaatcgacccgatcgccctgaagtcggacatcatcagagaggtcattgcaggtcttcggggaaaactgaggtag

SEQ ID NO: 534457 - DNA, 219 bp, Stenotrophomonas maltophilia
atgcagctactcccatacgaagtggcgttcctggcctctctcgatgccgttgttgatgagattcagcacaacgagagcccaaccctcgtcgatctgatgaactggaagctcgccgaagaacgcggagcgaagatctacctgaccgggatgggacatcagctgcgtggagacctgcgcgccaagagcaaccagtcacccccgcgcaagaagggtttctaa

SEQ ID NO: 534458 - DNA, 396 bp, Stenotrophomonas maltophilia
atgaagcgcggacgatcgacgggcaagccgaccatcgaacaacggcagcgtatggacgccatcgccgagattggctgcatcgtggcctacgcgctgggcatttccttcggcgagaagccagtgccatgtgaggtgcaccacctgacggtcggcggcaagcacggccagaagcggcgaggccacgacttcaccatcggcctgaatccgtggtcgcaccgcggtgagcccttcggcggcatggacgcggaaacctgcgaagccctgttcggcccgtcctacgccaagcagccgcgccggttccgccaggagatcggcaacgacgactacctgctggacctgcagaacaccgcgctagaccagtattgggggagggtgcggccatggcgcgcagcctga

SEQ ID NO: 534459 - DNA, 318 bp, Stenotrophomonas maltophilia
atgaacgagtcgaagaaggtcacgccggccgatatcgaggccgacatcaccgccgaatacaccaccacgctggacaaggcctatgccggcgcgccgctggtcgaaggcctggatcgggtgacgatccataccatcgtgctgcgcaacgggacgaagctggttggcgtcaattacggggccatcgtcccagccaaccacagcgccgaggaaggcgtgaagcaggctcgtagggccgcattcgatcaggcttggccgctcttcggcttccgcctgcgcgatgaactgacctcgctccctgatcaccctggcctaggctga

SEQ ID NO: 534460 - DNA, 531 bp, Stenotrophomonas maltophilia
atggccaagaccgtatccctgctgttgctgacgctggtcatcgaccgcgacgcaaccaccaagctgccggtgcagatcttcgactacgagctgccgatcgtggaagagctgtatccaccggaatccatcagcgaatcgaagcgcgaggccatcgaggtcagcaacttcgacgtggcggaagtgttcgccggcctgcagaacaagtacggccgcactgcggaaggggcggaggcactgaagtacgcctaccgcaacgatcgtgacttcgccaaggcggtggaggccagcatcgctgccgccaaggacgaagccgagcaggttgatcaggacgacgaggaagaagacgaccagcccaccgagctggaagccctcgccggcaggactgtcgccgagatcgaagcggcgctggacaacctgaccgatgaagagctgcaggagctggccgagatcgagaaggccggcaagaaccgcaagggcgtgatcgacgccatcagcgcggcgctgggcgaccagggcagcgaaaccgtttaa

SEQ ID NO: 534461 - DNA, 657 bp, Stenotrophomonas maltophilia
atgacgtgggtcgcaacggccatcgcggtgatcggcgccgcaacgcagcagtacacgcagcaccaggctgccaagaaggctgacaaccaggcggcgaaccggatctaccagcaggcggccaatcaggagcgggccgattatgcggtgaaccagctgctgaccaagcgcgcaaccgacgacggcagcgccgagcgggccaatgtcacccgcagcttgttggaccagtcgcaggccgcgcagatggcggcaagccggggcctgaatcagggtggcgcagtcagtgacgcttaccgggcgtcggccaatgatgccgcgctgggcatcagcgattacggccagcgcgcagccggcctgatggcccgaatcgacgcgccacagcaacagcgcaggcgcgaggcgctgcagagcgggaatctcgcgtcgcagctgggcctgatcgggcgcgaagcggccagcgatgacttcctggcgcagctccggctgcaggccattcgccccgacccgtggctgaccgccgctggccagatcgctcagggcatcggtagcggtatggcagcgcgtggtggtgctgcgcccaaggccaatgctggcgctacggccaacttcggcaaccaggccggcacctggtaccagaattcgaacctgtgggggcgctga

SEQ ID NO: 534462 - DNA, 1170 bp, Stenotrophomonas maltophilia
atggcgacgaacggatgggcctctctgggccaagcatttgcgggcggtggagcggggcaggagcgggcgtatcaggccggccagacgcgtgccgcacagctggccacgctactggccggtgcgcagatcaagcgcgacgaggcgatggcgcgtgatcagctgcaggcaagcatcggcggtgtggtctcagacccagcgcaggccagtttgctggcgaccgcattgcgtggtgggttcgacccgaccaagatcaccgggtacaccggcgatgtgcaggaacagggattccgcggcgatgctgtaacccgggctctggccggcgactgggcaggggccaatgccaatctggtgggcgtggcgaatggcccggtggagctggccagcatccagggccagaacctgatcaacaaccggctactgcccggcggcggcggcgtcagcaccaccgagcaagggcgcgccggcatgctggctgatgccgctcgcgcacgcgcctcagatgccagcgccgccagttcgttcgcatctgcggcgcgcacccgccaggccatgggcatcgacggcgcccagttcgcgctccagcgtgctggtcaatggaacccaggcggcaagaatgctggtggtacttccccgctgccggtcggcgcgctgaaggagctgttgggtgtggaggaagcccttggcgccacgcaaatccttggcgacatcatcgggaagaatcgcaaccgtcttacgaatggaaccttggacgtcggcccgggcgctcgaatcgccggtcgaatcaggactggcctgaatatgtccaatgcgaacgacgtcaacatcaccgagctgaacgccgacaagaccaagatcgtcaacgaatcgttgcgcctcaacaagggcgtgcagacagaaggcgatgccattcgtgcgggtgaggagttgatggccgccaacgacgcccagacgctgaagcgcgcgttcgacagattggaggaaatcaaccagcgcgcaatccagttgcagcagcgcaaggctgcactgatcaacggcaactacggccgcagcgcaagtccgggcgggatgcccagcgcggtagaggcgttcggtggtggtgctgcaccggttccggtgccagctgttcctgcgcgccgtcgctttaacccggccacggggaggatcgagtaa

SEQ ID NO: 534463 - DNA, 198 bp, Stenotrophomonas maltophilia
atggcaaatgaccgattcaaaggcaccgggcagttccacccagagaaggcatggagcgagattcggcggaaggactgggagcgcaagcacgaggccaacctcggattcaaaggctgggccctcgtgctcggcgtcgttgcttcactggcggtcgctgctatcggcgcgatcgcgttcgtctggcactacttcctgtag

SEQ ID NO: 534464 - DNA, 231 bp, Stenotrophomonas maltophilia
atgcaaatccctgacccgattcggccgtacgcagacctgatccgctggggcctggtggtggtgctggccgccggcctgttcgtggccgggtgccagcgaggcgaggaccgtcaggctgcgcacgatcgtgagcagatcgaggccgtgcagcgacagctggaggcgcgcgcgccgaggctgcagagaacctgcgcgcagccaacgctgccggcgaactgctgcaggaggtga

SEQ ID NO: 534465 - DNA, 276 bp, Stenotrophomonas maltophilia
gtgcgattccatcccgctgctttgatcctgctggtgctgactggctgtgccagcacgccgcagcgcccagccatcccggaaaaggtgctggtccctgtcgagaagcaggtaccggtcgacgcccgcctgaccaagccgtgcccggcaaagcgcgccacgtcccgcacggttgaggccgtggtggctgcctacaacgccaacctgatcgtgctgcaggactgcgacaaccgcatgggcgagatccgcagcctgggcgaggggaagacccagccgtga

SEQ ID NO: 534466 - DNA, 1035 bp, Stenotrophomonas maltophilia
gtgagcaaggtcaagctccaggacaacctcggccgtgtggtgaacatcaacgcagatgccaccaagggcgcgatcgtgggcgtcaatctgtacgcggcggatggcaagacactgatcgatcctgcccaactcggcggcggcagcggcaacagcagcacgccttggggcaacctgaccggcgtgccccgcaacatcgttgccttggcccagctgtcggggattgggtacccggtactggtcggcccggccgactggcgcatgcgcaccttccgctccggtggtggcattaccgtcgtcaacggcaatggccgcgatggcgatacggtggtgcggctggaggaagtcggcaacaccgaagacggccaggcgctgctgaagatcacccgcgacgtatatggccgtgtcatcgccaccgcggcagcaagcaccgacgaccttcccgagggtggcagcaacctgtacttcaccgccgcgcgtgctgatgcacgggccgatgcgcgcatcaccgcacagaagggcgccgccaacggcctagcgccgctggacgcagccagcaagatccccacgcagtacctgccggcgctggcgatcacgtccaccttcgtggtgaacagccaggccgctcagctggctctggttgcgcaggagggcgatgtcgccgtccgcacagaccagagccgcacctacatccagaatggcggcagcgccggcacgatggccgactggacgttgctccagacgccgccggacctggtgcaatccgtgaacggtcagaccggcaccgtctcgctggacgccgcagacgtggacgccacccgttcggtggtgggcctgcagggcgacgtgactgcgaccgacatcgccgacgccctcggcctgggcaccgccgccacgcaccccgccaccgacttcgtggtcatcgcttcgctggccacccttcccaacgccgttgatgacgccgcagccgcagccgctggtgtggccgtcggtgcgatgtaccgcaacggttccgtcctctgcgttcgcatctcctga

SEQ ID NO: 534467 - DNA, 2817 bp, Stenotrophomonas maltophilia
atgactacgaaatttcctgccgaaatcgaccagttcgagaatccgcggcccgacaccagccaggccacggcgcgcactcactcgcagcaacacggagacgccaacgacgcgatcgaagcggtgcagcggaaggtgggcatcaccggctcgaccgatccggaatccctagacttcagggtcagttcgcttagcggcgtagctgagtccctgggcagtgctgcgtttcaagattccacttcgtttggtacagcacagcaaggacagaaggcggatacggcagttcaaccccaggcgctgaactccgctatctccggggtaaacagccagatcgcaagtcaggcgcaggagatcgccgacgttcgcgcatcgcaaggaagcggcctgccgggctatgccgccaaggcagatattcctacgtccggcctcgggcccggcgacgcggggcgcatgttctccgtcaccaacgattccgatgcggccaacaatggcgcgtggcgctgggatggcaccacactggtgaaggccgctgaccgggttagcgcgctggaaccggttgtatcgattgcagcgcgaaccaccgtcggaaagaacttgctcaatccagcagcgtcgctggtcggttactacctggatcagtttagttcggtgccagtggcaagcgcgcagtactcggtttctgattacatcccagtcgctggaggggcgacctatagcgcgacgacctctgctggggggcttcgcttcgttaccttcttcaacgcgagcaagcaggtcgtcaccggtggaagctccagtgcgcagaatactctgcgcagcttcaccactactgctgaaacgcgattcgtccgcgtcagctatttgactgcgaacgtgtccagtcttcaggttgaggccggtcaggcaacgagctttgaagagttccaccgaaaggcctctgggcctgatggcgcaccggtgcattctgtcccgctgaacgggagtgtcacgatggacaaggtggccgacaaggccgtttcgctgcctcagacatcgttctccaaggcgacccggaacctgtacaacgcggcggatccggacgtgatggacggctactacatccagaatgtatctggagccgcagccccaaacgtgttgtattcagccagcggttggattcccgtcaaaagcggcgttacctacaccagaagctattcgcaccaaggagcgttgttcgacgcgaatcgagcgttcctctctggcctggcgaataccggcacgtccccaagccagttcacgcctgacgtagatgggttcgtcaggctgacggttcttctggctgggaaaggctcgttccagttggaagagggaaccgttgctactgactatgagccgttcggtttcatgctcgatccggctgtcgtgccctgggcgcagtccggcatcagtagcgcccaagtctgtgacggcatcgttttgccttcgcagacttactgcgtagcgggatcaactggagacatcgaacagttcaatctgtacttcgccaacgtgctgatggggtactcagcggacaagcgagtcgatgtgtccggcacctacggacgccagttcggtgattgctggaggatcgagccgggcagcggcaaggcgcactatggaatcgcgtcagggtccttcggcctgagcctcgcagtgaagggcttcgatcgtcgcacccttctgcagcggtcaaccaatgtgacggttttcccgaaaaccagcgctccggcaggccaggagcgattgctctggattggtgactctctgaccaggaatggccttttcctctcacatgctgctgcaaagtgcggcgtgaccctgcaaggcactcgtcatttcgcgacggacccaagtccgcttaatcgcgaaggacgaggcggatggacgcttctgcactacctcagttactacgctcgttccgacggcatggatagccccttcatgttccccgacggaatcgccggcgcaaactatcgtggcaacgtggtgttctggcgaaatgcggtccagcccgttaggaatgaggctgatgagtacaacttcgggggatatgaaaagctggctcgggggtggcttgactcgggtccattcatctacgacagctcgacgggctatccgctgaatccgcaggtcggctgggttgtttacgatccagcgcagtccgccggcgcgagattccggcagtggtccgggagtgcatgggttgctgcggggactcagccagcgtcgtggaccttcgattttggcaagtatcttgcgcgctttgccgaagcattccccgcaggcagtccgaaccggatcggggttctgctcggcgcgaacgactttcaggacgccgatgccgtggattcggctaccttcattggcaggttgcaaaccgtgatcaactcgatccgatcagcagttcccgcggcgaacgtgatcatcggattgccgacggtgggcggtcctcaggatgggtttggcctgctgaaaggatgcgggcagaccgcctacggctacacccggaacatgcagcagctggcgctggcgctgattgctgcattcgacacaccggcgatgcggtccgggaaaatctggatcgcgaactttactggtgtggttgatccggtgtttgggttccagacgaacgtggagcagcccaacaagtactcgaccaggtcagtgctgcgttgcccggacccaatccacccgaccccgaataatccgcctactgctggaaccgacggtgaaggggtggggcaattccagatgggagatagtctggctggaacgctgatggcgatccgcgcggcaggctga

SEQ ID NO: 534468 - DNA, 1206 bp, Stenotrophomonas maltophilia
atgcctctgaccgacgcagccatcaggcgcgccaagcccagcgacaagccgcagaaaatcaccgacggtggcggcctgtacctctacctcaccccgaccggcgcgcgcagctggcgctggaagtaccgcatcgccggcaaggagaagctgctgtcgatcggcctgtacccggatgtctccctggctcgcgcgcgcgaggcccgcgacgaagcccgccggctgctggcccgaggcgtcgacccgggcgcgcagaagaaggccgctgccctcgcccaatccgccctgggctcggacagcttcgagaccatcgccaatgagtggctggccacacgcccctgggtgcccagctatgcggagaaggtcgaagcctggatgaagaacgacgtgtacccctggatcgggtcacgctctgtcgccgacctcaccgcgcctgacttcctccgggtggcccggcgcatcgaggaccgcggcgcgatcgagtccgcgcaccgaatcatgcagaactgcggccagatcatgcggtacgccgtggccactggccgggccgagcgaaacccggttgccgacctccgcggagcattggcaccagcgccagagaatcactatgccgccgtcacagagccagccgatgtggcaccgctgctacgagccatgtatgggtacagtggaactctgatcgtgcgcatggcacttcggctcgcacccttggtgttcttgcgacccggggaactgcgtcaggccgaatgggccgagttcgatctggaaaaccggatatggacgattccggaaggtcggatgaagaggcgccgccctcacatcgtgccattgtccagccaagcagttgcgatcctggaagagatcaagcccctcactggaaggacccgctacgtctttcattccgcgcgatccaaggaccgcccgatgtcagagaacgcagttacagccgctttgcggcgcatggggtatgagcagggaacggtgactggccacgggttccgtgcgaccgcgcgcactatcctcgacgaggttttgaagttccgccccgacatcatcgaacaccagctctcccacaaagtgaaggatcccgacggccgcgcgtacaaccgcaccaaacacttagacgagcgcgccaggatgatgcaggaatgggctgactacctggaccggctgcgcgatggcaacgtggtgaagctgcgggcaggatga

SEQ ID NO: 534469 - DNA, 639 bp, Stenotrophomonas maltophilia
  misc_feature (266)..(275): n is a, c, g, or t
atgggggcttggtcgcggcatccatgccgctcacaccccgcaaacccacagtaccccgccgtcgacagtaggccggtggccagtagatccacgccatgcgtggatgaatctccattgaaatcgagtatttcgacaattgaacgaagagcatccacgcatggcgtggatctactgcagatcgcgaaaaactgtcgaaggcgaggtgggtccggtggcgggagtgtccgcggcatggatgccgcggccaagcccccagggacgggttnnnnnnnnnncggccaagcccccagggacgggtttacggcgtctcccgccaccggacccaccccgcccccctcaggaaaccagcttttgacgttgacgttgctccggcctctgcaggtgcagggcgcagccctgcagagagccccttacctgaacaggcctttttgcgtgaagtctcaaacatcgtttagacttgcggggtctgcagcggccgtccgtttccctccgggatcgccggcgaccagggtccgccctcttcgcccgcccccactccgacgccgttcgtcacgcattccagcctgcgcttcgtgccggctgcacccaattctcgcagcgcggttcacgggaacgctccgagtcagccgatcagtttga

SEQ ID NO: 534470 - DNA, 558 bp, Stenotrophomonas maltophilia
atgaacgtgtttcgctcactgggcttggtatccattggcttggtcgcatgcattctcggaccatacagtgtcgaagcttcggaagaccaaacaggcagtctcgcgcttgagcttgccagcgcgttacaggagacgcacaagagcctggcgccgatcagaacgaaggctgaactcgagcgccacctggccgcagatgaatcctcaccgctaagaaaactgtccgcggaatctcagcggaagtttgtcgactccctcgtcttcctggatggagggctggcgtcctactcgcaccttccactgagagatctctctgtcagcgacagctatagagttctggctctgttcggcgcacaaggagatctttcgctcaacaagactagagaggccgtgaactcgtcggaggagtcgatgcttctgctgagcaatgtggaagtcgcagcgttcccgccgacgcgttatccgaacgcggtatgcatggttcgagggcccaagttggcgatgtgcgagtatgactacggctccacctgtgatgggacggtgtgcaagcccaagcgctga

SEQ ID NO: 534471 - DNA, 948 bp, Stenotrophomonas maltophilia
atgaaagctgagctagggcgaagaattgcgagcgtatttttgctcggattgatgatggaaacaggagctgcccgctcggaatcggttgcgcctgcgtcgaattcaaataagtacattcaggcgcttgccattgccaaggacaaggcgttgcatcaagacgaaaaactctatcgattgaagctgttggtcgattcggtaaataagagtcatttgggtcgagcgaacagcgcggggatagaagaaatccgtgatcaattgaagatgctcgatgtcgttctctcccacgatcttgtcttcaaagggccggatttcaaagcgcatctaaaaatcgcagtgggactgctggatgatctcgagtcgaggggggctgggacaagggaggatcgcgacgtcttactgagagcccatcttgctgcatgggacattgagagtgccaataggctgatggccgtagaccccggttcgaacgcagctaactcagttgagaggcttaggtttcaaggctacgtgccaggccagcctgcctatgtgcgccttgaaggaggtgaagcgactgtcagcagcattgatttctcaacagggccgaaagtcgtggttgtagctggatgcgggatttcagatctggcggcaactgatatagataaagatgtccgtctaaaaaaggccatgtccgccgccaacgcattgtggctggcaccggcgagcatgaaccctaatctggaagcgatccgagcctggaacatcaacatgccatcgcaacagatcgctgtaagctatgacaacactcaatggcccgatctggacttttccaagatgcctgtcttctatttttatagggatggaagactcgtcggcagcatccacgggtggacagcagatagttcaatccccgcaggtttcgatgatcttctttcaaagatcggacttggccctatggatcaacagtga

SEQ ID NO: 534472 - DNA, 777 bp, Stenotrophomonas maltophilia
atgaccctgcgaacgcacggccacgaatgccaggatcttctcgacctgctcggccggaatctcgaagccctcgcccaccagcgtttcgcgcacgtaatcggcaccgcgcttgtccagcttgtccacttcgcgcagtaccgccagctggcgctcgccttcggccacgcccaggctttcgaagaagccgcgcatcagcttgcggttgttcagctggatgctgaagtcaccgatgcgcagttccgagaacaccgcgtggatgaccgccagcacttcggcgtcgtaacgcacgctcaggctgtccttgccgatcacgtcgatgtcgcactggtagaactcgcggaaacggccgcgctgggcacgctcgccacggtacacgcgctgcatctggtaacggcggaacgggaaggtcagttcgtgttcgtgctcggccacgtagcgcgccagcggcacggtcaggtcgaagcgcagcgccatttccggcagcgaacgatcacccgattcggcggcgttggccagcgcaccggtggactgcacgaaatacacctggcgctcggtctcgccaccggacttggtcagcagcacgtcggacagctcgaacaccggcgtctccaccggcaggaacccgaagcgctcgtagttgcggcggatgacatccagcatgcgctggaacgcaatctgctcgcgcggcagcagttcaagggtgccgggcggggtacggggcttgatcacgggcggaactcctgctggaacgggacgtgggagggggcgacattctag

SEQ ID NO: 534473 - DNA, 192 bp, Stenotrophomonas maltophilia
atggcttttgcttcccctccgcctgtcccggcgaacctccaggaaatgctcaaggactatccggagcacatcgaacagctacagaaggctctcatttcagtgagccataggcgacagagttacgccccccttgaggccgcagtatggaggactgtctcactagctttgtcgccgaagcgcgagctgaactag

SEQ ID NO: 534474 - DNA, 2400 bp, Stenotrophomonas maltophilia
atgacaatcagcgaaatcatgaccgaggccgacacctgtcgggaactggtcacaccaaaactcgtcgcggccggatggggcaatgcgccgcacgcgatcggcgagcagcacactttcaccaatggtcgcatcattgttaccggtggccgggtgcgccgtgccaagcagaagcgtgctgactacctgctttactaccgacgcgactatccgttggccgtcgtggaggcgaaagagctggggctgccggcggaaaccggggtgcagcaggtcaaagagtacgccgagattctcggcctgaatttcgcctatgccaccaacggccatcgcatcatcgaaatcgactacaccaccggcaccgagcgtgaggtggatcgcttcgccacgcccgccgaactctggcagcgactgaccgctgctgccgcgctgcccgatccggctacaccccacctgctcgaacccttcaacctggtctcgggcaaggtgccgcgctactaccagcagatcgcgatcaaccgggtgatcgaggccatcctgcttggccagaagcgcgtgctcgccacgctggccaccggcaccggcaagacctgcgtggcgtttcagctgtgctggaagttgtggaacagccgctggaaccgcaccggcgaataccggcgaccaaagatcctgttcctggccgatcgcaatatcctggtcgatgacccgatggccaagatgttcgcgccctttggcgatgcccgccacaagatcgccgggggcgacgtgagccagagccgggacatgtacttcggtatctatcaggcgctatccaccgccagcgaagacgtgttccgccagtaccggccggacttcttcgatctgatcgtcatcgacgaatgccaccgcggctccagccggaacgacagcaactggcgtgcggtactcgaatacttcgcgcctgccgtgcagttcggcatgacggccacgccactgcgtgaggagtcgcgcgacagctacgaatacttcggcaacccggtctacacctacagcctgcgccaaggcatcgaggatggctttctcgcgccttatcgtgtgcatcgcgtgatcaccacggtcgatgccgccggctggcgtccgtccaaggacgaactcgaccgtttcggccgcccggtgccggacgacgagtaccagacaaaggatttcgagcgcgtcatcgcgttgcgtgcgcgcaccaaggccattgcccaacaccttgccgacttcctcaagggcaccaaccgcttcgccaagaccatcgtgttctgcgtcgaccaggagcacgctgccgaaatgcgccaggagctggttaacctcaacagcgatctggtcaagcaatacccggactacgtctgccgcgtcaccgccgacgaaggtgccattggcctcacccacctcgcgaactttcaggatgtggacaagcccacgccggtgatcttgaccacctcgcaattgctgaccaccggcgtcgacgccgagatggtcaagaacgtggtactggcgcgcgtggttggctcccgctccgagttcaagcagatcatcgggcgcggcacacggctgaaggtcgactacggcaaggaatacttcaacatcatcgacttcaccggcaccgccacccggcatttcgccgatccggatttcgatggtgatcccgcgcgtatcgaggaagtgaccatcgatgatgccggcgagaccatcgagtcggttatcgaaccgccatctggcgacgaagagccgttggtcgactacaccctagacaccacagacactgacgcagaccagagcgagatcctcaccgaaccgccagaagagccgcgcaagttctacgtggacggtggcgacgtcgaggtcatcggccatctggtctacgacctcgacaccgacggcaaaaagctacaagtggtcaagtacaccgaatattcggggcgcaccgttcggacgctgtacccgacccgcgatgcgctgcaatcagcctgggccaaccccgacgcccgtactgaggttctgcgtgagctgaccgagcgcggcatcagtttcgaggagctgtcggctagtgccgatcagcccgacgcagaccccttcgatctgctgtgtcatctggcctggaacgcgccgctgctcacccgccgcgaacgcgcggaaaaggccagcaatgcagcgcaggatctgttcggccagtacggcgattcggcccgcgaaatcctcacgttgctcctcgacaagtacatcgagcgcggcatcctccagttcaacgccctgtccgagctgatgaaggtgcaacccttcgaccgcttcggcagcccttccgaaatcgccacccggcatttcggcggtatcgcacccttcaaggaagccgtctcccgcctgcagacggccctttaccaatga

SEQ ID NO: 534475 - DNA, 1800 bp, Stenotrophomonas maltophilia
atggccgcaatcgaaaagaaagccagaaccaaacgtgccaaggcaccactaaccacgcgcgacaacctgtcggcgctaatcggcagcgcccgtaagatcctacgcaaggacaagggcctgaatggcgatgtggaccgtctgccgctgcttacctgggtgatgttcctgaagttcctcgacgacctcgaagtggtgaacgaggaagaggccgagctcgacggcaagccctaccaccccatcatcgaatccccctaccgctggcgcgactgggctgcgcgcgaggatggtctcactggcgacgaactgctggccttcatcaaccaggacgaatgtcaccgcgccgacggctcacgcggcgcgggcctgttcgcctacctacgcggcctggctggcagcggcgagaaaggcagccagcgcgaggtcatcgccaacgtgtttcgtggcgtgcagaaccgcatggtcagtggctacctgctgcgcgacatcatcaacaagatcaacggcattcaattcagtagtagcgaggagatccacaccctctcgcatctctacgaatccatgctgcgtgagatgcgcgacgccgctggcgactctggcgagttctacaccccgcgcccggtggtgcgcttcatggtgcaggtcaccgacccgcgcctaggcgagaccatgctcgacccggcctgcggcaccggcggctttctggtggaggcctacgaccacatcgctcagcaggtgaccaacccggaccagcgccgcaccctgcaacgggacaccctgttcggccaggaggccaagccgctgccctacatgctggcgcagatgaacctgctgctgcacgggctggaagcgcctcagatcgcctacggcaacactctggagcggcgcatcaccgagatcggccacagcgagcgggtggacgtgatcctcaccaacccgcccttcggtggcgaggaagaagccggcatcaaagccaacttcccggccaacatgcagacggccgaaaccgcactactattcctgcagtacatcatgcgcaagctgcgctatgccgggcatggcgccgagcagggaggccgcgccgctgtggtggtgcccaacggcaccctgtttggcgatggcgtgtgcgccgtcatcaaggaggagatgctcaaggaattcaatctccacaccatcgtgcgtctgccgcaaggcgtgttcgcgccctacaccgacatacccgccaacctgctgttcttccagcgcggcgggccgactgacgagatttggtactacgaactgcccctgcccgagggccgaaagaagtacagcaagaccgcaccactgccgttcgaggcctttcagccagtgctcgactggtggagcgcccgcgaggaaggaccgcaggcctggcgggtggacttcgccgccaagcgcaccgccgccatcgacgctgccacaccgcactggcaacgggccgaaaccgagcgcgccagtgcgctcgccctgggcaagccgatccgcgaactggatcagaccatcagcaatgccgccaatggcgacaaggccgggctgcaagtgcagctgcgcgagttgaaggcgcagcagcaggcccatgaggccgctgccaaggcggcacaggccgagggcgacgcgctctactggccgatctacaacctggacctgaagaacccgcacgccgccgaagggctggagcacgccgacccgaaggatctggtcgccgccatgcgggcgggcgaggaaaatgtgctgcgacttctcggcgagatcgaagcgctggtggccgaggtgggcggcgaatga

SEQ ID NO: 534476 - DNA, 1155 bp, Stenotrophomonas maltophilia
atgaaggcgtggccaaaactccgtcttgcagatatcgcgccgattgtccgtagaccggcagagattcgccacgaacaggcgtatccggaacttggaatccgatctttcggtcgcgggacgttccacaagcctgcactttctggtgccgatgtcggcacgaagcggctgtttcgaatcgagcccggtgatctggttttctcgaacgtattcgcctgggagggcgcaatcgctgtagcgtcgcctgcggatgctggacgctttggatcccatcgcttcatcacctgcatcgttgacccagataaagccaacgccgtctacctcaagctgtatctaaccgtatcgccagaaggacgcgcacaggtactgcaagcatcgcctggcggtgccgggcgaaaccggaccttgggcgttgaaaaaatgggtcagattcaagttcctctgccgccactggccgaacagaaagccgtcatcagccgcctcgacacgctggccgacaaggtgcggcagctaaacgagcacctcgacgccatcgagcgcgacgccgaccggctactcgccgtgcgctttcgtgacgcgattgccgatgcgcccgtgtcgccgatggccgaggtagcgccactggtgcgtcgggaaatcgccatcgagcttgaaggcagctatccggagttgggcatccgctcttttggcaaaggcacgttccacaagccgccactctccggcgccgacgtgggtaccaaacgactgttcagcatcgaacccggtgacttgctcttctccaacgtgttcgcttgggaaggtgccatcgccgttgctcagccggaggatgcgggccgcttcggctctcatcgcttcatcacctgtcgcgttgatcccgaagtcacttcgccagagttcctgcgctactacttcctcaccgatgccggtctggaaaagattggcgaggcatcgcctggcggagcgggcagaaaccggacactgggtctcgaaaagctgatggcgattcaggttccgatcccatccctctccacgcagcgaactttcgtagccttacaagccaaagtggtagaactgaaagcccggcacgccaccattcgccaagccaacgatgcgctgattccggcgatgctggaacgcgtgttttccggaagccactga

SEQ ID NO: 534477 - DNA, 3762 bp, Stenotrophomonas maltophilia
atgcagttcgtccgccacggccccgatatccccgaacgcctgctgcaggcacacgaggacggacgcgtggtgttcttctgcggcgcgggcatttcctacccggcgcgcctgccgggcttcgccgggctggtggcgaaggtgtatgaagcgctggccgccacacccaacgcagtgcagcaggcggcgatcaaggccgggcagttcgataccgccatcgggctgctggaggcggacatcgtcggtggccgcgagacggtgcgccgggcgctggccggcatcctgacacccgatctcagcgccccgaacgcgaccgtaacccacgaagccttgctgacgcttggcaagtgccgcaatggccatacacgcctcatcaccaccaacttcgatcgcctgttcgaggaggtgattgcggcgaagtccctgcccgtcgagctgtttcaggcgccactgctgccggtgccgaagaaccgctgggatggcctggtgtatctgcatggcctgctcagcgccacaccgaccgcgagcgaactggatcgactggtcgtctccagcggcgatttcggcctggcctatctcaccgagcgctgggcggcgcgtttcgtcagcgagttgttccgcaactacaccgtgtgcttcgtcggctacagcatcaacgacccggtgctgcgctacatgatggatgcgctggctgccgaccgtctgctgggcgagtcgccgccggagatgttcgcgttcggcagtttctccaaaggcaaagaggaggaacgggccaacgaatggcgggccaagaacgtcacacccatcctctaccgcgagcacaatcggcacgcctatctgcacaagacactgcgtgcctgggccgaaacctatcgcgacggggtgcgcggcaaggagcgcatcgtggtcgagtgcgccatggcccgccccttggcaagcacccggcaggacgacttcgtcggccgtctgttgtgggcgcttagcgatccgggcggcgtgcccgccaggcgctttgccgatctggacccggtgccgtcactggattggctggagccgctgagcgaggaacgctaccggcatggcgacctggggcgctttggcgtgccgcccagaacgaccgtagatgacaagctcaccttcagcctgacccgccgaccttcgccgtatccgctcgcaccgtcgatgtgtatcgtcgatgccggtgcgcgcggcagccactgggacgaagtgatgcggcaactggcgcgctggctgatccgtcatctggacgacccgggtctgttgctgtggctggtcaagcgcggcgggcagctgcaagacgatctggtctggtggatcgaacatcgtctggacgaactggccaaactggaacgcgacggcaataccgccgagttgacgcgcattcgtgagggggcacccaacgcgattcccagcccccagatgcgcaccctgtggcggctgctgttgaccgggcgcgtgaaatcgtggctgcgcgacttcgacctgtaccgctggcgcgaccgcttcaagcgcgatggactcaccgctaccctgcgtctggaattgcgcgagatgctgacgccgcgcgtatcgttgcgcgagccgctccgctgggccgccgaggacggcggagcccgcgagccggcgcgcatcaaggacctcgtggaatgggagatcgtgctgtcgacggatcacgtccattccagtgtgcgcgatctgcccagcgacgagcgctggaacggcgcattgccggagctcctgtccgatgtcagtgccctgttgcgcgacgcgcttgatctgatgcgcgagcttggcagtgccgaggacaggagcgacctgtcctacatgcatcaaccctcgatcagtgaacaccctcagaaccagggcttccaggactggaccgcattgatcgacctgacccgggatgcgtggctcgctactgctgcgcattcgccagcgcgggcggcgctcacggcgctggcctggtggcacacgccctatccgctgttccgacgcctcgccttctttgctgccgcacaggacaacgtgatccctcatcgccaagcactcgactggctgctggcggacgatcactggtggctgtggtcggtcgaaaccgaacgcgaagccatgcgcctgctggtagcgatggcgccacacctcgatgagctgatgctgcgggaactggaacaggctgtgctcgccggtcctccgcgcgacatgttcaaggacgacctcgagccggagcgctggacccgtatcaccgaccgtgaaatctggctgcggctggcaaagatcgccgaggcaggcgcagtcttgggtgcggacagcaacgcgcggctacaggggctttcggcacagtatccggagtgggccctggccgcggatcagcgcgacgagtttccttactggatgggcgatggcgacgagtggcgtaagttcgtcgttacaccgcgtcgtcgccgtgaattgatcgaatggctcaggcagcaacccggcacagatcattggcaggaggatgactggcgacagcgctgccgcgacaatttttcgacaaccgcttgtgccttgtacgccttggccagtgaaggcgtttggccgacagagcgctggcgcgaggccttgcaggcctggtctgatgagaagctactgcggcgctcctggcgttatatggcccctatcctggccaccgcacctgacgaggtgctgcagccgctcgttcgcagtgtcagctggtggctacaggccattgccaagactttcgaagaccacgaagcactcttcttcgtgctcgctcgccgtgtcctggcacaggaccatcaggacggcgtcgataccgatgaccccgtccagcgagccatcaatcatcccgtgggtctcgtcaccgaggcgctgcttcgctggtggtatcgacgctcgctggaggatgggcaaggcctgccggaagagatcaagcccacgttgactgagctttgcgatacccagatcgacaactatcggcatggccgtgtgttgttggcggcccatgtcatcgccttgttccgcgtcgacggggattgggcgaggcaacatctgttgccgcttttcgactggcagcgctcggaagccgaagcacgggcagcgtgggaaggatttctgtggtcaccacgcctgtaccgtcctctgatggaaattctcaaaccagccttcctcgataccgcgcggcactatgcggcgttgggcaagcacgacgggcagtacgcatctctgctgacattcgccgccctcgatccgggtgaaaccttcacgaccgccgagctggcggccgccactcgcgcactgccaccggatggtttgcacgatgctgcacaggcattggtgagagcgctcgagggtgcgggtgagcaacgggccgactattggacgaaccgggttgccccgtacctgcatgccatctggcccaagacgcgagacaacgtgtcacccgccatcgccgaaagtctcggccgcctttgcatagcggcacaggatgcgttcccggaggcattggcgctgctacgcgcctggctgcaaccgccggcccacccggattacctagtgcatcgtctacacgaatcacgtctttgcggcaggttccccgaacaggcactggacttcctgagtctcgtgatagggcatcaaacccaatggccgcccggtgaccttggcaactgcctcgaagagatacgcttgagtgcgcctgacctcgataacgacccacgttttcaacagcttgtcatggactga

SEQ ID NO: 534478 - DNA, 1947 bp, Stenotrophomonas maltophilia
atggggatgtctaccttgcgcaaacttgcgccttggtgctttgcgctggcattgatcatctatctgcgaccctatacggggatcagacatgacgccacgctgtacttagctcaagcgttgcggattatcagtcctgatatctatgatggcgatttgttctttgcggcaggtagccaggcagatttcaccctattcccgcagctgctcgcgtacctgctacgtcacgttgagccaggatccgcttttctggcattaacctttgcgcttcgtgtcatcttctatgcggcaagcgcatacgtcgtccgggcgctgttccctcaaggatggcgttggccagcgatcttcgcactgatcgttatgcctagtctgtacggcgcattcagcatgttttcctatgctgagcccttcttgaccgcgcgcccattggctgaggctctctctctccttgcaatcggtcttctgctgcgccatcgccttttgtggtcattcgtgtgcctcgtcatcgcgggattgatgcatcccttgcagggggcggcagctggtcttgtaatctggtgctggctgctcattcaagatcgcagatggctgtgggcagtttctgcgattgtgcctgttgctctcttggggctcttgcatgtggggccgtttggaggtctcttccagtccatcgactatgaatggtatgagcaaatctctgcgttgagtgcccagattttcgttggatcttgggagccgcgggattggtgcattgtcctatcggacttctatctcatctatcttctgtttcagcgtacagaaagagatgttgctttatcaaaaatggcagcggcaaccattcttgcggttgcaatcggcttcgcattcagcgcagtttttgcagatgtactgaggctggtgctgccagctgggttgcagatctggcgtgttctttggttggcgcattggttggcgatggcgagtattccatttttgatcaatgatcaatggatcagaagcaatcgagacgtggtggcgacctcgctgttgatcacaattgctgtaacgggcgccagcgttcctaggattaccttgccgtgggcggtgcttggtttaattcccttgcacatgttgtggccctacgcggcaacgagggttagccgcactggaaggacgctaattttatcgggacttctcctgattctcgtggctgcgcttttctggtaccagatacgtgcctggacggtatttgaggcgctcgggagtgatctggaaagagtgcggcaagatgtcgttgttgtcggctacccgttgatcgcggcgggagtagtagcggctaccgtctggctctatcggcgatcgggatcgcgtttgggggctctacttggcgttggaagtatctttctcctgatagcagcaatattcgtttgggatgcgagaagcccttggagcaagacgctggaaacggcaaaaggaacggacatctttggtgtagagattccgcgccattccagtgtctactggtacgcgagtgagccgtcgccgctggggccatggttggtgctggggcgggccaattatttcagtatttttcagctgtccggtcagatgttcaatcgggggacgccaatggagggggccaggcgcaaggatcaggtcgatccagtaaacagccagggagagatctgtgacaccatgaatgcggtcaataaggatgaggactcatgctggatcggtactgaagggattcagcatctctgcacggcgcgcggcagcacgccggcgccggattacttcgttcttccattcaggcaaaggcagcacgtgcgcggcgtttgggatgttaagcaccctatgcgcgacgagactcttgggcgactttatctttacaaatgcagtgattgggtcgctttcgacgatgctacgcatcaagaactcgaaagaagtgttgatgcgaggtttggggaatga

SEQ ID NO: 534479 - DNA, 330 bp, Stenotrophomonas maltophilia
gtgtacaacggcagtgaatttaccggcaaggtgatggaccgctggacttatgagaacggcgtggagctggatttctcccggcgtggtacaccgacggacaatgcgatggtggggagctccaacggcaaactgcggcaggagtgcctgaacggccattggttcttgtcgctggccgatgcaaggagcaaaatcgaggcgtgggggcgcttccatatcgaggagcgcccccacagtgcattggcaaggaatgcccgtgcggaactcgcccgagaacacaggcctcaagcaaattctctggcgcaaaaagtgggcgaaacctttaccggctga

SEQ ID NO: 534480 - DNA, 651 bp, Stenotrophomonas maltophilia
atgcggctcacgcccctgcgcagcctacccacccggcctctgccagtttccgttggcgatcagccacgtagaagaaagaagaagagcaaaagtaaaagcgcttggccggccgctctttgtagagccgagcccacgctcggctgcatttcgatcagatttcgaatattcgattccgatgcagattcatccacgcatggcgtggatctaccgtgtcgaccaaggtcgacacctacccacagctgcgaaaatctgtcgaaggcggggcactgtgggtttgcggggtgtgagccgcatggatgcggcgaccaagcccccatggatgggtttacggcgtccccgcaaacccacagtgccccgccatcccaccggaagaccgctgttgctgttgctgttgctttggctttggctgttgcctctgcgggtgccgggtgcaacccggccgaaccgctccctcagggccaggcaggcggcgcggcaacccacgcctgctgcacttcggccagcgatgcgcgctcgtcctcccgccactgcggcagcaattgcgcatggtgggcactggtactccactgcgtcggctcggtacgcacagcagcggcataccactgcaccgcttcctgtttctgccccatccgccacagcgccagcgcatag

SEQ ID NO: 534481 - DNA, 714 bp, Stenotrophomonas maltophilia
atgaccgtcaagactgacagccgcctgaaagttctcgcgcgattcgagaaggacactgccaagcaccagatggaggtgctgctggacaacgggctgcaccggcacctgaagttcagcaattccgggagcagtgtgtatcgcttcgacatcgtcacctggccgggatacctgagcatcagcggcgacatgggcacgtcagtgttcaggcgcatgcccgacatgctggagttcttccgcaatgaccagcgcaaagaggatgcttcggacgttctccgcatcaatcccggctactgggcagagaagtgcgtggccaacgatggcgaggggaagaagttcgatgaaaacctgttcgagcaggtcgtacgggagcacttcgaccactacatggtcgagcaggacgacgaggcggtgggcttcgctgcggcgcgtgacgcgctctgggatcacctgaaagctgaggtggtggtcggagccgatgacacgcgcagtgctctggagcgctggggtgatttcagcgtcggcgaggacaacaccacctactgcaccgacatggtgcaacccgataggtacgcgggttggttcaaggacttcaaggtacgggacgccttggaatggtcaacgtccgtcgaggactacaccttccacttctactggcgcctctacgcgatcgcctacgccgtccgggcgtacgacagccggagcgtgacggcatga

SEQ ID NO: 534482 - DNA, 291 bp, Stenotrophomonas maltophilia
atggacgccacacaggttagcgcgcgggacacggtgctcagcccagaacaggtcgcgcgctacgctgcggtctcgtcgctggcttcgcgtgttgaatgttgcagcgatgcacgcattgatcgcttggttggggtcattgagcagcagggcaagcagatcgccgaactggccatgcacgtggggctgctggtgcaagcggtggcgcagctgctgggtgaggaagctggcgcgccggcgcaagtcgaaggtgccgagcctgagcgagtcgacctggacgggaagccctactga

SEQ ID NO: 534483 - DNA, 1305 bp, Stenotrophomonas maltophilia
atggctcgattttccgttgttgagtatgggtctccggccaatcttcttccttccattgctggagcgatggggagaggagctcaagaggcggcgcgcttgctttcggatgctggcggacgtatcgcccgtcaagtcgggctgaagaagtcgccgattgaggtcagtggctcgcatgtttcatcttccaaagtggctggcttggttcacttgggtcgttcatgtgagctggaaatcgcgccaaagttcttagggcggcatgctgacagcgccggctggcgggaagattttttctttctagccatgctttcaaagcacgggcacgtcctcagctctgatcgcattagggcggacactgctgtagatagcgatctcgactcgctactggctcgagccatcactgacatgtattgggagcaccaccaccgccccgttcggtcatacaaaaagaccctcgaacacgatttctttcttgacggggatgtcgacccgttcgacttgcgcgttcctggaccatcgggatacccacaggaggtaatccgctacagcaggtccaatcgtcacaatgcgatcatctcggcggccgctggcgttgcacgccggcatgtgcgacatccagccatgaacgcagatttgtcacgggtgaaggcccatttgggccatcagcctcgtctacctcgtgggcatttgcttcagcaaatggttccgggtaggtcacggcgatggcaggcgctgatggatctttcggtggacgtagtaaacggttttggcatgggattcaatgagggggaggctagggctcctggatttgtcatggcgacatggcaactatggcaggacctcatcatggtcggtcttcgtttaggcttcggggatggtcacgttgttgcagagcagccgttgagtctaggtaagaggtgctatccggatgggaagatgggaaggctaaatgtgagacctgacacgtcggttgctctaaatgggcgcgagttccacgtcgacgcgaaatacaaggggcgcctggaaagtggtcgtttgtatgcgtctgagtcagacatttacgaggccatggccttttccatggctagtaagggacttcctgtgatactggcctaccctaggcttgcttcagcgccgctgactccggtgggaacggtagaggtgctggaacaggttagtgtaaagggttgcgggccgatcgtcgctgtctccatcgaggtgcgaggcatatcccgccgtggggcgctcaagtgcttcgctcaacaaatgagacttgggatcgcggatttgtccgagatattgcattaa

SEQ ID NO: 534484 - DNA, 588 bp, Stenotrophomonas maltophilia
atggctgcagtagcagggggaagtatcttcgggaatgcgcagcgaatccttttcaaggctcttcctcccggggattggaagaagtttggcggggtctctaacaatgaccccaaggctgggggaggcgcgcgcgatcttagatacaacggattcgaagattttgagcgtgtcgctaaagctctgttccccacaaagatgattcgaagaaccagggatggtacacctaagctgatcagcgcctatcaaggatctcttaagcacaccttcggcccatcactttcggatgacgcgttcttcgagaatcccacggacgtaagagacgctgagtggcggttcaccaaggtcagctcgaaatcgccgattgcgcttgcaacgccgcaggccggtgaggatgatcttgatattctggtgttggttcaggagagtccgggcgaagtggtgcctgtgttcactacgctcaatacgatgccgccaggtcagatttctgcgttcatccaccaggtatgtcaggccccccgaaagtcgagatctgatgctacacctgcgggtttcctggacatcatgagcaagtggagtgaccacaactaa

SEQ ID NO: 534485 - DNA, 801 bp, Stenotrophomonas maltophilia
atgaagtctaggtgctgggcgcattctcttggtgactgcgactcgatgtctggggagcacgtcattagcaatgctgtttttagcgcgggttgtgactgccctgtactagtcgagggggtgcgacgcataagggatgggtcgccgacccacaacgcagagaagtccaacatcctatgtcgtcggcacaactccatgttgagtccgcttgacgcgtctatagggagggtagccaggttccaagcggcgagcgaagatccagccttcacggagcggctttatctcgatggccatctgctggagcggtggctaatcaagacgctcgtgaatttcgccgctgccggctggttgggagaggaaaagctcaagccatccccagaggttgtcgctgctatctttggccagtctccgttcccttccggcatcggtctctacaccgtcgatggcattgatcctgctcaccgtccatccggaggtgttagcgtaatgccactgtatcgattactgcccaagggccggtctctggcgggcgcatacgtcgccgttcatggtatggccctgcttgcatccttggacgaccgccttgcttcggagattgactccgggttggtgccggctgcatatggacgctttacgcccggtggctctcggcacctctatcgcccgggggccattgtcatcgagcgcaaggagggtccagcccttgtggtcgccatggcgtggcaaggttctttcacgtttgcggatggaaccagcgtgaccctggctgatatggagagggcggtgcgggaacgtgcgcagtaa

SEQ ID NO: 534486 - DNA, 186 bp, Stenotrophomonas maltophilia
atgggtttcaaagcacgcaaagctgtcaaaccttcccgcgttctccgtgaacgggtagtcgagctgcagacggcgagctataaagcgaccgtcgacaagcttttggtcgctaaaaaggccggtcaaaagcccgtcttcattggtgagcgtcagaagtttaagttgcgctttctcgaccccgtttga

SEQ ID NO: 534487 - DNA, 1542 bp, Stenotrophomonas maltophilia
atggccatcttccacaccgcgatcaagacttttagccgcagccgggggcagtccgctgtcgccgcagccgcctaccgtggcggcctgctgctcgccgacgtgctcactgggcagcagcacgactaccgccgccgcagcggtgtcgtcgaaagcttctgccttgcgccgccggacgctcccgagtgggccttggatccccgcgagctctgggcggtcgcggaggctgcggagcgacggaaagactcgaccgtggcgagggagttcgaagtctccttgccccatgagctgtccgaagaagagcgcgcccatctggcattcgtgctcgccgatgcgctggtcgcccgttatgggttcgctgtccaagccagcatccactccccagggaccccggatggcctcaaccaccatgtccacatcctggcgaccacgcgtcgcgttgggcctgagggcttcggcgacaaaacccgcgagttggatgtcgggccttctggaaaagtagaggttcagtggattcgggagatggtcgctacgacgacgaacgcccacttggaggcggccggctttaccggcacgatcgaccaccgcagtctggccgaacaggccagatcggcaatggagcgaggcgacgacttggcggcagcggcgctctcccgtgaaccgacccagcacctaggcaagcatgcttcggccctagcggggaagggtgtggcgaccgacaaggcgagcacgaacgagcagattgcggaagacaatcaggagcactatgactatttggtgctcaaggccgggttggaaggtaagcccgtgcctgtcccagaccaagaacccacaaagcgccgtgggcgggtgctcaacagcgatacgcccgggctgccgtcggggctggagatgcgaggtgtctccggtgttcggctgcaacacgtgctcctctcgtctcacgggcttcccgagccgcaggcacccgtcagccttgccgagaggattgtggacgcgctgcgcgacgtggaggagatttctagggcgagggcagacttggccatggaaaagattcgctcttccttggaatgggtgcggcagcagctggccctccaaggtgaaaccaccgagctccgtcagtggatcaccacggcggtgctccaagttcgtgctctgaagtgtctgattgtggggaaggcccgcaggctgctgaatctaaagagtgcggctaggctgcatcacatggccgagcaagagtgggaaagattcaactccgattacccgcttggatcctccggttactcgcggccggagtggacccagcggcgagggcggcggctctcggtgctggagaagcgtgcggccgagttgaagtcggctcaggagcgggcgtcagagagtgagctgagcgccatcgatgctgaaatcctaacgaaggccgatctcctcgccgacttgccccacccctctgaggctgttgctccacagcctgctgatcacaagccggtggctccgcccacgttgcttcccgttccgcccgtcccccgggggcctaagttccactga

SEQ ID NO: 534488 - DNA, 1389 bp, Stenotrophomonas maltophilia; identical to SEQ ID NO: 500533

SEQ ID NO: 534489 - DNA, 195 bp, Stenotrophomonas maltophilia
atgctcggctccacagcagatccacgccacgcgtggataacttctcagaaatccatggttgccgagaacaaagccgttctcggtgcccccagcgccaggctggaaagcaacggcatgccccaatacgccttgttggtcacgttgttcaccgtggcgcgcagcgccagcggcctgccggccagtgtggtgctgtag

SEQ ID NO: 534490 - DNA, 765 bp, Stenotrophomonas maltophilia
atggcgggggggtgggggccagcaggacacgccgtaaaccccgctccgcggtccggcccagccgctggcggctgggcgttcgggcgcttgcgaagcagtgcttcgcaagcaaagcgccctcacccatgggggctcgatggcgccttgctcgtgtgcgctgtcctgcgcacacggcaagaccggggttgggcgtcctgcccaacccgcccgaggcatgcctcgggcccatggcgccaacggttttggagagggccatccgccccctgtcgacagtttccgtgcggcgcggacgggaagggcggaatcaaaggcgagagcaacaagcaaaaaaggcagccaatggctgccttttttgcttgttggggtcagatccccttgcgcagcaaaggctctgaccccggctcttgccttgcctttgctcacccttccgccgagcggaatgccgggtggcgcgggtgggtgaggctgaccgggactgtcagcggcatggatgccgctgccaagccctcagggacgggtctacggcgtgtcccgggcagcctcacccacccgggccccacagccaaccaacaatcagccggcaacgctttgaaccttacagcgcctcgaaaatacccgccgcgcccatgccggtgccgatgcacatcgtcaccatgccgtacttctgctggcgacgacgcaggccgtgcagcagggtcgcggtacggatcgcgccggtcgcgcccagcggatggcccaaggcgatcgcgccgcccagcgggttga

SEQ ID NO: 534491 - DNA, 468 bp, Stenotrophomonas maltophilia
atggccggcgcccagagcggcgccggcgccgaggccgacaccccccatgccagcgcccattccgctaccgccacctcctccacccgcacgaccgcccttggcatcgccctcgttgcggcccttgccgccgccactggcggcacccggccgggtcggcccctgcggcggtatctgcaggtcggccggaatcggcgccagatccagcgcttcgcgcacgaagtcgcgcagcgagaccaccagttcgtgggtatgtaccggccgcccctgtgccagttcattggcggcacgcgcggccagccgcacctgttcgtcggtgcccagcaacaggatgtccgagagcgcggcctcgaccgcatcgcggatacggcgcgttcgatccgaacgcggttcggcgatgccttcggccgcttcgcgctggcgcagatcgcggcgatggctgggatccacgcccagttcaccagtgaatga

SEQ ID NO: 534492 - DNA, 462 bp, Stenotrophomonas maltophilia
atgacgacgctcgatgtccctcgctacctgcagcgcctgcagctggatgcgccgccaccgcggaccctggccggcctgaccctgctgcagcagcgccacaacgcactgctgccgttcgagaccctcagctgcctgctgcgcgatgaggtaccgatcgacctggacagcgtgcagcgcaagctgctggacgagcgccgtggcggctactgcttcgaactcaatggcggcctgctggcgctgctgcaggcgctgggcttcgatgcgcagccattgagcgcgcgcgtgctgctggctgcccatgacggcgaactgaccgcacggacccacctgctgctgcgcgtgcaggtggacggcgatgactggctggtggatgccggtttcggcagcctgaccccgaccgtgccgctgcggctgaatgatccgcggcgagggggatttcgtgctgtacgccgaatccggtga

SEQ ID NO: 534493 - DNA, 324 bp, Stenotrophomonas maltophilia
ttgatcggcatggtttgggactggatttctaaggggacggtaaatcttcttggcaccgcgaaagagcagcttgcaggcatgttcggcaagatgcttgcgacatttggcttgaccacagtcacctttaaccaggtgctgcccaatctcaaagcgtatgtgatgcagtggatcggcggattgaatggccccgcgcttgaattgctcggttacttgggcgtgggcacggccatgtcgatgattctttcggccttgactgttcggttgacgtggaaggtgttcatcgtgccgaagacggtggccgatcagctgggggccgggtcatga

SEQ ID NO: 534494 - DNA, 429 bp, Stenotrophomonas maltophilia
gtgttgactgagagcttgcagatgcggagcgcgccactgtatgacgcagtcgtggtgactggcgagattccggggaagggagtcacttgcaaggtgcgtaaagctggtgaggcggggcagctctacgcccagcaagtgagcagcccactgatcagcgtcgctgcggcaggtgctgagcgaggacgcaacgttctgagcgatcgcggtgagcaggcagccgtggacctgacggttcccctcttcccgaagccgctgaaggcaggggaagtgggtgccatcatgcctttggatttggtggaggtcgttgccgctgagggcacctggcacgggcaatgcgagtccctgcgcatcgaggttgtgatcgatcagcaggccgttgtgattgaacagaccgctaccctggaaaggcactacaccgatgcggactga

SEQ ID NO: 534495 - DNA, 234 bp, Stenotrophomonas maltophilia
atgcggactgacctctgggaccaattcggcgagctggtgaccagcagcccccgattgctggcgaccgtcactgcgcacaacggtgacggaaccagcacgcttaccacttatgacggagtgcagatgcgggcttttggtcagctccagttgtccatcccttacaacgtgtgggttcgggctgggcgcttggtggaagctgcgcccaacctgccgcttatcgaagtgaccgtctag

SEQ ID NO: 534496 - DNA, 816 bp, Stenotrophomonas maltophilia
atggacaaatctcataagtggttccacctagtcgtcaacgcacttctcttcctggcaggcgtcgctgcgctcagcgctggtggctatatgacctatcagcttcaggcggcgactgcggctacgttctatggcaccggtctgattttgctgttcgcgtcaacgattgataggttcgagtccctcaagggtttcggcatggaagccaaacagagagcgctaaatagaaccctctccgaagttcaagaggtactcgaagaggtccaacgactgagcgtcttcaccacgcagagtcttgccacgctctacggcaagactggacggttcaacggcgccccgagcgccgaagagatgtacgcaatcgttacggcctgcaagagcagtatgaagcgggcgcaggccaccgacgcggcgatcaaagctgcgctacatccatgcgtcaaggcaatgttgatcgacctgaactacgctgttatccatcctgcgctatcggcactcaggatcagagagcaggagctaagcgcggaactccatgccacacctgtttccgatctggaaactcgccaggaaaagctcaaggcctggcaggaaatggggcagactgctagcgcggttattgattttagtgattttgaagagggctcatacccttggaaaatgatcgacacccttcgctcaacgcccgccaactcgattccagaggcggtgacggcagcgcagctattggtcaccttttccgccgatattcagaacctccagagaaggggcatgatcgatgatccctctgcatggttcactatcacgcaaaagacaacctaa

SEQ ID NO: 534497 - DNA, 480 bp, Stenotrophomonas maltophilia
atgaagggagttagaaaggccgtgctgaccggggcgtttgccctgactgcggcggctggagcgcaggcgcaaccgggggccggatcggatctgcttcgccagatcggccgagccatccaaggctcgcccaaggtggtcggcgataggacgcggagcccttacctcgagccggccgggacttactgggatctggaccaggatggcttggaagggattcagcacctgcgggccggggtgacggctgtcgggggtgggggcgtggacacctgcgacatgcagttgctcgtgttcaggggtgagatatatcaggggtgttggcgagatatatgccggacaaccccggacaacgcgggattaccgctcaccttcattcaacactcattgcgcgtggcgcaatcactcgccggcctgttccaggttagcgagttgcgtgaggatctgatgctctcgaactctaagctgccccaattcgatcagtag

SEQ ID NO: 534498 - DNA, 273 bp, Stenotrophomonas maltophilia
  misc_feature (192)..(199): n is a, c, g, or t
atgaacactgacaaaaccctggcggaagtgcagcccggtgagagggtgaggctggcaactgtgccgtacgaccgcgcacgcgacctgataggtgacgcatacaacgccggaactcacggcatcggctacggccagcaggccatggagcctgtctcttatacacatctgacgctgccgacgatactccttgtnnnnnnnncagccctcccagcccagcggcctcgacctggaagcaatgatcgctacatgcgttcctgggggaagcatcgttga

SEQ ID NO: 534499 - DNA, 951 bp, Stenotrophomonas maltophilia
atgagggccttcagttacgaacgcgcgagatccccggccgaggccgccaaggccgtcgccggtatcgagggcgcgaagttcctggccggagggaccaacctgctcgacctgatgaagctggaggtcgagacgccagcgcacctggtcgatgtgcaggacatcggcctggacaggatcgaacccaccgacgagggtggcctgcgcatcggcacgctggtcaccaataccgcgctggcctcgcatgagcgcgtgcgccgcgactacgcggtgctgacccgcgcgatcgtggcaggcgcctccgggcagctgcgcaacaaagccactaccggcggcaacctgctgcagcgcacgcgctgtccgtatttctacgatccccatctgccctgcaacaagcgcctgcccgggtcgggctgcggcgcactcgaggggttctcccggcagatgggcgtgatcggcacatcggacagctgcatcgcgacctatccgggcgacatggcggtggccctgcgggtgctggacgcctcgatccagaccgtcagcggtgacggcagtacgcgcagcatcccgattgccgatttccatcgttcccccggcgacaggccgcagcaggacaacgtgctgcagcgcggtgagctgatcacccacgtcacgctgccgaagcccctgggcggtcggcacgtgtaccacaaggtacgtgaccgcgcgtcctatgcgttcgcactggtgtcggtcgccgcggtcgtgcaacgagacggctcggcgcggttcgccttcggtggggttgcgccgaagccgtggcgcgtcgaggcagccgaaccactgctgcgcgacggcgtaaaggccgcggcccggcaggtgttcgccggtgcccgtccgacgcgggagaatgcgttcaagatcgctctcgccgagcgcaccctcgcagccgtgctggcggaaggagagcgctga

SEQ ID NO: 534500 - DNA, 1035 bp, Stenotrophomonas maltophilia
gtgacgttggtaccaatcgtctaccgcagcactgatccgggagcgcctatccttaacggccaggccggctcattgcttgccgtgctcaacgcgatcctggtgacagggtatggggatggagcatccgcgaagcctggcgcaggctggactcgcccctacgccagttcttctgtgcaggtgttccgaaacagtgctacgacgggctctggcacctatttgcgagtgcgcgacgatgcatcggctgcaacgttgaacacgggttgtctggctcaattgtttgcctacagttcgatgtccgacattgacaccggcgcggatcaaacccccagcgctgcgctacaggcccgtggctcattcattgcgaaggcgccgacaacaaccgccgacgctcggagctggattgccatagcgacggagattggtttctacctttttacggcgtggagcaactttggcaacggccttggcccctattactacggcgacattgacacgacagtatcgggcgatgttttccccttcgtgatgttcggttcgaacgatctgacgttctacaccccggcttggaacgccgacgtctgctcgttgttctttgcatcgcctttaggagtcgcggtcgaaggagtgtccagtcgcgacaattcgtacgttcccggtggatttgtggtgcgcagctacagcggcgggcagaatgctccaggtcgggtcgccactactgggatcgatccgcctgcaggtgggcagaacaggcgttcatatggctccggggtataccctgtgggcccagaccgtgcccacgggggatacaactacatgcgcgcagcagtgcgtgaagcgccgttcgccttgcgtggtcacttgccgggaattctggtgccgctgcatgcccggccgcacgcagagggcagcgtagtgcccttcatcgaaggaatcgggctcggccagtggctggctgtgaactacaacgttgtagagcccgatgtcgccgatcgcaacggccaagtgctgttccgcctggatgcgccctggcgatga

SEQ ID NO: 534501 - DNA, 426 bp, Stenotrophomonas maltophilia
atgaagcccatcaccctcaagaagatcggcgccggccgcaaccagctgccggacgactccaccgaccatgtcgccgtgttcctgcccgactacggtctgaccttcaccgccaccaacatcgtggacagcgacgttccgcacgccgaatgcgaggcctccgccaaagccctggacctgctcggccacaccgactgggatctgccgaccatcgaggagtaccagctcctgatcgaccgcagccgctactcgccggccatcaacactgacttcttcaagggcatccagaacgactggtattggtcgaagaccccggccgcctggtccccggcgtccgcgtggagcgtccttttctacagcggcgacgtcaactacaaccaccgcctcagccacgggttcgcgttggccgtgcgtcgtgccggtcagtga

SEQ ID NO: 534502 - DNA, 549 bp, Stenotrophomonas maltophilia
ttgaacgccatcaccatccgcaccaagggtgaagcggagatcttcatctccaccgaaaccctccgccctggtcacctgatcgagcttgatgacgatcagtccatccaccggtacgccaccggccacacgaagctgttcgccgacggcaccagcgctgccggcaccgacccgcgtactgatcacgtggcggtaatcgaccacgccaccggcttgatgtgggccgtgaagtccatcggcgacgtcgatggcgacccgatgagccacgccgattgcgagaaggcctgcagcgagctgcggctgctggggcacgaagactggcgtctgcccgcccgctccgagctatccggcttggtcgatgaaacccgccacgagcccgccatcgataccacgctgttccccagcgtgctgccgcgctggcactggaccagcacgacctgcgcctggtccccggcgtccgcgtggctcgtcagtttcagctacggcctcgtcggcagctaccaccgccactccaacgggttcgcgttggccgtgcgtcgtgccggtcagtaa

SEQ ID NO: 534503 - DNA, 192 bp, Stenotrophomonas maltophilia
gtgactgagtgcttcgtcatcagcaaggcggattgggatcagctgatgcagctgttcggtgggatgttcctgctgctcgcattctgtgccgtgttctcgccgctcgatctgcattcgtgggagtaccgagtgcgccgctacctgcgtcgccgtcgcattgcgcgcatcagggaggccgctcatggccgttga

SEQ ID NO: 534504 - DNA, 285 bp, Stenotrophomonas maltophilia
gtgatcgatccgttcattgccttcgtgctgctggcggccatcgtggtcgtgtccattggcggcgctcgtatcgtgtcgtggctgctggaccggcgtgatcgtgccgccgtccagcgcgccaaggaggcggccatcgtcgcccaggcacgcgccgaactggtcgccaccggctggaccgctgaggacgaagctgcgtttcaagccttgcaatcgcagcaaggcaagcatctgcgggcgcttcgcccggaattccagcgactgttcgagggggtgcgccgtgactga

SEQ ID NO: 534505 - DNA, 171 bp, Stenotrophomonas maltophilia
atggatcaccttggctacgcagagcactgcgagcgcaacgcgcagttcgcacgtgacctcgcggtgtatttccggtcgatcaatgacgccaaatcggcgacctgctgcgatctggatgccgagcattgggactacacggcatcagttcactgtcagcggggtgcagcgtga

SEQ ID NO: 534506 - DNA, 603 bp, Stenotrophomonas maltophilia
atgggccacgccttgcgccagcgctcgacggcttccagcgattcgacaaaccgaaggtgtcggcgctgggcggcggcgcgctgcggcttgattttcccggcctgctcgcgggcggcggcttcgctggccttggcctcggcccgcttcgcgctggcctgctggcgcaggtcgtcggcgtgctgcttcgccgcggccgctgtcgctttcgcgtcggccatgtcctggcgtcgctgttgctgctcgcgctcgcgcttcaactcggccaacgctgccgcgtgttccatgctcggcggggtgggggaggggatgcgtgtgcggtcagggataacgccgcgcttttccatcgccgccgccgttggtccttggtgctgggtcggctcccggtcagtgatgccctgctcgatgagactgcggtggtcaatacgtgacgcatggccgaaacgctccaaagcgttgttagttttttccgcccacgctgcgcggtattcggtggctaggccgtggtcgttccagtcgcggttttttttgccgaacccttcggggccgatttcgcgcatggtcagcatggcgtggaagtgcgggtttgcgctgtccaggtcgtga

SEQ ID NO: 534507 - DNA, 261 bp, Stenotrophomonas maltophilia
atggcccgcctcaccccagcccaaaaaatcgccgcccttgaagcccaactagccaaagccaaggaagaagcccgccgcctgcgcacgcgccgacttatccaagcgggcgcagtgtttgaacccgtgctcgatgaatgggaaagcctggaccccatcacgcggcgcaacttcggggccaccatcgcggacaaggtgcggcttctggcctcgcgcggtccaacccctccccccgcacccccctcccctgcggacgcttcctga

SEQ ID NO: 534508 - DNA, 801 bp, Stenotrophomonas maltophilia
atggcacagcccaaagttcgtaagttcgcaggcgatctgcgtttctgggagcacggcgcgaacggcgcccgcgttcccgtcatcccggagccggccgacaagttcggcaaccagccgctggaacagtcgtcgctgacgttcagctacgaagctggcgactcggtggagatcaagagcaagcgccgcgacgcgcgctatcagcagatcatccacaaggattccaaccctggtgtcaccagtgtctcgatcaccgcgctggaagttccgccggccatcctggcccgtatgctgtacggcacgctggtggccacccaggttgccgccggcaccgcaaccgacatttccgtgaccgtgggtagcgcggacacgcctgtgaaactgccgcacaacttccttctggccgacccagaaccgacgttcaagaagggcgcggtcgacctggtcaagggcacggattacaccctcgactcggcgcatggcctgctgatcccgaaatccggcggccagctgcaggcgggcgataccgtcgtggcgaactacaagtacgacgcatatctggaaaccgccatcagcggcggcaccacgccgagcaagtccttccagatcctgggcgatatgcaggaccgcattagcggcgacgagggcctgctgaccatcccgaacgtcgacctgaccgtggacggcgacgtggactggttcagcgatgagccgatccaggtgaccctgaccggcccggtgatcttccaggccggcgaggccgatctctacacgttcaagatcgcagcgcagtcggcgggctga

SEQ ID NO: 534509 - DNA, 2784 bp, Stenotrophomonas maltophilia
atgagtgatcttttccaaagccacgcggccaaatccggcccggttgaatgcctcgggcaaacgttcccgagcgatgaggcgcgccgcgagcactacctgaagctgctcgccgagaaactcaaagacccggcgttccggaagatcgagggttttccggtcggatcagatgaggacatcctcgcgctttctgacccgccgtactacacagcctgcccgaatcctttcgttgaggatttcgtccggcacttcggtaagccctacgattcgttagttccttacagcaaagaacccttcgctgcagatgtgagtgagggcaagaacgatccaatctacaacgcccacagctaccacaccaaggtaccgcacaaggcaatcatgcggtacatcctgcactacacgcagcccggtgatgtggttttggatggcttttgtgggacaggcatgacgggtgttgccgctcaactttgtggaaatcgccacgttgttgagtcgctgggattcagagtagaaccggatggcgcaattctcgaacaacaaaatgaagatggtcgacaggtatggaggcaggtttccaaacttggatcacgtcgcgccatcctaaatgacctctctacagcggcgacgttcatcgcattcaattacaacactccgatcgacttttatgacttcgaaaaggaggcaaaaagaatcctcgccgaagtggagtctgagtgtggctggatgtatgaaacgctccattccgatggaaacaccaagggaaaaatcaatttcacagtttggtctgatgttttcatctgcccgcagtgcgcgggagaagttgtattttgggaatcgggtgtagataagaatgctggcaaggcaatggacgagttctcttgtcctcattgttcttccatgctgacgaagagaagcatggagcgagcgtctaccagtcgcctagatccgcttctaaatcaagtaattaagcaggccaaacaagttcctgttctgatcaactacagcgttaacagaaagcgctttgaaaaatcacccgatcaattcgacatcgatctaattagtcgaattgatgcgatgaccggtactacgtgggttccgacagatcgaatgatggaaggcggcgagactcgtcgcaatgatcctgcgggcatcacccatgtgcaccatttttatacctcgagaaatctaatagtgctcggtctcttgcgcgagaaaattgccaaagcagatcgacgatatttgttttggttcacttcggcgcttacctgggttggcaaagagaatcgccttcaccttgggaactattttgggggaggcggcggcgttatcacaagccttagaggcacgtggtatgtcgcctctctctcggtggagacatctgtaatcgagcgctttgcattacggacccgagcacagcaggtgcgaaacaatattcaagcggaaaatgccattacaacttgcggcagttttagcaatctcggtgttccatcgtcgtctgtggactacctgtttattgacccgccctttggcggcaatctcatgtatgcggagttgaacttcctatgggaggcctggctccgtgtaataacaaacaacaagctggaggcggtcgaaaataaaacgatgggtaaatcgctggatgattatcgaaagctaatgaccagcgcgtttagggaggcatttcgaatcttgaaacctggtaggtggatgaccatcgagttttccaatactcaggcagcagtgtggaatgcaattcagactgctttgcaagaagctgggttcgtcgttgcaaacgtatcggcactggataagggaaagggtagcttcaaggcggtaaatacaacaactgccgtcaaacaagatctcgtcatctctgcgtacaagccgaacggcgggcttgaagagaggtttgccaagtcaggtggaactgatgaatcggtatgggattttgtgagaacacacctgaactaccttccgcgagtaaaggttaagggttcagaactcgaattcattgccgagcgggatccgcgaattattttcgatcgcatggttgcatggtttgtacggcacaacgtgccggttccgatgtcaactcaggagttccaagccggtttgattcagcgttttgttgagcgcgacggcatggtgttcctgcaggaccaagtcgctgaatacgacagaaaacgaatgcaggtggctgttgccccgcagatggagatgtttgtttctgacgagcgcagtgcgatcgattggcttaccgactttctgaagcgcagaccgtcgacataccaagagatccatacggatttcattagccaactcggggctggatggaagaagcatgagtccaaacctgaactagccgctctactcgaggacaacttcatccagtacgacggcacgggtgaggttccgagccagatccacagctacctctcgaccaaccacaaggatctgcgcggtttggagaagaacagcccagcccttgtggccaaagccaaagatcgctggtacgtgcccgacccgaacaaggcgcaggaccttgagaagaagcgcgagaaggcgctgctcaaggagtttgaccaataccgtgcctttactggccggcgtctgaaggagttccgactggaggcgctgcgcgctggctttcgctcggcatgggccaacaaggactacgagaccatcatcaacatcgcgaagaaggtgcctgacgaagcgctgcaggaagacgagaagctgctgacgctctatgacctggcgctgacccgtaccgaagacgggatctga

SEQ ID NO: 534510 - DNA, 414 bp, Stenotrophomonas maltophilia
ttggtagagccggccgctggccggcttccgcagggcgtttccggtgaccacgtggttgccggccagcggccggcactccccatcgttgggttggccaatgtcgacgcctaccgggcgtacggcgaccggccggattggcgcttggtagagccggccgctggccggcttccgctgggcgttcccggtgatcacgtggttgccggccagcggccggcactccccatcgttaggttggccaatgtcgacacctgccgggtgtacggcgaccggccggattggcgctcggtagagccggccgctggccggcttccgcagggcgttcccggtgactacgtggttgccggccagcggccggcactacccaccgtgaggttgaccaatgtggacacctaccgggtgcacggcgaccggtag

SEQ ID NO: 534511 - DNA, 198 bp, Stenotrophomonas maltophilia
gtggtgctggaagaggacggcgagaccatcggcctgcgcgtgtcggcagtggaagatgtcgccaacctcaccgattcacagatcgaacccccggataccgcccgcatctgccagatctccaatgatctgttccgcggcgtcgcccgggtcagccagcgcccgatgatcctgctggacgccacacggctgctgagttga

SEQ ID NO: 534512 - DNA, 834 bp, Stenotrophomonas maltophilia
atgcagggtggccagctcggcaaacggatcgtcggcaccagcggcaacctggtccggattgacctggttgtcctggcggccgacgtagtacatcaccaccgtgccgtcctgcacgttcagccgcgcacgctcacccagcgcggcatacagcccaccgcgcccgaagaagtaggcactggtctgcgcggtcagtcgtaccaccgcacggtgcacggtgaagccatccggcgtgatatgcggcgtgtcttccaggatatcggtcggattgaggtagtacacctcgtgcgccgaatagtgactggtgctgcgaatgtcctcggtgccattcttgccgttgcgccaccaggcgggtcgatccatgcgcaccggagcgttcacggcggtggtctgtgtgatgaccacgttctcgcggatgttgttgaccacctgcgcatcgatggacaggttgccggtgacatcgatgaccgagctgatgttgtcgatccgcccggcaatgccgctggcgatgcgatcggcactcagcgtgccgccgatggcagcatcaccgccgctgtagatcaggcccttgccggtgttctgcagctcgcgcacgcccaggtccaggcgctcgcgtgcagccacggtgccgacgcgggtggcaccaccggcctcttcggcgcgattcttcagcacgccggtggagatcgccacgcgatcaccatagatgcgcccggtgccaagattgtcgatttcgccggcctccaggtgggtcagcgcgccatcgatcaggccccggttggtcagctggccacgggcattgaggtgggtcgtgccctggctggatatctcacctga

SEQ ID NO: 534513 - DNA, 837 bp, Stenotrophomonas maltophilia
atgagtcaagagacaagagaagaacgcattaagcgattactgagggaacgggaagagggaacgttgactgagaagcctatgcccgtccgtagggaagagaaatcggaggagtccgttcaggaacagcaggattgggaagaagattctcgcatcgtttctgcaaagaacagagagcgcatcaagaagaacgccgaactggctgccgcgcaagcaaaagcagcaactcaattcgcggaaaaaggtgcgaggagtgcgatcaagtctttccaaggctttaaggggaaggtcgaagctaagcttcaagaagagaaagagaagcgccgactgaaacgcgaaaataaggagtcgattaaaagcgttgacgtggaagtctctgtaaacgagagcagttctgagttgcccacagagagcgggaacgcgcagcctccgacacggacaaagttatggatgctgtgcagtattccaatcgtcctcagcttcgtattggccgcagcctggttgttcaaaaccactaacgcccctgaacgcgtagagccgtcaacagcggagcaggtaaagactgaccagaccgcaacaacacaggtgcttacaccggtccaggcagttcttccaacggttgaagagccaccccagacgttgcccccgcttccgcaggaatcacaggcggaagacctgggattagaagtgccagctgctgtcgctgagaaaagaccggaaacaaagcggccagttgtaagaagtgagcgcgctcaaaaaccggtagcgaaaaaggcagagcccgaaaagagtcaatggcaaaaagatgcggctcaaaagttagaagagtatcaattttag

SEQ ID NO: 534514 - DNA, 255 bp, Stenotrophomonas maltophilia
atgaagaaaattatcgagagcgaagctgccgacaacttgatttgggaattgcaaatggcctgcgccaaggcgaaccaagctaaggcgaaatttgattttgagaggatgatgaagattgcagaaaaagctgtgattgggcactcagagtttcgtcaagcgccgcgtggaaagatgagtttagctgatgtagtagcgttgtttaacaatgatgattttaaagaactagggtccagaagtatgaggggcgacttatga

SEQ ID NO: 534515 - DNA, 285 bp, Stenotrophomonas maltophilia
atgaaaacattaatcacatccaaacaaatcgctgacaaccaatttgtcttcgtcgctgaactcgcttcaaagggcggcggcaagttcaaacaccctggcgtgttgcgactgatgaagacagacaggaaggggttggagaccttcaatcaacacgcacgcatcatgaacaacaagggttacgagcaaatcgactacgagaatgtggatttgagatgcaaggggccgcgctcaggctacgctaagaagttgatggcgttggttgagcagatgaatgaaattcactga

SEQ ID NO: 534516 - DNA, 483 bp, Stenotrophomonas maltophilia
atgagagacattagtaaaagacccaaagccccgatcctggcggaaatcaaacgtcgcctttccgtttgtcttccattggccctggttcgcatcttgaacgaagaacagaaccgagtcgagattgccgtcaaagacgcgctcaaccaactcgattccagccttgggctcgaatcggttcaactggatagctctgagcgctttgcaatcaagcaagagccagtggttatcacgaaggaaggcgtaggccgttaccttgtgcgcgatgcgtgctccatctatgccgataagacaagagtgtcgaacgtcgaagacatcgttctttacctgatgttttccaagctgagactgtttgcgccggatttagcggcggacattcggatgtttgagcggaaaagactgactaagcaagagtatacggtgctcgaaaaacgccaaagacaactggaaaccgaattgcgctacattcgccaacgcttggcgtaa

SEQ ID NO: 534517 - DNA, 444 bp, Stenotrophomonas maltophilia
atgagaaagattgtagagaatgaaatcagttacacctttattgaggaggtgctgttcttgacgctgcgcggcgaccgcaaaaaattgaagcgagagtatcgaatcgccaaagacttggcttgcaccctcattaaagaagttgaacccggaggaaacttggcatgcgcgtcttggtttgaagacgaggaacttcgcggcctgccttttgaggcgattctcgttggagagaaacgtcaaggagacaaaggcaagctctttgtccaatgcgaaggcaagaaggtatgggcagaaggggtggaggaaatcattcttttcatcctctttcaaaaatgtaagcggtcacccagcttctcgcaatacgaaagaaggatcagaagtgcgatgttcgccaaaaccaactcgaaaaatccaggattttcagttatcgcagagtggttgaaatga

SEQ ID NO: 534518 - DNA, 741 bp, Stenotrophomonas maltophilia
atggcaaagacgtggatcagacgaagtttaagagagcaacaaagaggcttgtgcgcgtattgcgatgagccgcttccagcgagagcgaaaagctccctactcatccctgttcagataggtggatctaaggacgcaggcattgttcttgcgtgcaacgaatgcctgggaagcaagagccagtcagatttggttggatggctcggtatgcctttccatcgagtgcttccgaagaacgtgcctggcctgctggtgaagcgcttggaagccgctgagcaagcccagaaccatcagctgccggtggcttactcagcgaaccggaaagcggtcagaaaggcgcttgaagagcgctggaagagcccgcgagtgagagtcgccctagatgaggacatcttggtctttgaccgtcagcagcatggacgcggagccgccctggctgtgctgcggagccagttcgcagctgtgattgaagaacgcgctacccaggtgagggtgcgtgttccaactcaacatttggacagagcaaagagcgtgcttgcgaccctgaattgctgggtagtcggactacccacgggtagcgtcctaaccgcgttgaaacgcgctaagaagaagacgccaaaaaggggcatcagcaagcggcaaagacaagagatgctgatgctcagagacacagatcagctgagcacgcttggtcgagcagatgtagaactcgcgttgctaagagatagactgagaagtcggtga

SEQ ID NO: 534519 - DNA, 288 bp, Stenotrophomonas maltophilia
atgtcttctaaggaatacatcacaacttatgtcaaggcagcaaaaagtgttatcgattcacccaatgggactgctcgactcttgtccgggttcagcacgctgaaaaatgccgctgacgcaggggtgactcccagtcagatgcgcgcaatttttccggacctgagaaagtatagcgacgccacgattgacggctttgtccagatgggcagtgatatgaccgaaggcaaaaccattatcgcgagcgcagtgtttgagaatcccgacccgagtagtgctattgctcagtga

SEQ ID NO: 534520 - DNA, 564 bp, Stenotrophomonas maltophilia
atgacaaacaagaacccgtcgcacactccgactccctcgaccacgccgaacaaagagaacgcgggaaagccggaacagactccggtgcctacgcctcatccgactgcgactcccacccagtcgagcaaggcaaacgaagacagtcgcactttggagcagttggaacaagaggcgcaggaattgcgcgcgaagatcgccgcaatcgaagaagtgaagaaggggaagctggctgctgaggcggaaaaagcttttaacgacgttcttgcatcgattcgtcagttcgctgaacacttcaatgcagaccaggttgatgagatcgttgaggagatctacgagcgcagcgcatctcagagtgcgagtgttacgaagaagaccaccaaaaagacggtgcggaagtctgctgctaagaagatcgctcgcaacgtgaaaaactatcagctgccgaccggtgagacctacggtggcaaggggcctacgccgcaagcattcaaggattgggctgaaagtgccgcaggcaagaagtggcgtgaccagaatccgggtcagaaatggccgtctgcctga

SEQ ID NO: 534521 - DNA, 285 bp, Stenotrophomonas maltophilia
atgaatctgaaagaaaaactaatcgaagtccttgctcgtgcggcatccatcgcgctaggtcttatcctctttgtcgcatttatgattggcgttccccttgcgttatttttgatgacggcggtagccgtgttttgtcgatacgtcatgacttggcatcatgattttttaagaatgggttttttgggtgcttctatccttgggtttttagtattcttcgtatttggacttcattcagttatcaaggcctctaagggtgagaaggaaagtaaaggcggtgactcatga

SEQ ID NO: 534522 - DNA, 1602 bp, Stenotrophomonas maltophilia
atgaaaagacaaaccgggtattcattgaccgaactgctaattgcagcaggtatcgttagcgtgatgggcgctgtcgcattcgtgctctaccaacccgtgaaagcgcgcgcgcagacccgcgccgaaagcgagcgactcaacaacctttcatcggaaatccagcaggcgtttggagtggttggtagctatgaaggcgtcagcagtgagcgcttgattgaagagcgcttcatccagccagagcaattccagagcgggaagattagaaatgcgtggggcggcgtggttgatgcacagccgtttggcattcgtcatttcggagacgcgtttaccctcgactacacgagcgtcagcgctgcgagctgctcagatttcgtctctgcaaatgcgtccaatgcttacgatgtcgtgatcgatggaacaagcatcgtcaaaaacaacaacgatcaactggatgttgctgcgttggcgaaggcgtgtgcgagcgctcgcgtcgtgagctttgtctatcacaacgagagcgtgggtcagttcattgcgtcaccgctgaaccttcctcagagcgatcagacggggaagaacccgcctcagagccctggccttactactcctgactcggcgacgggtggacagcaagccacgccggttcacccctacgccccaagctgcggtcctcggccagccctgccttcttgccctggcatcagcaaccaggtctgggaagtcactgtttttccccaatgctggaacctgattggttcttgcgctcttcctgcagatccatcccccgctcccgttgtgccggcgctccctgcgcccgtccctcttcccgctgttcctcccatcgccccggcgctttgcagcgcttcttctgagtctcagcctgcggcctgccttgctggcagctatgggaatgccacttctacccgtcaaaagacgtgccccgaagcgtgggggcaacctgtgtggacgaactgggaaacggacagaagcagctgtcaaagttgcccaggaagctcccaggaagagagctaccaaaccgtcacgagaagcggctcctgcccctccggcatgaccggttcaatgacgtatcaaacgcggttgaaaggcacgcggaacgtctcctatgcctgtccagcgggccagaccactctgcctgctccctcttacaccgagtgggcctgggtggagacaggagaggtgttctcgaaagatgagagcggatgccgcgcggaaggcttgacggttgccagtggaaaacttttcatctcgaacacaaacacgactcgaaccatccaagaaggcttggttctggcgcagaacgcggattggacaacgcttgcgagtgtgtcgagcgactggccgcagagctacggacccgtccgggcttgggcagacgtgagctttacctttaacggctctacgcaaggcttctatcaagccgcaaacggcaatacgcctcgacctggaagtcccatcaactactcagaagttcggaccctcaacttcaacggaaaactggtggacatcgatttccgcacgtttggaacatcagacggcacagtgatcaacgggggaattcgcattctttaccgcgtccgttga

SEQ ID NO: 534523 - DNA, 369 bp, Stenotrophomonas maltophilia
atgagtctaaattcgaatttactgttgaatcggcatatcaacaaggcggtggtaagcgcgttctttgagaatgacttccagcagatgatcgaaaggctgaaatctcagccgctagacggtaggcgtgagtatgatgtgatgacgcaccatgccggattgttttttgctctacacagcgaaagatacagtcttgacgagttcatgattcgttgggagcaagacgatgtttccaccacggtttgtgccagaacgcatttggtcacgctgagttgcaagggtagcgtctttgatgagttctatttgaatgacgaggcttttgttgttttggtggagatggaaaggcttcggcgatacttcctcaattcgtga

SEQ ID NO: 534524 - DNA, 897 bp, Stenotrophomonas maltophilia
atgagctttgtccgaacggactcgggcctgtcaaacctgcatttgttcgaaggtgctgacgcagtggtctacttagagggcggtcccagcctcagttccgaagaaatcgagaaagggaacttcgccgcttcttccgacgacattagattctggcaggagatctttgatcacttccgaccggataagcggattgcctttaaatctatcggttcaaagacagcagttttgaagattgctgaaaaaattgaggcaggctctgtatcttccgtgatcgcagtcatggacagggacttcgatcacttgcaatcaaaagtcatttcgcacccgaatgtcctctacactcatggctacagttgggaaaacgattgctggcaggagttggcagtccagtcagcagccacttcgctttgcgggacatcaaaaaattcaagccaaggagcaaccattgtccaggacgtatcgctcctctataagaaaatatccgtgcagctgaatcggcacgtgaggatggatgctggcctgcgcctccttgatcttccttactttgatcgcgactcctttcagcgatatgttctggtccgggcgggcaagcctgaattgaacactacacagctgcggtccaccgcaaacgctgcgcgaaccagccgaacaagcaagttgaccttcccaggtctaacggtctcctgcatgaaagactgctacgggcatttggctggctggatttgctatcgaatactctgctctatattgtcgaagaatcgagcttctgacgcatccatctcgaaaagctatgcgagcgccatggtggtttccaagctgatcagtgcaatcaatcagccgccgctgttacccatcaatcaacactatcaaacaaataccgcttcgattgtcttttaa

SEQ ID NO: 534525 - DNA, 447 bp, Stenotrophomonas maltophilia
gtgctggccagcgacgccgtgcatgccacgctgatgcaggccccgccacaggccattgagctgttccacggctatacctactcgggacacccgctggcctgcgccgcagcgctggcaacactggacgtctacgccgaggagcgcctgttcgagcgcgccatcgaactgggcgagtactggcaggaacggctgcacgcgctgcagggcctgcccaacgtgatcgacatccgcaacttcggcctggtcggcgcggtcgagctggcgccgcgccgcgatgcacctggcagccgcggctacgaggtgttccggcgctgcttccacgacggccggctgctggtgcgctgtaccggtgacatcatcgcgctgtcgccgccgctgatcgtggacaaggcacagatcgaccagatcaccggcacgctgggcgagatgatcggggccaccgcctga

SEQ ID NO: 534526 - DNA, 693 bp, Stenotrophomonas maltophilia
atgctggtgcgggtggccgggctgggctatcagaagggtttcggcgggcacttccacaacgacaactcgatcaccgcgttgcgcgacatccccgggctggtggtcggctgcccctcgcgcggcgacgatgcggtgatgatgctgcgcacgctggccgcattggcgcgggtggatgggcgcgtggcggtgttcctggagccgatcgcgctgtacatgagcaaggacctgcacgaagcgggggatggccagtggctgttcgactacccggcacagggccgggcgctggtgccgggcgagggccgggtctatgcaccggaggccggagacctggtgatctacacctatggcaatggcgtgccgatggcgttgcgcgcggcgcgggcgatcgagcagcagctgggctggcaggtgcgggtggtcgacctgcgctggctggtaccgttggacgccggcttcatcgcggcccaggccgcgagcgcgcggcgggtgctggtgctggacgaaggccgccacagcggcggagtgggtgagggcgtggtcacggcgctggtcgaggccggctttggtcacctgccgctgcgccgcgtctgtggcgccgacacctacacgccactggcaggggcagcaatgttcgggcttccaagcgacaatgcggtgattggcgccgccctcgacctggcgcaggaaccctga

SEQ ID NO: 534527 - DNA, 597 bp, Stenotrophomonas maltophilia
atgaagaacaacgtacttgccgctgcgctgctgggcgtctgcttaccgctcgccagcgcccaggcctcggaactctccgtcggcgggcggatcatgcccgaagcctgctccatcatcctgccggaaggcgatctgctcagcttcggtgatctgcaggtcaatggctctggcgactctttctccttcggcgccacaaagaccctcccggtcgacatcagctgcagtagcggccacgccgttggcctcaagttccaggacctggcgttcgatggtggcaacgaacccaaggactggttcgcactggtggacgaggctgacgaactgattggacgggtcaagctggctttcctcgcgggacaaggggatggcagccaggtcactctttcaatgcgccatccctaccagggctactcgcacaacgccatcgcgggggatccggagaactacatgcgggttgaaaatcccgacccgcgcggctaccgggagatcaaatttgcgatgcgggtgagcttgaacggcgacaacatggacgcgaaggacatcgccaacgccgccgctgtccgcagccaggtcggcatcgacctccactacctctga

SEQ ID NO: 534528 - DNA, 621 bp, Stenotrophomonas maltophilia
atgaataaccacaagacgttcccctgcctgctcggcttggggcttgcggcggcgatggccaccgttccgtccgccgatgcggcggagctgacagtcgctggcagcatcacgccacaaggctgcaccctcagcctggataatgacggcgaaatcacgctgggcgagatcagtctggaagacatccatccactgtacggcctcaaccttgccgagaagaagatcggcgccagcgttcggtgcccgtcgcgcactgcattcggtctgcatttcagtgacagcatccgtgaggacaaagtcaccaccactggcttccatcttgtttccgacaacgaccccgggaagaggctgggcatgtaccaggcctttctttccgacggcatggctgacggcagctttgcgcgcttctacaggcgtaacaacgctggcttcctggagggcctgagcgcgatccaatcgaatgacctgggctacgcaatcgtcgtctccaagccagggtacagggccaaggatgtgaccttctctatccgcctcaagcccagccttgctgcgaggaaccacttcgatgcttcccaagatgtcagcctcgcggggcagatgactgttgagctcagctacctgtaa

SEQ ID NO: 534529 - DNA, 633 bp, Stenotrophomonas maltophilia
atgaagatgaagatgattgcactggccgccgtggccctgaccgcaagcgcagccgccaatgcaagcgtgaccctgaacgtgaccggcaaggtgattccgccgtcctgcaccatcaatctggccgagagcaacctgagcctcggcggcatcgcttcggctacgctcaacgcggaccgcccgaccgcgcttggcagccagtccacctcgattgaagtcatctgtggctcaaactcccgggtcgcactgatggcgaccgatgatcgcggcggcaccgtggccgctgacgcggtcagcaccgctcatagtgcggcatcggcagaacaggccttcggccttggcgctgttgacggcaagaatacgggcgctttcgtgattgccctgtccaatggtgtggcgggtgacagccagaccggcttcatcaattcgcaggatggcgaggagtgggcggcgaccgacctgctggcaccgtcgatgctgaccgcatggcagggccagaatggcgaggcggccagcgtccgcagcgcgaacgccaccctgaccgtgaacgccgccgtggtgggcaccgacgagctggatctgtcgaaggacattgacctggctggcaaggctacgatcgtcctgcactacctgtaa

SEQ ID NO: 534530 - DNA, 129 bp, Stenotrophomonas maltophilia
atgatcgtcccggaacagcgggtggtcgccgtgcgtctggtccaccggcgcgagacccacagcgctccacaggacgactatccctccttcttcgccgatgtcctgcagttggcgcggacactgcgatag

SEQ ID NO: 534531 - DNA, 363 bp, Stenotrophomonas maltophilia
atggatacctctgcacccggcgtctccctggtggaggagatcgtggcacttcgccagcaaatagcgatgctatgcatcgatctttcaggcgaggattggctaaccgtcgaggaagccgcgcactactgcggagtgtcagttagccagttcaatgcccgcgcccatgaatacgatcttgatccgcgcaagttcatggggaagaagctctatgcgaagacggctctccaccaggcaatctacggcgcgaaggcttggacgcgtccatccgcaacctccgcaccaaccctagctgcgacctcccctgagatgaaggaggcgcttgcccggctacggcgctatgacgagcgcaaggggaaacgctag

SEQ ID NO: 534532 - DNA, 303 bp, Stenotrophomonas maltophilia
atgcctagaacgccattcgctgccctagccgtcctcgtcctcctcgggggctgcaccagacagccagagacgtggacggccttcgtctatcctcctgggaagtccttggccgccgaagattcctccaaggcgatctacggccactacgagtccttcgagcagtgccaagaggcatctattggcgctctgcggcaattggccttccagcatcagtccgaggacttcgggagctatgagtgcggcgttgcctgccggtacgagaaggagtgggacatgtacgtctgcaaggagacccggaagtag

SEQ ID NO: 534533 - DNA, 309 bp, Stenotrophomonas maltophilia
atggttgaggatcggacctcgatttctactgtagaagtagatggagctgtcgagtcctgggacggtgttacctacgaggtcttcgctgccgagcgacaatgcctgcctgaggattttgaaggcaggatgcaagtggctaccgctgccattggcgccccttggagggcgtacgacctacatgacgggcgatgccccgctctgagcggtggcaactgccaatgcgggttggtgagctatttcagcaatggacgctggatagcgggggtcgacatgttccattcggtccaggacatcttcacactgcactaa

SEQ ID NO: 534534 - DNA, 291 bp, Stenotrophomonas maltophilia
atggcgttcaagccaggacaatcgggcaacccgagtggccggcccaaagtggattttgaggtacgccaattggcgcgagagtacggtcaagaggccattgagaagctggtgaccatcatgcggggcgataacgctgctctcgccaaggcggcgagcgaggcattactggatcgtggctatggcaagccggtccaatcggttggcgtagaccctggctcggcacccgtccaagggatcacggtccactttgtctcccctgcaccatccgaggaggagggccgccatggttga

SEQ ID NO: 534535 - DNA, 273 bp, Stenotrophomonas maltophilia
atgcgccactacctgctggccttcatcgcgttcgtggtggcaactgccgtgatgtatctggtttgtgcgttcgccgcagccagtttcaacccggccgattgggccgcacctgcgcgcttcgtccttgcgatgctggatgtggtttttggcgtcctgatagcgggagtcgctcacaaggaggcggaagaagttcgtcgtctggttcggctcgatttggccgacagggaagccgacgcgcgctggcacggcacctgggagagaaagaagcaatga

SEQ ID NO: 534536 - DNA, 303 bp, Stenotrophomonas maltophilia
atggcaaagaagggcgctacggctggccggagccagatgaacgagatccggcatcagaaccactactggaagggctatgcggactacacgctcgaagtgttcggcgacacgttgaagaagcggcaaggctggaagaacgacctaactggcttggatgcgatccactactacttggtggaaaaacaccattggctgccatcggttgttcgggcaatgtctctggaagacctgcgattcgccttgaccgaagaaatgcatggctggacgctgccaaaagacgcgatcggaccagaggacttgtaa

SEQ ID NO: 534537 - DNA, 231 bp, Stenotrophomonas maltophilia
atggacttcgtgttcgaccgcaccgccgagggccgggtgctcaaggccctgaccatcgtcgacgatgccacacacgaggcggtggcgatcgaggtggagcgggccatctccggccacggcgtaacgcgggtgctggatcggctggcgctgacacggggtctgccacaggtgatccgcactgacaacggcaaggagttctgcggcaagacgatggtgacgtgggcgcactag

SEQ ID NO: 534538 - DNA, 4455 bp, Stenotrophomonas maltophilia
atgggcgcgaacgcatttgccaatggcgttgatggcgtagccctgggcagcaaagcctcggttgataccggcggcggcacgtccggcatcgccattggtgctgctgcgaaggccgggacgccgggttacaccggtgcaatcgccataggcggtggcgccgaggcgcgcattgatagcgtagccctgggctacggtgcgtcggcagccgcgaaaggagcagttgcgctgggcgtgcgttcttccgcaaccgaagtgaatactgtctctgtgggcagttcgacgctgcggcggagaattgtgaacgtggaagacggccgcatcacggcttccagctcagatgccgttaccggcaagcaactgcatgcgatgaacgagcgggtcgatggcttgatcaagcaggattccgcgagcggcatagtgcgtattgccaacagcaataccggcacggaagtcagcatgcgcaatgcagtgttggcgacgcgaaaagtgagtggcgtttctgatggcacgttgacgacaagcagtacggatgccgtgaatggccggcagctcaacgccacgaacaccaggctggggacagtggaatcggcagtgggcaccgtaaagggagaccttgcggacgttcgtacgctcgcccagtcggccaccaaccgcatcgatgccaccaccctggcactgggcaagggcgcggtcgcagaatcggggagctacggcatcagcaccgccatcggcaacaatgccaaggcctacaacggccgcagtgtcgcactcggattcgacgctctggccggcgtcgatgcagagggcaacaaggtgaacaaccagaatgccggcgtgtccatcggtgcaaatacgcgcagcgcaaacggcgcggtcgcgaccggcttccgggccattgccagcggaaacttctccatcgccgtaggcggtgacgccaatgcggctgccgagcatgccactgcaatggggtacctgagcaaagccacggccaagcagtccactgcgctggggcgtggcagcgaggccaaggcgcacttcgccaccgcgttgggcaatcttgcggtatcggccaacaccagcgccgtggcactgggtgaccgggccaacgcccgccatgacaatgcggtggcactgggtgctggctccgtcacagcgtcggtcaactccgtttcagtgggcagcgctgcgctcaagcgcaagatccagtacattgccgatggcacgatcagcaatggcagcaccgacgcgatcaccggcagtcagctgttcgcgaccaaccaggccgtgtccactgcgcagagcacggccacgagcgcgcagacggcggccaatgccgcaaaagccgatgctgccaaggcactgaccgagacgaccgcgctcgccggtctggtctcccagacaggcgccaccggcaatgtccgcctgggtgggaagaacaggggcaccgtactggacgtgcgcaacagcgccaacgccagccggaaggttgccggtgtggctgacggcgacttggatgacagcagcaacgaggctgtgaacggcaagcagctcaatgccaccaacgtgcaggtcgctgccgtggagaaagcggctacggccgcgcagacggatgcaacggttgcgaaggcagatgctgccaaggcgctggtcagcaccaccgcgctggaaggactggtcagccagaccgccgccaacggcaatgtccgtctgggtgagaagaacagcggaacggtgttggatgtgcgcaatagtgcgaatgcgggtcgaaagctgactggtgtggccgacggtgtggtcagcggcagcagctatgaggccgtcaacggcaggcagctcaatgccaccaatgagaaggtggtggctgtggaaggcgtggccatctctgcggctgcggacgcgaccctggcaaaggcggatgcaacaaaggcgttggccgaaacagcggcgctgggcgggctggtggcgcaggtttccgcgtctggcgatgttcgtttgggagagaagaacggtggtacgaccctgaacgtgcgtaatagtgccaatgccaaccggaagatcagtggtgtggcggatggagccctgagtgccagtagtgccgaagctgtgtctgggagacagctgtactcaagtaatgctcggattgcagccctggaagacacgactcagtttctgagtattggcacggcgcctgctagcgagcgtgccgaggcagggcccgtgggagtcgctgtaggtaactcagccaagaccggcagcgatgggggaactgcagtgggtacccatgcgaaggcactcggtagaaactccgtggcaattggccgtgcgtcagtcgtgcatgaggattctgatagtggatttgcactaggtgctggagcggaggttggcattgcgggaagcggcgcacggggaggtgttgcaatcggtgctggagcaaaggtaggtaaaggagcagatggttcgctggcgatcggcgaaggctctcaggcggatgaggccggagtggcttcctttggaagtgctactacttatcgtcgtctggtgaacatcgcccgtggcaccgccgaccacaacgccaccaccgtctctcagctcaaggattccctcgctaccctcggcggtggcgccggcatggacgcaagcggcaacatcatcgccccgacctacgcggtgcagggcggaacgcagaacaccgtggaggacgcgctgatggcgctcgatggagctgtcaccaccgcaggccgccgtgcggacaaggtggaaggccagctcaactcgatcttccaggattcaccctcggcccgtggcgatggcatgaaccagatcgcgctgaatggcgtgaatggcatggtgctgaccaacttggctgacggtcggatagcgccaggaagccgtgatgccgtaacgggcagccagttgtacgccgcagagcagaagatctcgcagaatcggaacgatctggaggcgatgcgcaaggagcgggagatgcgcgagcaggccatgcgtggattggatgcgagcggcccgattgatttcggcggtgcgcgtttgactggcgtggccgaggcgaagttgtcggctgatagctcggacgttgtgcgtggcagtcagctctatgagaccaacagccttgtttcggccatggaagacatcagccagtacgtcagtgtgggtacggctcctgggtatggcgctgctcaggctggtccgggtggtctcgccattggaaacttggcaaagacgggcattgaggggggcacggcaattggaacattcgccggggcaatgggcaaaaactcaattgccatcggacgggcgtccactgtctaccaaggctcagattccagctttgccgtcggaactggagctgaggttggtagggccggcgagtctggtgcaatcggagccatcgcgtttggtgttggttcgagagtcgaacccggggcccatggttctatcgcgctaggaaccagctcttatgcaaccgaggcgggggttgtgtcgtttggcaatattggtacgaagcgtcgcctcaccaacatcgccaacggcaccgccaaccacaacgctgccaccgtcggccagctgcgcggagcgctttccgcgctcggcggtgaggtcgatgccaacggcaacatcgtcggccccagcttcaccgtgcagggccagtcccagaccacgctcaatggcgcattggaagcgctcgacggcgcagtcgtcagcaaccgctcgcgggtgaaccaggttgaatcccagctccgctccgtgttccaggacaccccctcggtccgcgccgacggtctcaaccagctcaccctcgccggaacccacggcatggtcatttccaacgtggccaatggcctgatcgcggctggcagtcgggatgcagtcaatggcggccagctgcactcgatgcaacagcagctcaacggccgtatcgatggcctggaagagcgcatcgatgcgccgcagccgcgggcaatggccgtcgcttcggtgcccgaaccagaagcaccggtgccgcaggccgaaggcggccagcaggtggcgtcggtcggcgagggtgagaaacctgcaccgcagccgaagacgaagaaggaggacaccccgaagccccaggtcgataccgctgaactggagaagatgctggcacgcgccaacgagtataccgatggcgcgatcagcaacttcgagcgtcgcctggacaagatggacaagcgcttcaaccgcatggcggcgatgagcagcgcacagaccgcgatggcgatgaacaccgcgggcctggccacctacaaccgcctgggtgcgggcgtgggctacagcgagggtgagtcggcgatggcggtgggctaccagcgcgtgctcaacgagaagggctcggccaccttcagcctcaatggggcgttcaccaacagcggtgagcgcagcatgggcgtcggcgtcggcatcggctggtaa

SEQ ID NO: 534539 - DNA, 195 bp, Stenotrophomonas maltophilia
atgaaggtgccgccctttgttgtcacagccgcgctcatgttgatggccccggtgatctcgtatcactgccctcccgaggcgacgctgaaggtgaagggctacctcaggttgtcgaatactgagttcagacctatgcggaaggagggtaatgcctttgccgaggcacgcggtagccacgggccggtggtgtcctag

SEQ ID NO: 534540 - DNA, 738 bp, Stenotrophomonas maltophilia
atggatcaagttaaagattactctgacgaaaggttgtactcgggatgcgtctactgtggaatgacagttgagacaagagagcatgtaccctcaaaggtattccttgacatgccttatccggagaacctcccggtagtggggtcatgcaaagagtgcaacgagggcttctccagagacgagcagtacgttgcttgcctgattgaagttgtaagggttggaagctcggatcctagtgacatgcgtaggcagttgattgcagccacgctcgcaaggtccgggcgtctgcgagcacttattgacgcagggcgctcggagcaagcagggctgattcagcactcttttgaccgcgagcgactgagtcgcgtattggtcaaactcgcaagaggacacgcatgctttgagctcgcagcttggaatcttggtgagcctgaggaagtatggtgggcccccctgatctctctagctgattccgaacgcgaggcgttcgatgcgccccacgtagttgagactttcggtgagattgggtctagggctgtcagtcgaatgatggttattcaaccaaccttgacttccagcactggtgagatgattcagtcatttcctcctctggtgatatccgattggctggatgtccaagaaggcagataccgatttctggctgttgatagcggaggggatgtggtcgtttctattacgatcagcgagtatctggctgctcgagttagatggaagaagtga

SEQ ID NO: 534541 - DNA, 1374 bp, Stenotrophomonas maltophilia
atggtgttgcatagcaatacctttacctgcacagatggttggcgagactggggaagctcattgaaagaagaatttttgagcgtgatggaccttttcgccggttgtggcggatttggattagggctcgagcaggcagggttcacgccaatctatgttaatgaaattaacaacgacgctcgtgcgacctatatttccaatcgaaagactaagcacagctggttctcagaaggcctcgacacagagaagtggctcaatcgctttagttcggcggatgcgagaaggatcacgaggagggaaacgctcgacaagctccaaagagacatcttgtcagagtttggcctagatcacggggaaattgatctcatcgtggggggaccaccttgtcagggattctcgggcataggacatcgccgatcctatgccgtagccaaagaggatgttccatccaaccacctctacaaggacatggctagaattatcgacagactgcgtccaaaagcgttcgtcttcgagaacgtgcgtggcctgcttactgggaagtggacgtattacggcgaacctggggaaatctggaaggacgtcaagagggctttcgccggaattggtgattataagcttgctgcggagctggtgtacgcgagaaactacggagtctgtcaaaatagaccacgtgtggtacttgtgggaattaggagcgacatagcgggagcggtcacaagcaagagagatgttgacgccatagatggcactgggatatccagcggattccttcccgccggggacgtgtcgcgtgcgccatcaattgttgagctccttggcgatctggttgatccgtattaccagaacggcgggtcgacagctacgtatccctggcaggcacttagtgaaacgcagatcgagctgcgccgctctcatgacggcctcacgattgctcagcagggcgacccagtgtcggagcatgactacagcaagcacagccttcacgtgcttaagaagtttgacgcaatgctcaatggcaacacttttgtgtcaacgaagaagttcgcccagcgcgtactgcctaaggaatggaccgagaaagggccaaccgtgaccgccacctccctacctgacgactatgtccacttcgagcagccccgcacactcactgttcgcgaatgggcaagacttcaaggattccctgactggtaccagttcaaaggtaaacgaacgaccggcggcatcaagcgggccggaaaccctctggagggcattcatgagcgagagcttccgaaatacacccagattggaaatgccgtaccggtgccaatggcgaaagcaatcggggagcatttagcggaaatcattaggcgaggctcggtcctcaccgcctaa

SEQ ID NO: 534542 - DNA, 1491 bp, Stenotrophomonas maltophilia
atgctggcgtttgcacgtggcttctttgaagtaagggggggcggtccctcgtcagggcgtctggccgctaaagatctcgttactgtgcgggagggcagggattggggggcggtcttcttgctggagttggatggcggtgcgggtcttagttcgaatccgcgcccaagcaactgcatcttcgctgatctggtggtctcggttgtggcaccaagcgatgaggcgctagtcgacgtgctcgctcgcatcgaggccttcgacgacaccatcgccgacctggtccccatgagggtggattcaacaattttcccatcagtcgaactacctctcgccgatagtggcgcaggagagtacgagtgtgcgacaggtgatttcatcgcggcagagcctctagttctggacaagctcggtggagcatatgctcttgtaagggcgcacttagagaatttggagcggcctccttccgagttgcacggaatgcttaagttcgaggctgcgcgatcgcaggctctgggcgatgcgcttggtgccttcgcgtcccatgtttaccgactagtccgcccgtccgtaggtgaggcggatgacctgagaatttttgtggccgcggcgtgtagtcttttaacggcatcgactgcgcgaggactagatgcgacttctttcgttcgaggtctagccattggggacggcgaaggagctgtaagtatcgcggcattcctgactgtcatggaaaaagtcttcgacaaccggatcgagttggtcgacggtatggtcgatgactccggtggcattggtcagcgcgcattgttgatctttttgctcgcgcctacaccggagaagctcagaaggtgggtgaaggctcgcactgttggccctcgtgttgcgttgctcgcgagcgtgctctccggcctttacgcaggcttcggtgggctgtctcgtggagagaagggcgcgtcgcgcgagcaggcggtggctcatgtggctgccgccaggctctccataaatggcgaagttgagggtcttgagttgacttccgcgtgggaccagagtggtgtccgcactgagaccctgtttgcggcgtcgcttcctctaatgcgtgggaagggtgcgacggacttgcagaagagggcggtgctggaggcccttgctggcaacggttcgcagccagctgttgatccggagagtggagacatccgtgtggttgttgaaggctgtccaatggttgcggtgattaagtatgcccgctcctctttggtgcttgggggcgttgaggtgtacgaagttgtagttgagggtcgtcaacctagaagaggggctctgacaagggatgttctagagagattattggatgaatcaagtcggcccgtcgtggggtgcctaaccccgattaaaggtagagtattgctaagagttgaggtgcaatccgcatcacacctcgtggaagcgctaaatgcaataggggccgtatcgtccgcgttgtctctcacggccgtgtag

SEQ ID NO: 534543 - DNA, 1206 bp, Stenotrophomonas maltophilia
atgcgatttcctaaactgacggatctcgatgcggagcaaatgcggatctacagcggtgccccaccgacagggtccgtgatcgtcgttggtcctcctggaacggggaagaccgtgatggcatttcatcgagcggcgtacctcgaagcgcgaggcaagttgcagccaaacaaagcgatggttccgcgtgtacttatgtatagcaaggttctctcgacttataccgctggaagagacgggctggcgcccacggtcgccactagtacacttcataagtgggtgtacgaatggtggagattgatgtttgggcgaaagccgccgccgcactgtgcggatgatgcgtacgcattcaattggacgtcaatcgtcactcgggtgctaatctcgtctggcatgctccagggacgtcagcattggggtcatctgataattgatgagggtcaggactttccgcctgatatgtatagagctttatctgccattagttcttctatggtcgaggagggtatcgacgcgaggccggcgatcaccgtatttgcggacgagaatcaacgcctttccgagacgaggaactcaaccattcaagagattgagaccgcgttgtcacttcctgaaggccgtaggtatgcgctcaagcggaattacagaaatacattgcagatagcggcctttgtgcgtcacttctacgtggggttgccgtctggaattcctgatcttcctgttcgtgtgggcacagcgaagccaaaggtcgttcttgctcgctctgggatcgaagtggcgaggcgcagaatagccctctatgcaaagaataatcctgacaaggatgtaggggtaatatgcatggcggactcggtcaggcgcaggtgcttcaatagtttgtgcactagactggcagggtccaacattgtggttcagacttactcaaacaaggagagagaggagcatccacctgaggctctgaagttcgactgtgggggctccgttaccgtgctgaatgcgcagagtgcgaagggtttggagtttgattcagtattcgtgatagatccacttatcgatgctggtggtgcgagccttcagcaggccagaatgcagctttacgttactgcgtccaggccgagggactatctagagctaattctgatgaatcctcctgacgattacttgaatctcctcccggaatcagaaacgtatgacttcatcgaagagtaa

SEQ ID NO: 534544 - DNA, 1716 bp, Stenotrophomonas maltophilia
atgactgatattagccgctggaaggctgatgagatgcgagcaattgagtcaagttttttagagcgaaaactgaatacgcctatccgatgtccgtccgggaaggaggtggctcgtcccatcgcaatcaatcggtttcctcgctggcacttctgtcccagatgcagactaatgcgtatggtcacgggtatggacgatctgaatagcgaacatcagattccccgttgtactgccccaaaatgcaaaagtgatttgactccaatggggtttgttgccgcatgcaggaacggtcacctatctgacgttgattggcataggtgggcgcactcaactcatcagggcggttctgtctgtagccggcaaacggcaagtatgaaattcgaaaccacgggtgaagggggaggtgattggacggccatcagcgttcgctgtgcgtgcggggcgagtcgagactttgcgggactagtacaggtagaaggcccggcgggattaatttgccatggggggcagccctggcagtaccagccgccgccatgcggcgagaaggtgactgtgtatcggcgtgctgcgagcaatctgcacttctcgaaacagatatctgccctagatctccagcctgaagacgtttccgggatcaccgggaatgcgatcgaacaagcgtgggaggcttccgatttcatttcgatggcgcgagccctcgccgcggccgacgtttcgcatgacgtgattcttagtgctgcaagcaatcatgcagaccgcatatcgcgtgagtatggctgccgtccgtctctggcgttggagtgccttcgcgggatcatcgaatcggggggcacatcagaaggtgacgaggggacccgagcggctgatgttcagcaggcgattctgcaagaggagtggagcgttctctcagggcgggccgatatcaagacagagcatctagatgtcaggagaaaggcaatccctcctgactggccggttgagctgcgccggacaattcggtccatgtccatggtgcgccggatgcgagaggtgcgtgcgcttctcggttttaggcggctgaatcctgatgagggtaccccgctagtcccggtggatcttggtgcggtgcaagccggatggttgccaggcgtcgaagcttggggtgagggcatatttatccagcttaatgaggaggccgtgctcaactgggaggagcgggctcggccgccaattgaggggcagctccgtagcatgcgtcagagcgtagagggaatggggtgggattcggagtgggcatctctacgctttatcatgttgcactcccttgcccacgctcttattcgtcggctgggctttgatgctggttactcggcttcctctattagggagcgcatttatgcaagttccggcgcgggcgggatgtgcggaatcctgttgtacacggccgatggcgattcggaaggatcgcttggtgggcttgtacgcatgggagatcctactagattcagtcacttggccgaagctgcacttgccgacattgtgtggtgttctgcagatcctgtatgtagggaaacgagtaaccaacaagccgctccgcttaatgcagctgcgtgccacgcgtgcattcttgcgtctgagactacgtgctgctgcaataactcgttgctggatcgtagaactctgatcggcgtcagcgaaatggagcctttcttccgcatggaaaatatgaaatttagctaa

SEQ ID NO: 534545 - DNA, 3201 bp, Stenotrophomonas maltophilia
gtgtcaattactgagctaagcgaagctagagagcggtccgtcgagaagattcgatcctggatgatcggcccgtcagatggagaagaggaagacttcgtcggctcccctctgcttcgatacatgatgggaatgctctatccagttgaaaacaatcagattgacctggcagacgatggaactacggatgatagccagtccgccgacgatgacgccgactcttcggcctcaaaccctgcccgccgacagctcccatcgtcactcggaatgagctttcttgtcgggcctgatgcctgtctggaatgtgtagccgaggcagccctgtacaaggcgtatggcgctaaggctactggagagcgtggtaggcgggcttggcgtcgagacaggctcccttccgacatcgaaaccgttcaagtgatgaccggacaggtcgagcgccttaccctcggcgggcatgccaagctccacatcaacgcgcgaccttggggaggggggcatctggttacggtgacgttgataaacgtaattgatgccgggaagaacgtaatcgaccccgctaaagtcctctttcaggtcgggctttccgtgactgtatcaaagggggagcttcttccgtatccgtccgctcgttccgcgtcggcgagtagcgacgatgaggcggaggttagatacctctatcgtggatcgcccgtgtacgcgagagggcatggtgttgcagcggagtgggaggaatgtgctgatggtcgtcctaggatggttcgcgcatcattcatgcccaaggcagaggtgcgcgctccaaccttcgaaattcagtcagatcctctcgtcgacgaacgatacgccagcgttgagtatctcgcgttcaataatgatgtcgaggagcttaaaagggtcctggcaacggtgagctcatcgttcaggcgctgggttaagtctcaacacgagactgcttcgaggaacggcgaggtagtcggcgtggttctggcgaaacggtctgaagattggtgtgagaggatagatcaaggcatcgaacttctctctgatccggttgcctatgagtcatttgtgctggcaaatcgcgcaatgtactggcaaatgatcatggcaaaggaggcgcggaatggtccattctctgttcaggatggccgatgcgtcccgccattgcgtgcgggacatgatttcgagtggcgaccattccagattgccttctttcttggcgtgcttccctccttgcttgagtcggcatctgcgtccgttgctgacgcattggcgattagggatgaccgcgacactgttgatgtcatttggtttccgacaggcgggggcaaaacagaggcatacttgcttgttgcggctttcgaactgataaggcgccgactcgttcatggagcgcaagatcagacgtgcgctgtgctgagtaggtacaccctgcgaatgctcactgcccagcagtttcagcggaccgggatgttggtgggcgcgctggagctaatgcgtcgttcggacatggcgcgacttggtagtcgtccattcaccgtcggcctatgggttgggaagagtctcaccccgaactacttcaaagacgcggtatccgcttatgagaagtggatgcgggcaccgtcgacggagaagaatccgttcttgctcgatcgctgtccagtttgcgggacagctatagttgatgatgtctccggaagctccggtgtgctggcgagcgaggttggattcgcattcagatgcatgagtcgatcttgcaaattcagagatgagattccaatgcaggtcgtggatgaggccttgtacaggtcaccaccgtctatattgctgggtacactcgacaagtttgccggtcttgcatgggatgaccggccccgtgccttctttggtttcaatgaccgaagcggtcctccgccttcgctagttattcaagatgaattgcacctgatctccggccctttaggttccattgcgtcgccgtatgagcttgccatcgattcgatcataaaatcgcgtgcagctggtcgcggtcccaaggtgattgcctccacagcgacaattcggaactctggggaacaggtgcggggaatctatggaaggccatccgcggtatttccatcgccgattagaagttgggatgacgcattcttctttcgattgcaatcaacatcagaagtgccaggtagactctacgtcggtgctatgggtcaagggactaccacgcctgtagtctccatggtatggatggcggctgcgctattgcaggcaagtaaggaggtggcgctgccggctaagcttgatgatgcgtattggactgtccttgcctatttgaacagtcgtcgtgaattgggacgcacgatcactgcagcatcacaagaaattccggatcgaatcaaggccattgcgacaacatcagacaatgttcgtcaggtcaacaagattatggagctgagctcgcagatggcgagtgacatgggcgaagcgattcgtacccttcagagaaagggaacgccttcaagtccggcaacggactttgtaccctgtacgaacattatctccgttggggtggacattgacaggctgggtctaatgctaatcaatggacagccgaagctcacctcggagtacattcaggcatcaagtcgcgttggacggtctcctttggtcgcgcccgggcttgtggtcacactgtattccccggcgaaaccccgcgatcgatcgcactatgaagattttgcggcctatcatcaatccttctaccgctatgtagaaccaacaagcgtcacgccatatgctccccctgccagaaaaagaactctgcacgccgccttgatctcaatggtgcgacacgcgaccccttactcatcgaatgatcaagcgggtgccgttcctctagatgacgctgttgtagtcggccttgtcgaacagttcaaaaagagagttagatttgcggatagtgtagaggcggatgaagtctggcgcgaaattgactccatactgcatgtctggaaagaacagaatgaggcgggaggaaaggtagtctacgttagctcaggtcggcaattcgttgggactgagaccgcgttgatcagagatttcggagatccgccaaaatgggggatgttcgaaacgatgcgatcagttcgcaatgttgagccggacatccatcttcgtcccgtcggcaagagtggtgcaggaaatgactag

SEQ ID NO: 534546 - DNA, 1662 bp, Stenotrophomonas maltophilia
atgaagctgatacccaacagcccctgcgttgagacgaccggcaccgagcgccgagtattttctttactccgtaacgttgactggggtggggtgacaggatttgcattgcattctctaaacctcgcggagcacgagtatcagcgatggggcgagattgacttcttggtcgtgggcacgaaagggctcattgcaattgaagtcaaagggggaagcctctcttgttccaatgggcaatggtgctatgaagatcgaatgggtcgagtagtgcgccgaagtaagtcgcccatcgtgcaggccaaggacgcattcttttcgctcgacaaaaagtacctcggaccggcactcgggagaaatttcgctcttgatgccccggccggtttctgcgtaatacttgcaggcatggctcgaaaagatatcgatcacataatcggtggtccagagcttcctgctgcgctagtaggtactcgagaagatgtggccaatccagcgagccttcagaaattcttgacgcgcgtcgcgatgtattggtcggccaagaatagatccaagggatcgattcaagcggatgacgtgaagcgaattctccagctgctacgtccggagttcgagcgagttcgctcgctcgcattgacgcgtgaacaacttggtatcgagataaaatacctcacatctgagcaatactcaattattgatcattgggaaggggctaagagaatcctctgctcgtctgcagccggttgtggaaagacgcttctcgccgtagagatggttcgaaggctgagggcttcaggagagaaggttattttcgtagtcggtagtaattcgcttgcggacgctttgcgatcaagtttggatctggatggcgtggtgcttggccttgacgatctggactccttatcgttgaaggcaaaagagaagacaagcactctgataatagatgaggggcagcagctcctcacgcggaggcagttggatatccttgatgcgacattggaaggggggctggcttctgggcggtgggtctggttcggcgatcaaagctatcagtcgtctttgcctgaagttgaagcgcgcgagtgcttcgaggcgctaactaagatggcttcagttgcgccaaggctgacgagaaactgtagaaacacgcccgagatcatatcaagcgttgaacttgcatccggggtccctcttggtcatgcaaaggtgcgtggtcgagggctccatccgaggttcgtggaggcagacagcctcgtgcaagctgcaagcatagcgtcaaatcaggttcatcaatggaacgccgaggagattcccattgcaaacatggcgctcctcactgataacgtagattctggggggctcgccgccttagttgcgagccagggcaagttaagtgtcgaaaaatggaggcgggcatctgcaagttccaatgcgctgaaccattcatgcatcgacgattttcgcggcctggaagctgggtttctgattatgtggatcggcgatgatgacttgaacgatgaatcgctcggacgcgctctctaccttggaatgacgagggcaaacttcagtcttctcgtgatagcgacgccaaagaatatagcgcggataaaagggtacatggcagacaatgcgctaaggccgaaggagatggcaagtgtcaattactga

SEQ ID NO: 534547 - DNA, 180 bp, Stenotrophomonas maltophilia
atgtccagcgcgatcgagaccatcgccgccagtaccgccatggagaaacatggttccaataccgtagaacagccatcgctggaacagctgcttggtctggtcgaacagaaggcacagaatgaacagtggtcccaagccgatgaacagggccatcgcaacctcatacagcagcagcattga

SEQ ID NO: 534548 - DNA, 171 bp, Stenotrophomonas maltophilia
gtggtcgtggccgggcgcggcaacgacaccactgcactggcggcgcaggcctacttctgggcgcgtgtggtctatctgcccctgtacgccgcaggcgtgccctacgtgcgcagcctggtgtggctggtgtcgctgctgtcgatcctggcgctggtgttcgcacttctgtaa

SEQ ID NO: 534549 - DNA, 627 bp, Stenotrophomonas maltophilia
atgacacgcattcactcctatgtcgtgcggtacgacagtggttttgcgcccaaccccttctacagctactgcacgctcgcgacttgcaagcccagtatccgaagaagcgctaacgtcggtgattgggtggtcggcagcggaagcaatgatcgaagtgtccgacgcggtgggcatctggtctatgcgatgcgggtcaccgaggcaatgacatttgacgagtatggccgagacccgcggtttgaatccaagaagccgtaccgcaacggcagccggaagcaaagttgcggggacaacatttacttcagggctgcggctggggttgcttggcagcagcgagactcatttcactcccgctccgatggctcgctcaaccctgaccatgtggctcgtgatacaggcgtaaacagggttctgatcagcaacgatttcgtatatttcgggggtgagggccctgcgtttcctcatgagttgcaagatcagcacggtcgccctctatgcaaaacgggaataggcctcacggcctttgacgatgcgcaactagctgcagaccttgagcaatggattcgcagcttggcagtgagcggctaccagggcgccccattcgaatggctgactcttcgcaggtga

SEQ ID NO: 534550 - DNA, 141 bp, Stenotrophomonas maltophilia
atgatctcgttgaccttgatttcgacagtaaatttggaattgaggaacagctacccagagaattcagaatccgagtcaatcaacgaggcagtggtaagagttatctccaatggaatggcgtattcattggagaccctttaa

SEQ ID NO: 534551 - DNA, 582 bp, Stenotrophomonas maltophilia
atgagcgcaatcttcctctcggccagcgtgccacttgtagggcgtggcacttaccacgaaaccgccgatccatttctcatccaatgtgcggtgagagaactggtcatagcagtcattcgtcagcacaagatcgtgtggggtgggcatcctgcgattaccccgatgatttggagcatatgtgaagacttgggggtcgactactcgcagtctgttgtcttataccagagcacgttttttgcagaaatcttccccgaagagaacaagcatttccaaaatgtagtcttcaccgatgcagttcccaatgacagggcggcaagcttgcttgtcatgcgcgaacaaatgctttcgcgtgaggacttgagcgctgctgtgtttattggtggaatggatggggtagaagctgagcacgagcttttcaggcgcttccatcctgcagccaaggtggtcccggtgtcctcgccaggcggagccgcgctgaatctcgccaaggaccatggctatttcaccggtgaagcgcttgccgatgtggactttgctcagctcttccatgcgcatctggcggtgcccttggctggcaaatag

SEQ ID NO: 534552 - DNA, 288 bp, Stenotrophomonas maltophilia; identical to SEQ ID NO: 342971

SEQ ID NO: 534553 - DNA, 756 bp, Stenotrophomonas maltophilia; identical to SEQ ID NO: 344384

SEQ ID NO: 534554 - DNA, 222 bp, Stenotrophomonas maltophilia; identical to SEQ ID NO: 346749

SEQ ID NO: 534555 - DNA, 993 bp, Stenotrophomonas maltophilia; identical to SEQ ID NO: 346750

SEQ ID NO: 534556 - DNA, 1086 bp, Stenotrophomonas maltophilia; identical to SEQ ID NO: 498911

SEQ ID NO: 534557 - DNA, 663 bp, Stenotrophomonas maltophilia
atgctactgaaacttgatctcaggctccattggcgctttgctgaacttccgcttgcgacgcagccacttccagtatccggggaacccgaatacaacgagcttacgctcgtagtcgatctgcacagcgactgcttgagcgtggaatgtccacataaacgttgtgtagtcggaacagtccttcgcttgatcaagagtcggcggcaccacgctcctaccgcgcagctccacatcagtgaatatggcgccgactttctctgcagttcgagcgacacccgccactatgtgtgtcaagcgcgcatcgggcagctcttgcagcggcacctgtctcagcgtcttaaccaactggttgaagtactcgacgtccgaaacaaaaggcacaccttcactagcacactttccgatgtgaaaactgttggcggaggacacggtacagctgacggtgagcagctgttggatcaccgagactcgctggaaaagatcccggcggtgctgttgcgtcgcgatgcgagctgcccagtaaatcgcgagagcagaaagtaccgcctgagcccaagatgcggcggacgaccaccagctgagcggctggcagaggatctggaaggggtagcagtagagcggctcggccattgtgatcgcctatccatggtggagggcaaagcatga

SEQ ID NO: 534558 - DNA, 345 bp, Stenotrophomonas maltophilia
atgcaacagctcaacatctctttcgaggtagggctggaccgccgctaccgcgacatgcgcgagtgcttcgcctcctgcgtgtactccaaggggctgggccgcgtggctgctgccatcgacgtggctccgtccaatctctccgcgatgctcgccggcgaccgcaacctggacagcacgctggtcgagaagtacatggccgagttcggcgataccacgccggccatgtactgggcggctaagcacctccagtgcgctacgacgcggcagcaagccgctctggcccagctgccgtcgctggtcgaccagctcaaccgcctgatggctgaagcggggaagacgccatga

SEQ ID NO: 534559 - DNA, 480 bp, Stenotrophomonas maltophilia
atgacacagttaacccagcagaaactaaaggaattcttcgcgtatgagcctgatacgggcctgttccgttgccgaatcgggaagcgtgcgggacaggtcgtggggcacgagcatcacggctacatcaagatcagcatcaaagggcacgggggcatctacgctcaccgtctagcgtggctctacatgacggggagcatgcccctcaagcacatcgatcacatcgactgcgagcgcagcaacaacgcttgggcaaatcttcgactcgcgacgcccgatcagaaccaagcaaacacgcggcggacaaagcgaaacgtcagcggcgctaagggtgtcttccaccaccgtggcggcttccgtgccgtcatcaaagtcaagggccgacgaatctacttgggcgactacaacaccttgcaggaggcagctgctgcctatgccggtgccgccaaggttggtttcggcgaattcgcgaggttgacctga

SEQ ID NO: 534560 - DNA, 525 bp, Stenotrophomonas maltophilia
atggatttcagttcaatcgccacggcgattgcctcgctcaaaagcgcccaggagttggccactgccaccctgtccgttcgcgacttcaatcagtcggctgcggctatcgcccagatcaacgagaagctgctcgcagcccagcagggtctgcttgcgcacaacaccatgctcctgcaactgcagagcgagcatttccagaccacacaggaactgcgagaactcaaagaatccatcacggagaagaaccgctatctcctggtcgacctgggtggtggcgtgttcgtgtatcgagtgaacggcaccccacaggagggcgggaccggccagccaggactggcggagccggagcactacgtctgtcagccctgcctcgacaaaggggacaaggcagttctccagagccgcaacgacttctggcactgccccctctgccggcaggcttacgccgctcgcggaagggcttcgcacggagcaacgttcgccatcaccgaggacgacatgccgtaccggccgaggggattctga

SEQ ID NO: 534561 - DNA, 390 bp, Stenotrophomonas maltophilia
atgaagtcatctcaaaacgcaatcgccctggggctcgggattcttacggttgcttccgcagcgatcgccattcacagcttgggacgagtgagctcgctcgaaggcgacttggcccagcgatccttagagattgcatctctccatagcgatctgcgcctgttgcgcgcccagatctctatccaacccggacccgccgagacggtggccaatgaatatgacgactcgaaactcaaagatgaactagagtcgctgcgaatgcgcgttgattcggtaagcagctacgtcggcaatccgccggacgctttcggcagcaccagcctcaccgaccggatagatcgcggattccgcgatatctgcgtaagcacgtcccataggatctgcccagactga

SEQ ID NO: 534562 - DNA, 306 bp, Stenotrophomonas maltophilia
atggccttccacactgctgccgatgtggcccgcaacgcccagcgaaactacgacgctcgtcttccggcagacgtcgaggtggaatttcaagacgcctgcaacgctctggccatcgcctatggccgtgaaggtgacaccgccgaactgatcgcggttgtggccggcgccgagcgtgtcctgtccttcctgacttcggctgtcgaggtcccggcgcacctgctgccgagcctgcgtgatctgctggacatgcaggcccgagtcacccgccagatcgagcgcgaagtgcgcgccgggggggccgcatga

SEQ ID NO: 534563 - DNA, 294 bp, Stenotrophomonas maltophilia
gtgagccgccgcatcgacgtgctgcaggtgatgtacgggctgcaatgcgttcttgcgatcgacctgccgaatgctgaccccgccaacgagctgggccttgcgcgagaactgatcgccgaagtcttcgaggcagcgcgtgaagtgctgagtgtcagcgactttcccgacctgctccacgccgaagagcgcctgcgcgccgctctggccgcctgcgaacccaccgattccaaccaccagcaggaagccatcgacggcatctgcgcagaaggagagtgccatgaagtccgatcgtga

SEQ ID NO: 534564 - DNA, 291 bp, Stenotrophomonas maltophilia
atgaagtccgatcgtgaaatcaagcatgccagcaaccttgcggatgccttggctggtcacgcctgcgccatttcgttcgctcagggcgacgacccttgcctcaaagccacgctgctggaagcaagccaccacatcgacacgaactgcgtgcaggtgtctcagaagaaggacggcctgctgatccgcactcttcgcggcgaggcccgttacatgacctggcgcgagcgcatcgcctactggctgctgcgcggcaagaccgagattcaccctcgcgataacaggaacgcctga

SEQ ID NO: 534565 - DNA, 270 bp, Stenotrophomonas maltophilia
atgaatagttgtgaccgccttcccgtgcgctaccacgtgcacctggacgtcgccggcgcactgacgagcatgaccgaccaggatctggaggggcttttccagcgcaacccgcccggagagccggtgactgcagcagaggctcgcagggtgctgaccgaccacttggccaatggccgcagggtcatcccgctcgctctctgcgagggctttgactacagcggtaccggttgcccgggccacccagcagcagctgaggtagaccatggctga

SEQ ID NO: 534566 - DNA, 177 bp, Stenotrophomonas maltophilia
atggctgaccccatcaaggtaacggtcaccgaccccgctacgggcatggtcctgcaggagcggatcctcgtgaacgactatgtggtggtctgcgccggcgatcggtacgtcaagagcgttcagatcatgggatccacgcacatgatcgcagttgcgaaggagaagccgaatggctga

SEQ ID NO: 534567 - DNA, 366 bp, Stenotrophomonas maltophilia
atgcgcgccggtgtggaggaagccttccgatgcgcccggctgcagcacggctcggtcatctacgacgggcgggagtggtggatcggcactgacgatttcgctcagttcacagtggaccgaggccctgcccccacattctccgtgccaatcgtcgatgtcattcgctacgcggatctgagcgtttggtacggtgcgctggcccgtgaggccacaaaccaggttctggcctggcccctgccgttcgatgcactcgagagcgtggcgggcttcacgccagaagcggtcaacaccggctggattctctacggactgttgaactgcgcaggcctcagggcaggccagatagttcttaaacgatattcgtag

SEQ ID NO: 534568 - DNA, 378 bp, Stenotrophomonas maltophilia
atgctgcaggacctcgtgcagctggcaaacatgggattcggctttggggtcaccctttgtataggaggtagcctggtcagtggcaccgtcgtctctggacgcaagtacgtccagtccattttggacaagacgattggagagggcgtcaaagaaggcccacttcgcgacgcgctcacaaagcgattctcagggtacctggatctttacccagaatcgaacaccccgattgatgagtcgaccccgctaccagttttcatacatctttcaggcgccaagttctactcaccagggaattcactgtccacccccgccgatggtgtcatctggagagggttgatcagtgatgtttcggggtttaacttcggcaccctcagctaa

SEQ ID NO: 534569 - DNA, 684 bp, Stenotrophomonas maltophilia
atgggttgctgggcactaaagttcgactgggccgcgatcggttcaatgtttcagggcctctctgccattgttgtcgcaatcgcagcagtggttggcctgaatgcatggaggaagcagttacaagcaagcaaacaccaggcgctggctgaggatgcgctgagtttggtgtatcgactgcgagacgcgatcgaccatatgcgtcaaccctgggcgttcgtcggggaaatgaacaaggtcgagcgtctggagggcgagtctgaagagtcctttgagggaagaaagcactacggcgtggttgaggtcaggtatcgcatgcatgccgacgctgctactcagctagaggcgattcgatatcgagtcagagcagtgcttggtgacgaagcagcttccggggttgaggacgttctggccgtcttgcgtcgagtccgtaacgaagccagcaacgcggtccggaacaaacagtcgcttgtcctggcggcgtcgcggctgacgggctcgcgctcggatgagagtacgaaggaatatgaccttgcccatacccgattggctgaatcggagtcttggatctgcgctgtcgaaggtgacggagatccagcggcgaaggcactgaagtctgctgttgctagggctgagtctgcgttcagagattttgccatgatgaagccgcagcgttcacgtagctga

SEQ ID NO: 534570 - DNA, 972 bp, Stenotrophomonas maltophilia
atggggcgtaaccgcttcatcaacggggacatgcgcatctggcagcgcggcaccagcttcaatgcgagcggaggtgtgggaaaactattctgcactgaccgctggtttgtcgaacgaagcacgagcaccatggcgtgcgcgaaacaggatacgtctgccagcgaccgggccatcattggccctgtgcctagttatatgcgcgttaccgtggcagcaagctccggcgctggccactacgcgttactggcgcaagacgtcgaggatgtgctcacgttcgctgggcaaactgtggtggtgtctggatggttccgtgcgcagtcgaccatgaacatcagcctggaggctatccaggtcaccaacggaggcagcggcaaccccgcgttcgctaccgcttcgcaacaggtaaatactacgtggcggtatctatcgtttgtcgtttcgattgctgcgttcacacaggcaatcaatcccggatcgcgcctgcgtcttcgcttctggctgtccggcgggtccgactgggccagttcgaccaacgtaggtacgcagaatgggtatttcgattttgcgctcctgcaggccgagcagggcgtagttgcttctccgttcgagcgccgatttgaggccatcgaaacgctgatgtgccagcgattctgggagaagagttacgacattggtgttttccctggcgcggcgtcttctttcgggcgatgtggcgagttcatcggcataacccctcgaaacgcaggtaactcgtacctgcagaagtttcttgtagcgaagcgtgtcactccggctatcactgtctatgcttccgagactggcgcagccaatagcgtgtcccaagatgacggcaccaacgcgcctgtgactacgctttcggccgtcggccaaactggcttccagctgacctacgccaattcgtcgggccgatatggagcgtctttccactacgttgccgacgccgagtattag

SEQ ID NO: 534571 - DNA, 507 bp, Stenotrophomonas maltophilia
atggagcgtctttccactacgttgccgacgccgagtattagtgtgtaccagctaactaaagaccctgatgtagtccactgcgtaggcactggtgcgtttattccacgcggccactacctgtggccgaccgaatggctgctgaccaacaccccgctgccgatctcgccgccctacgaattgcactcgcccgagcattaccgggctatccgagctgcagcgtggaactggatgaccaagttcgtgcaggaacgccgctacgactcgatcgagagctgctgcagctacttcgacagtggggtggagcgctaccggcaggaagcacgcgcgatggtagcgtggcgcgacgccgtgaatcaggcactggaggcgttggtggtcaaccctccgtccaacatcgagacctgggagcaggtgcgtccgctgctgccgcagccgaacgcattcccttggccgtccagcgtggagcttccgctcggggtaggtgacggccccgcggttcaactttga

SEQ ID NO: 534572 - DNA, 1902 bp, Stenotrophomonas maltophilia
atgagcggcgcgcggtacaccggctggacgccgatcgttgttgtcggcgaccgggcagcggcttcggtccacgtgccggcagccagaaagctcctgggatatgtcgtggaggaggccgcgcgcaacggcctgggggtggcaagtgccaagcaggaggcagacgacggaacggtggtgttggccgagaagatcggtgagctgactcggttgacgatcgttgcaccagaacccgagccgccactcgaacctatcgatcccgcagggggctttatcgtgtggcctcgctggaacgtgcacacgggtgatccggccgaccgtgggtcactagttgaccccaccggtgagaatccggcggcctggctcgagttcagcggtagacgcatgatcacgcactactggaagcgctgggacgttgtcgacaacatcaccgcggctcgctacgagagctacaaccagccagaccgctatcctgccggtctccacttcttcggcaatgtcgactggaaggatggccaggatgtagctctgtccttctatgggtatggagcccggtacgtccgcgacctgaccctgatcgatgaccgcgcacgctggatcttccagcagggccagatcctgttcgatcgggttgcctaccgggatgcgatggtcgatacacctccggactatctgtcctggcggctgacgtccggttgcctgcgcaggaggactgatgggcatcatgagctggtggtgacgttcacccactatgtgaccaatcaaccgaccacagctcaatcggcgttcgttgcgttcagagtcaatcgaagcgagggaacgcctgaaaagggcgattgggaagtggtgcacggcagccaccgcctccttggaatgacaccgggcaagatcaatccacaggacgaatcgtcagcgaacggtttcaacgatgctgcgttgccatggttcttcaacgctgatgggaccagggcaatccgcacggtgagcagtgagccgaccacggtgtttgggctggtcaacacgatgacgcaggaggtagagatcgccgatggtgacatcgaacacacgctgacccgagcggactatctgatcgggaactacaccaatgcgcttggggcgttcgcactggttgaaccgacccgtggcttggtggcctcggattacgctggggcagagcggaaggatgcctatctggcgcttcgagtgagccagggtcaggcacccaccgaggcgacagggtaccgcggcaccttgcgagtaattgccgtactggaatttgacggtggcgagatcccgctgatggaccgggatttcgccgttggcaacgatcgccaggactaccaccacctggcttgcatggatctgcgccacaacctgttctgtggatggcggatccaaggcttcaatggcgtccacaccattcagccgtttgcgtatatgggggggcgcttggtgtatggcgcggtcgagccggtgaactgggatccagccggtggccagccggcaccatctctcgggctcgacacccggccgcccgggattgtccttgatggtctcgtgttcggttcctactggacaggggcctccggatcaggatggggcccgcgggacggcacccagcacggtgtgatctggcgcaagcagccacgcgaagggctgcttttcttctcggctgcgtccagcctcaggacagccatggccgaacgacagggcatcagggacttcctcggctttgattggagcggtggatggaactactgcaagggccgctactgcgtgtcgatccccgggccttacaccggaacgctcaactacctgacgggctacgagctgggcgcggtcacgggcgtcatcgccgacgaccggcggttctacccactgacggtactgccaaaacccatatag

SEQ ID NO: 534573 - DNA, 738 bp, Stenotrophomonas maltophilia
atgctgtctaagccaccggcggcgacgttctttcccccgaagcctgccagggacgctttgccctaccgcgcggcctacaccttctgcggtggcgagccggcgaaggggtactggcggcagtcctgtagtgaagggacgatggccgtcccaagcaatggcgcagttcaactgccgcaaaacgccgtgatccttggttacgagcaatccggtgggagcagctacgttcggtaccaggtttgtcgcagcgtgttcgtccagacagcacctcctgggcccgtgacctgcactagctatccggagcaaaaggcgcagccagcatcgccccggattcccggccgcttcgaatacgccagcgtgtttgcgtggaacgccggcgcccgcagcgatgctgagctcgatggcgacctggctatgaggctgaccatgaatcgagtggttggtgtcgttgtgggtctctgtgcagatcgtgaccggctggaggatcccgcagcaattctccacgggctgtacttccatcaaagcccggggggtgtgatgcagacctgcgcaatcgagtctggcgcgaaggtctgcgagatcaggacctacaccgattctgacgcctgggaggtccgccgggttggaggcgtcatcgagtacgtctgcaacggcattgtcttctatcgctcgcagcaacgcagccatggccaactgttggtcggctgcgccgtgtttgccacgggagacgtcatcgaatga

SEQ ID NO: 534574 - DNA, 1482 bp, Stenotrophomonas maltophilia
atgaccatcgagtttgtgtccttgagtgccgtagaggtcgaaggcacagcgcgctgcacagtgatgcttcgcgcgcgaggtattggttctggcttggcgggtagcggcaacgcccaactcagacttggcggtactggcgttgcacacgtccgctttggcggtgggatcgatccggtagtgccagcccacggcgccgcggctctgcaactgagcgcagaaggggtgggatcggtccacctgaccggacagggtagtgtcttgctcgacctgcaggccgctggcttccaggctgctcctggtcatggtggcggcgcagcgaagctggcgctgcacgcgcgggggcgccagctctctgagccgatggcttatgcggggctagaggccattcctcgcatgatctcggccttcggcgggttgtggtttgtcagcccacgggcggccatggccgtgggacaggcccagtcaaccctgccgacccatgtgcttagcgaagccatggcagtggctgcaggacggcgtagcacccagtcgagcaagagctcggtcaccgacgcgctgagccttgaggacacggcggcgatcgtctaccagctgctggtagatgagggggtcaggttcgccccggcggtgcaggcgactgtttcaaagctggaacgagttctggacaggcttctcatgcttggcgcctgccagtcctatgccgacgcagtgaatgcgatcgctggaggcctgtggttcggagccttgacggaagccctcaagtccgagcgcgtggtggaaagcctgatcgcttcgggggtggtcgggacgctgcagcgggccgcggatcgcctggccgaggcaatgctggtcaatgccgaagcgttcggatctggaacgggtgtggtgctggtcgacgagcgcatgttgaccgcggtaggtgaggtcagtagtgcagaggctctgcagcggttgggcgacagcctgggatttgtaacccgccttgcgctcgattccggcgagtacgtggcttgggtgctgaacaccgagaaccgcgcgctgagccgatacaccgagtatccgttcaacagcttcgccaagatcggcggcagatactacggtgcggcgagcaacggcctgcaccgacttgaaggcgacgacgacgatggccaaccgattgccgctcgcatcaggctcggcctttccgccttggggacacgccgcctcaagcgagtgccagaggcatttgtcggctacaccagcaaaggcacgctactgctacatgtgatcacggtgaatgaggaatctggccagaaggaggccgccatctacaagattctggagcgaccagcgacaagcacgcgcgagacccgctggaagctgggcaagggaatcaaggcagtcgacttcgacttcatcatcgagaacgtggatggagccgactttgatctggcggcgatcgaattccggccgatctatctcgaacgacggacgagggggtag

SEQ ID NO: 534575 - DNA, 333 bp, Stenotrophomonas maltophilia
atggcggggccttgcttttggcgcgagttgagcggtgtgatccagcaatgcggcgaggatcctgagcccgaggaactccagctcgtggtcacgaacggatacgcctatccctggagaaatccagagttcttctatggcgccgccggctttgtgaacggcttggacttcgagttgaggattgaccttgaaggtgggccaactgtcgttccgatgattttcgagccagaagggcgctacctcctggatgggtacatccccgtcgatgcaacaccaggccttgcggtccaaggcagcaatcagtggaaggttttcatcttgcttcagtggtcttga

SEQ ID NO: 534576 - DNA, 654 bp, Stenotrophomonas maltophilia
atgctggaagctcttttcgtggcggccacgaatcctacgccggcggctactcccgccgcaggtggcacgtacgattggaagtggctggtgccggtcgcaactctgcttcttggcttcggtctcaagtgggtccaggaccactttacggagaaggctcggcagaagcgcgacgatgggctgcgccgccagcagcgctacgacgcactgcggatgcggcgcttggaggcagagcgcgcgaacctgctggcgctccagcccctagtattagccttcatgcgagccgcgaccgacgcctacaaggtgaagatgaaggccttcggagagggtggggtcgccgcagcctatctgccaggcagttcgatggaacgtgacgctgcgctgcaggcgatggccaaggtcaatgacgatgtacgtcaatcgtcggccgcgatcatccccctgcagtcacgacttcattctgcggaagtccggaccgcgttgaatgagctgatcgatgttgtctgggcaaccatggactccaagaccagcttggggatgatgaggaactggcagcgggtcgatcagccgcacaacgaactacacacgttgatgggccggatcatcaagcagcttgaggatgagaatctgcagctcggggatccacctgagaagtga

SEQ ID NO: 534577 - DNA, 363 bp, Stenotrophomonas maltophilia; identical to SEQ ID NO: 500400

SEQ ID NO: 534578 - DNA, 738 bp, Stenotrophomonas maltophilia; identical to SEQ ID NO: 500372

SEQ ID NO: 534579 - DNA, 399 bp, Stenotrophomonas maltophilia
atgaagcgcaaacacctggtggtgctggccgcggcactggccgtactggtgctgtcggcatcctgggcttacgccgatggcgttggcccggtgaccgccattacagcctgggccaaggaacagatcacgtcgttgtgggccgatttcaccgacttcatgaccgacctacagacggacttcatcgagttggtgctgtcctacgtcaaggcgttggtctacctgattccggcgccggacttcctgtctcaaatgagcatctgcgcgatgctcaccgcggccggtccgtggacggccttcatcgtcgcccagcttcgcgttggcgaggccattgcgctgctcaccgcggcattggtgttccgcctggtgcgcgtgttcctgaccctattccagtggacgtaa

SEQ ID NO: 534580 - DNA, 192 bp, Stenotrophomonas maltophilia
gtgatcccggctccgcccatcttcatcacttcattcgccgagcttgcggagttcgatatgggcctcttcggatgtgccctgctggtggggcttgttgtgttgctggcggtgatttccatcgtgattgaggaggcatggttggcgctccgtcgcctgtggagtctctggaaggggcgcgccaatggccgttga

SEQ ID NO: 534581 - DNA, 168 bp, Stenotrophomonas maltophilia
atggatgcgaccgttctaggcatcgtggggatgtgcttgatcgtggtgatcgtgggcttggcccggatcacggcttggtggctggaccggcgtgagtacgccgcaggtcagggggcacgccaagccatcgtcattgcccaggcacgcgctgaggttcgtcatgactga

SEQ ID NO: 534582 - DNA, 897 bp, Stenotrophomonas maltophilia
atggcgggagccaagcgcgggtgtctgttcgtggtaacgctggtggtggtgctggccgccgtcgtggccggcgcgggcgcgtggttcttctaccagcagacccggttcgccgatgccccgatcaccccgtccgccgagagcatggtcatcgccagtggcgatggcatgaacacggtgctgcagcaccgggtcaccatcgtggagggttggaacatccgccagctgcgtgccgcgctcaagcgcgccgagccgttgctgcacaccaccgacagcctcgatgacgccgcgctcatgcagcgtctcgggtttggtggccagcatccggaaggccgcttcctgccggagacctacgtctaccagcgtggcgacagcgatctggacgtgctcaagcgcgcctacgccgcaatggaaaaggcgctggatgaagcctgggaaagccgtgcgccggacctgccgatcaacacgccgtacgaactgctgacgatggcgtcgatcatcgagaaggaaaccgcgctggccactgagcgtccgcagattgccggcgtgttcatgcgccgcctgaagatcggcatgcgcctgcagaccgacccaaccgtgatctacggcatcggtgcggcgtatgacggcaacatccgccgccgcgacctgaccaccgatacgccgtacaacacctatacccgtgccggcctgaccccgaccccgatcgccatgcccagccgcgatgcgctgatggcggccgcgcaacccgcagcgggcgacgcgctgtacttcgtcgccgtgggcgatggcagtggcgcgcacgtgttctcgcccagcctggaccagcacaacgccgcagtggcccgctacctgcagcagctgcgccagcaacgtacccaggagaccccggcgcaatga

SEQ ID NO: 534583 - DNA, 1983 bp, Stenotrophomonas maltophilia
atgcgcaggattgtgctggctgcactgttgggagcggctgtgggtggggcatcggctgcaacgctggacctggatcgctatctgcggcaggagtcgtttaccgacatcaagatttcaccggggggcgagtacatcgccgcgacggttccgctggaggcgggaaccgcgctggcgatctatcgcattgccgacatgaagatggtcggcagcttccgtccgccccgcaacgatcacgcccacaccttcgactgggtcagcaacgagcggctgctggtgggcatggcacagaagttcggcgtgctggaccggccgacgccgaccggcgaactgttcggtatcaatgccaacggcaagggcggcgagctgctggtggggtaccgggttgccgaccagagtctgggcaccaacatcaaggtcaagccggcaggactggtggccgcgtacctcagtgatgaactcaaggacgatgatcgcaatgcactggtgaccgtgatcccgctggtcggcaattcgcacgcacaggtcgagcgcatggatgtggtcaccggtcgccgcaacgcggtggcacgggctcccattcccgatgcggactttacgatcgatgagcagggcgaagtgcgtttcgcacgtgctgtcgttaccgatggcacgcagaagctctactaccgcacaggcagcaacagcgactggatcctgctcaacgatgaatccttgagcaagcacatcgagttgcccctgggcttctcggccgacggtcgcctggcgtacctgcaggtcgagcaggcagacggacctgatgccattgtcagctgggacccccagagcaatgaacggcgcaccctgctgcgcgatgagagcgccgaccccgcgcgcatcatccggcgccccggcagccgcgtgccggtcggggcactgttccttggcggtgcgccgcgaacggcattcttcgatgacgcctcggacgaagctcgcctttaccgcagcctcgaagcgggcctgggcggcgcggcctacgtcacctccagtacacgcgatggcaagacggtgctggtggaaacctggtcaggcagcaatccgggcgatttctatctctatgacacggttggcaagagtgcacggcacctgatcagccgcagcgactggatcgaccccgcgctggcggcggaggtgcgtccgatcagcctgaaggcgcgtgatgggcgtccgctgcatggcttccttaccgtcccgcatggccgcgacgcccgtgcgctgccgatggtggtggtgccgcacggaggtccgatcggtgtcgccgacgatggtggctatgacaccgaggcacagatgctggccgcggcaggttacgcggtattgcaggtgaatttccgcggctcttccggctatggccgggcccacatgcaggctgcgcgcaagcaatggggactgtcgatgcaggatgacgtcaccgatgccacgcgctgggcgatcgaacagggcgtggccgacaggaaccgcgtctgcatctacggggccagttacggtgcctatgcggcgatgatgggggcggtgcgcgaaccgggcctgtaccagtgcgcggccggctacgtcggcatctacgacctgccgttgatgtacgcgcgcggagacatccagagcgatgagtcaggcctggcctacctgcgcaactggctgggatcgcccaaggatctggcagagcgttccccggtgaatctggccgcgcaggtgcgggtgccggtattcctggccgcgggtggccaggaccagcgtgcgccgatcatgcacagcgaacgcatggaagctgcgttgaagaaggccggttcgccggtggaaaccctgtacgtcaagaacgaaggacatggtttctattctcccgccaatcaacgaacgtactacagcaggttgctggccttcctctcgcgcagcctggggggacaggtggctgggcaggcaacgcctgcggagaagagcagcgcgccctga

SEQ ID NO: 534584 - DNA, 411 bp, Stenotrophomonas maltophilia
ttgaccgttgagcacatcaaggccgccgcgggcgagcggtcgccactgatccaccagcagcgcgcggccatagcggttgcagcagcgctcgaaaccgccctgaccagcacgcgccccgccagcggcggcggccgcgcattgaccttcacatttgccggtgagccgcagctgcaggccgcgtgcgacgcctggcgcgcatataccctcgccaccatcgacacgcaggcgtcgctggcggagacggcgacccagcggctgacggcccagatcggccttgccctcttcgatgaccccaccatggacctgactcagatcgcgaacctggtgaccgctgcacgctcgaattcacaggcagcgctgttgccgacgatcaccaatgaagcaacggaggtcggccatgggcgcggctga

SEQ ID NO: 534585 - DNA, 327 bp, Stenotrophomonas maltophilia
atgactgccggcgcgatggtgagctgggcaatcacggtggtcggtgagttcgacagtgctggccgtaggatccccgaaagcgtggtcccgctactgcccatggtggacgtggttctttgggccaaggatcagcagcagccgctacgggttgacgttctgcaggagcgattcggtctgtcccgcgcaactgcgtaccggtggctggtggctctgaatgatctgcatgatcctgcggcagcgaagcaccggctgccaagcttgcggcagttgagtaccgcgctggggcgtgagcggccggcatcgggccacgaaggggcgacgggatga

SEQ ID NO: 534586 - DNA, 810 bp, Stenotrophomonas maltophilia
ttgccatccgcccgtgatgcgcggtcaagatggtgtcaaattcaacggatgatcatcgaatccatgcgtatattagataaccctcacgatcccctgccagttgaagccacctttgataggttcattgagttggtaggaggggctcgtgtcggttcaattgtgggtcagacacctgcattcgctaatgcagactatgttttcacagaaaagcagttcgttctggagcttaaagagctaactactgattggccactgctagaggactaccagcaaaagatcaacgatttgtggctcaaatgcgcgaatgatggtcgagtcacggcgcggcatttggctggcgacctgcagctgcccagggatgttcggcgagacttccttcagctcttacgcaaaccaatcaaacgtatcctggaaaaagccaatcgtcagattagggatacgcatgagaatcttcggcatcaatcaggtgaaggtatcttgctgcttgtgatcgacggtttgcgcagtgttgctccgcaatttttgatggcgctcgttgcaaagatccttcttcatgattattcgtcgataacgggaatagtgcttatcactgttaacgagtacatcgatgttcctgatgatgatttcgcgagattaatttggactccaagctatcaggaacgagcatcagataatttggttgatttcgtcgatgacatcgggcggaagtggtttgacttcatcgagcgagagatagggggcttcgacgatcgaatcgaaggtcctaacaaaggatggcttgagggcgcgaacttcgtcaggcgcgagtga

SEQ ID NO: 534587 - DNA, 864 bp, Stenotrophomonas maltophilia
atgttcaaccctcagacctcgccggataccggcaatgccacttcttcgccggcatcgccggttggtcccttgcagctcgacttgctgggtggcccgacgaccgcgagctctggaccggcagcgccccgtgccagccgttctccgtcgcgggcaaaggaaaagcccaggatgacgatcggcacctgtggccccacttccttcgcctcatccgtgcccgacggcccgctgtcgtcatgggagaacaggttgcggcggcggttggcaagaactggctcgacggagtgtctgctgacctggaaggaatcgactacgcctgccgggcggccgttgtcccggcttgtgccgtcgacgcgccccaccgaagggatcgcctgtggtttgtggcgcacacccaacgcgcacgtggtcgatgcgaaatcgaacgtggtgaagctggaaggtcggaagccatccgatccgcaggttgggttggcggaccaggtagcagcattgtggcccactcccacctccctggccccagcaaagaatggcaacaacgaggcgggcaactcggcggggttggtatcgatccgagcgcatgctctggcggctctatggccgacgccttgcgccagggatcacatgccagcgcactcgccggagtacatcgcggaaaagaaggcgcaagggcatgggatggcagtgctgccggattacgtgcagcacgctccccttgggacggggccggatggctcactggccacgacggaaaagcccggcgctttgaacccagcattcgtcttctggctcatgggattcccgcccgagtgggtaagttgcgcgccggcggcaatgccatcgtcccggaagtcgcggcggaagtga

SEQ ID NO: 534588 - DNA, 225 bp, Stenotrophomonas maltophilia
atgaagacctgcacgaagtgccaccggtacctgccgctgatcgccttccctcgcgccggcaagcgcggccacgaaccggcctgcacgccctgccagaacgacgaccggcgcctgcgcgcgccgctgccgccgatcgttcgcaacccgatgcaggtgcgcctcaacaacctcaccaacctgtggcacgggccggtgcgccgcgtgccccttcggagccacgcatga

SEQ ID NO: 534589 - DNA, 396 bp, Stenotrophomonas maltophilia
atgaagggcggccgctcaaccagcaagccgacggtggctcagcagcggcggatggatgccatcacccaaatcggctgcatcgtggcctacagccttggcattgacctcggcgacatgccgattccagccgaggtgcatcacctgaccgtcggcggaaaacacggcgccaagcggcgtgggcacgacttcaccatcggcctcaacccgtggtctcaccgcggcgagccgttctgcggatggtcggctgctcgctgcgaggagctgttcggcccgtcctacgcccgccaaccccgcaagttccgccaggaggtcggtagcgacgcctatctgctggacctgcaaaacaccctgatcgaaaagcacatgaaggagggcagcccatggcgagccgactga

SEQ ID NO: 534590 - DNA, 1593 bp, Stenotrophomonas maltophilia
atggcaatttatcatgcaacactcaagtccttctcccgtggtaagggcgagtcatccgtcgccgccgctgcttaccgtgccgggtttgatcttgtcgataccgcaacaggtctttaccaccgctactcccacaggcatggcgttgctcaccagcaaatgcttgcaccgatcggtgcaccgagctggtgctacgacgcacagcagttctggactgccaacgaagaggcagagacacgcgccaatgcccgcgtctgtcgagaagttgaggttgctttacctcacagcctgtctgatccccagcgtaaggcgctcgcgctcgatctcggccagctcctggtgaaccgctaccaggtcgccgtgttagttgcgatccacgcccccagcaaagagggtgacaagcgcaatcatcacgtgcatttgctaatgtctgctcgcaaggtagacagcaaaggcttaggcgagcgcgctggcatggcgtttgactcgcgacagggcggcggtgccaaggccattcgggaacttcgcaaagccattgaaggcgtcatcaatgcgcacttggagcgcgctggcggcacggatcgagtggaccaccggaccctgagggctcaagcccgggaagctgcattaaagcaagattttgtccgtgccaatgagctcagccgcccaccaacgaagcatatgggcaagacccggaccgctatgatgcgccaggccaagaagttgggtctggaccacgcgcttacagcaggaagctttgtggagcggatcattagtcgacgattgcaaaccgctcccgagactcatggcgttcccgaagggcactcccaccaatctgcgctcgcggatcatgcgcgcgaacaggcggcgctaccgcaggtcacgacaggcaaaggaaatacggcggggaaaacaggcccggtcggtggacgcatcatgccaacagccgtgccagtagggattacgcggaggattagtcgtgttatgcgcttggcgcgggcgactgggcaggacgctgaggttctgaacgccgaagcagagcttgtcgaacaatggttggagagccagcgtcaggcagcgcaagactcactcgatatgcttcgaagcgtgggcgggatccagatcgaaccgcagttccagaaggcctacaccacgctcatgtgtcgacgagtcgacgcgtatgcgaccagttccttcttgtacgaagacactgaacgcctcgcacaagcggtgatgagctacgcgcatgcagtcgtgaggccccagcgtgcgcgaatggcgtatttggcagcccgcgctaagctctctgagtatgaggctacgccgcactcacgtgagggcgcgcgcgcgaagcaacgctacttccgcgccaaggcgcacatctccaagcgtgcagcggcgttgcaagcggctgccgttgaccaggctagaacgcagatggtggaggcgggtgaccacctcgagaaaagatttgggattagaggctcccgtgcacccactccaggcctgagtattggcgaagattcactttcaaatggagtcctttccgacggagagcttgatcttcgtccccgtctcggtaggcctagggcgtag

SEQ ID NO: 534591 - DNA, 1749 bp, Stenotrophomonas maltophilia
atgcccatcaccggggtcaagatcaagggtctgagctgtttcaccacagagttctgcggctttgacgagttcaagctgatcaatgtcatcatcgggcgcaacaacactggtaagtcgcagctcttgaagatcgtgcagagcctctgctcgccagatcgcaccaagtcgcgccttcctgcttcgtatcgattcacgggcaccttcgacgaggggacgctccaaggaatttttgcaaattctcagcgctctggggccctaggcgtccccaacaccggcagcaactggacctatcacggactgcggttcgtcgatacaccagtgagttggatcgagaacgcccacgggctcgtaaatgacctgtcacatcgagcgaaggagaagcctgatgcttggggcagagtcctctcccatcaggttaacgaagcaacagagatggagcttgctaaggcggtgagccgacttaggggcccatttcccgacaagatctttcgccatatgctggctgatcgcgacatacggaatgagcctgccgccgccaagctcgctcttcgctcagatggacaaggggcgaccaacatcatccgcgatcacttgatccgggcggacaacatcatggcgacgcggcgcctcgttcaaagcgaattgcgagcagcgctcaaccatatcttcggcccggatgggtccttttctgcaatttctgtgcaacagcatgaggacggggaatgggagatcttccttgaagaggcagaaaaggggctgatcccgctgagcagctcaggcagcggcttgaagacagtcatcctcgttctgctcaacctcctggtgatccctacgcttgagaataaagcggcaagtgagtatgtgtttgcgttcgaagagcttgagaacaaccttcatcctgcgcttctccgacgcctgctgcggttcatcgacgggttcgccgtcgaacaccaatgccctatctttctgacaacccactccagcgccacgctcgatcagttcagtcgctccgatcatgctcaatttgtgcgcgtatcgcatgacgggacagctgcatcgactcaaacgatctcggcgcactttgatcactctcaggtggtcggtgacctgggcgctcgcgcgtctgacattttgcaggcgaacggcatcatctgggtcgagggaccgtcagatgccatctatctcaaccactggatcgagaccttctcgaaggggagtctcttagaaggccgtgactacgcctgcgccttctacggcggatccctcttggctcgaacaagtttccgtgacccaacaacgcctaatcccgaagagctcatccagctcatacggcttaaccgcaatgctgcgctggtgtgcgacagcgatcgatcatccaagggtgccgcactaaagcctcgcgtgctcaaagcgcaagaggagatcgcaaagctgccaggcggatacatgtgggtcacggctggcaaagagattgagacttacctgcctggctccgtgattggcaaagcacttggcatgaaagctgatcccgttgatcctgcgcagttcgagctcttctttccaagcgcatccaagtcgaagacgggcgactcttacgttgaagccaagctcaatcgggccagtatcgacaaggttgagcttgccctcgcctctcgcgagcacaccacatcagccatcatggccccgcgctttgactggaccaaacgcatgcaagaactggtggttacaatccgaaagtggaacgattag

SEQ ID NO: 534592 - DNA, 219 bp, Stenotrophomonas maltophilia
atgcttgtctttgtgaaggccaacggatctgacgacgctcgcttgaccaagtttgctatcggcaagtgtgagaaaggcgacggtggctataactgccccgtccaggcccgcgtcttggccatgaatggtcgctttgacgaagaattcaacggcgtatttacgttcgccgaggtggacggcaactaccgagtcgtcggcgtcgtcagtcgcaccctttaa

SEQ ID NO: 534593 - DNA, 384 bp, Stenotrophomonas maltophilia
atgaccgtcggcacgttcctcctcttgctcgtcctcggcgctaccgcgcttgtgcttgttggcttgggccgcagtttcaaactgcggagcgagcgcggcaactttgagcaggactacgaacgaagctacttctcccgctcgggcgccatcgcgctgtcccctgagcgagcgaggatcaagcttcatgaccgcaaccagaccaagatctactcttttgctgacgtgcgagcctgggaaaaacactggcacaacactaagcgcgaaggcacgctagcggtgagtgtgcgcgacgtcgaccagcctgtctggacgatcaagttcggcaacgaggcggagatgaatcgctggtatgagcttctgaaccaggcaatcaacgccaactga

SEQ ID NO: 534594 - DNA, 1221 bp, Stenotrophomonas maltophilia
atgaaaaaggctgtctattcgctgctctacaatctcgtggtcgcggcgttccccttggttgcactgccactggcaatcagccggacatcgctggctgattatgggtcttacctgggtgcattccttgcctacactgtttcgctcactgtttccataactgcattctcggcatttgccggccgcgcctatgtgcatgctcaggagactggaggggtccgctcagtatttcgctctctccttgcggctcagttgatacttgtctgcggtgctctggtggtctattgcgctctactgcttgttatgtcgacagggcgtatcgtcggggcgtggccgctgtcattggcgctcgcaagctcttgcttgaacgttgattggtacttctatgcggtgcacgactatagatccatcttgattcgtaatacggttgtgcggggagtgggcctggcgatgatctaccttctcgtaatcggagagggtgcgattagtcgatttgccatcatcatggctgggattctcatcgcttcgaatgtgatgggcttcgtaatcgcgtggcgtcgtcagcaaagctggatggcggagcaggtgtggcttaccggcgcatggaatcagatcgtccaggctaggcacttgcttatgagtggaagtgttgcagcgtcttatcagcagttggatcaggtgatcgtcaaggccgctcttggtgaagttgccgttgcgaagcttaatatcctcaagcaggtcgtctacatggcttgcgcagttaccaatgcgtactgtcgatatcaaactcctaatggaattcgatccgtccttagggggtcttctggcgagcagttccgccgaagtctgctcgggttcttggtcatcatggctgtgatgggtgggattggaatcatgtttggggcgggagttctaaatcttctttccgctgctgccggtgcgttcactctggttgatgtgctgttggtagcagccagtgcggggttcatttcttgttctgttttcattgctacccaggtgaatgttcctctttcccttgagcgtaattcgttgcgagcgaatttgatggttgcggtgatctgcctcgcgctgctttcggttctgccagggatctatgggtataggggggcgatgctggcagttggtgcgggtgagttcatcgggctcgtgactttagtagtcatgagctcgagagttggtgcatggaggcgcataaacaaatga

SEQ ID NO: 534595 - DNA, 747 bp, Stenotrophomonas maltophilia
atgatcacgaatctgcctacttatgtgctttccctgaagagtgctattgatcggcgcaaatccatccgggagaggctggatggtgtggtttcctatcaaatattcgatgcactcactcccgcggatctgggagaactcatcggggggcgcggcaggctcactccaggtgaatactgttgcgcaatgagtcatcgagcgatcgcggggctggctgccgagcatgatgtggcccttgtgcttgaagatgacgcgaatctgatggatgagttcgttccagtggttgcggaactcgccgatcggatgcgtagcggtgcagaagacgcggatattgtcgtaattggttactcgaagatccctcagagcgatcggtttcggattggaatttttaatccaatctcccgcgattgtcgtctgaatagcggtgcgtttactggcaggccattccgtcaatggccatgcggtgcggtagcctatctgatctcacgccagggcgcacagcggctgagggcggcgaccacatcgatcgatggggccgctgatgactgggctatgttcagtagcaaaggcatgctcgtcaggcactgccacccactggttgtccttgaggactacagggtgctcgaaagtgcaattgagggcgagcggcagaacttctcagagaacaatccgctcctagatccagttcgctacctgcgaggttgggcgcgacgttgtgggctgctggtaaggagatggatagaaaaatga

SEQ ID NO: 534596 - DNA, 996 bp, Stenotrophomonas maltophilia
atgaagattccgtatagattcacggctagggaggggtttctgctattccttctttatctgccactgtacattggagtctcatgggtggcggcggaaaatacgccgatgctgcttgataatattatgtatcgagagcgttatgatgcgatttcgcttagcaacctgccctttggtgtggaggtggtttccgcgcttttgatgtacttgtcgtcgaagcttgggtttaattattttcagttcgttttcctgaagagtatatcgtggctttgggttatctaccggctttatggattgacccgttctaggcgtgtgcctgcctgtattctgctcgtttcatttcttattccgtcctttcatgatatcaccacgtttctgcttcggcagtcctttgctctggaattcttcattctggcggcaacatcaagatcacgtctcgctcgtgcactctttgcggtcgcaatgctctttagtcagatcacatccattctctggttgccatttctgtatttgaagcccggtctcttagtccgacgaaagctgcttatggctgtactattgctggcacctgtaactatgttgacgggattcagcctggggtcacaggttgttgaggcaagtggctccctggtcggatatgcaggtatatttgcggagaacattcaaactaaagttggcttctacaatggtggcggcggtggagtagctagtagcgaggtctctataaaaaatatgctggcgatgcttggctcggtcctccttcttgctctcgcggggccgaggttgcttggacagattccgcaggcgattcttagagttattgatattcagattctcgcggctattttattcttcctcatgtttggcaacttgattctctcaaatcgacttggctatgcggcatacttcatcgccggtctgtttgctgcactctccatttttgcctattggcccaaagtgcgtaactacatcgtggcgctgagtggaggggcgcgatga

SEQ ID NO: 534597 - DNA, 1020 bp, Stenotrophomonas maltophilia
atgagagttcttcacgtcgctgattgctacgcgggtggtgtaagtcgggctattgagtcgattgcgggcttactccccgagcatgagcattttcttgctttcgacggcgaggagtctcctacggctagctctggctttgcaggggctgaacaattgcgtggagggaagtgcgcgaaagtgattcagctttcgagggttgctcggaagtacatgccagacgtcattcacgcgcattcgagctgggcaggaatgtttgcccgaattattccaatgccggcgccggttgtatatcaaccccattgtttcgtttttgacgacccctaccgtggccgagcttcgaaggcagtatttagggttgccgagcgtattctgagcagatcttccaaggttgttctaacattgaccaatcatgaagttcgcctcgctaaatctgccggcttgaaggggcagctcgtcaatcttccgaatgtaccgacgattgctgattcactgcacgctccaactgagcgaacggattccataccgtttaccgtttctatggttggtaggcttgcgcgccagaaggatccgttgttctttgccgaagttgctgatgcgttgcggaacgatcagcggttcaagtttgtctggatcggagacggggatctggattaccggcggcgactggagggccttggtgttcgtgttacgggttggctgggacccgaccgactttttgatgagttgaaatcatcttcagtatatcttcatagtgcggcctacgagggctatcccttgagtgtgctggatgcagctgcgctcggctgcgcaatcattgttcgcaagatacccgcttttgaggatgatcagtttttagcggtggatcggactggcgacgctgtacaactattgctggggctcgcggaggatcccgcacagattgcggggttgaggcgtgccaactcagagttgctggcgcgaatgaacagggcggaacagaggaaggttctgcttaatacatataggagtctggtcgaatga

SEQ ID NO: 534598 - DNA, 1038 bp, Stenotrophomonas maltophilia
atgaaagtttacttcccgggacgcattctggagcgccacgtaggcgggaataccacctacacccgaaaagtcgcggaaggtttgactttacaaggcgttgaggttggagtacttccgtactctaaaagtcccgtcctcacaatggcaaaggaatcccttgctccattaattctggcgcgggttggggcagtcattcactattcggccgataccgggcctctattcaaagtgagccgtattccgtcagtcgttacggtacatggggttgccagtcgctggatatcaactgcaaggactgctcgccaagaagccgtctggcgtgcgcgcgtgaagcgtgcgatctcgagtacgaatagggttattacagtgtcgaggtcgagtgcggatgatgtaagcgaagtcttcggaatcgagcgggatcgcatttcggtgattccgcatggtattgatgtggccaagttttctagtccgcgagatctttctgactccctgcaagcaatgattccggcggagttcattttgtacgttgggaacatagagcccagaaagaatctccagccgcttctggaggcggttgagtctgccgagttcaaaaagttggggttgcctctggttgtcgcgggaaagcctgcgtggaacttcgatacattgatgaagcagataggcgccgcgaagaatgtaattcacgtggggtttgtcagtgaagaagacaagatcgctcttatgcagcgtgcgcagctattcgtgtttccaagtctttacgagggttttgggtttcctgttcttgaggcaatggcgagcggtacagccgtgctcacgtctgaacgtggatcgctgaaagaagttggtgggccaagcttgaaactgcccgatgatactctcgggcgggattgtatacttcaaggattgacagaggcactttcaaatggagaccaattgaaacgatgtgcgaaggatggtgtcggctgggcatcacgcttcagctgggacgcaagcgttgcagcgcatatggatatctatagggagttgattaaatga

SEQ ID NO: 534599 - DNA, 1065 bp, Stenotrophomonas maltophilia
atgaagagtgtcctgatcctgcacgcttacagtgccgaaaacctgggtgatggcctgcttgtagctgaaactctcaaggcggttagagctgcattcgacgatgaagcgatcgaggcagtggtcttggcgagttaccccgagtccttcgagtcgattcctggtgttcgcttcgttagatcgaagccgggtcgcttcggctatccgagtgagtatcttcatgctctttggtcaatggaccgctttgatgcgattgtcgccgttggtggggggtatctccgggcaaaatcaatgaaggaggcgttgaagactgcgttggtgcacggtccccagttgcttgcagctgcctggcgagcaccgaggagggcggtatatctgcctcaaagtattggtcctgcacatttcggttctcggctgattcttcgcggggtccttcgacgaatgcagaaggtttttcttcgggatgaccgcagtattaaggaaatgggcctgccaaatgctcttcgcgctgcagatctggcagccggtcgtatgtctgagcgtggagtgagcctggcagtcgctgatgtgcctgttctttccgtacgccatgtcaatggtcgcttgcctggaggattgctacctcttgcgaattcgatcggcacctatgacagctatattcaaagtacggtgaggagtaatgatgaccgaccggcgacgagtgagcttacttatcgcagattgattcctcgtccggagatgatgggtagtgctgcagagccgcgcgtggttgtggccgtgcgtctgcatgcggcattgatggccttggctgcgggtcactatgtagtgcaccttgcctacgaaagaaagggttttggtgcatttggagatctcgatatccccgagtttgtccacaacgtgaattcgtttgatcaggaaaaggtccttgcccaggttcaccttttgctggggagtcaagcggcccgtgctgagtacaatgacaggcttcgtcattccatgatcaagctaagcggctgtcgcgagctactgcattcggcaatacgagacggctcgagcaacgccgcttga

SEQ ID NO: 534600 - DNA, 225 bp, Stenotrophomonas maltophilia
atgaatacactctcctacaatcccgacgtgtcagaccatcccgacttcgacgagccaaacacaacagaatcgcgccgaaaacatgtgcgcttctggctccgatgcctagccgatcgcggagagcaacccgacgcccgcatccatgtcgctttggatcggtatgtcgacggccgctatgatctgcatgcgctcagccaagcagtcatcaatccttacctccattga

SEQ ID NO: 534601 - DNA, 219 bp, Stenotrophomonas maltophilia
ttgccgaacttcatcatcaacaaaaacgcccaggccaacggcgatcacgaggtgcataacaccaccacgggatgcaccttcatgccgctgtcggctaatcagatcagtctgggctcccacttgacttgcaagcaggccgtggccgacgcgaaagcccgttggccgcagaatcgcatcaacgggtgctattactgcgccaacgcgtgccataccagttga

SEQ ID NO: 534602 - DNA, 492 bp, Stenotrophomonas maltophilia
atgttctttccaagcttgcaagacgccaacgatgccatcgagcggtttggcatgagcctgacacgcgacggcgacggagtcgttcttgaaggggatagcacctggcgagcatggcgcgccggaagcgaatcaagtcactttgatacgttaggtcatttttgggctgagtggtgctggtatgtcgccttcgctcttgaaaacgagcgcaaacgtgcctgcttcatgtctgccctattggccgtcgatgttgaagggcaaatcaatctgctcaacgcgctttcagactacgaacatggcagggctagtccattggattacttgttcgctagttcatcagtgacaatggagactatccccgacgattggcctgatcgcctagcccaggctatcgggggtgagggtgagggcgcggtccttggcggaggaaagctcttccgtgctatccgtcgccatgcgcctgacgccatgaatatcttcttcccaaccgcatag

SEQ ID NO: 534603 - DNA, 987 bp, Stenotrophomonas maltophilia
atggcgacgagcgaacagagagaatcgaccgaacaggcgttagatccaatgcacctagcgcttgcttggacaatggcgcggaccaaaaccatcgcaggtgttcaggactacgatgaagaaagctacacgtccaccatcctcggtggcgcggcaatagcggcaccgctgttagccgtctttggcggccacagcccagccgatcaagtgacctgcggatttgggacatttcggaagagtggcggcgccaaaacaccattgagtgaaacggctacaggctcagacttctgcctcgttgttggtcacgacgaagagaacgccaaggttgcgatctttcaagctaaaaaactcgaatccaacgtcaaatctcgtgttctatccatcaggcgaggtccagcagagtcagccaaaccgcactttcagatgaccatgctgcttgcatttgtgtgcagaatactggcgcaatcgcaagcgcccagctttaaggaatttgcatctgacgcaacctcaatcgctgccgcttcacggcttgagaaatttcaatcgcatcaagttgaagcgcttgtgaagcacattgactgggtccattacgtggtttatcaagatggcgaagcaaccacagttcccttcaaccagctggatcagggctgcatcgaggccgagatttcgagagcagcccagacgtcccacaagttgacgaaaccccgcgctcctttcattgacacgatgactgaaggcttgtcaggcaagggggctggctggttggtgcttcctcgcactgtcattaagaagttcttgccagagcttatcgaaatgggcgcaatcgtcgtcgtggatgacaagggcggcacagggcttacaccggatttcgattgcatcaaccaagcctctctcgaacctatcggtggtatccaagcaaacccacagggcgctgccgccgtcgttgccatggtcagcagacctagcggcgggctgaaaagcggaatgtga

SEQ ID NO: 534604 - DNA, 159 bp, Stenotrophomonas maltophilia
atgccctcttttgcgtggaagataagtgaccggcagatcgctgagacgctggactacatccgaaattcctggggcaacgcagccaagcccgtggacgaggcagaggtcgcgcgcctgcagtcggtgctctcagctagagatcagctgcctgcgaactag

SEQ ID NO: 534605 - DNA, 123 bp, Stenotrophomonas maltophilia
atgtcaccgcgtgccttttcggtcatcaccaaggcctgcgggacgcgcgtgaacaaagcggccgatgggaagactgtcacgggcacccatggtgaccccaaggggttccacaacgacgggtag

SEQ ID NO: 534606 - DNA, 1032 bp, Stenotrophomonas maltophilia
gtgactgtgagccgcgatctgattggtgatatcgagacggccgatgtggtcgccatcacaaagattgtttgtgagtctgccgacagtgcgcgcttggcatgggaagtggttcacgacgccatcaatgccaagcgtgaggcggtcatcgaagcgttggttcccatgttgtcctccaaggacagagtttttgccttggcgttggcggccgaggaggggctactcaatgttgttcgtaagcttgttccactgactgaaccgagtgccaaagactcgatggcgctggtgtgtgcagctcgggcggggcgcaaagatgtcgtggagctattgttacccgttagtgacgcactagcggatcactccgctgcactatacgaggcaagcgcctgcgggcacgctgacgtggtgaagctgctaattccgcacagcgatccttacgacaaggacagtcgagctcttgctcaggctgctcacgggggccatcttcgtgtggtcaaactgctgcttccggtgtcatcatcgatcatttgtgcgactcagatatttccggcggcggctgggcacggggcaacagaggtcgtcaaactcatgcttaaagctaagctgccagatgccgcgcacacgtatgcagctgcttttgaccttgcggcaagtaaaggtcaatttgaggtcgttgagcttatcttgggtgcaattgatcagctcggacgcccgcgccgtttcggcgagaaggcgatctacgatgcagctagcaagggctaccgagagatcgcggagttgctggcaccgaccgtaggtcaaagcgcgtgtaatgctgcgttggtcggagcagtcggtcacgcccagcgagagacagcccgagttctctttcaccatgcaaacttggatgaagtcagggcgaggctgttcagtcccgagcaccacgcgctattggacgagcttgcggctgaggcgactgcacagcaggatcgtgaggccttgaacaagcagacccagctgccaatagggtcgcgttccaatattccgcgactttag

SEQ ID NO: 534607 - DNA, 1407 bp, Stenotrophomonas maltophilia
atgctgctgcccatggttgcggatctctattacgacaaccgggattggttggcgtttgggatggcctctttggtttcagccgcctgtggcagtgcgctgagctggggctattggcgctctcgcgggaagtggggcaagtcgggcctgacattgaggcaggccttcgccctgacgccactgagctgggctgccgtgtccgccgtgagtgcgctgccgtttctcttctcggaacacccgcagcttcgcggacatcttgccaacgcattttttgaagcgatctccggcatcacaacgaccggcgccacggtcatgacgggtcttgataccgcgcccccaggcttgttgctttggcgagggctgcttcaatggatgggtggcatcggcattatcgcgactgccattgccatcttacccgcgctcggcgtgggcggcatgcagctgtttcgcacggagtcctcagatcgctcgcaaaaggccatgccccgggttcggcagatcgcctcgacgatagggtatgcctacattggtctgacggttgtggccggcctggcctattggctggcaggcatgaacccctttgatgccatcgtgcatgcgctcacctcgattgcgacgggcggatattcgacctcagatcaatcgttcggtcgatggcaagacaacgggatccagtggcttgccacgctcttcatgctgtcagggaccttgcccttcgtcttgtatgtgcggttcttggctggggaccggagggctttctttgatcgccaggtcaaatctctgctggggcttctggcagtgtcggtgggtgggattggaacgtggttggctgcatccggccaatatggatttgagcaggcttatcgattcgcggccttcagtgtggtttccgtggtcaccaccacaggctatgccgtaacggactatggccagtggggagcggccgtcgtaggggtgtttttcctgttgacgtttgttggcgggtgcacaggctccacgagcgggggcatcaagatctttcgcttcgaggtcatggcagtgatgcttcgcgtccacttcctacgcctgctttatcccaatggggtctttcctcggtcctacgacggcaagccgctctccgacgaggtgatcggctcagtggtggcgtttctaacggtgtttttggtctgctatgccgtcattacggtcgtgctgcttgggctagggttggacttcctaaccagcgccagcggcgcggccacggcgctgtccaacgtagggccgggattaggggagaccattgggccagcagggacgttcgcttcgctgccaagcgcagccaaatgggtgctgtcgttcgcgatgctgctggggagactcgagctcttcacggtgttgatcatcttcctgcctcgcttctggcggggatga

SEQ ID NO: 534608 - DNA, 1389 bp, Stenotrophomonas maltophilia
atgaagattattgtgtgtggcgcgggccaggtggggatgacgattgcgcgccagttggcctcggaaggtgtggcgattacgatcattgacaccgatgccgagctgatcaggcgggcggatgaaagccacgacattcgcggggtcgtcggacatgcctcttacccggatacgctccgggaagctggcgcgatggatgctgacatgctgatcgctgtgacgcgttcggatgaagtcaatatggtcgcctgccaagtcgcctactcgctttttaaagtaaagcgccgaatcgcccgtcttcgccatgtgggatacaccgcgcgcgatgcaaacggcctgtttgcggctgagcatctgcccattgatgtgatcatttccccggaggctgaggttgccgagggaattacgaggcggcttcgcacgccaggtgcttttacgatcctccccttggctcgcggacagttggaagtgatcggaatcggtgtgacggatccagattgtccggcgatgggtgagcgcatctgtgaccttgagtcaaacggcaagtttgagcacatcagggtccttgccataacccgcaagggcattacgttcattcccacgccgcaggatcgcgctgagctggcggacgaactttacatactcgcgcgatcagagcggcgcaaggcgacgatggcgcttttcgggcaccgcgagcgccccgttgccgaacttgtgatcgcaggtgccggcaatgtgggcatgcacctggttcgaaacatccgcgccttgcttccgaaggcgcggatgacggtcattgaacgggatcgggatcgggcacgctacgcggcggaaacacttggtggcgatgttgttgtgctccatggcgatgccctggatcggtcagtgcttgaagaggctcgggtcgatcaaaaggaaactctggttgccgtaaccaacgacgatgagtccaacatcttctgctcgctcttggcgcgaaaattgggctgccgccaggccgtgacactggtcaacaagagcacctacgccacacttcttcccggaatgggcatcaacgcagtcgtcagtccaagcgcggtgacggtctcgaccgtgctgcggcacgtccgtcgaggggccattgtcggtttgcagacgttgcgcgaggactttggtgaagttattgaagccacgattggtgccggaagttcgccacttttaacgcacaccatcggcgcgcttggtctgccggaaggcattaaagttggtgccgtcattcgagaagaccacccacttgatatgacagccgagacccggataaatgcgggtgacagggtcgtgctggtcgtggcatatggcgagatcgatgttgcagagaagcttcttggcggagcgggcgggcggtcgttttga

SEQ ID NO: 534609 - DNA, 1254 bp, Stenotrophomonas maltophilia
atgtggttccgatccacgctctacggcgttctaggcgtggctactgccttggccggtgcgggcgctaaattcgtgctgccggaggggctggcaacgcagattggtgccgactcagttggcaacatccttggcatccttgccgcctcaatgttgacagtgaccacctttgccctatccaccatggtcgctgcctacggctcggcgtcgaccaatgccacgccgcgcgcgtcccggctcctgattgaagatacgcgagcgcaaggcacgctggccacattcatcggtgcgttcttgttctccatcgtcgggctcattgcgctgagcaccggcatctacggggacagcggcagacttgttctctttggcgcgaccattgcggtcatcatcgtcatcaccgtcacgcttctccgcgccatcgagcaattttcccgctttggacgactcggcgaaacggtcgatcttgtcgagcaagccaccttgaaatccatgaagcagcgtgcagaagagcccttccttggcgctacgccctactccggcgtcgctccgagcagcacggtcgatgtcttcgctgcggatgtaggccatgttgaacacattgatgtgcagcgcctcaacacggttgcagaacaacaccagctcatcgtctatgtgaactgtcagcccggcacctttgcaaccccaaaccgcgcgctgctcagtgtctggggcaccctccacgatgagcagagaacgcagctgcttgcagctttcaccatcggcggctcccgtcggatagagaacgatccgcgttacggtttggtcgtccttgctgagattggtgtgcgagcgctgtcgccggccgtcaatgatccagggacgtgcattacggtcatcggcacctgtgttcgcctgctgctcaaatgggacgccttgtcatccggatccggggccaaggacgttcaatatccgttcgtgcacatggctcagcttgatgtggatgacctgtttgaagacgtgttcgcgcccatatcgactgatgcagcagggtcgcttgaagtcaacatcaggctccaaaaagctttcgccgcactgtctgctggctgctcatccaccacgcgccaggcggcgcggcgctacgccgatctgtctctggagcgggccttgcagacccttagcttctctcaggatcgcgacaagcttcgaacaatcgccaccgtagaacacaaaagggcgcaacaggctgtcgccccccaggccgcagcggaaccgaactga

SEQ ID NO: 534610 - DNA, 1101 bp, Stenotrophomonas maltophilia
gtgaaggtatttcccctgatttttctgtgtgctgcggcaacggccacagccacaatccatgctcaagaagcgcccgacactcagcttgaaccgtttgtcgatgtgggtggtgccgtccggttcaattatggctggctggactacggtcccacaagccgcttgcaacttgaactgcttcgcgcagacgtcaaagccggcgctggcccccttttcttctcggctcaatatcgctggtatgacggcttcgatgccgtccaccatgcctacgccggatggaatttcaacgaccaaacgcagctcaaagcgggcatccagcaggtccccttcggacttatgcctaccgtttcccagagcttttggtttggctcaggctactaccttggcattgaagacgattacgatccgggcgtgacggttagccatcggagtggcgaccatcactggatagccggctggttctcgggcgatgaatacggaagcggctcccgctacgaccgatactcctttgacgtggcccagaccgctgatctgccctacaaggagcgggagcgcgttcatttcagatacgaacacaccagctccttgcatgacggtgagctgctgctcggggcttctgcattcagcggtcaggttcagaacaccaccacccgccgtcactatggccaccagggtgcagcgctgcatgcccagtggaaacgcgatggctggacgacccagctgcaatgggctcgctaccgttacagcgtgccaggcgacaggattgcgatgtcagcgtttcttgcccctttcgagattgcgtcggaagccgatgtccccagcgcaaacgtggcctactccttcggtgagaagcgttggctcgatgacatcacctgctacaacaacctcagcatgacgcgcccggtgggacgcagccaaggtgtgagggagtcatggcagaacgtcaccggatgcagcctgcaaaaagggatcatgttgacttacgtggactggattgctggcaagaacatgtggtttgcaggcggcgacggcatcggaatcgatgacggcggcccttcccgctggcatagccgactcaacctcaacatcgggttctacttctaa

SEQ ID NO: 534611 - DNA, 1977 bp, Stenotrophomonas maltophilia
atgcagagccccgctccgccacccactcctgttcgccagcgcatcttgccgcaggtgttcattcccactgcggccatcgtgcttttactgctggcgctatccatcttcgttccagaaaaagcgacaacttggttcacggcggccaagaactggaccgccaacgacgcgggctggttcaccatcttatcggtcgcaggcttcctggtctttgtggtcggtgtcgcgatcagtggctacgggcgaatcaagctcggcccagaccacagtcgccccgattacagctatgcctcgtggtttgccatgctctttgccgcaggcatgggcattggcctgatgttcttcggcgtggcagagccgatcatgcactacgctaccccgccgacaggcacggccgagtctgccgaggcagctcgccaagcgatgcgtatcaccttcttccattggggtgtgcatgcctgggccatctacgctgttgttgcgttggcattggcctactttgcctatcgccacaacctaccgttgcgggtgcgatcagcgctctatccactcattggagaacgcatccacggacctatcggccatgcggtcgatacgtttgcagcgcttggcaccatctttggcctggccacatcgcttggcctgggcgtaatgcagatcaactccggactgaactacttatttggcctggaagtgagcaccctcgtccaggtgtcgttgatcggcatcatcatcctggtggccacagggtcggtcgtcgcgggactcgacagtggtgtccgtcgcctgtctgagatcaacatgatcatggccgtggcacttcttgcatttgtgcttgtctgcggtcccacggtccacctgatgcaggcatttgtccagaacactggcatgtacgcctcccagctcttctcaatgaccttcaacctgtatgcctatgagcccagtggctggcttggcggctggacgttgttctactggggttggtggattgcgtggtcgcccttcgttgggatgttcatcgcccgtatttcgcgaggccgcacggtgcgtgaattcgtggttggcgtcttgctggttccgctgggctttacgttcctttggatgaccatctacggcaactcggccttgttcatggttcgctccgaaggtgttcaagagctcgtcaaggcagtgtcagatgacagctcaatggcgttgtttgagttcctgcgccaccttcccctgacgatgatcacctcctcgcttgccgttgtcctcgtcgcactgttctttgtcacctccgctgactccggcgccctggtcatagacatgctgacctccaagggcgaggaagagtctccggtttggcagcgcatcttctgggcactactggttggtggcatcgctgttgccctgctcattgcaggtggccttgaatcactccaagctgcgactattgccagcgccctcccctttacgatcgtcatgatcttgatgtgctgggggcttctcaaagccatgcatctggacgcaaccaagcgctcgatttctcgtgatgcacgattgcttccgggcaccagcgatgactggcgcgccaggcttaagctgctcgcgcataaccccgtcaagatcgaggtcgtcggcttcatcaaggatcaggtgctgcccgcgctccaagaggtcgcggtggagctgcgcaagcaggatcttccggttgaagtcacccaaggggaggatgggcgcgcctggcttcgcgtaggccatggcgaggaaatggacttcttctactcggtgcgtccccagccttacgagccgcccaccttcgcgttgcaggacccgcgtcgcccggtgagcgagggcacgcgccactatcgggctgaggtctacctgcgcgaaggcgggcaagactacgacgttatgggctggccaaaggtgcagttgatccacgatgtgctggaccaatacgagcgccaccgccagttcctggatcacgttcgctga

SEQ ID NO: 534612 - DNA, 1173 bp, Stenotrophomonas maltophilia
atgacaaccatagaccgaccgcgcagcatctttgcccgcatgctcgctaacgaggcatctgcgggtgtggcactaatgatggcgtcgatggtcgctatcttgctggccaacagtccagcagcgggcagctatttcgcatttctgcatgctcatgccggcccggttctcagtgagaaactcgggccaatgacgccgcatctttggatcaacgacgggttgatggcgatcttctttcttcttgtcggcttggagatcaagcgcgagcttatcagtgggcggttgtcctcctggcagcagcgcagattaccagctgtgcctgcgctgctcggcatggcacttcctgctctgatctttctgatcgcatctcggcacgagccctccctttccaacggctgggccattcctgcggccacagacattgcctttgcggtgggggtgctggcgcttttggggcggcacgcgcctcccagcttgaagctcttgctgctgtcggtggccatcatcgacgacatgggtgcagtggcaatcattgccctgttttacacctcgtccctcgacatcggagctctggcggctgcaatcggcgcggggcttgccatgtatgcgctaaagagaaacggtgtggagcggctctggccctacttggttctgctcttggccatgtggtatgccacgcttctttcaggtgtccacgccacgattgcaggcgttgtcggtgcatttctgatcccctacggcgccagtgctaagtcgccactggttcgcttggagcacggcatcgctccttgggttggcttcgtagtcgtgccgatctttggctttgccaatgccggtgtggatctgtctgggatttcgatgagcgccattttggccccgctgccgttgggaatcgctgctgggctcttcgtcggcaagcaaatgggcgtgttcggaggcgttgcccttgcggtcaagaccgggcttgctgaaaagccagcgggcgcatcatggctacaaatctacggcgtgagtttgctctgcggcattggtttcacgatgagcctcttcatcagctcgctcgcgttcccattggaccctacgttcgttgaggatgccaaggtcggcatcttgcttggatcgctgctttccgcgctgctgggagcggtcgtcttgaggtttgcaccccgaagctag

SEQ ID NO: 534613 - DNA, 2622 bp, Stenotrophomonas maltophilia
atgagtattttggaagaagttttcaagtggacgacgacgcttccgccttggcagagtgacgcggtcgctcgtcttttgactaaagtggatctcgatcagaacgacgacgccgatctgcttgcgctgctctattcagcaaatggaattcctgaccctcagggacgaactgctaagcccttgtcacaggatcaagttcccgtggccgctgatccagagagtgctgtcctgcttcacgcgatgaagcaattgcaccacgtcaacgcgattgcatcagaccagtcggtcactgtggcgcctactggcctcaccgtgatctacggagacaatggatcgggtaagtcgggatactcccgtgttttgaagcgtgcttgtcgtgcacgcgaccagtcagagccgatccatcccaatgccaatcttccagtgagccagggcggggttgctcaagccacgtttgagatctctgttaacggggtcgaccaagaggtggtttggcggctcgatgcggcaccgcctgctgagctctcttcgattgcagtcttcgatgcgcgttgcgcaaaagcgtatctggaacaagaaaatgacttctcctatgttccttacgggttggacgtttttgggtcgctcgcgcgtttgagtcaacggcttaagttgaaggttgaccagcaggtcctgactagcgcagttgatctcggcgcgttcgctcacctgcgtggagagacggcggttggcaggcagatcgcaacgctcacaggcaagtcgaagccggagatgattgaggcacttgcctcacttagtgcggaggagctcgcgcgacgagccgatcttgaaacgagcctcaaggaaaacaaccccagggaaaaagcccaggcgctgcgcattcgcgcgcgccgctgggcgacgcttgctagcaaggttgcagagcaggaggctcggcttagcgatgcggccctggcggtggtgcgacaagcagccgatgaatatcggactgccaaggctgccgccgagcttgccgcgaagcttcatagcgacggcgagaagctattgccaggaacgggcggagaggcgtggcgcgagctctatgaggccgccaaacgctttgcagcgcaagtcgactcagacaaggctattggtgatcttaccccagaagatgcgtgccttctttgccagcagcctttgaaagagggggcggcacggatgcatcgctttgaagcgtttgttcaagcagaagcggaaaagctccatgctgcaaaaaagggagctttgggcgctgtctacgttccgatgacaaagcaggcgatcgcgttaggcttggatgaagcgctccttctggcgcttcgttccgaagatgaggagcttgctgatggcttgcctatccacgaagcggcactactggcgcgacagcaatctatccggaaggcggctgagagcaacgattggagtggagtgctatctgcggctgccattttcagccagcgtctgtctcagctatcggcccagcttgatctttcggctaaggcgttggaagaagcttcagacgaggctgcgcgcaaggcgatgcaagccgagctcggggagcttgacgcgagagtgcagctcggcttggtcaaggatgcagtgttgtcggcggtggccaagctagcctacataacaaaactgaaggcatgtctgcccgctcttcgcaccaatggcatttcgacaaaggcatctgaactggccgagcaggtggtatccagggagcttgctgacgcgcttaatcgtgagttcgcagcgctcagagtccatgccttgcgggtcagtgcgcaaagccgctccgaacgcggtaagccacttcatcggcttcgcctagaactcccccagtcacgaacgccctcagagatcctgagtgaaggcgagcagcgcgccattgccattgcgtcgttcatggcagaaatctctctgaatgcacaaacgagcggcatcgtcttcgatgatcccgtctgctcacttgaccatcggcgccgcgagcttgtggcaaaacgcttggttgaagaagcagcgaagaggcaggtcattgtcttcacgcatgacctttacttcctaaagctccttgcagatgacggcaagcgcttgggcgtcagcgtccaaactcaaagcgtgagtagacagcagcaagggttcggcgtgaccagcgcggatctcccatttgaaggtaagacgagcagtcagcgggtggggtttgtgaagacaatccaggtcctggcagccaaggcctacggcctgaacgaccaagagaactaccaaatccaaacggtgagggcttacacgctactaaggcttgcctgggagcggtcagtggaagaagtgttgcttcgcaatgtcgtcattcgctttcgcaagagtgtggatacccaacggctagcgggagtgacggtctccgatgaagactacgcgcgagtaaatgagggtatgactaaatgctcaaactacgctcatgaccgcgcggaaatcgcagggatagcgttgccggacccggacgagctcctggcggatatcctttcctttgagagcttcattaaagaagtgaacgctcgctcgctgacgactgagtccgcgcggcgaaagggggcgggcgttgttgcctag

SEQ ID NO: 534614 - DNA, 177 bp, Stenotrophomonas maltophilia; identical to SEQ ID NO: 531397

SEQ ID NO: 534615 - DNA, 246 bp, Stenotrophomonas maltophilia
atgaacgcgaccaagaaactgcggcttgggccgctgcccaagaccgagaacgtcaagcttaccttcgcgtgcccggccagcctgaaagccgacctcgaccgctacgccgcactgcacgcgcaggcgtatggcgaggcggtcgatgcagagaagttgatcccgcacatgctggaggcgttcattgccggcgaccggggattcaggaagggaggcgcgagcaggcccgcaccgccgaagccgagctga

SEQ ID NO: 534616 - DNA, 1080 bp, Stenotrophomonas maltophilia
atgcgcggccaagagaatccccaagcgtcgatgttcagctacgtgagcctggagcaacgcgtgccgaaggaccacccgctgcgcactctgcgtgcgctggtcgacggcattctcgccaacatgagtgcgctgttcgatgagcgttactcgcacaccgggcgcccgtcgattccgcccgagcagctgctgcgtgcgctgctcgtgcagatcctcttcacgatccgcagcgagcgccagctcgtcgagcagctcgactacaacctgctgttccgatggttcgttggcctgggcatggatgacgcggtgtgggaccgcaccgtcttcagcatcaatcgcgaccgtctgctcggcaccgacgtcgcacgccagttcttccgtcgcgtactgcatcttgccgagtggcagggcttcgtctccgacgagcacttcagcgtcgatggcacgatgatcgaggactgggccagccacaagagcttcgttcccaaggacggcagtggcccggacaagcctgccgggcgcaacccggaggcggacttcaagggcaagacgcgcagcaacgccacacaccagagcacaaccgacccgcaggcgcggctctacaagaagggcgagttcgcggaagcgaagctgcgctacatggcgcacgcgctctccgagaaccgcaacgggctcgtcgtcgatgtcgagagcacgcaagccacgggacgcgccgagtgggaggcggcgatccggatgattgatcgcagcgtgcgcaagccgggcgcgacggtgggtgcggacaagggctatgacacggccgagttcgttgccgcactcgaacggcgcggcatcaaggcacacgtggcgcgcaaggtcagcggcagcgccgtcgatggacgcacggcgcgtggcaaaggctacgcgatgagtctgcgccggcgaaagatgatcgaagaggccttcggctggatcaagacggtgggtggtttgcgcaagacgcggcacaaggggctggaaaagctctcgggccaggcactgttcgcgttcgcggcgtacaacctgacccgaatgctgagcctgatgcgagcggctgccgcgtag

SEQ ID NO: 534617 - DNA, 1095 bp, Stenotrophomonas maltophilia
atgcgaggagcggacagctacaacgaggctctgttcagcacgatacggctggaggacttcgtgccggccgagcatccgttgcggccgattcgcgtctgggtcaacgacgcgctgggcaagatgggcgatacgttcgcggccatgtacgcagccgacgtcaagggcggtcgcccgagcatcgcgcccgagaagctcatccgcgcgatgctgctgcaggtgctctacagcgtgcgcagcgaacgccagctcgtcgagcagattcgctacaacctgctgttccgctggttcgtcgggctgtccatcgacgacgaggtgtggaaccactcggtgttcagcaagaaccgcgaccggctgatcgagcacgatgtggtgaccgagcttttcaacgccacggtggagatggcgcaccagcgcgggctgctgtcgggcgaacacttcagcgtggacgggaccttgatccaggcctgggccagccacaagagcatgcggcgcaaggacggttcggaggacgggcgcccacccgaggactggaaaggccagccccgcagcaacgacacgcacgaatcgacgtcggatcccgacgcgcggctgtaccgcaagagcaacgccgcacctgcgctgccgagctacctggggcatgtgctgaccgacaaccgccatggcctggtggtcaacgtgcaggccagcaccgcggacggcacggccgagcgcgaggtcgccgcgcagatgctgggcgacgttgcaagaccgggcaagcgcgtgacggtgggtgccgacaaggcatatgacaccaaggggttcgtcaaggtgtgccgggagatcggagtgacgccgcacgttgcgcagaacacgagccgcaatggcggcagcgccattgacgggcgcaccacgagacattctggctacgctgtcagccagcgcaagaggaagcgcatcgagcagtgcttcgggtggggcaagctcatcgggccgatccgtcaggtgatggtgcaaggactggacaaggtggaccagcttctgaccctgacgatgacagcctacaacctcacacgactgcgcaacctggcgcagccatgcccggggtgcgtccaatga

SEQ ID NO: 534618 - DNA, 909 bp, Stenotrophomonas maltophilia
ttggatttcagattgctgcgttacttcatcgcagttgcggaagaactgcatctggcccgtgcagccgagcgtctgggcatcgagcaatcgcctgtgtcgcgtgcgatgcgcgacctggaaagccagcttggcgtgcagttgttcgaccgcagcacacgcctgacgcggctgacctgggccggccaggtgttcctcggcgaatgccggcgcgtgcaggccaccgtggagcaggcagtcaagagcgccaaggcggcggcacagggctaccagggccatctgcgcatcgcgatctgcgacagcctggcgcaaccccgcatcgccaccttgctggcacgcagccgcgaggatgagcccgagctggagattcgcgtcttcgagctgccgttcgcgcagcagctcaagatgctgcacaacgatctgctggacatcggctttggcttgtcaaacgcggtgcatgatggcctcgtcgccgagccggtgtggaccgatccgctgtcggtgatcgtgcccgcacgccaccccttgctggcacacgtgcaggtgccgctgcccgaagccttgaagtttccgctggttctgtgccaccccgaggcgggctccggttgccgccaccagattcaggcggtgctgcaggacacgaacatgccgctcaagctggtggacgaagtgaccagcctgggcgtgatgctgaccctggtcggcgccggctacggcatcggcttcgccatcgcctcgcaggtgcagacgctacagcgcccggacatctccattcgtcccctggccggcatcccaccgatgctctccacctacctgctgcgccgccggggcgaaccctcggagcccatgaggcggttcatcgagcgggtgaaagacggggccgcgccggtcgatgatgagccggtcctttga

SEQ ID NO: 534619 - DNA, 912 bp, Stenotrophomonas maltophilia
atgaacttacgccatcttcgctgtttcatcgccgtggccgaagagttgcactttggccgggcggcgcggcggctgcatgtggagcagtcgcccctgtcgcgcacgatccgccaactggaggccgacctgggcgtggcgctgctggagcgcacgccgcgcggcgtgcgcctgaccccggccgggcaggtgtttctggaggaggcccggcgcgtgctgctgacccttgagcaagcccagaccaagacgcgggcggtggcggtgggacaccggggcaccctgcgcatcgccctggccggcggcgtcgggcggacccggctgtcggcgctgctcgcgctgtgccgcgaggaggcgccggaagtgggcatccggctgttcgaggcgccgctgtcgcaggtggtgggcggcctgggcaacgacctgtacgacgcggcctttgcgatggccggcgagatggcggccggggtggtcgccaggccggtgtggcaagatccactggtggtggccatacccgcgcggcaccccttgctggcgcacaagcgggtaccgctggacgaggtggtgggctacccgctggtgctgtgtcacccgcaggtttgtcaggagtgcagccggcaatgcgagcgcctgctgcgcctggtggagacaccgccggtcgtggccgagtacgtgacgacccactcgttgatgctggccctggtggcggccggctatggcgtgggattttccaccgcggcgcacgcggtggcatgccggcaggcggacgtgatcgtccggccgctggacgaggactcggcggcgttgacgacctacctgctacatcccgagggcgcgatgtcggagccgctgcgccacttcatcgaccgtgctcagcgtgtcggccatatgccgttggatacgcaacggctcgcatga

SEQ ID NO: 534620 - DNA, 762 bp, Stenotrophomonas maltophilia; identical to SEQ ID NO: 332636

SEQ ID NO: 534621 - DNA, 237 bp, Stenotrophomonas maltophilia
atggcgagcgcacatgaactggcgcgcggccgtgaacggctgcgcgcgctgatcgagttcgcgctgggcgaaggctggcgcgtggtgcgcacgtccggcgggcacctgaaattcacgaagcaaggctgcgcgtcgatctacaccagttcgacggcgagcgaccaccgtgccgaccgcaatgcacgcgcgcaacttcgccgcgccgaccggcaggcgcaggagaacggccgtggctga

SEQ ID NO: 534622 - DNA, 372 bp, Stenotrophomonas maltophilia; identical to SEQ ID NO: 332637

SEQ ID NO: 534623 - DNA, 528 bp, Stenotrophomonas maltophilia; identical to SEQ ID NO: 332638

SEQ ID NO: 534624 - DNA, 225 bp, Stenotrophomonas maltophilia; identical to SEQ ID NO: 355864

SEQ ID NO: 534625 - DNA, 1539 bp, Stenotrophomonas maltophilia
gtgccgcgcttcgccgcgaccgtgtcgcagctgcaggatgccgtggcgcacgcaacgtcgccggcagcgcatctgcccacggctcgctatgcgcctcaccgtcccgagcgcacgctgctgtattcgctggtgcaggcgcattggccggactttctcgcgcgccgtgaggtagaagaccgcccgctgcccgagtatgtgcgcgaggagttcgagacctacctgcgctgcggcgtgctcgagcacggcttcctgcgcgtggtctgcgagcactgtcgtgccgagaggctggcgtattcctgcaagaagcgcgggctgtgcccgagctgcggcgcgcggcgcatggccgagtcggcgcggcatctggtggacgaggtgttcggcccgcggccggtgcggcaatgggtgctgagtttcccctacccgttgcgcttcctgttcgccggcaaaccggatgccatcagcccggtgctgggcatcgtgcatcgtgtgatcgccagctggttagccgatcaagctggcgtcgaccgcgccagcgcgcaatgcggcgcggtgacgctgatccagcgcttcggcagcgcgctgaacctgaatgttcacttccacatgctgtggctcgacggcgtgtacgacgcgaacgtcgagcccccgcggcgcaagccgcgcctgcgccgcgcccgtgcccccacctctgcgcaactgacggaactggccaacaccatcgcgcatcgcgtgtgccggcacctgtcgcgccgcggctggctcgaaggcgaagacgaatccgtgttcctgtccgacagcgcgggtagcgacgacggcatggatgggctgcggatgagttcgatgacctaccgcatcgccaccggtcgcgacgctggccgcaaggtcgtcacgctgcaaacattgcccggtgacgcaggctcgctggagggcgatgccggcaaggtcggcggcttctcgctgcatgccggcgtggccgcggaagcacacgaaagccacaagctcgaaaagctgtgccgctacatcacgcgcccggcgatcagcgagcagcggctgtcgatctcaccgcagggtagggtgcggtatcagctcaagacgccgtggcgaaatgggaccacgcatgtcgaatgggatgcggtggactttatcgccaagctggcggcactggtcccgccacctcgcgcgcatctcacccgcttccacggcgtattcgccccgaatgcaaacctgcgtgcgcagctgacgccctcggggcgcggcaagcggcctgcgggcgatgcggcgccagtggacgtcagcgcccacgacgagccgcgcagccccgagcagaagcgccgtgcgatgagttgggcgcaacggctcaagcgggtcttttccatcgacatcaccacctgcgcccactgcggcggcgcggtacggatcgtcgccagcatcgaggaacccaccgccatccgcgccatcctcgcccacttcgagaagcacggcgcgctggagcaagcgcactaccggcccgcagcgcgcgcgccgccgccggccgcgtga

SEQ ID NO: 534626 - DNA, 669 bp, Stenotrophomonas maltophilia
atgagcacaaaacaacgttactgcctgcgcgttctcgtggggatcatatcggcgacggccgcgctgcctgccgctttcgcgctggacatcacgctgcccgctgagacggccgcatacaagcccagcgagctgccgggctaccggctggtgcagcagaactgcatgacctgtcattcggcgcaatatgtgcagtaccagccgtccacctccccgcgcagctactgggaagccacggtgaagaagatgaaacacccgttcggtgcgcccttctccgacgaggacattccggcaatggtcgactacctcgtcaagacctacggcgccgagcagaccaccgctgccacaccggcacccgccatggtggccgccgcgccgcccccgaagaccgctgcaccggcaacccccactaccgctgcgtcgctgcagcccgaagcgctgctgaaggccaacaattgcaccgcttgtcacgccgtcgagcagaaggtcgtgggccctgcgttcaaggaggtcgcggcgaaatacgccggcaaggccgatgcgctgcagcaggtggccgccaacatccgcgcgggcggcgccggcaagtggggcacggtgccgatgccgccgtacccgggactgacgccggccgagctggatacgctggcgaagtgggtgctgagccgctga

SEQ ID NO: 534627 - DNA, 1206 bp, Stenotrophomonas maltophilia
gtgctgaagaccttgggcgccatcggcgccggtgccggcctgatgggtccgaccgccgaggcgcttgcggcgattgcgggtcgcgtcgtgttgccgttcgacaatggcgagcgcgagttggtggcctttccgcagaagcgcccgctgatcctgctgaccagccggccgccgcagctggagacgccgttttcggtcttcaacgaaggcgtcatcacgcccaacgacgcgttcttcgtgcgctaccactggagcggcattcccacctcgatcgatccgcaaagctatcggctgcgcgtgggcggcaaggtcaacacgccgctggagctgtcgctggacgacctgaagcgtctggccgacccggtggagctggtggcggtcaaccagtgctccggcaacagccgcgggcatttcacgccgcgcgccaacggcggccagctgtccaatggcgcgatgggcaacgcacgctggacaggggtgccgctgaagaaagtgttggagaaggccggcgtgcaggccggtgccgtgcaggtgagcttcaatggcctggaccatccgccgctgcaaggcgagagcccggacttcgtcaaggcgctcgcggtcgaccacgcgctcgacggcgaggtgatgctggcctgggcgatgaatggcgaggacctgccgatgctcaacggctatccggtccggctgatcgttcccggccattacggcacctactgggtcaagcacctgtccgacattcaagtgctggacaaggcgttcgacgggttctggatgagtacggcctaccgcattcccgacaacgcctgcgcctgcgtggagccgggcaaggcgccagccaagaccgtgcctatcaaccggttcaacgtgcgctcgttcatcaccagcctgcgcgacggcgacaaggtgcgcgttgggcgcgagacggtggtgcgcggcattgccttcgacggcggcttcggcatcaccgaagtcgccttctccgccgatggtggacacacctggacggaagcccggctcggcaaggatttgggcaagtattccttccgcgagtggagtgtggccttcaagccgagcaagcgaggcgctcatgaactgaaggtgcgcgcggtcaaccgcatcggtcaaagccagccgctgtccgcgttgtggaacccggccggctacatgcgcaacgtcgtcgagaccacgcgcgtcgtcgcggcatga

SEQ ID NO: 534628 - DNA, 1386 bp, Stenotrophomonas maltophilia
atgaaacgactctccctcactctgccgctggcattgttcagcagcatcgtgctggccgcgccggcccccgccgatcgcgtctacaccgccgaccagaacaccaacacggtgtcggtgatcgatccttcgtccaacacgctgctgggccagatccggctgggcaacgtgcggccggaggtgctgtcgccgttgtacaagggtgagctcaacgtgcacggcctgggcttctcgcctgaccacaagaccctggtcgcgatttccaacggctccaattcggtcgccttcatcgacaccgccaccaaccaggtcaaaggcatcgcctacatcggccgctcgccgcacgaggcgttcttcacgccggacggcaagcacgtgtgggcggtcgtgcgcggcgagaactacgtgtccgtgatcgatgccgcgaccttcaaggaagtcggccgcatcgaaaccgcgcccgggccgggcatggtgctgttccatccgcagaagaacatcgccttcgtggtgcacagcttcacgccggaggtggacgtgatcgacgtgcccacgcgcaaggtgatcaagcgcatcccggtggtcagcccgttctcgcccttcctgcagttcaccccggacttcaaggaagtgtggatgacgcacaaggacgtgggcaaggtgacccgcatcgacaccgatacgcttcaggtcaagggcgtgatcgagaccggattcatcaccaaccacctcgggttcgccaagaccgcacgcggcacgctggcctacgtgaccatcggcggcgagaacgtggtgaaggtctacaccaccgacgccacgcccaagctgctggccaccatcccggtgggcgcgctaccgcacggcatctggccatccgacgatggcacgcgcatgtacgtggggctggaaaacggtgacgcggtggacgtgatcgacaccgccaccgaccgggtgatcgctcgcgcacccgtggggcaggccccgcaggcgctggtctatgtgtcgaacgccgtgcccagcggcacgggcacagcccacctcgtgccccgcgtcaacgacgagccagtcaacattacgctcaaagccacgcagggagaggcccgcggcttcgtcgtggcgcgcaacctggggctggtggacgctctggaagtcttcctcttcaagctcaagccgcaaacggtgtacaacgtgtatgtgagcagccagcgttcgccgatcgcgagtttcaagaccaaccccgccggggcggccaacggcacggtgatcggcccgctgcgagacgcggtgaccaccatgtcgtcgaaaacgccttccgtcgcgcagattctcgtggtcgaaggtgatgcggcggcgcaggcgtcgaatgcagttctggtgagcgcccgatag

SEQ ID NO: 534629 - DNA, 492 bp, Stenotrophomonas maltophilia
atgcagacccccgccttcacgatcacgttgctctcgagatcaacccgcccgctggtgtttgctgccttggccatgttggtagcttcaccggcgctggcgcaacacgcccactcccacccggccgcaaccctaatgcaatccccgccggctttcgtggcgagcacggccaaacctttcgcccaattgatggacgacgcgatggcggtgatggagcacgacatgcgcgccgcgccgatgaacggcaacccggaccacgacttcgtcacgatgatgattccgcaccatcaaggcgccatcgacatggccaaggccgtcctcctgcatacccaggaccccgagctgcgcaacctggcgctgtcgatcatcaccgagcaacacaacgaaatccggctgatgcaggcctggctcgcacgacatgccgacggtgccgccacccaggacgcagcgggcaacccatcccactccaccagcacaacacaaggaacccggtga

SEQ ID NO: 534630 - DNA, 843 bp, Stenotrophomonas maltophilia
atgaacgcattgcccatcaccgaagccgatctgcaggcttatgtcgatggcctgttgcccgaataccggcgcgccgagatcgaaagctacctggcagagcgcccgcaggaggcgcagcgcctgcaggcctaccggcaagacaagcaggcgatcaaggcgctgtacgggtcgctgctggatgaacccgttcccgacgtattgctgcaggctgcccgtgcgccgcgcacgcgctccgctgcaccccacgcgggaacgcgcctgtcgcgctggtcgctcgaacgcgtggccgcgggcttttcactggtgtttgtgggtgcaggcgcaggctggctggggcgaggcgccttgcaaccgccagagatgctcgcccgatcgacccgtggaccggcggccatcatcaacgcggcggccggcagcctgtcccggcaagccgccatcgcgcacgtggtctacagccccgacgtgcggcgcccggtggagatcggcgccgaccaggaagaccagctggtcgcctggctgtccaagcgcctgggcgcaaagatccgccccccgaagctgggcgcgctgggctacgagctgatcggcgggcgcctgctgccgggatcaagcggcccggtggcgcagttcatgtaccacgacgccacggggcagcggctgaccctgtatgtcacccacgagcaggccgccaaccaggacaccggcttccgcttcgcacaggaggggccggtcaacgtgttctattggatcgacggcaaattcggctatgctttgtcggccggtatcaacaagggcgagctcgcgcgcatcgcaacagccgtctattcccaactgcaaccgagctga

SEQ ID NO: 534631 - DNA, 528 bp, Stenotrophomonas maltophilia
atgaatgcgcaggaggtgtcactgaccgaggcgggcgcgcttatggtcgccgccctgccgcgcctgcaccgctacgcctgcgcgctcgtgggcgaccgcgccgctgccgacgacctggtacaggacaccctggagcgggcctgggcgcgcatcgacagttggcggccggacggcgacatgcgcgcctggctgtttagcatcctgcacaacctgcatgtggaccagcgccgccggcccgccgtggcgaccgtgcccctgcatgacgaagcgctggcgttgccggtgagggcttcacagaccgatggcctggacatgagagatctcgaaaccgcgctgcggcagattccgaccgagcagcgcgaggtgctgctgctggtggcgctggaagacatgagctacgaggagatcgcgcgtacgctcggcgtgccactgggcaccgtgatgtcgcgcctgtcgcgtgggcgggctcgcctgggtggcgtgatggaggggcgttctcaaccccagactctgaaggtggtgaaatga

SEQ ID NO: 534632 - DNA, 438 bp, Stenotrophomonas maltophilia
atgcggctcaccgccaccgccaccgccaccgctttcgctctcgcgaccctgttcagcggcacggcgttcgccggacccgccgacgacgcccgcacgcacttccaggccatcggctcgggcgatctggccgcgctgatgcgcggctatgccgacaacgcccacctcacctgggttggggggccgctggacggcagctacgcgggcgccgatgcgatccgcggcgtgtgggaaaagttcaccaagtcccaaggggccttgaaggtgtcggtcgacaaggtcgaggaagccgccaaccccaggggcgcgaccgtgaccgccaatgtgcagttcgagggcaagcagccaatcaaagtgcgctatgtgttgatctaccgcgacgcgaagatcgtcaacgaaacctggcagatcgatccgaaactggcggtcgccagctactga

SEQ ID NO: 534633 - DNA, 369 bp, Stenotrophomonas maltophilia
ttggggctagcgacgaagtgttgggcgccatcggtcctagcgcagattgaagcgctggcgcagcaggtcgaggcctccaagcagaaggacccggtcgggtacgtgaagaagaacgccagcaaccgactggcggccatcacgaagctggcgttcgacgttattccgcaagatccgacacggccggagtaccgccagggcggcaccctcggcgacgagcacaagcactggttccgggcgaaattctttcagcagtaccggctgttcttccgctaccacgcgccgagcaaggtgatcgtgttcgcgtgggtcaacgacgaggacactgatcttgcccccgtagttccggacactgtccagtcgctaagttag

SEQ ID NO: 534634 - DNA, 1050 bp, Stenotrophomonas maltophilia
gtgtgcttccgcggccacgccggcatgcagcgagaagccgccgaccttgccggcatcgccctccagcgagcctgcgtcaccgggcaatgtttgcagcgtgacgaccttgcggccagcgtcgcgaccggtggcgatgcggtaggtcatcgaactcatccgcagcccatccatgccgtcgtcgctacccgcgctgtcggacaggaacacggattcgtcttcgccttcgagccagccgcggcgcgacaggtgccggcacacgcgatgcgcgatggtgttggccagttccgtcagttgcgccgatgtgggcgcacgggtgcggtgcaggcgcggcttgcgctgcggacgctcggtggtgtcctcgtacacgccgtcgagccacagcatgtggaagtggatgttgagattcagcgcgctgccgaagcgctggatcagggtcaccgcaccgcattgcgccgtatcccgcggcacgccggcctgatcggcaagccaaccggcgatcacacgatgcacgatgcccagcaccgggccgatggcctccggcttgctggcgaacaggaagcgcaacgggtaggggaaactcagcacccattgccgcaccggccgcgggccgaacacctcgtccaccagatgccgcgccgactcggccatgcgccgcgcgccgcagctcgggcacagcccgcgcttcttgcaggagaacgccaccagcctctcggcacgacagtgctcgcagaccacgcgcaggaagccgtgctcgagcacgccgcagcgcaggtagtcctcgaactcctcgcgcacgtactcgggcagcgggcggtcttcggcctcaagacgcgcgatgaagtccgggtagtgcgcctcgaccagcgcgtacagcagcgtgcgctcgggcaggtggcgcgcgtaacgcgcagcggcgtgggcggccggcagtggcgcgcacacctcggcctgccgccggggtgcggtcaggcgcggcacgcagcgctccgttgcagggacggctgctcagggttgcgcccgcgagcacgcgttcatatcggcgttttctga

SEQ ID NO: 534635 - DNA, 1995 bp, Stenotrophomonas maltophilia
atgagcgaccgccgcgacgacgatttccgggtacgccccagcgccccgaagaaccggggcaagggtcagggccagagcttcgtttccaaggtgctcaagcaggcaggcaaggccagcagcggcaagtcctcgatgcgccattccgcagccggcggcagcggcgcacgcgccggtcagcgccccggttcacggcttgggcgcggccacacggcggcgcgcttcgccggggcgaagctgacgcccatgtcgcggcgcgtgaccatcaagaccctgctggtcaaccagcgcaacgccagcccgcagtcgctcgccaggcacctgcgctacattgagcgcgacggcgccggccgcgatggcgaaccgggccgggcctacgggccgcagaccgacgaagccgacctcgatgccttcaaggagcgggccgccgacgaccggcaccatttccgcttcatcgtctccccggaggacggcgccgagctggacgacctgcgcacctacacccggcatctggtgaaccggatggaagccgaccttggcacgcggctggattgggtggcggtggatcactggaacaccgacaacccgcacgcacacctgatcgtgcgcggacgcgacgacaccggcaaagacctcatcatcgccggcgactacatcgcccacggcttccgccatcgggccgccgaactggcgaccgaatggctggggcagcgcaccgaactggagatccagcagaccttgggacgcgaggtgaaacaggagcggtggacgagcctcgaccgcacattgcagcgtgaggccggcgtggatggccgggtgcagatcgaacgcttcaatgaaccccggctgcaacgccagcggctgctgctgatcggccgactccaacgcttgcagcgcctgggcctggccgacgaggtgcagcccggcacctgggccgtccatgcggacgcggagaagaccttgcgtgccctgggcgagcgtggcgacatcatccgcaccatgcagcgcgccatgagcggccagccgcgcgaactggcggtgttcgagccgggcgacgacggccgcaccatcgtcggccgcgtggccggcaaggggctggccgacgagctgcacgaccgcggctatctggtcatcgacggggtggacggcaaggcccactacgtcgcgttgaacgccggcgacgagctggcgaactatccaaccggatcggtggtggaggtgcgtggttccgcggaggtacgggcggccgacaagaacatcgccgcgctggcgagcgatggcctgtaccgcaccgatcatcacctggcgatcgagcagggccgggccaagcccgaccgcgacccgcagcaagtcgtcgcggcccacgtccgccggctggaagccctgcgccgggccggcatcgtggagcgcgtggccgaggggttatggaaggtgccggacgacctgaccgagcgtggccgccagtacgacgcgcaacggctgggcggcgtcgccgtggagctgaaatcgcacctgtccatcgagctgcaggcgcgcgtgatcggagccacctggctcgaccagcagttgatcggcggcggcaaggggctgggcgacttgggctttggtggcgaggtcaagaacaccctgcaacagcgcgccgacttccttgaagaacaggggctggcggagcggcgcgggcagcgagtgatcctggcgcgcaacctgctgggcacgctgcgcaatcgggaactggcgcaggccgccaaggacattgccgccgaaaccggcctggcgcatcggcccgccacggacgggcagcgcgttgcaggcatctaccggcgctccgtcatgcttgccagcgggcgctatgcgatgctcgatgatggcatggggttcagcctggtgccgtggcggcctgtgatcgaacagcggcgggggcagcaactcgcagcgacgatgcacggtatcggggcatcgtgggaagtcggtcggccaaaggggccatcgttgggctag

SEQ ID NO: 534636 - DNA, 402 bp, Stenotrophomonas maltophilia
gtgcaggtggtgtggaaccggatcatcctgcccgacacgtcctcgctgacgctcgacaacctcgtgggcaccgatccggccggctacgccggcctggaagacgacgtggactggcactggaagcgcatcgtcgctggcgcggtgctgacgacgctgctgggcgtcggtgccgagctggccgcaccggagaaccgccaggacggcaaccgcatcgtcatcgccgggcgcgacagcgcacaggacagcatcaatcaggtcggccaggagatcacccggcgcaacatgaacatccagccgacgctgaccacgcggccgggcctgccggttcgcatcatcgtcaaccgggatctggtgctgcggccctaccagccgctgttcttcaatcggggagcttcgcaatga

SEQ ID NO: 534637 - DNA, 837 bp, Stenotrophomonas maltophilia; identical to SEQ ID NO: 512155

SEQ ID NO: 534638 - DNA, 264 bp, Stenotrophomonas maltophilia
atgatcgatccactcgttaccttcgtgctgctggcggccattgcggtcgtctccatcggtgccgctcgcatcgtgtcgtggctgctggaccggcgtgaccgtgccgccgtccggcgtgccaaggaagcggccatcgtcgcccaggctcgtgccgagctggcggcatcgggctggaccgctgaagacgaagccgcgtcccaagccattcgcgcccagctgggggtttgcctggagcgcatgcggggatcgatccatggccgttga

SEQ ID NO: 534639 - DNA, 525 bp, Stenotrophomonas maltophilia
ttgttcctcgatgccccggtgtttgccgcgcgtatccgccagtggctcaagacactgcgcaagaagaacgtcagcgtcatcttcgccacgcagagcctcgccgacatcaaggattcgagcatcgcgcccgcgatcatcgagagctgcgcgagtcggattttcttgcccaacccgcaggcgacagagccgcagattcgcacgatctacgagggcttcggcctcaacatgcggcagatcgaaatcgtcgccactgcgcagcccaagcgagactactactaccaatcccgcctcggcaaccgcctgttcgacctcgatctggggccggcagcgctggcgtttgcgggcgcttccacgccgcaagaccagcgcgacatagaccgcgtgctgctggacgccggcgtgcccggcttcgcgggcgcctggctgcgccatcgcggcctcgattgggcggccgacctgctgccctcgttccccggcctcgcgccgggttccctcgctgaccaacccctggagaatctgccatga

SEQ ID NO: 534640 - DNA, 726 bp, Stenotrophomonas maltophilia
atgaagaagcgtcttatcgccaccgccatcgcggccatgctttgcaccgccaccgcccatgcgcaatgggtcgtggtcgatccgacgaacctcgtgcagaacacgctaaccgcgatccgcacgctggagcagatcaacaaccagatccagcagcttcagaacgaagcgcagatgctgatgaaccaggcgcgcaacctcgccagcctgccgtccagcgtggtgaaccagttgcgcgccaatctggcgacgaccgaacgactgatcgcccaggccaggggcttggcctacgaagtgacgaatttggatcgggagttcgcgcgcctgtatcccgagcagtacgccgccacgatcagcggcgaccagatgtaccgcgatgcgcaggagcgttggcggaacacgctcaacggcttgcagaccacgatgcagatgcaggcacaggtgtcgcagaacctgggcgaagacgaaagcgtgctggctgacctcgtgggcaagagccagtcggccgaaggcgcgctccaagccatgcaggccatgaaccagttgctggccttgcaggccaagcagtcgatccagtcgcaacggctccagatcacgcaggatcgtgcggcctcgctggaactggcgcggcaggcggccgccaccgagcgagcgcgcgaagtgcggcggcgtttcatcggcgatggcacgccgtacacgccgcagcgcgtggatttctacggcaattga

SEQ ID NO: 534641 - DNA, 705 bp, Stenotrophomonas maltophilia
atgcgattcaagaaaccgcaggtgcgctatgccgacacgccgcagcctgccacgccgtaccaagctgccggccaggtgtgggacgagcgcatcggcttgccgcgcgtgcaggcgaagaactggcgcctgatggccttcggctgcctaacgcttgcgctgctgatggccggcggcctggtgtggcgctcggcgcaatccatcgtgacgccctacgtcgtggaggtggacaacgcgggccaggtacgcgccgtgggcgaagccgccacgccataccggcccaacgatgcgcagaccgcgcaccacatcgcgcgcttcgtgacgctggtgcgctcgctgtccatcgaccccatcgtcgtccgccagaactggctcgacgcctacgactacacaaccgacaagggcgcggccgtgctcaacgactacgcacgggtcaacgacccgttcgcgcgtatcggcaaggagtcggtaacggtgcagatcaccagcgtcgtgcgcgccagcgacacgtctttcaacgtgcgctggacggaacgccgctacgtcaacggcgccgcggcgggcttggagcggtggacggccgtggtgtccatcgtgctccagccgccgcgcaccgaagaacgcttgcgcaagaaccccctgggcatctacgtcaacggcctgtcgtggagccgcgaactggattcttccgaaggagccaagccatga

SEQ ID NO: 534642 - DNA, 429 bp, Stenotrophomonas maltophilia; identical to SEQ ID NO: 512146

SEQ ID NO: 534643 - DNA, 714 bp, Stenotrophomonas maltophilia
gtgaacgaagcagcgctgaacgcgacgcggcgcaaggcgcaggctgtggaactgcaagacttcaccgccgccatcgagcgcatcgtggccggcctggaaaggaagaaccgtgtgctcaatccgaaggagcgggaaaccgtggcctatcacgagatggggcatgcgctggtggcgctggcgctgcccggcaccgatccggtacacaagatttcaatcgtgccgcgtggcatcggtgcactcggctacaccctgcagcggcccaccgaagaccgatttctcatgacacgtgccgacctggagcacaagatcgccgtactcccgggagggcgcgcggctgagaagctcgtgtttggcgagctgtccacaggggcttcagacgatctcgcgcgggccaccgacatcgcccgcgacatgattacgcgctttggcatggatgagggcttggggtacgttgcttttgaggcacagaggccgcgttttcttgatgcgcctgaactggtacagggtggctgccgggtggccgaatcgactcagacacgcatcgatcacgccatccgtgacatcgtgatgggtgtgttcgggcgcgcctaccgaattcttgaaatcaaccgagaagtgctggagcggtgcgcgcgcgaactgctggcgcgggaaacgctcgacgagaacgacatccttcaattgacccaaggacttattcttaatagaaactag

SEQ ID NO: 534644 - DNA, 426 bp, Stenotrophomonas maltophilia
ttggatcgggagttcgcgcgcctgtatcccgagcagtacgccgccacgatcagcggcgaccagatgtaccgcgacgcgcaggagcgttggcgaaacacgctcaacggcttgcagaccacgatgcagatgcaggcgcaggtgtcgcagaacttgggcgaagacgaaagcgtgctggccgacctcgtgggcaagagccagtcggccgaaggcgcgctgcaagcaatgcaggctatgaatcagttgctggccttgcaagccaagcagtcgatccaggcgcagcggctccagatcacgcaagaccgagcgactgcgctggagctggcgcggcaggcggcagccacggagcgcgcccgcgaggtgcggcggcgcttcctgggcgacggcacgccgtacacgccgcagtccgtgaacttctacggcaactga

SEQ ID NO: 534645 - DNA, 321 bp, Stenotrophomonas maltophilia
atgcgatgcgtcctcgtcctgtgtgtcgcgctgctggccgcgtgcagcgagcagccggccgaccaccttgccgatgccctggccgccgatcccgtgcggctcaaggcattgcgcgcgcaatgcgcagccgaccggcaggccacgggcgaggacgcctgccgcgccgccgccgaagccttccggcggcgcttcttctccggccaggccgggccggatgaataccagacgctggccgacctgccgccgatcccgccgagcttcgatgaaccggccgatggcgaagcgccgcccttgaccgccgtaccggaggacacgccatga

SEQ ID NO: 534646 - DNA, 504 bp, Stenotrophomonas maltophilia
gtgacgccctacgtcgtggaggtggacaacgcgggccaggtacgcgccgtgggcgaagccgccacgccataccggcccaacgatgcgcagaccgcgcaccacatcgcgcgcttcgtgacgctggtgcgctcgctgtccatcgaccccatcgtcgtccgccagaactggctcgacgcctacgactacacgaccgacaagggcgcggcggtgctcaacgactacgcacgggtcaacgacccgttcgcgcgcatcggcaaggagtcggtgacggtgcagatcaccagcgtcgtgcgcgccagcgacacgtctttcaacgtgcgctggacggaacgccggtacgtcaacggtgccgcggcgggtttggagcggtggacggccgtggtgtccatcgtgcttcagccgccgcgcaccgaagaacgcctgcgcaagaaccccctgggcatctacgtcaacggcctgtcgtggagccgcgaactggattcttccgaaggagccaagccatga

SEQ ID NO: 534647 - DNA, 531 bp, Stenotrophomonas maltophilia; identical to SEQ ID NO: 508189

SEQ ID NO: 534648 - DNA, 465 bp, Stenotrophomonas maltophilia
gtgcggtatcagctcaagacgccgtggcgcaatggcaccacgcatgtcgaatgggatgcggtggacttcatcgccaagctggcggcactggtcccgccgccacgcgcgcatctcacccgcttccacggcgtattcgccccgaatgcaaacctgcgcgcgcaggtgacgccatcggggcgcggcaagcggcctgcgggcgatgcggcgccagtggacgcaagcgcccacgacgagccgcgcagccccgagcagaagcgccgtgcgatgagctgggcgcaacggctcaagcgggtcttttccatcgacatcaccacctgcgcccactgcggcggcgcggtacggatcgtcgccagcatcgaggaacccaccgccatccgcgccatcctcgcccacttcgagaagcacggcgcgctggagcaagcgcactaccggcccgcagcgcgcgcgccgccgccggccgcgtga

SEQ ID NO: 534649 - DNA, 504 bp, Stenotrophomonas maltophilia; identical to SEQ ID NO: 534646

SEQ ID NO: 534650 - DNA, 177 bp, Stenotrophomonas maltophilia; identical to SEQ ID NO: 511045

SEQ ID NO: 534651 - DNA, 729 bp, Stenotrophomonas maltophilia; identical to SEQ ID NO: 521076

SEQ ID NO: 534652 - DNA, 624 bp, Stenotrophomonas maltophilia
atgaacctcgccctgcccgcccctgccatcggctatgcgccaccgcctgcaggccttaccctgtacgccgtggaagccagcgcactgccaaccgatgaagccttgatgctggcctgggccggtggcgacctgcgcgcgttcgaaagcctgtatgggcgccaccgcaagcgcctgttcggcttcctgctgcggcaactgcgcgacaccgcgctggccgaggagatcttccaggacgtctggcagcgggtgatcagcgcccgtgccgggtggcaaccggacgcggccttcagcacctggctgttccgcattgcccacaaccgcctgaacgaccattggcgcgccgcccgccaccgcccggctgccccggccgatgccgatctgcgcctggccgcgatcgaggatgggcagaccccggaaggcgagctttccgaattcgaacaacgtcgccgcatccagctggcgatggaacaactgccgcctgagcagcgcgaagtgctgcaactgcggctggatcaggaactgagcctggaggagatcggccagatcaccggcgtaggccgggaaaccgtgaaatcgcggctgcgctatgcgatggacaagctgcgtgcgggattgaacgcatga

SEQ ID NO: 534653 - DNA, 264 bp, Stenotrophomonas maltophilia; identical to SEQ ID NO: 352461

SEQ ID NO: 534654 - DNA, 285 bp, Stenotrophomonas maltophilia
atgaagtcctttgatttgttgggacagcgggacttcaaagaatcgcaaatcgacttcgggttcttcttggcggcagagtgcaagcagtgctggcagccgcgacggtgtaatgccgtcggaaagggcgatacgcagttggctatggaagccgttggcggcagccttcacactgtcgcgggcctgctgtatggcaaggaaaacacggggcacgtgatccaagaacagcttgccggcccgagtcagtcgagtgctgcgactggtgcggacaaaaagctgctctcctaa

SEQ ID NO: 534655 - DNA, 1464 bp, Stenotrophomonas maltophilia; identical to SEQ ID NO: 352509

SEQ ID NO: 534656 - DNA, 3153 bp, Stenotrophomonas maltophilia; identical to SEQ ID NO: 433534

SEQ ID NO: 534657 - DNA, 1179 bp, Stenotrophomonas maltophilia; identical to SEQ ID NO: 352507

SEQ ID NO: 534658 - DNA, 321 bp, Stenotrophomonas maltophilia; identical to SEQ ID NO: 433537

SEQ ID NO: 534659 - DNA, 144 bp, Stenotrophomonas maltophilia; identical to SEQ ID NO: 352505

SEQ ID NO: 534660 - DNA, 192 bp, Stenotrophomonas maltophilia; identical to SEQ ID NO: 352504

SEQ ID NO: 534661 - DNA, 1272 bp, Stenotrophomonas maltophilia; identical to SEQ ID NO: 352503

SEQ ID NO: 534662 - DNA, 609 bp, Stenotrophomonas maltophilia; identical to SEQ ID NO: 352502

SEQ ID NO: 534663 - DNA, 264 bp, Stenotrophomonas maltophilia; identical to SEQ ID NO: 352501

SEQ ID NO: 534664 - DNA, 168 bp, Stenotrophomonas maltophilia
atgatcgacggcgcggattgcagcacggttcccatgttgctcgtcatttttctggcggtgcagccgtcgcattcagacgatttccgcaacacgcaggagccaaatggtcttgacaccgacagttacagcttaaccgtttttgatgacgacctgatggcgattcgatag

SEQ ID NO: 534665 - DNA, 1131 bp, Stenotrophomonas maltophilia; identical to SEQ ID NO: 349104

SEQ ID NO: 534666 - DNA, 1683 bp, Stenotrophomonas maltophilia
atgaactcgaaaaaatgcctcgcatccctgattgattctttgggggagcatgccaacatccgagaaaccatcgggcaaatcgacatttccgggcatgtctctcctgaaaaatcggacgatttcaagcaggccttcaaagatttctcggaaaagaaatctgaggcttggtcgatttctatccgtgatggcgaattttccgagatctccacagatgccattgcgaatgaggatgtcacccttgtaatcaagaagccaataggaggcaggattttctttgcgtcactagcaggattctcggcagccttggaagacaaggcgctgacattggctagcgagctattggtgctaagttcttttaatggattcaaaaccagaggattttctgtcctgccttgggatggtgaacctttgcctggcttgccgtgcttggagcctgattcagatgcaatcgaccctagaaaaggcgtagtacgagacttgaccggcaacactgttccggcagacccctatcgttggatactagtaggtcatgacggcggcggcgagccgtggaatatatggaagactctggcaactaaaaatctggcaacactacttgtttcggatgtctggaaagaagatacaacgaaagtatccatcaatggcgcgagaaagcgcactttctcactcggagaaaaatgccaggatagcaacgcttactcgaaaatatgccaagctgccgattggatacttgtaaagcaggacacggaagcccggcatgaagttcttgtgcgacgtctttcttcgattgtcagagactccgactccaatggagtcgcggagtggctaaccgtattgcctgaatctctgcaagaagcccttgatggggctcggcttgatcatcgcgcctatgtgagatcaaagtcagcagaaacggtaaaagctatggccgacctcagaaaggcggttggagaagatgtttcgcgtatcgtagagcgcattcatagactttctgcaggttttgtgattggtctggctgcactggcaacggggctaggtgtccgccttacattgctgacctctcagaagaacacctgggcagttgctgggataattttctgctgcgtcgtactagcgattacatgggcaagcattgttcttcagcatcatgttagctctaaatcattggtaaatgagttgcgcaacatgaggcgttggcataaaaacattcacatagcactaacccggtcggactatcgagagttggcattacatccggtgcttgatgccattcgcctatataagaaaacagcgaagtccaccattaatggaatgattgccgcttcatttgtttttattgccctttttattattaccccttttttctactcggcagaacctgttggcgccaatgataaaaatagggagtcgcaatcattacttaattctgatattgaagagtcggctttaaaagttagccctacccagagagagggcagaaatttggaagtagctccccctacagggcaagagtcaaattcagaagacgacaaagccgtacaagatacgagcattcttgatgataagcagagcagctcttcccaagatgtatttgaggccggagaaaagggccgaagccccgaaaattatattagccctcgctcggcgaacgacaccgttcctacacccgctacgatcatgtga

SEQ ID NO: 534667 - DNA, 696 bp, Stenotrophomonas maltophilia; identical to SEQ ID NO: 349102

SEQ ID NO: 534668 - DNA, 174 bp, Stenotrophomonas maltophilia
atggaaagcccgatcattgaacccttgctggacgacatggctgcgctgcatgaagccagcgcgatcagtcaggagacgctgcaggagttcgccgcactactgacgctatccgggcctgtcgattcccgtatcactgatacgagaatttctgagcagcgggcctctcaatcgtag

SEQ ID NO: 534669 - DNA, 321 bp, Stenotrophomonas maltophilia; identical to SEQ ID NO: 433547

SEQ ID NO: 534670 - DNA, 306 bp, Stenotrophomonas maltophilia
atggccttgcagctggccgacctgcaagccgagcaggctgctgtcgagccgccgcaagagcgcgcgcccagcgctgcacccatgccctacggctactggatcagcgaggacagcttcaatcgcgtggagcgtgcgcgttccgcctctttgctgctgtccagcgtaggcgagggcatcggcgagtccgtggcgttgtcgttcgatgccgtggcggccagcgccgcctacgtgcatgaagacctggccgctgtggtggccagcgcccgacacagcagtcagatggaggccgacgatgacgcggcctga

SEQ ID NO: 534671 - DNA, 594 bp, Stenotrophomonas maltophilia
gtgtcgtgggtacgcggccgattgaaatggcgctatgacaccaagatcgaggaggctgagcagcagagtaagcaactgcatcccatcgcattggacgggatgcgaccgaccgcgcggagcggagcggaagcgggggcgggcgcacccgtcacgtatgcgaccgtggctgagtacgctactgctcatctcccgcgcatcggaacaatgccctggactgctccgatctatgaccagcgagcggtgaccagcgatccgcagctgtactgcattgccagtggcgaagggctggacggcaacgggcaacacaccgcggcaacctgcacatgtctgacagagcagggcacacgttacgagttgagccagccggaatgccgaacgctggcgcgcaatggccctgtctacaatccctacaagaccacgcaaccccaagcgcctgcgccggcgatgccggcagttgctagtcaacgggccacggccggcacacagggcgcagtgatcagccgcggcgagcgcgccaacggcagtttcccggaatcgcctgcgtttgagtctgatacctacctgaccagtccgacaatcccgacaaagctctga

SEQ ID NO: 534672 - DNA, 735 bp, Stenotrophomonas maltophilia
gtgatcgactttcactgccacttggatctgtatccggatccgcacgcggtcgctgcggcgtgccaggagcggggcctctacgtcctgtcggtcaccaccacgccatcggcttggaatggcacctcggccttggcgctgggcaagagccgtatcagaactgccctcgggcttcatccccaagtggcccatctgcgcaaatcggagctgccgctcttcgaacagttggtggggcagacgcgatatgtgggcgaaattgggttggatggggcgcctgagttcaagccgcactggaatgaccaagtggaggtctttgagcgaatccttgcagcctgctccagcgcgggcggcaagatcctctcgttacacagccgccgcgctagcaaagatgttctgaatcggctggaaaagcatccgcgggcaggaattcctatccttcattggttcagcggcacggtgaaagaggtcgacaaggcggtggagcagggatgttggttcagtgtgggcccagctatgctaagtacctcgaagggccgtgctctagttgatcacatgcctcgagagaaagtgcttaccgaatctgacggcccatttgtgcaaattgagggcagatctatcctgccatgggaggcttcgcgtgcggtgctcgccctcagtgacttgtggcatgtaccttctgccgaggtaacgcagcagctttctttaaacctaaagacgttgggttcggttcacatctga

SEQ ID NO: 534673 - DNA, 1278 bp, Stenotrophomonas maltophilia
ttgaagatcttctgtgcaccgaagggctgtccggtcccgcaaggccacgatctagaggtcctgctttacggccagcgcgatcggtctaacgatcaccaaggtagtgtgggagaagccgtccagcgggaaatttaccgcgctggactactgccggatcaacgcgcctgggactttctctcgctggcattgtcggtggtgactgcagacgtctcggtgacgcgcagtgacagccccgatgggtggacgcgccagatagagctggtcattgccgtttcggatcctggcttctggtccacccaatccgacgccatccaagcaatgctgggctttctgtccacggatcgctggaacatcagttttgttgatggtgggcacacaccaaaagcgccatcgaagttggttcggcccaaggaagactgtgtggtgttgctttctggggggctcgacagcttggtcggtgcgatcgacttggtggagaagggctattcgcccctggccgtgagcaatgtggtccgaggcgatgcggacaatcagagcctgttcgctgagcgtatcggtggaggtcttaggcgcttagctctcaatcacaacgctacgccaccgtgggacaaggaagattcacagcgtgctcgatccatcatctttttggcattcgccgttgtcgcggcaaccacgctcgagcgctatcacgaaggcgaggaaatccccgtgtttgtctgcgagaacggattcatcgctcttaatccatctctcactcatacgcgactgggtagcctgagcacccgcacggcgcatccggagttcttgaacaggctgcgtgatcttctggccgcagcggggctgaggattcgactggagaacccttacgaagacaagaccaagggtcagatgttgaatgaatgcaaggatcaagccttgctcgaagaacttgctctctcttccgtcagttgcggccgttaccgagtttttggctaccagcattgcgggcgctgcgttccttgccaggtccgccgggcggccatcaatgcttgggagcatgtggacggcacgagctacaaattcaagaacctgggcaagaaggacaccgatcacgcgaagttcgatgacgtaagatccgtcgccatggctattgctgaagtgaaggcggatggaatcgatgcttggctctcttcctccttatcgtatccccggatgggcgacagggcgccacgccgagcgctcgtgcaacgtgggctcgctgagcttgagagcctgcacaacgagcttggtgtgacgtga

SEQ ID NO: 534674 - DNA, 441 bp, Stenotrophomonas maltophilia
ttgctggtcggacgcaacgccgacgagatcatggatgcgatcgtcgaggccgtgcggccggtggacggcacccaggatgcagaagcctcacgagcagcgattcgagacgctttgtccgagctcttggcgcgctacgagaacgccaatctgctgcagctgacggacgagcaacgggaattcgcgattgagcgtttcacggcgaacgacgtcgtacgtcggttcgagctcgatacgggccaagtcatcatcgaaaaagcgcctaccaccaccatgggcttggcgaggcttaaggaaattcgcagctacatcaagcagacggtgtccgcttcttttcggacattaaagcagacaggacgccaactgaacaccggcaaggtcacccaaatggtgagggacgcgttgcgggagacattcacggtgttcgaggagtatgtatcttga

SEQ ID NO: 534675 - DNA, 1848 bp, Stenotrophomonas maltophilia
atgtggacagataacgaaaccgaacgggatttcctgaacttttccggcgtggcggacaccattgccgagatcatcgcgcaggctcagggtaagccgatttcaatcggcgtatcagggcagtggggcagaggtaagtcttcgctgatcaaactgacacgaacatcgttggcgggccgtcctaagaagaacggtgatcgggactttgttttcgtcgagttcaatgcgtggctctaccagggctacgacgatgcacgtgcggcattgatggacgtcattgccgagaagttgcaggacgaggctggaaagcgaggcaagggcaagagcaaggtcctggagttcatcaaacggatcaagtggtttcgcgcagccaagctggtaactggtgacgccattgccttggccttggggctggctcccaccggcctgctgggcgggctctggcgcacggccaaaggcatggccgatggcgtgagtcagaaggagttcgagcagggtaaggagcaagccaaggcagcagccgatgaggcaggctccctactggggcccaaacccgacgactcacctcctaaggagattcaggcgcttcgcgatagctttgaggaagccctggaagagctcggtatcacgctcgtcgtactgatcgacgacttggaccgttgcttgccgcccaccaccatctcgacgcttgaggctatccggctcttcctgttcttgaagaacacggcgtttgtgatcgctgccgatgatggaatgatcaagcacgcggtgcgtaagcatttcgagggacttgatgacgatacgctggtcaccaactacttcgacaagctgattcaggtgcccattcgtgtgcccgcactagggacgcaggaagttcgggcatacatgatgatgttgttcgtggacaacagcgagctcgaagcatcggtcaaagagactgtccaccagaaggtcggagagcgtctgcgccagagttggctcggaaagcgcgtggatcgtgctttcatccaatcgctggaacttgaccttccccctagtttgctcggtcagttggacacagcggatcggttggcgcctctgatggttgccgcgtcggacatttcgggcaacccgcgactcattaagcggtttctcaacgcgctttcgatacgaatgacgatttcgaaggctcaaggagtcggcgtcgatgaggccgttctcgccaagttgctgctgtttgagcgcctgggcgatccaaaggcttacggccaactcattgcttcggtgagctcgcatgacaacggtcacccaacgatcctcgcggaatgggaggagagggctgctagtggtattgctgttgaattgtctgcaccttggcaagggtcttttgtgcaagagtggttgacgttgccgcctgcgttggccaaagaagatcttcgtggcgcgctatacgttggccgggagcatgcgcctctgatcatgcccgaagacaggctgtcgtcagacgctgcggacgtgttgactggattgctggcgagcccagacatggcgggcgcactgaaaccacgcttggcggccatcagccgccccgagattgccatcatcatggatcgccttttggatcgggctcggcaggagcagcagtggggcgtcccagaaatcttggaagcttgcttggtcgttggggagcatgatcctgcacaggggctgcgtctggcgtccttccttcgtgaccggccgatcgcgcaaatccaagccagcatcgtcccgaaggtcgatggccaaccatgggcggatagtcttttcgagcactggctcaaacaaggcgtcggtggtccggcgaagaaagcaatccagcaaaggacgagctga

SEQ ID NO: 534676 - DNA, 525 bp, Stenotrophomonas maltophilia
atggcggcaaacataaatcgccaggccaatttcggctcggtcatgacgactatccacgaggcgatcgaggctcttgagcatagcctgccggcagatgttggacaggtatttggacctggcgcaacctatgacttcttccggaccctcaatgagcttgtgggcagtgcaacgcactcattgtttatcgtcgacccatacatggatagcatggtcttcgacggctacctcgccaacctgaggcgaccgatcgccacgcggttgctaatgcaccgttatctcgacagcgtcaagatcgcagtcacggctttccacgcccagaacggcgggcagatcgaaatacgtcgcagtgccgaactgcatgatcgcctgatcttcatcgacgaagcccagtgctgggtgctcggcgcatctatcaaagacgcagccgcaaaaaagcccacatacctagctccgttggcagcggatttagttacagagaagttgaggatatacgacgatctgtggcgagccgcgacaccgatctag

SEQ ID NO: 534677 - DNA, 1884 bp, Stenotrophomonas maltophilia
gtgtcgccgatcaccgtcatctccgcgccaacccattccgctatgatggggctgcttcgggggctggcgcatcgacaacagcagaagaaggggcaatcggtgtatctggcgcagctcaacatcactaatttcagaaagctcaaaaaggccgaattacattttcagaagggtctgaacgtcctggtcggagccaacaacgcaggcaagaccgcagtcgtcgatgccctgcgcgccctgctcgcaggactcgacgaaccctaccctcgactggacgccgaggacgtccatcggccaaagaacgccaatcccgtcggggacatcgttctccgctacgtattccgcgacctcgacccggacgacgaggctgatttcctggcggcactgaaaccgaacgcggacgggaagatggaagcgcacataaccatccgctactcggaagcggataaggccggacgactgcgcgccaagcgttggtgcggcgaccatgaagacgtgggcctgaccgcggacatgatggagaacttgcggggcgtgtacctgccgccgctgcgcgatgcatcgcaaagcttgaagcccaaccgcaccagccagttgtcgcgcctgttccagctccttgccaccgacgccggtaaagatggcatcaacaacgcattgcaggaactcgacgaggcactgaaggagcaccagccggtcgtcagtacccacacagcaatcaaggggaggcacgacgccatgctcggccagcagctggcgcagtccctggaactcggcatcagcggcagcgatttccagcgactggcctcgcgcctgtcgttgatggtggatgctttcgagatagagcagaacgggctaggcttcaacaacctgatcttcatggccgtggtgctcagcgagctggctaagaacccagaagccagctaccgcggcctcatcatcgaggaaccggaggcgcacctgcatccgcagctgcaggcggtgctgctgggctacctcgaaagcatcaaggacgccgaaggcgaaaagccggtacagctgttcgtcaccagccactcgccgaactttgccagcatcgccaacctcgacagcctggcctgcctcgtcgaaaccgggactggcgtagaaaccttctctccccgcacaatcaagttcggcaagggcaagcgcgagaagctggaacgttacctcgacgtgacccgcgcagagttgttcttcgcccgcagggtaatcttcgttgagggagcggcagagctgatgctggtggatgtgctggccgagaaggccggccacaacctgcgcaagcacggcgtcagcttgattagcgtcgagggactgaacttcgactcgttcttgccactgttcggcgcagaagcgttgaagatcccggcggccgtcatcaccgatgccgaccctgtggctgccgcagccgaaggcgaggagccgcaagcgctgtacccggctcccggcgacttagtgcaggtatcggccaacacggcgaagatgaaggaaggcgaagacgaattcgtcaaggtcttccacggcctcaagacgctcgagtacgacctcgcactgcacgccgacaaccgcacggcgatgcttgcagcgctgaaggaactacatccgcagatcgccacgaccgtcgctgcggcggtcgaagctgcggaaggcgacgccgccaaggcgcgcgcgcttttcagtggtatgttcgagcgtcgccagaacaacgtgcagaagggccgcttcggtcagacgctcgcgcaggtgttcgccgaaggcgccgcctgcaccgtgcccggctacattggcgacgcgattgcccacgcatgccaacccgggaaggccccgaaggggcccgccgccgcacaggcggagcatgccggacaatga

SEQ ID NO: 534678 - DNA, 1737 bp, Stenotrophomonas maltophilia
atgacccaggcatccgccgagcagttgcagatcatcgacgcaccgctggcgccaatgtccgtcatcgcctgcgctggaagcggtaagaccttcaccgcagtacggcgcctggcgcagatgcgccggcaactcggtaatcaccgcggtcgcgtcgcgctgttgtcattctccaacgtcgccgtggatacgttccggcaggagtaccagcagctgacgcgggatgccccgggagggtccgggcatgaccgtgtcgagatcgacacgctggatggcttcattactggcaacgtgctgcgcccacatgcgtatcgaacgatgggcgcacagcaggctgcatttctcgtgatgggcggagaaaagttcctaaatgcgtttaagttcaataccgacacctacccccgcgaggtcacgacgatgcaggtgggcgtcgaaaatggcgagttttacttctactacgctgacaacgacaacacgcgaagactcaacaccgcctatgcctccggcatcgtcaaccgccttggccgggtcggcgcctatacgcacaacctaggtcgttactggtgccatcgcacgctaacggggcaaccaaccatcctccgtgcactcgcccgccgctatccacatatcctgatagacgaagctcaggatatcgggatggtacatcgagccgttatcgagcaacttgctggggcaggttgccaggtgtcgctgatcggtgatccgaatcagggcatttacgagttcgccggcgcaaacggtgccttcctgacacagtacggccagcggccgggcgtgaatgctcgaagcttgacccgaaactaccgatccgtaccggcgatactggacctggccaaccgactgtcgacgcgcggggacacggcagaccgggcgccacccggtacaacgcatggtgccttcttcgtaccgtaccggaatgccgatcgggaaaacctcgtggccgcattccaggttgcggtggaggcggccgacctgaaagccgagcgatcggccgtgctatgccgcggccgtgacatggccgatcggctcgccggcaaccgtggtgcccctggccaaggaaccgtgaagaacctagcccaagcggcaattctccgggaccacaggagggatttcctcggcgcgtacaagctggtggccacctgcattgttggtctgctggccaatccgccgcagggactgatcgccaggatcacccagcctgcgcgctatcccgacgaccggccgctgcgccggctcgtctgggcgttcacccgaaacccagattcgggcctgccggcggccacgttgccgggagacacgcactggcaccctcagttgctagaaaggacgagagcgttgctggctgcgatcgagcgggatcttggactggcaagcgccggcaatctcggcaacaaactggccaggagaggcttgaccaatgctccgttgatcagtgccgtagacctcgctgccgaaaccgaacagcctcgcatgcgcgtggatacggtccatcaggcgaaaggagaaagcctggatgcggtgctgtatctcgcaaatcgcgagcaggtgagcgccctgctcgccggcgtggacaccgaggtggggcgcattggctatgtcgccgtgacccgcgcacgcaacctcctgtggctcggcgtgcccgcgaacgcactggaggaactgcgtcccgcgttgctcgtctgcggcttccaggaagctgaagccgccgcacccgcgtaa

SEQ ID NO: 534679 - DNA, 975 bp, Stenotrophomonas maltophilia
atgcagatgaatcggtcccaactctggaaaaacttccggctgggtgaggaactggacgtctccggcactttcatctacaacggattgcgccgtttccacgaactgcggaagctcgactacagcgcggacctgttcgaggtcttctatcagctctccgtcggcatcgaacggctgatgaagatcgccgttgtcctccttgagcatgacgacgccagcgatcaggaggccttcgagaagtccctttcgacacacaaccatcaggcgcttcttgcgaggatacagaagcgcgccgatctcaagctgtccaattcggacaacgccttcttgcacctacttaccaggttctacgagaacctgcgctacgaccgcttttctctcaattcctcttttgcccttgggaaggagaagcacgaacttttcgacttcctcgaaggccagctgaaagtcgagctcggcgagcgtagttcgattttcggccatgagaatacggatcagtacaagaaattcattcgcaaagtcgtcgtcaagatcgcgagcagcctgtacgacgtcatcgaggaacgtaccaggtccctggggctctatacctacgagctacgctacgcttcgaaagccgagactgtctttcttggcaaggcagacatcccggccgaagatatactgtggaaagaactgctcgttttctttatgaacacgaaggagacatcgggctacctcacctttatccgcggtatcgaacctttgggcttcgaccccgggctcgtcccagactacctggactgcttccagtcttacagcgaccgcgcgcaagttgttgacgaactggaagccctctatgaggacgtacccgacaaaggggatcgcctttgcatgattggcctgatcggcttgcccaatgtgtatttccccggggacgacgaggatgaaggcttcgaagacgaggccgacggcttcgaagatcctccagacagataa

SEQ ID NO: 534680 - DNA, 483 bp, Stenotrophomonas maltophilia
atggagatcgtgccagtgggcagctcgcatgggcactttcagacggtgactctagcaccagtcctgctgatgccagaggtcgctgaaacgctgagcccgggtgtcggcgagcgcctcaaggctgccgtaagcagtcagctgcagcgtcagatcgacaggcgcctgggccggagcggggcgcaagattcgggagcgggtctgttgctgattgcaaggatcacctctgtgaaggaggcctctgctggcctgaacattgccacatcggttctgatagggccggtgagcaaggggcggctttcccttgagatcgaggcgatcgacgtaagcaccggcaggcaggtaggactgctactgctcgccgacgaagccgacatgagggacattcgaaaaagctacacgccggacggccacgccaaggcgcttgcgggtcggttcgcggtcgaggcggtggagttcattgcgccgatggtgagatcacgctag

SEQ ID NO: 534681 - DNA, 1428 bp, Stenotrophomonas maltophilia
atgacgcgcctgcatctgacgtggctgaccgtagtctgtgcagcactgggcgttgcgatcttacttgcaccacagaatgcctatgcaggcatggatcagggcgaggcgtacgccgcgtgcaagaaatcgggaagcgataccatcgccgcctataagggcggctccaccgaatgcaatgacaacggtgcgatggcctatttgtgcaagttctcgcacccacaggcaaccggtggtggctgggtgaactgcaaccgcgaattctggtttccgtatgaagatagctgtcaaagccggaactcacgaaatccccctggcgatgccgcgctctggtacagcgccccaagcacatgcataggcggctgtcgtctgcttggaactcccttcagctcggaatctggcggcgtgaaggtctacggcatgaaggaccgctactacagcggcgatgtttgcgaagctccaagcggcccgcctggcatcggccccgatccgcctacgaaggaatccgagtccaagccgaagccgagtgagtgcgttgcgctcggtaacgggcagacggcctgtacgcgccccgatggcgaccagtgcgctacagcatccacaggcaagaccttttgctggaagcccggcgagaccggcgagaagaaggatggccctgacgctcagaccaaaggcgagaagggcaagccggtcatgcctcctacgtcggatgatccgacaaaggagtatcagcgaaaggaaggccatcagcagacggcctgcatcaacaacacatgcaccacgtacaacgtcaccaactacggccagaccggcaagggtgaagctaaaaattcaaccggcgacaacaactccgacggtactgggaatacaagtggcaacggcacgcccggtaagggaagtggcggtggcgggaaggagggggagggggactctgccagcgatagcggcaactgcgacacgccgccgctgtgtacaggtgacaccttgaagtgcctccaccttcgtttcacatggaagatccagtgcaatacaaaggggtcagagatcagtaagggcgacggctgtggcgacaacgacgttccggtctgtgctggttccagctgcaaggctgaagcctacgcccagcttcttcagcaatggcgggcacgctgctccgtagaaaagctcacgaaaggcgttgaggaccatgctggccagggcgatggcgatgatggcaagggaagcatcttcattgatgattccggcaagaatccatcgttggatgaaggcaaagtttcttatgcgggcggccagcttggctacagctttgaggtagaaggagtgaaatttgagatgcctcaacaggttctcgactttctgcccatcctccgaatgctgatcatcgctctcgcgacacttgcggccattgggatcatgagggggaacggatga

SEQ ID NO: 534682 - DNA, 177 bp, Stenotrophomonas maltophilia
atgagcaggtatccctcattcgccgagctggcggagttcgatatgggcctcgcggcaatcgccgtgctcctgtcactcgttgtcggcggagccatcgtctccatcgtgattgagcaggcatggctggcgcttcgtcgcctgtggaatctctggaaggggcgcgccaatggccgttga

SEQ ID NO: 534683 - DNA, 390 bp, Stenotrophomonas maltophilia
atggatgcacttgtcaccgccgcgctgctgggttccttcgcagccgtctcgtttggggcagtcaagctggtttcgtggtgcgtcggccgggtaggggagtcatcccgccgcgctgcacgcgaagcggcattcgtaggccaggcacgcgccgaactggctgcaaccggctggaccgaagatgacgagtccgcataccaacgcaacccttacgccttcgaccgtgagctgccgggcatgtgggaggcgtcggatttcatggacggtcgtgattacgatctggatccggtcacaccctctgaaaagctctatcaggcagaaatcgccgccaccaagcgcggtgatctgctggccgccgctcgctacgccgaagagcgggagcgcaccgcatga

SEQ ID NO: 534684 - DNA, 357 bp, Stenotrophomonas maltophilia
atgatcgatctgccttgtccatcgtgtggcttcctgaccctggaaggctcctacggatcatttgccatatgtccgatctgcgactgggaggatgacggagtactacttgccaaccccacatccgtcggcggagccagcggcgagtccctggcgcaagcgcagcagaaagctcttttcaggttgcctattggcgtcaatgtcgcaagcggctttcgccgcgggtctagctggcgccctttatccagctcggaaatcaggcactacgaagccttaagggacgacaagcactggcacagcaaggccgtctcgcacgagggggaggcttactggtcgaacttgggcgatctctcgatctga

SEQ ID NO: 534685 - DNA, 213 bp, Stenotrophomonas maltophilia
atgggccgcaggcgtgtcacgcctgcggccctgcatgccctgcacaacttcacctggctgccctgcgaaccgactgaagatcgccgcacgcgttggcacgtgcatgaactgaccggacctggggacctggctggcgtggtcatcgtgagcgacgcctggaacctagatcagggacgtctcgagcgaacggtagtagtcaattttcgcgcgtag

SEQ ID NO: 534686 - DNA, 198 bp, Stenotrophomonas maltophilia
atgagcgattttgtccccgtgcacaacgaagacaaactgccttacagcggagccatgaatgatgacgtctcccggaagatcacgccggacggtttttcgatcatggcccacaaagggtcgattgaggattttgatgccttcacagacgctaccggccgatcgagggcgggcacgtcgaaaatcgacgcggatctgtag

SEQ ID NO: 534687 - DNA, 930 bp, Stenotrophomonas maltophilia
gtgcgtagctatcgactgtggcctattgcgattcttgcgcttcttccctttgccccgagcgcatgcgccggcaagccgggcaacgctacccaagccgaagcgaatgcgggtacgggtacgggtacgggagcgaggcttgcacaacagatcgctcaggatctagtcagagttaagggaggcacctttctgatgggcgacttcggccctcagcataacgctgataagcttccatacagcggtgagaccaacgacgacattcttcgcagggtgacagtaagcgacttctcgatcacagctcacaaaatatcggtcgagcaatacgatgcgttctccgatagcgctggacgcccccgagtgggcaattcggagatcgacgcggatctttatcgaaagcacgtgaacgggtcagcgggcgtaagttggaatcaggcagatgaattttgtgcttggttcggaaagaagatcggaaaacgagccacactgccaaccgaggctgaatgggagtatgccgcgcgttcaggcggcagaatggtggtctacgccaccgataatggcaggatcgacgacggccgaaatgtcgccagcttcgatcagaacatggatggcagtgccgttcctcttggcaggttcccccctaatcctgcgggcctctatgacatgattgatcacggccacgagtgggttcaagactggtacgaagccaactatagcggcgataacctgctcgacccccaaggcccaaagaatggaagcgaaaaggtcgttcgcagtagcacaagccaaggcggggactccctagcgctcgtgtcgatgaccttcacgcgagcatctcacgtaccggatgcaccaaagcaaaaagatcccagaggggtggacatcgaggccaatcagaactacggatatggattccgatgcgtagtccgagattga

SEQ ID NO: 534688 - DNA, 666 bp, Stenotrophomonas maltophilia
atgcgcaagtcatccgctaagcggcgatctttgcgatgggcacttctccgttcagcgccttttcttctggggatagccgtggtcgcgagcactctggcggcggcccagttggcagtcacgcagcgggctaaagttgaacttgccgactatacggtcgttctcttggaacacgctcaagatgttgcccgtgccggcgttgatgggttgaacaaggcgctgttgatagatgccgcgccctgtggagatgaggacttagccgagctgcgtctcatagcgtttcactcccgctacattaaggatgttgggagattgagcaacgggcgattgatatgtacagcaatatgggggcgccttcctacgcctgtaaagcttgtagctccgaatcgcctcgttcgaggctattcgctctggcggagcgtggccgcccctggcgatgggcgcatcaaagtggacctcgcgtcgtacggaaacgccattgtgaccacggctccaacggcgtttgagcgagtggcagtgcccatggagggggggcggagcgttggtggtcacgcgagacggcagacaccggtttcaatcctttggcgcagtgcaggaaatgtcgctgggcacgaacggggcgttgactccatctgccgggcacgtcgccacacgcgcctgcagcagtga

SEQ ID NO: 534689 - DNA, 1392 bp, Stenotrophomonas maltophilia
atgagtgattatgatttccagtttaagctcgactggcttagtggagtgtcactcgccaagctgtccttctcaattgacggaaagcctgtatggccagtggcgcatgatccgagcgctggcatggaaatttatgcggacgatcttctctcgtttctttctgagaattggcactcacttctcttggaacaaacttaccctgtattgactccatttcgtcccagtcgtttgtgggtgttgcttgaggagcgctgggaaagaggggatgattcggaatccgagctagagtccatccgcgccgaagagtttgagcagaggcataatctgggcgcttgtatagctggtgtcttggatccgccgccactctggctcgttcgccagggaaatgctgtgcaggttgataatgggaaggatctttggagtgtatctctcgaagatcttttttccagtttagaagcgcttggggattgtatcgctcaccgtcttgctgcggaagagaagttttctcgtttagtgcgggcctggggggatcgcgtgaaagtcgatgcgttgaccctcctggcaacctctgttggtgtttctaattcagatgctaagaggctggttgatgctcgtttgctgcgaattcctagcgatattcatgatgcagcgaacgacgatgacgaattgaggctcgcggctcgagttactggtgaactccccttcgataagcttaaggccattctggatattgccaaatctgttcccctcggggattcgggggcgcttgatggtctcaagggggctgttgcagagaacttggtccagtctagataccaaaagccacatgatgtaggagtcttggtagccgttgcggcgcgtgaatatcttggattgcaatctgctcagcgtatagatgttgggcaagtccttgctaatcttcgcgtattcttgaggcatgatgcgggtggtctgggagatgaattcaagggcttggcaatatggggaaagagacatggcccagggatcatcgtgactccagcttcaaaaaatggattcagttcggcgtatcagcgcgtcacaattgctcatgagttaggtcatttactgatggatggcgatcatgcaattggcgctgtggatgttctgcatggaagagtgcctctagcgatggagcagcgagcgaagtctttcgcaggagaattcttgcttcctggaaaaaccgcggcaaatgcgtggcttgaaaagggaagtctgagtgatcgggggagtttgaaggcgtttgtcgaaggtttgagtaaaaaatatggcgtaactaatgccgtagctgcttggaaattggagcatggtctgaagttttggaatatcgatctttctgatatcttgaattccaccttcccaagtcgctggcggtag

SEQ ID NO: 534690 - DNA, 618 bp, Stenotrophomonas maltophilia
atgacggctggaactgaactggataaggagttgatgggcctgcgcccaggacggcgtccagcccagcccaagccaatcgaactgacccaggcagaagagctggagttggctaaagcgaaggccgggcgagtggagtgggtcggtcctggcgttgccgcatacattcttgggatttcaaaggaggcgctcaagaagcgtcgactccgtggagaaggtgtcgtccccgagcatcgggcggccaagagcaacaagcacggggtacgctatcgctggtcatcggtcgttagatgcggcggcgcggagcggttccaaagcgaagttcttgctgagcgtttggaagatgttgtggaggtattgaagaagctaggcctagcaggcttggagcgagacctgccctgggctttcactggcgagggccgcatcaaaggtttggcggatttccacccctatcttccggctatacccctccccaccagcgaagcgctacgccggccatgggtcagcctagaaggacgtacgccgttcgacgacatggctgcccgctcgttgtctgccgcggaggccgaggcgatgcgggcggctgaatggcaacctgcaattcagcctccccagaggtga

SEQ ID NO: 534691 - DNA, 894 bp, Stenotrophomonas maltophilia
atgcccgtcgccttggagcaactggacctcaccggatacgaccttgtcatctcgagcgagtctggaccggcgaagaacgtcatcacgcaccctgatgcactacacatctgctactgccatagcccaatgcggtatgtctgggatatgtatccgctctaccttgcagatgctggatggtttacccgacttctgatgcggccgttgatgcactacatgcgcctcaccgacgcagtctccgcctcgcgtgtcgatcatttcatcgcgaattcaaagttcatcgcgcgtaggatagacaagtgctatcgcaggcaggcagaagtcatccaccctcccgtggaagtggaggactttgaagcacgcgctaaaaagcaggactactaccttcttctcggtcagttgaccgcgtacaagaaggcagaccttgtgatggacgcattcctgcgcagcgggaagcgcttggtcatcattggcgagggcgaacaactcgctgctatgcgcgcgcgcgcgactgagagagttgtcgtacttgggcggcaaccgttctctgcactgaaagaacatctggccaacgcgaaagcccttgttttcccaggggtggaagacttcggcattgttccacttgaggcgatggcttccggaactccagtcattgcatatgccaagggtggcgcgcttgagactgtggtcgagagtgacgaccccaacgcagcaactggattgttcttccacgaacaatctattgatgcgatcaatgaggctgttgctcgatttgagtcgctttcagagcccatttcggcagaggcatgtcgtgcaagggctgaacagttcgcccccgatcgattcagggaagaactctcgtccttcatccaggcaaaactccgcagggaagcctga

SEQ ID NO: 534692 - DNA, 1017 bp, Stenotrophomonas maltophilia
gtgaaagcaccgaccgtcgcgatagtcatccccgcctacaatcgtccggacgagctgggcgaactactgcaatccgcgcttgtccagacctgcgccccgtgcacggtcattgtatgcgaagaccattcgccgcttagggccgaaataagagccgtctgcgattcatatcgagcagccttcttgaccaagggcattgaattgctttatgtcgagaatgacacgaatcttgggtacgacaagaatctgcgcaagagcattgagctttccgatgccgaatgggcaatcgtcatgggcaatgacgacctcctgctacccaacgcagtacaggatgtcatcaaatacacttccaacaacgacgttgattttgcatcacgtacgttcatacgtttcaatgactcgattgaaactaccatcgggacttcctcactatccaaatcggattcattgttcacgactgacaacacctcctcggggatgattttcagatcggccggatttgtgggcggactgatcgttcggacgagttttgccaagagcatcagctgttcggatttcgatggcagcctctattatcagatttacctggcagcgaatgcgtactgcggaaagggaattggatacattgccactccaatcataggtggacgtgccgacaaccctcctatgtttggtggcgctgaagatgacggcggcgtccacgtccccggcagctataccgcgaaggggcgggcaagaatgtgggagggagtgttgaagatcgcgagaagtgtgggcgacaagcatcagcgcgaccttatttctgatattcgcagggagctcgaggtcaggcaatccttccacgtattcgagatgaatgccgcgagctcccgccaggagcttagggcgctaagaagcgccttgatccaactgaacctgttttctcacccgctaccgagagcacttttctggcttgactacctgcttggacgcaatgcgacgccgctgtaccggatgtgtcgcaagcttctacagcgctga

SEQ ID NO: 534693 - DNA, 570 bp, Stenotrophomonas maltophilia
atgagggaaatgagccagaccatcgacctcgtactggagacaatcaggggacgtcttcattcgattggtaagagcattcgttttagacgatccggaaggaacttcaaattgtatggctccaagcacatgaacggcatcgatctggccgttggtgataactgctggttccaggccgtggacagttacaagggttcgatataccagcctcgcattactatcggggcagccagtatgtttggaaataatgtccacatctcggccatcaagtcgatcacgatcggcaaggactgcctgttgggctcaaacatatatatcggcgatcactcccacggcagcacgaggcaaggctgtattgatcttgatatcccgccggcgaagcgggatctggacgacgcgtgcgacatagtcatcggagaacgcgtctgggttggcgacggcaccgtgattctcgctggctcaacgatcgccgatggctgcatcataggtgccaacagcgtagtaaaaggaaaattcgagaacgccgcagtaattgcaggcgcacctgcacgagtgatcaaggaattgctgtga

SEQ ID NO: 534694 - DNA, 1179 bp, Stenotrophomonas maltophilia
atgactcgggttctttaccttgtggagggtccagcaccttatggtgcgaatcgaagcctgttgtcgctgattgagtacgggctttcccacggaatcgaaccaatggtcgtcggctccagacccggccctttctctgaatggcttggcgtccgcggcgtctctttcaaggcgatcggacatagattctcgatctatccacggacgaacacccttgtccgaaaggttttctttgccccaatctttacagccttccgaataatcaatgccgttgcacttctgaggcttgtgctgatatgcaggagctttcgaccagatgtaatccataccaatatcggccccatcgccattggcagcctcgcagcaagactgatgggcatacggcacgtttggcacctgcgtgagtatcaggacctcgactttgggatgaaattctttccctcaaagtcggcattcaagagactcttagccagatctgcccgcgtcatctgcgtgactcaagcaatcgccgaacactttggacttccagccaatgcaaccgtcatcagtaatggcgtcgcgtccggcagtgctgccgtcctgaatatgcccaaggcagactatttcctgtttgttgggcgattagagcctgcaaagcaggctgcgcaggtaatagaggcctacctaaaccatgtggcaaccgcttccaatccacttagacttctaatcgcaggtgatggggatctcgcttacattgccgatctcaagagtatcgcagccgatgcgccgtcaacggcccgcattgaattcctgggcttcaggaacgacacagattatttaatgcagaatgcgagggccattattgttgcatcagacaatgaaggcttcgggcgtatcaccgcggaagcgatgttcaatggctgccttgtaatcggcaaggcaaccggcggaactgcagacatcctagatgcgcatcaggatgagccacttgggctactgttcaatacatcgagcgagcttgcatcacagctggattttgctgccgaaatgagccccgaaatgtatgaagcaaaggtacgccacgcacagcacaaggctatcgcgcgctacagcactgaactgtacggagcaaaagttcttgaggtctacgcccgcttgggcggccaagacgaattcgaaactcaggacgggctgatgaaatga

SEQ ID NO: 534695 - DNA, 1308 bp, Stenotrophomonas maltophilia
atgaagaaaatagcactccgattcaccaacagaagcattgatgcatggttgatgagaatcatgctggcgctcacactgatcactgtggcaggtggctttgcactattccttgacggaggtgcccgtccccaaggcttgatgaacgctgttgaacgcacgggcctgtggaaatatgccgagatcgcatacattcccatctcgcttctgatcatcgctcacacgatgctgtcgcaaggcaggtactcgcacctgcgtgaaatcttcaagagcaccggcgtaaagatagccgcaatctttgtattcatgtgcgcactgcaatgggtagcaggcctgccaatcagcaacgcaatgattagtacccttctgagcttcgtcgcactgtccctcatcatcgggttcgccacgcaactgcttagcgcggaggaaatattctccacgttgaacctcacatacttctcctgcctctttctttccgtaatcctggtagcgttcgttcccaactacggcatttccctgaacattgatgaggactggcagggcatgtttgcgcacaagaacaacctaggcatcttctgtgcgtcctacggtcttgttgcagtcggatgctggaaaacatcacgactgctcacgacggcaaacatagcgctcgcagcagcgctcctgctcggatcaaaatcgtacgcgtcgatcgcagcattctccatcgcagcactgctgagcctcagcccaacctggctaaggcgaaccataattcgacttcgatatccagttctcgcattcggaatttccgcatccgccgcgatcgtttttctgtcactcagcagcttcagcatggaactattcgagaaagacttcactttctctggccgaaacatgatctggagctactctctctttgggtttatccagcatcccatgcttggacaaggaatgaactcgctggcataccaggtaagccataattcagcgggattcttcaacgcaaccggccaggttctcgccagccatcacaacggcatgctggctctgatctatgacttcggcatgataggagcaacggcagtgttcgttgcgcttcagcggccgctttggcgcatgaatataagaagcaccgctgcgttcatgctgatctccgccttgatcgcgaccatcgtcttgaacaccttcgaagaaaggcttttttcgccaaattcattctacttttcgctaatcaccctcatattcatgattgaaaagaatcctttctgcatcgatcccgagcggccagaccgaattaaccagaccatcaattcacgggccgcggcatga

SEQ ID NO: 534696 - DNA, 1305 bp, Stenotrophomonas maltophilia
atgagtaacttgtaccgcgcgattgccaagagcatgggcagcaagtatctggcgtatgcgatgcagttcgcggcgcttatgatacttgcacgagcatttacgcctgaagtattcggaaccattgccgcaattcaagtcttctacctcttcttccagctcgttggcgaagggggatttggcccagccatcattggacttcataaattgaatgccagggatcgcgacgggatatttggcttgaccatcctgataggcgcgggtctcgccgcgaccttcatggcgctgggatcattcctggtcgatttctataagatgccggagcttcccgttgcgatcccgtttgttgcggtgggtctcatgctcaacgcatgggcgatccttccaatggcccagcttcaacggcagcaatcgtttctgcaactggcaaccgcagcgatcatcgcggagttcgtggcactcgcgcttgtgttggttgctcgcaaatatgtcagccccctgtgcgcgatctcgatacgcattccgattgtggcactcgtgaatttcatgttcgcctaccacttttccagaagaaccgattttggacgcccaagacctgggatgcacttctctgctgtggcccccttgctcaaagtgtctggctaccagctcgcgttcaatgtgcttaacttcttctcgcgcaatctcgacaacgtgcttgtcggcaagtacctaggggcgccactgctgggcatctatgaccgatcctatcagttgatgcggtatccgctgcagcttttgacattcgcaatgacgccagcaatccagccggcgctgcgcggccatgcgaacagtcctggcttcgtgctgaagatacatcaggatttgacattcaagctttcgctgctgggcctcgcgtgcgccctaggaatctatattctcgccacccctatcatcctagtcgcctttggagagcagtggctcccggcagttccagtaataagacttctctcattgacaattccagttcaggtagtgctctcgaccagcggcagcttcttccagaccttccagcgaactgatctactcttccgttgcggacttttctcagccgcaacaaacgtcaccgccattgtaattggcatctcgctaggctcgctcgaacacctttgctgggctctgctcgtctcgttccacatcaacttcttccaagcttattacttgctacacaagcatatcctcgacggggaatttcgccagttcctgcacaggatgattccagccggcatcggcgttggagcacttgcgacttggcatgcattgcattag

SEQ ID NO: 534697 - DNA, 792 bp, Stenotrophomonas maltophilia
atgctcgatgggcgtggccgcgtatccaggctacgcaagattcgactctacttctatatcaaactgctcagactgatcagcaaacgactgatcatggtcagacacaataattacccccacgactcggatcatgagcagatcccccggatcaaacatctgatgaagtcgtacgaaaaatacttcgatgtcgttgttacccactccgggcacaatgcggactcaggctacatctacgtcccccaccccctgtacactagggcagcgacgtctggtcgactgattgatggcgactatttcttcattctcggtcgaattctcccctacaaggcaatcgacaaactgattacccacttgagtcctgacgtccacctggtggttgccgggaaggcccctgatccaacctacctcgccaagtgcaaggagttggcggagggcaagcaagttactttcatcaccggctacttgcccgacagcgacgccgcaaaccttgttactcatgcccgagggatggttgtcccaaactcggatgaagacatggttgtgagtggaaactactttttctccttcagctatggcgtccccatcttcactgtccagacgccattcaccaactggctagtggaaagcaaggaccccggcggccttcatcagcacccgtgcatctcctcgctagcacgctctctacttgatgccagcaccgccaacaatcccgacccggaaaaaatcgaagaagcgttcggcgactctgccgtagccagaggctgggcaagcgctctggccgcagccgagtaa

SEQ ID NO: 534698 - DNA, 777 bp, Stenotrophomonas maltophilia
gtgtgttctgcgtggcgcagggcggaggcccttgcgtacgaatgtcctccggcgccggccgttggccgtcacctccccctttacttcgtacgcaagggcctccgccctgcgttcggagttcgtcggcgcctcgttgaaagtcgcccgcgcgcgttgcgctctcctcaccgcacgccgagcctcgtcggggtgggcaggggtgtgggcaaagtaaaggaggaggtgacggccaacggccggcgccgggggacatttgcccaggcccctgcctgccccggcggggcccatcagcgggcggagagtccagacgaagacgcgcttgtggcggtgtgttctgcgtggcgcagggcggaggcccttgcgtacgaatgtcccccggcgccggccgttggccgtcacctccccctttacttcgtacgcaagggcctccgccctgcgttcggagttcgtcggcgcctcattgagaggctgccgcgagcgttgcgctctcctcaccgcacgccgagcctcgtcggggcgggcagcgggctgggcaaagtaaaggaggaggtgacggccaacggccggcgccgggggacatttgcccaggcccctgcccaccccggcgaggcccatcagttcgcggcgattccagacgaagaagcgctcctcaatccgaacgccaggcaaaaaaagacccggcagagggagggatctgccgggtccggattgcgtggggggagggacccacgcaatgagcgttgcgtcgcgtcagtggttgttcgcgtccgccgttga

SEQ ID NO: 534699 - DNA, 510 bp, Stenotrophomonas maltophilia
atggaaagcgcagtatggggctttatcggtactattgttggcgcccttgccagcattgggaccagttggatcactacacgttcggctacttacgcacagcgagagaagatccagcttgagtggagagtacggcaacgagagttccagatcaaagctgtcactgagcttcaagaaatcctcggtgaatttgttcgcgtcacggggaaaattcgtcacatcgacgagatgcgagaaagggcagggcacaccgggggagtgctaccaatcggtgaagacctgtctgatgcattttcgcaacacctgcggcgcatcaatgtgttgttggcgcggatagacgacgcgcgtgcccaggcctcgattcaggaggtccgcggaactgctgtaaagatctcaatgggcatgggggtggatatgcaaactatgttgcaattctcaaccgagattgagtgtgccaactcggcactgacggcttaccttggttcgatctactccacgaagcttggtcattga

SEQ ID NO: 534700 - DNA, 255 bp, Stenotrophomonas maltophilia
atggtggacaacgccttgagcgagcctctaccaccgctgctcggcctgccgtcgacacctgagcagctgcaaaagacccgtcgcttggctgaggctgggaccatagagctggcgcggatcaaggaagcgctggagctgcgcagatcttcggtcgagagcaaaccgaaggacgtgggagccagtaaacagatagcttcggaaggggcgggctatgttctcaatgccatcgtaagcttggaacaaatggaggcatag

SEQ ID NO: 534701 - DNA, 525 bp, Stenotrophomonas maltophilia
atggcacggcctaagaagtctccattcgatccgacccagcactttgttcttaatgacattttcctgtggacatgttcattgaccagagatggtgtgtatcggaaagatctgcatgagggcaaatgcgttcttcagtcgtttcgtaaggctacgcctgagctgttccgtgctgaagtggaaggtgaagaggacaccactcttttgctgagagtgcttgttgacctaggtgttcgctccgtatttgagcatggcgatgactccgaggaagacgaggtgctgtatacggtggaagccacattcgccgctgagtacttcgtaattgacacacctaagagcgcagaggacttgcgagccttcgtcgacttgaatgtagtgcataacgtctggcctttctggcgacagcacgttgtcgatacgacgaggcgtgcatcacttcccgttcccagtgtccccttgttcgccaagcctggcggctcccggaagaagaagctgaaggcattggagccgttgcttccggagaattag

SEQ ID NO: 534702 - DNA, 1362 bp, Stenotrophomonas maltophilia
atgaaggcacagggggaaaacttggcactagtaaactgtattgaatgcggaaggcaggtcagtgatcgtgcgccgtcttgcccgcattgcggtaacccagatctgtcttccgttccgccgcggccggacatctcaaaggcggccccagcgctcacgcccgcattgaacctgcaggggcggggcgagccgctgcgtttcaagcaaacaaagtccgaacgcaacggtcgccgaagtcgctggccgtcagttcttctggtcggggcagttctcgtagtaggtggttatctggcctaccgctacgctccttcgttcacgaggggaagcggcagcaatgactacagcttggattcacatggttacattgctgagattgggccagagttctttcaaaagcccaagacactgctactggtggatgatgcgaccggcagagcgcttgagagcaatagcattgagtttcgcatagcagatggggagatgacgctgtgcaacaccgccggacaatgtggtgcgcgaggacggattactcgggaggggctgcgggatgggacgagatgcgatggcattgcaaccacggcaccagaacttggtgtagccaagaggtactacgtcatatgcatttcgccaaaggcagtcaagcaattcgttctacccgaaggtgataggccaggtgagattcctgccgacacgccatacgcatccatcgtcacccaggcaagcaatggcagtgtgttgactgtcaactccctcttgacggtgaagaagggtgtgacagaggttcctatggaaccaaagcaagccgcccagccccagctcccaatggataaatgtgcggtcattgaccaaggcgaggcgcagacccgccagcagtgccaaggtggaaacttcaacgcttgccgagatattcaagggtgggtagccaatcgcatcatggagggatgcacggccacgcgatccacatctcaaacagatgaggcgcagccgccaccttccagtgcaagcgacgcagctacgccagaagcgagcgcccgctccagcgactctattgctgacactcaggacattgaccttgcatcacatgaaaggaccgacagcatggaaatcactgtccgttctgccagagaacctagatacccgcccaacgcgttccgaagcggcatcgaggggactgtccgggttgagctggatgtggatgaggagggcaatgcaaccaacgcaactgtcctgacttcgtcaggcaatgcggaccttgatcgagccgccttggaagccgcccgccaatggaagttcaaccccgccacaaccaacggaaagccagtgggtggacgcatcgttgtccctgtgacctttgcacttaactag

SEQ ID NO: 534703 - DNA, 432 bp, Stenotrophomonas maltophilia
atggggtggcccgagcctgcgggcgatcaagtgtgggcctaccagaagctgcggccggccaattatcggatgctgcacagcgaggcgctcggtttcgtggccgcgaaaactgatgagggctttgaactgtacgcgcgccatgtcggggcgacgtccttcgagatccggtgcaagggcgttctggtgatggacgtggagaacgcgccctcgcgcgtgctgatccggatgcctgccgatgcccgctggcgttcgccgggtatcgaacggctgcgtatcagcttcgagcggtggctgcttgtccagcagatcgaggggcggttgctggtggagcgtgcggggccatcgtgggttgaggcgtggtttgggcgctttgatgaggcggcacctgacaggcagcagtgtctgctcggcagccgttcgggatcccactag

SEQ ID NO: 534704 - DNA, 450 bp, Stenotrophomonas maltophilia
atgaacagcagtgaaaaccagccccccggattcgatcggatccggataggagagtgcactgtcactctgtcctcgcgcgaagtcgaggtcgtcggtgcgcgtcgcccgcgtcggctgacgccgaaggcgctgggcgtgctgcgtgtactgctgcgccagccggggcgtgttgtcacccgcgacgaactgttcgcggaagtctggccggacacgctgccgaccaatgatgtgctgacccaggccgtcacccagctgcgcaaggcgttcagcaacgacgatgacaacggccaggcctacatcgaaaccatcgccaagaccggctatcgcctgctggtaccggtacaggtgctggacgatgtcgagtcgacaccgacaggatcgtccgacgaccacgctgtggatgtgcaacccgcgctggccgtcggagtggcacccgcagtgcctgggtag

SEQ ID NO: 534705 - DNA, 1254 bp, Stenotrophomonas maltophilia
atggaatcctcacaccgctccgaactggttaccgataaaaccctgcgcgcgtggttgcgtgccggtcctgtggatcgcggcatcggcgatggcctgaccttcgtggccagcgcccgcggcgccgccgccggcaaggcctcctgggtgctgcgcttccgctttgccggcgcggccaaaggaaaggtcctgggccgctatccggatctgtccttggcccaggcccgggagaaggcgcgcagcgatcgcgccctgatccagcagggcatcgatgtggccgcggccaagcggctggcccaactggacgcgcggcgtgcgcaccgcgccaagaccgcgccccgacagaagtccgtcgcaccgaacacgccgctggatgtgcaggccatcgatccggcccaggccaccgtcggccagctcgggcaggcctggctggaccgctatatcaccccccgttacaagcagcccgatcgcatccgggcggtgctggaacggcacctctaccccacgctgggcaccacccgcgtccgtgatgtcgtgccgctggacgtggatcgcctgctggtggccaccgtggcacgcggcgcgcccaccgtggccaacgacctgctgcgctacctggtgcgcctgttcaagtacgcgctgatcctgggctgggccagcggcaatccggccgccagctttggcctgcgcgatgcaggcggtcgcgagcacgcgcgcacgcgctggctggccctgcatgagttgatcagcctggggcgtgcgatgcgcagctgcgagcggtttgggcgggagaacgagctggccacgtggctgttgctggcgctgtgcgtgcgcaagatggagctgctctcggcccgctggagcgaattcgatttcacccgcggggtctggttcctgcgcggggggcgcaccaagaccggggcccagatcgaagtgcccctcaccgcccaggtgatggcctggctgcaggagttgaagatctttgctgccggcagcccgtacgtctttccgctgcgccggcgcgtgcgccgacgcaagggcgtgtcgcgccagaaccgcttcccgcacgtcagtcccgacaccctgaacgtggccctgaggcgcttggacatggaccaggtcgtgcacttcaccgtgcacgatctgcgccgcaccgcgcgcacccacatggtcgcaatgggcgtgaaccagtttgtgtgcgagcgcgtcgcgctatttcttcgagatgccttaggtggcggggtgaagaatgcctga

SEQ ID NO: 534706 - DNA, 1602 bp, Stenotrophomonas maltophilia
gtgattcgcagggtcgtcattcggaactatcgcaagtttcgcgcactcaacgtagacctgttgcccggaaccaacgtgctggtcggtagcaatgacagtggaaagtccactctaatcgaggcggtcaatctggcgttgaccggtagggtcaacggtaaactgctagcgcaggagctttccccttactacatcaacttggaggcgactggggaatacgtccaagcgctccaagccaatcccaaggccatcccacccacggtcattgtggaggtctacctcgacgatgcgggtgaggctgaaatcttgcgtggcaccaataacctcctgggcgaggacgcgtgcggcatacgcatccaagccaagttatcgccggatttcgaggaggagtatcgcagcttcgtggccgacccgagcagcatccgacttgtccctacggaatactatcgagtggactggctagggttctccggcaatagcgtgactgctcgaagtattccggccactgcatcggtcgtcgatccggcctcggtccggctccagtctggcgtcgactaccacatgcagcagatcatccgaacctatctctctgcaaaagatcgcgtagaactgacgcgacagtaccggagtttgcgcgaggcgttcagtgagaaggaggccgtgaaaggaatcaacaagaagctggagggaagcagtgaatcgctgactcagcgctccctaagcttggcgatcgacatttcccaacgtcacgcctgggaaagcggcttgatcgcccacctcgatgaccttccattcccgtttgtcagtaagggcgagcaaagcgccctgaagactatcctggctgtaggaaaaaaggccgaaggcgcgcagatcgttctcatcgaggagcctgaggcacacctatcgttcgcgcacctcagggccttgatgaagcggatcgaggcgcagtgcgaagggaaacaggtcattgttgccactcacagcaccttcgttctgaataagcttgggttggagaacatgattctgttcggagaagacggcgcgcacacgcgtatcaccgacgtccctgagtcgacggtcgactacttcaaaaagctagctggattcgacacgcttcgactggtgctcgcaaaaggcgccattctggttgaaggaccttccgacgagctgatcgttcaacgcggatactgggacgttcggggcaatttgccgatcgacgacggaattgatgtcatcagtgttggtctttcgcacaagcgatttctggacttggccgtccggctcaaacgccgggtgtgggtcgtcaccgataatgacggcaagtccgccgagcaggtctccaagcgtttcggtgactacacggggtatgggttcatctcgattcataccggaagcgatcctagcctccggacgctggagccgcagctggcagcggctaatgatctggcgacgctcaatgctgcgcttggagcctctcacctgagcaaggagctggcagtggaggcgatgctcgaggacaagacgggttctgcactagcgatcttcgaatcccccacgaccatcaagatgccggagtacttggccaatgtcatcgatgccaagtaa

SEQ ID NO: 534707 - DNA, 1083 bp, Stenotrophomonas maltophilia
atgtcatcgatgccaagtaacctcgccatcttggcggccgcgggctctcgcaagacggagtacgtggtggattccgccttggccgtgacggacgggaacgtcctgatcacgacgtacaccaacgagaatcaacggcagattattcagcgtatcgagcagaagactggatcggtgccgccgcacatttcggtcctggggtggttttccttcctgattgcgcagtgtgcaaagccttaccagcgggcgcgattgggtgatgccttggtgatcaacagcctcaacttcataggaagcaggaacaagttcgccaagaagtccgatcgtcgatacttcctggacggcaacaatgacctctaccgggacggagtgtcggacctggtcgttgccatcaacggcgatacccacggtgcagtcgtaaagaggctagaaaagatctatacgcacattttcatcgacgaggttcaggacctcgtcgggtatgacctggatgtgctggacatgctcatagcttcgactatcaggctgacgatggtgggcgacccgaggcagcacacgctgtcgaccaatacgggtcccaggaacaagaagtaccgagggccaggcatcaaggattggttcgaagagcgagccgaggtctgtcagcttcaatcccgcgacgtcagccaccgatgcaatcagtcgatctgcgattttgccgatgccatctaccctaacatgcccaagacaagctcttttggcgtcgacaagacagggcacgatggcatcttcttcatttcgccgcaacgggttgaagaatacttgggcgagcatggcaatgtgaccgtgcttcgacacgatcgaagggtcaacacgttgggcgttccggccatgaacattggtgtgtcgaaaggaagcacattcgaccgcgtcatgatctttccgaccaagccgatggttgactacctcaaaaggcgagatccgtccgcgctgaaggcaccggaacggctctacgtcgctgtgacgcgggcccggtttagcgttgccttcgtcgtcgaggaattggaagatcttggggtaaagacagtcgccggaagcggctggtga

SEQ ID NO: 534708 - DNA, 762 bp, Stenotrophomonas maltophilia
atggaagagttgctgaaaagtgtggacggtccgcgcacggatgtggtcgatactgttacctatgcctactatccggcggaggacgcagggtgcgcgaccaatggtgcatgtggccacctgaagagtgacctgtacagcgcgaccaatccgctaggccagacggtcgaaaccctggcctacgacgcgttcgggcggccgttgtcggtcaaggacgccaatggcgtcgtcaccgattacacctaccatgcccgcggctggcccacctcgatcaccatgcgcggcgcgaccattgccgagaaccgcgttacccagctgagctattggccgacaggtcaggcgcagcaggtcaccgagccggatggcagcagcgtcacctacgtctacgatgccgcgctgcgcctgaccgatatcgaagacaacgcaggcaacacgattcactacaggctggacaacgccggcaatcgcctcaaggaggacatgctagataccggcggcaccctgcgccgtaccctggcacggacgtgcaatacgctcggccagctgaccacactgaaggatgcgagcaatcacgccaccggctttgccaacgacgccaacggcggcccgcagacggtgaccgacgcaccacagcgcgtgacactgctccaggcatttttggctgctggccgggcacatggaaaagatccgccatcgacaggatctaggtgtttagaatccttcatcggtccttccacattttcgcggaacgacacgttggattag

SEQ ID NO: 534709 - DNA, 510 bp, Stenotrophomonas maltophilia
atgtcgctgacgagcgtgcaatccattgacgtgcagatacagcaacttatggcgcgcaagcggttggttgaagcgcgcgatgaggaggtcgaccaggcgctggccgcgctgcagaagtatgcggaggtgctgacggcggctcagcgccgccgggtggtccaactggttggtgaggatgtcgccgcatcggcaccgaccccgtctggcaagcgcccacaccccaacaagggcaaggtgctgggcacgcaggcgcccaagtaccgcctaccaaccggtgagacctggtccggttgcggacatacgccgcggacctttgtggcgtgggcatcaggcgccgagggcaaggcatggctcaagtcccatccgggtgagaagttcccgcctgtctcggcagctggcaagaagactgccagtacttcagcggccaacagcgcgccgagcagtaaaaagccttcggacaagaaatccacgggcaagaagatgacggcccggaagggagcgtcgaagtag

SEQ ID NO: 534710 - DNA, 195 bp, Stenotrophomonas maltophilia
atggacgatgcgatcgacctgcatcgcctgctggtgcgcaaccccgcctccacgttcctgtaccgggccgattgctggtccatgagcggagtcggcgtcagcgacggggacaatctggtggtggaccggtcagtcacgccgcaggccggtgacctggctattacgatctgggaggggaaccagcccacccgctag

SEQ ID NO: 534711 - DNA, 465 bp, Stenotrophomonas maltophilia
atgttcggactcgttgacggcaacaacttctacgccagctgcgaatgcgtgtttcagccggcgctgcgcggcatgtcgctggtggtgctgagcaaaaacgatggctgcgcgatcgcgcgctcggccaacttcggcctgtactgcgacatgagcgcccgcgttgcggccatcctgcgggaggctgcgcccagggtggaagtctacagcattgacgagagcttcatcgatcgggagggcgtgcgggaccgccagatattcgcccgtgatctgtggcagcgtgtgcaccgctggaccggcattcccaactgcatcggcatcgggcccacaaagacgctggccaaggtggccaagagtgccgacggggtgattcgacctcggggacgcgggcaaccgggacacggcgctacgggccttccccgtttggagatctgtggggtgttggccgcaggctggcgccgcggttga

SEQ ID NO: 534712 - DNA, 834 bp, Stenotrophomonas maltophilia
atggacaagcatgatttggatttgttgggaaacgcaatcgacagtctggtagaggcgctagagaagtttgagcaaggagacaatgggaatccgaaggcctacaagtttgcagtccttcatatggcgcattttgtcgaactaatcttcaagcatcatattactcagaaacacccattgttgatctatgcgaggcctttcgatgaaaggctcaatacacaaaagacgattgggctatgggaagcaatcaacttcatcaataacgaagaggccggcgccgtttcgaaggattttcgtagtgatctagactggctgaagaacctgcggaaccagattgagcatcataagttcgaaatgaatgttgctgaggttcgctctacgatgggtaggctttttcgctccatgatgctgttcatcgaagattacacggacctggatttatcggaagaaatcccgaaagaagtgaaggccacgttcaaagttctgtccgatgagtacgagctgaaggttcgggatgcgcatatggcagccgacgtcgtggcccgctccgcaaaattaaatccattcgagaatcggctggacgttcgagtggattgtgactggtgcggtcatttcactatggtcgtaaacgaaaaatccccaaccggatacaaatgcacgttgtgtgataacacaacaagcgatgatgttccggccgcatgtgattggtgccaagagcggctgacgtttggcgaactctatagtgacaccatcgaggacaatggtgagccgcgagaggtctatagatgctaccgttgctcagggcagtaccacgctgacaggtatgaagacgagtga

SEQ ID NO: 534713 - DNA, 432 bp, Stenotrophomonas maltophilia
atggagctgggctacctttgcagactgcgcggcattgagacgctcaggctcaccgaggcgcaaggcacgactgaagggctgcgcaccaatcgccgaatgcgcagtcgagatagcctggtggagtggaccccgcggcaacggagcgcatgggatactgcaatcgcgcggcacgaagccatcatcgagcgccacagcttgccggtgcagatgcgggccgatcagcgcgatctattccttgcagagcatggcgaacccttgcagaagaccagcctggacagcacgtggcagcgcttcatccagctcgcaatcagctctggggtcatcatgccagaggaacgcttcagcctgcacgacctcaagcggaagggggcaccgacactgtcggcaatcgcgccgaccgccaagatgcgctcggtgttaccgacgcgatga

SEQ ID NO: 534714 - DNA, 2583 bp, Stenotrophomonas maltophilia
atggaccatgatccgctaaagcaactttcggccaaacggcgcacatacgctgacctgagccgcttcatatcgtcgcgcacttcagaggttcctaactacacgttcctgctgggagcgggctgctcagtttcttcaggagtgcgcagcgccggagcgctagtggaggagtggcggcgcgaggtattcgagcgcctttacccaggggatgcctacgaagttgatgctgctaaggagcggcttagtaagcttgagggcgtttggtataacgcaaatcgggagtactctgcgctttttgaaaagaactttgacctgcctcgacagaggcgtatgtttgttgagaaagaagttgctgggaaagtgcctaatcttggctacgcttacttgattaggttggtggatcacggttatataaatacgatatttacgaccaattttgatgacctgataaccgaatcgttcttccagttctcgcagagccgcccaatgatgtgtgctcacgattcggcaatctcaagcgtatcagtaacatctacgcgtccaaaaattataaagcttcacggcgattatctattcgatgacatcaagtcgaccgtaagggagacggagtccctggaggaaaacactcggaagaaattcgtagaattcggaagggatttcggtctggtcgtggtgggttatagtggctgcgatagatctatcatggacgtccttcagtatcttcttagaagcgaggaccatttcaagcacggaatatactggtgcatccgtaagggtgagacgcccagtgatgagttgatcaagctgctttggcgtgaccgagtctactttgtcgagattgacggatttgatgagctgatggggcagcttcataacgacctggtcggcaatagtctgcctatcgacactggaattgttaacgataagcctcggacaataattaagggtttctgtgaaaatacctatttgggtagctcgagttctgaggtgatcaaaagagatctcgagatcctagagcggcaaaattcacgtgaggagctattcagtacattccgagacataaagaggtttcctcaggaatcagatgacgatgaaatcagcgatcgagagacggtcgcgatgatcgagattcgtcgcctcatcgattccaactcgttctcggaggcgcgtgacaggatacgatctgaacttgagaagcatcctggagctcgcgcgcgtgaacgcttttatgatctgctggtcaggactgaggagtttgccggagacgttaaagcagcgataagagttttggatgatttgattgctctggattctcgcgatccagataactacattcgtaagactcatctcctgcatgatcacgatgcgcggatggttgccgtcaactcctgcctcgaagtcgctcccaatagctacaaggtacataatgcagcgctggcagcgctcttggacgctaggcgagctggcttaggcttcgacagcagcacgcttagtgagaaaattgagcatcatttccaggctagcatacggtgcaacccggggctaaataattgggcgtgggatatgctcgggaaacatctgtacaaggaagtcatgcccaaggatgatttccgtcgaagaatggatgagatcgtttctcgctgttcgtctatggatccagcgtcattgagggcattgcgtgcgcgcctaaatagactgtcccggtacaaggaggacagggtttctagcgaagctgaaactttgttgtcggatatagctgcggctcccaagcaaaagccgcaatttcttcgggctgactatacctggctcgaaatggacgcaatgtctgcgcttggtaaaacggcagaactttccaagaaggtcagtgaactaaatttggatgctgatctttcgtccagcagggatttccttgtccggaaggccagccatctgctagaagccagcggtgacctgacgggcgctgtcgtagccatgaaagctgcgctcaaggctgaaaaatctcccgatgacgcgctccaccttgctcggtattacgtttatcagaaagacccttctggagttgccgatataattaaggagtacggcaagagattctatccattgcatcgccatctcctgactcgaagtgaatccttggctcgcggtaacgttgaaggtgctcttgctcagttgcgtgcgatgaatacgcttagaataattggtgtggatcaagccaatgaggaaattcatgacctgcttctgttgaagaaatacaaggaggcggagcaaattgcgaagacggcgctggagcaagtcggctggagcgttgcacatccagagttgctgattaattatgaattggcccgggttaggcaggacgaatctccaaaaaaggctaagttacaagacgtaattgataagtcaggcaacgaggctgcgtcagcttgtgcatacttcttgatgggaaatatggagaagtgcaaggagttgctcaagacggaattgcgacgcaatcgggaaaatcggtatatctacgaggattgggcaatattctcggacgcgaaggggagatctgtcctagaggcagcggtcaattctgctaactga

SEQ ID NO: 534715 - DNA, 513 bp, Stenotrophomonas maltophilia
atggccggtgccgtccaccttgaccgccaaggcgtgacgttcctgggtccggccgaatccttcgccgtggtggacgtgcccggccaagccggggtgccggtgagggtgggcggcagattggtagggaagaccaacgcccagggccgcctggtggtgggcgaggtgaccccaatggtgcccaccgaggtccgcgtagacgatcgggcgctgccactgggcacccagttggccgagatcgagcaaaccgccaccgctggccgccaagccggcatgcacctcaccttcccagtcctgaccgagactgcacgaaccttccgcctcactggcccggccatcgaagcgggcacggtggccaagacggcgaccgagaccacccaggtggggttcgacggggtgctctacctggagcacccggagccggggcaggtggtcgaggtggcgggggtctgcagggcccggttgccggcagaccttggctctgcgcaaacggtggtgtcgctggcctgccagtga

SEQ ID NO: 534716 - DNA, 648 bp, Stenotrophomonas maltophilia
atggcgaggagcatacgcgtcgccgtcgcagatcctgcgaacgcggtcagcacctggctgaattggtggaggcctgaagttcgtcagatgaatcgggggaaaaaggcatggactgggcttaacctactccctcaaccgaaggacctcgacatggaagatttcctcaacagcattgaatccgcaatagagcaatcaaattggaacgccgcaatatcactatctctaatgctgccggacatatgcccgtccatgcagggaattcagcgcggccgaaagcgatacatgtcttggtttgaaacctatgcatctggcgagttcaaatcgagcaactgcggagatttcctctcagcgaaggactgctacgctttgcgctgctcgattcttcactctggcatcgatgatatctccgacaacgaagtcgatgcgacgctgagcaaggtaactttcgctacccttgaaatgcacaacatcagattcggagatcacctgatactgcatccaaaggagtttgctctatccatgattcgcggggccagatcatggatttccgacatctctaacgacatcgatacacagaagcggcttaaaagaatggtccacgtcgaaaccaaacctttctcaccgctgcctggagtactgctcggttag

SEQ ID NO: 534717 - DNA, 177 bp, Stenotrophomonas maltophilia
atgtctcagaatgtcgatgaaatcgccaaggatcttgtcgtcgcgctccttggaggaaacggaaatgaaggccgcgacgggcgatgggtggccgaacagtaccgggtgatctgccaggcagtgggcgaggcgagtcgtaagaacggcgatgatcatgtggcgcatcaccgtagatga

SEQ ID NO: 534718 - DNA, 531 bp, Stenotrophomonas maltophilia
atggacgcgcggtattgtcttttgctctccgactggccatgccttggccagtcggaatgggccgcttggattcaggtcattggcgcaatggtcgcgctcttcttggcaatctatgtgcccatcagaatgcgcaggatcgacgattttgatcgacgacgcagtgctgttggctgtttgcaacaactggactgcatagccacctactatgcaaccgtgatcgaccagctcgacaaagcccttggcactccatttgtcgacctcacagcagcgctcactgccgctcgcgcacacctgcaaaaccccgacacaccgccagaaacgctgcccaccataggccacgcagtagatgcgaccgaaaagttgatgaaagactggacgcgcgcagccagcgacagcgtctaccgtcagaacaagttcacagtgcaacaggcccgcgagcatcacacgcgaatccgaacccactgccttgctctccaggttgcctcggaccgctggcgccgcaagcactggctctctctggttttcacgtag

SEQ ID NO: 534719 - DNA, 165 bp, Stenotrophomonas maltophilia
atgagacgcggccgctccactggcaacaagcccaaggcccagctggccaggctcaacgccatcaagggcgtggggtgcatcttcggaaatcacactaacttgatgcccgaagacatgtgcgctgagttttgggaaatggcagggacgaaacggagggttgcgtga

SEQ ID NO: 534720 - DNA, 513 bp, Stenotrophomonas maltophilia
atggattgcaaatggattggctggtgtgcaatggatcaaagcgcgcaagcagcttgggttcaggccgttttttccgtggtcggtatcggcgtggcaatattggtgccatacctgcagcacaggaatgcggcaaagactcgcgctagcgaagctcgcgctctggccattagccaggcaagcgcgcttattagggacgtcaagatctacgccaatagggccgacgccatgaaatcgaacttcgacgaaaggaatctgacggatgacgcttggcgccttagttggcctgcgcccccagacgaggttaaggctgccgcggcgacgctgcatgaactggggcagccgggaacgaatctcaccaaggccatccaccacagccttgaagccaaggatctccttgatgtgaacggatacttgaatgcgaacagcgccgccgactacggacgccacctgatcgctgtgcagaccaacgtgcatgctgctcttcgcgaaatgcgtacactgcttgagtcctag

SEQ ID NO: 534721 - DNA, 672 bp, Stenotrophomonas maltophilia
atgaaaaaaacccaaattgcccctcccaatagcccgatagtcaccaagctcaatccaaggggggatgtccactttctccccggctcattggggaaaagccaaacgcagacaaggaaggctagaagttcggtcatggctttcgatccgaaaacgtcgaaatggtttagaattccttgcgccgcaccgacgctgactattgcgatcgccgccgcgaatattttgttttctgcgatggggcgaggcttccagagcgctatcttgttgatcacaaatgttgttcccatgttccaggccccgactcaggtcggggctttggttactgcatcacttcatcatgatgtgcttccagatcatccctgcagcgccgattccactgaatggtgcgattcggccatagcggtacgccatttctccgattttctccgattttctcggagtttccgcgcacgtgagtgccgttgctccgaccaatctggaattgaatgctacccgaaccacccgaaatctctgcaacttcagttctatttagatcacggatatggaatccttgtttccccgttgttggggtggtcatccttgcgagccccctctggacctgtcaaccgtgttgtgagatttcgtttctcgcagcgccgccgccgagacgtgaacttcgccaaaaaaatgatctga

SEQ ID NO: 534722 - DNA, 627 bp, Stenotrophomonas maltophilia
atgaccgccctgcccgccgacgtcgccctgctggtgatcgacctgcagccggacttcatgcctggtggcgcgctggcctgcgaccagggcgatgcgctggtggcaccgattgccgatctgctggcacagcgccgctaccgcaccgtggtggcgacccaggactggcaccccgccgaccatgcctcgtttgccagccagcacgccggccagcgcccgttcgagaccatcctgctgcacgcgcagccgcagaccctgtggcccgaccactgcgtgcagggcagcgccggtgccgcgctgcacccgggcgtggactggaccgtggccgacctgatcctgcgcaagggcacgcgccaacaggtggattcgtacagcgccttccgcgagaaccatggccccgatggcgagcgcccggccaccggcctggccggctggctgcacgaacgccgcatccgcgaagtgcatgtgtgcggcctggcccgcgactactgcgtgctgtggagcgcacaggacgcggtgaagtccggcttccgggtgaagttcctgtgggacctgaccaagccggtgaccgaggccaacgacgcgatggtgcgcgaggcgctgggcaaggcggggatctcgatcatctga

SEQ ID NO: 534723 - DNA, 1611 bp, Stenotrophomonas maltophilia
atgccatttgagttctccataccaacttccgctgcgagtgccctacgcatcgttcttaaggagggcgagtcactaatagttgtgggagccaatggaagtggcaagacacgacttgctgcatggattgagcaaaacttcggagagcgagctcatcgaatatccgcacatcgcgcgctcacgctcaagccaggagttcccaaaattagagagtctgatgcacttcaaggtctgcgattcgggacgactggtagtaatgttagcctcgcgcatcgcacgcacaatcggtggggcaaggacgaggcgggcggtatcctcaatgatttcgactatctactacaggccttgtttgcggagcagtcacgtaccgcgttactgagtcataaacgtgctcgttcgggcgaccatactgccgctgcgccgacgaaatttgagaggctgcaactcatatgggagcaactgcttccacatagagagctagtcgtttccggcgatgacatccaagcccagagaagtggtggcaacagcctgtatagcgcatcaagcatgagtgatggcgagcgagcaatcttttacttgcttggtcaagcattgatggccgcagaaaattctttgtttatcgtggacgaaccagagcttcatatgcatcgctctattatgagcaagctctgggataggattgagaacgaaaggccggattgtgcctttgtgttcatcacgcatgaccttgaatttgccacctctcgggtggggcaaaaggtagttatcggcgactatcaatctgatacccctagctggagtgtcgaatctgttccggaagatagcggatttagtgaggaattgacgacactgctacttggaagcagacggccaatcctattcgtcgaaggtgatatgtccagtttggacaaggcgatataccgatgtatctatcctggctggaccgtcataccgcgtggttcttgcaaggatgtccttcacgcggtctcaaccatgaagtccaacgcgacgctgacacgtattacctgcgtgggaattgtcgatgccgatggctacgacaatgaggaaattgaagcattaaatgaaggctcagttcatgtgcttccagtctcggaaattgagaatttgctcatgctcccggaggttagcagagagattgcggcagccgaccacatgtcagatgctgagattgaggagcgacaagctcaactgtacgacgcactttttgcgcatgtgagtcaagatgatgttattgaagcgacggtggcacgttattgcctcagacgaatagaccgcgcgcttaagaaaacagacttgagtaagtccaagacagttgaggcaattgcaaaaaactatgcatctcaagttcagacccttaacattgaagccatagctgaccagcggcgagcgcgaattaaagaggctgtctcgcagcgcgatgttcccgagttacttgcgttggttgacgacaagggaatgcttgctgatgcggcatctaagctaaagaacactacgcgcgcgttatttgaatcatggcttacacgcgtacttatgaatgaacgtgcgccacagctcgtggcacaattaaagacgaagcttccagaaattgactga

SEQ ID NO: 534724 - DNA, 450 bp, Stenotrophomonas maltophilia
atggtgacactgaccttcagtgggagcgacggggtgagctacaagtttgcggagaaggcattcggtaccttcgcccacaaactcaagggctacctgttcggtacgaagtcgaagaagcgaatcgccatgtgtccgatagtcgaggactacggtgcggaaatgatgtggagtacatcaccgaccggggtgcgacaaggaacgcacatccattgccttatgcgcctgcccggtagcccgatgaaccacaaggatgtggtcagaaggctctggcgggcttcaggacgacgctgtggtgacccgagagtcaactgtcccggcagagacgattggtatgtcgaaatgctagcgcagcaggacagggtggagttgactagctatgccctaaagaagtgcagcgatagcgtcgatggtgtgctagtgaaatttgtacctgtgcgggctacgacttaa

SEQ ID NO: 534725 - DNA, 1530 bp, Stenotrophomonas maltophilia
atggaaatccaagatccacaacacagcggtagtgactcagttgccgaggacaatcgcgactccaacaccgtctggtcttgggggaaattgctgaatcctatgcggcgtaaggaggttgcgcgcgccgctaatgccgctaatggcgagggctcgccggtcaaagctatccctgatagaacggaagcgcggactccaatcgagagagatcacgatcgtattcttttctcgacgccggttcggcgtcttgctgacaagacccaagtgttcccgttggataagaacgatagcgttcgtgatcgtctgactcattcaatcgaagtctccaacttggcgcgaagctttggcactattctggcggagaagctagatgtgtccgattttccgaccgcgcaccgagatttgcctgcgctgtgtgcagccattggacttgttcacgacctcggcaatccaccatttggtcaccagggtgaggctgctatccagcattggtttgtcagcaacccgcggctgatatcgactctaaccgatgcgcagcgtcgcgatttctcttcgttcgaaggcaatgcgcaaggttttcgtctggtcactaagcttcagctgcttaatgataattatggcttggatctgacatacgcttcactcgctgcaatgatgaagtatcccgttcaatcatgcgatgtgagcgacgagaaatgtgcttcgaagaagcatggcttctttcagtcagagaagccgattgcagatgaggtcatgaaggcggttggtcttgagcttgggagacgtcatccactcgcatatgcaatggaggcatgtgatgacatcgcatactgcgtatttgatgctgaggactgcattaagaagggattggcatcaatttctgacctccatgaatggttaaagcacgacagcaaaggcgatgcattggtggagcggcttgtccggtttagtgaggccaagactggcgaatacagagcgcgtggcgagttctcccctgccgaactcaatgatatttcgatgcagcgttttcgtgctgaggcgatcgggctcttcatggactctgcagtcaaggcctttgtagccagccaacaggggttcgctgatggcacggagaccagttccttgcttgatctctctttggcaaagaagttgcgcaaaagcttaaaggatttctcactcaagcacggctacacgcacaggtccgtactcaaggtcgagctcaccggatttaatgtaattaatcgtttgatggatatgttttgggctgcgatcaccgaccgagaatcattcgatgaccctaagtccaagcgtaagcatccgtttacacgacttgcttatgagaggatttctgagaactatcgtcgagcgtttgagaatccccagggtgcctctgcgaatctcccaatgcggtatcgagaggctcagcttctgtcggatatgattgccggaatgacggattcattcgcaatggacctttgtgaagagctcgaaggtgtcattggtgacttccgtcttgattgttataaagaatag

SEQ ID NO: 534726 - DNA, 729 bp, Stenotrophomonas maltophilia
atgctgaatagtcgactaaggaaaattttagataattttttgttcccttcttctattgttgaaaagagaaggggggtggctggctttatggctgaaatttctcttggcttgcccgacaccgttatatttggtgggatggttagggaattttccttggggcatgctagggaattttgttcggatcttgacttggtcacgcgtcactcgcggaggaatattgagcaattcctgggggggcgagattgggtgaggaacaagtttgggggatatcgtgttctccaagataaatggatgtatgacatttggtcattggaagatacttgggcggtacaggcgggctatatcgagtgtaagaattttgatgacctgctaaggacaacattctttgatattgattctgccgcctttcacatttcatcgcgtcgtctaataatgagtgccgctcacgtggaggctgtgagatctaaaaagttggggattaatcttgcggagaatccatctccgtctgcaatggcaagacgcgcagtccgaatggcgatgaggaatgacctgtcgctttcaagggagcttgcacactacgtggtttacaactattgctcaaatcagcctaactcgctggaaagtggctacgtgtattgtttgaagcgtctgcttgattcgggcgaatgccagcttgttcgtccggagattcaatcggatttttttcaaatctcttgttcagagcgttga

SEQ ID NO: 534727 - DNA, 1731 bp, Stenotrophomonas maltophilia
atgctgggacacgtcattgacttcatcaagccggatgccagtgagccgttccagctggtcttcttcgcgatcatcctcggcgccgccgtgacgaccgttgcgggtgtgtggcgcactgcacggcctgataactggaaggccaactgggaaggcaccgggcgggacaataccgggctggatgtagaccatggctcgttcaacgacgtgtgcgatgctgttgccaccaagccggagaagtatgcggagatcgtgccgggcctgctcctgatctttggcctgctcggtaccttcgtgggcctgggtattgctttggacagtgcctccgccatcctgagcaacgccaacgcccagaacgcgcttgatggcgggatgaacgacctgctggaaatgatggggggcttgggcaccaagttcaggacctccacctggggcatcctcggtttcctgctggtgaagctggcattggcaggcatggggcgggagacccagcgccagcagtgggtgatcgcccgcatgaagctggagatggacaaggcccgccaggccggcgcgcgcctggaagagcagcgcagccagcgcatgcaggatgcgctggccgacgtggccgtgaacatggacggctcgctggaccagaggctgcagcaggaccgaggcctacgactggcccatcaggacgatacggcagaaatgatgcggcgcgccgtgcaggctctcggccagcagttcatggcggcactggagcaggaccgcagcctgcgagtgcaggctgatcgtgcagccgcagagcagatgcgggcactccttggcaatgcgtttgagcagctgcagaagggcatgcaggacaatcagaccgcgcaacgccgtgcggccgagcaggctgcacaggcattggaggcgatgctcgccaggcaggaccagggcaacgagattgcactggatacccagcaggtgctggtggcgttcactgcctcgcaggaggctttcagcggctccatccagcgcagtgccgataccatgtcagctgctgccaccaacatgaacggagccgcacgcgagatgtctgcggccatcgccgcctttgacgggggagtgcgaaacacgctcggcacgatcgaggaaaagctgggcgaaacaatcgacagcatgggccggtcgctgaccaagaatctcgaggttatggcgaacctgttgggggataccgccaacacgctgaagaaatcgctcgagtccttctcgatcaaaactggcgagacactgggccaggtcacaggcagcatgaagatcgcctccgagagccagcagaaggtgatgggcgatgttcgcaacgccatgaaggatgtccaagagatggtactgcaagccaccagctccatctctgacatcagcaacaagcttgatgacagcctgagggcggtttccaagagcaacctgcagatggcagcgctggtggaacccatgaaggcttcgcagagcagcaccaccacagccgtggcgtcactccaggaaaccggacaggcgctgcggtctctgcaggctgccctgactcgcgacggaaatgacgcagagcggctgcatgcggccctggcaaagggcgcagaggtggtggcccaggcgcacagccgcatccatgatctgctgcagcgtcaagtcaacagtctggaggtgctgcgcgaggagctccgtagcctggtccagcctcggatggaggatgaggcggagctggccggatga

SEQ ID NO: 534728 - DNA, 1434 bp, Stenotrophomonas maltophilia
atgaacccctactttcttgacgacactcttcctacacccacacctcgagtgctactggggcatctggcgtcaatggagaccatcggccgccgtcagctcagattgtcctttgacgcgatcccatacagatgggcacttcactcctggcggcagtacggggacgttgagcctgaacctgagtacgtatcgcggttctttgaggaggttccgctgtttcacctcgatgtcattgtgcgcggtttcaatgaacgcgaactcgttgaggttgtaaccgacctcgcgccgcccgacaggcgtgcggagggcaccatagtggggcggtggataggcctcaggttccgtcccacacccgctggcgacgcgatcagctattccagcattactgacgccggaaccacggggttcttggggcttgcccacctccccgaaccacctctgattgagcacctcaacaggttgaggcctgaagtcacccacgtgaatgccgatcactgggctctccgcgctgtgcttgacagcattccgcggccccacgcgatggccgtactggacgtgggtcaagcttcttccaacgtgatgctgggtgaaactgggcggcctcttctctactttgatgttggccgggccatcggggcgaacgcgtggaccacccccgctgcgctcaagttctgcacctgcccaaacaacaaatcaccggcgcccgttctcatttcgcattggcacgcggatcactacaccgccacgtcattggacccggacctgttgacgtgcacctggattgtccctcacaccgtcaatcctgctcacatggcgttccagaacggaattctacttgccggctcccaggtgctccagttgcccccggtctttcccgatcttaagttcggcacgtctgggagctatacccttacgcagtgcaccggaaccgggaacaatctcaacaatcgcggcaatgccctgatggtggattggaggggtttaaactggttgcttcccggcgacgccagctacaagtacatcagcttggttaaggatcgagaattcaccgccgtggttgctactcatcatggcggcttctttgcaggcaatactgtgcccacaagggcaccgggctatgcccgactggtgtattcgttcggacacaacaacgtctttggcacggcgatgcacccgctccccgcctcggttgccaagcataagacacactggaaccacggtaactggatcccagcacttccgcccggtctggtgtcgcccggcgtcgctggagacgttcgcgccacagcggtgcacggcgtcatgcttttcccaggtattgcgccgccgacgcattctggcgcggtggcgatcgggtggcaggggccaccggcccttgcagggttagcggcgccatgcccgacctgcgggaagtcgttcaatattcagcagacctga

SEQ ID NO: 534729 - DNA, 1413 bp, Stenotrophomonas maltophilia
atggaaggatttgttggccgtcagcgtgaggcccaggtgctcgaggatctgctttcaggatcgcccagcaagggcttgaagattcagagcattgaaggtcccagtggaattggcaaaagtagcgtttttgccaaggccatgcgatccattgacttggatagcctgggtttcctgaggatagagttggcaggagcaaaccgggggatagatggctcaactggcgagttcactgccgcagccattgatcagctggttggctcgcttgtgcgctctgcagtagggccgggaatcgggttgaagccatcaggctactacttcccgaagacccgtgaagcaattgaggctgtctctaagatcaggggtgagatcaccaaggagctcttggagcgcggagtaaacgtaaacactgaaggcctcgagggagttgccaagctgataaagtcaggtgcatccatcgttcagcgtgtcggcatgttcgtgccgaaggtcaaagaatttgtggaccctgaggcagtgaaggaggccgccgacgagctccccggggccgcgagtgaaatcaaggccttgtcttcagaatccatccgtatctgggaaaggctcggtatcggttccgcctcatccctccgtgaggctgctaagcaagatcctgaagaggtccttgcgaatgcattggtagcagatctaaaggcgatcctgctgggtgagcacgaaggcaagctcaagccggggcacgggaagatcaagcggttggaacggttgctcttcgttgtggaagactatgaggcgcttcataagcagctcggcggacttctgatccccaaattcctaaacaagctcaagagcagcgacatcgatgcaactttgatcgtgctgacgaggttcaagctcaaggccacaaatcctctctggaaggactacgaggcgcagcttagacgcgcaattgtgctcaagccccttgagaagattgaagtggacgagcttctggcggagtttggcattgtcgatacagccgagaaggagcgcgcttggctggagtcctctggtcttccataccatctttcgcttttgatcgatgagctcgatagtggtgggcgtagttctaccagcttgaaggagctacaccaacgcgtcgtcatgtggatgagtccgcgcgaggtctcttggctacaccaggttctctacatggatgatctgcaggtggaagcgctggagcaggtctttggtagtgagcaagaggcaaaggacgttcgtgactggttcgaaagtgaaggctcaatccttgatcaatcttcccagaagctgagaatgcttccattcgttcgatcacgtctttgtgagtatctggagagccgcgaccgaaggaagacaaaggagctgaaggcccgtgcggatgcggttttcctggcagattga

SEQ ID NO: 534730 - DNA, 2340 bp, Stenotrophomonas maltophilia
atgggaaaaagttcaaaacgaggctccactcagggtgccatagtagagatggaggattttggcgttgtagtacaggtccacaatcgtggttttggcttcgcatgctgtttaacgggcgatcagaatcgcgagatttttcttaatgaaaaccgaatttcatttctcaaatcaataaatagccagccgctaggtcgcctaatccgaatgcgcgtagttagacagccagacggccgtctatccgcaatcagtgtcaggccactcgctccgaccgatgcaggcaccatcgaactggctcgacagcatcttgcgcgtagagaagcttcgttggatgccgacgtcggcccggctcctattcttagactattagcgggcattagcccggcaatcgaccgcttgctgcatccaatgattgatgcagtgacggaagcagagtggctctcacctgcaatgctcgacaccctaattcttgcgccacagccagtatggaagcacgccatttcgcaccatcttaacgctaggacgccgggcgcactagagacactattcgaccaaatcaaggatagcaagaaggaaattgacatcacatggcttaagccaatgtgggaatcattgcccgcccatcgaaatcaattacaacacatcgcatttgaaaacaggatgcagatgtcggtttcggaggcagcgcaatgggcacgtctcgccctcgaaaatcatccacaaactgggaccgactggtgggatgtcctcagggattcgatagaatctggactgccattggattcgcattggctgcattgggaaaaatggacagatgcgccctggaaaacagtcgcaatcgccttgcgaaaatgtgacgcagatccagacaattcaattgcacgacttatctacattgcaaatcaatcctacgaagttgggcgtatggacgcggctcttgttctcgccagcctcgaccataatgatcaacgcttatccgacatgtggatttctcagttaggaattgacacaccggaagatatagcgcatgccctgagcgcccaaatgatgactgcgcgggcagcggaaaaatgcgctgcgacctacatcaacggactggggctacccacagaagatatcgccttgcatcaattggatggaagcacgacggaatggcagcagatggatctgcgcgtagacggaaagcatggtgtggatgttaagaacgtccggcgaaacatcaacggcgggatccagtccagccgctggaaggtcaagggttttaaaagcgatgctgggggtaacgaggtaacactatgcggggtcagcagcccttacacatggaaggctggtggcggattaaggtgcacaacttcagaatacatgcgggttctgggtgtcacaaaatcaatagaaatatctcaactcctagagcagttcaaagatatttttacgctacgaacaaatccagcttcaaggctgattgagctaccggcttgggcatgggactaccccaaggctcagtacagggagcgcgaccaggctatggcggtgctacggaattccctttcatccttatataaaaccgcaattggtcggcgctgcatcacagcaattccacctgtattcttttcattctggggcatggaacctcccggtagtgaccgcctgaccacacaacagagagacttcctggatcttctccgatcatcccgctggaatcgcatcgtggcacggcaggaagtatgcgttccacgacttccttggctctatctttttactcttcacgcgtgggcacgctggcgcgccgcgagtgaactggcggacacaaaatctattctaagcattctgagatggcatgctcattcaactcaagatgctatgcatgccgcatccctagcgcgaatagccagagccaaggacctcaaaaatacagatccaccaatgttccaatcagacacggcttccaatcaaccatcagcggtttcaggcataggaattatcgatcccgccaacatgatagagacgctgctaaacgcactatctatccttgagaagcacgtctcccgctcgcagtttattaccctttcggacatcaccatctattacaacggcatactggttggcacttttcccgacggacaacggaagaccctactggcacattgtggaggacgactagaagagaaaaacgttgaatgcggacatcgccccctagtgtacggcaagcaaaaaacttgtacttgtggacgactcatatgcgaaaagtgcggctcctgcgccgatccccgctatgaatcatgtgctgaccaaacagagcggcacgctcggttacggctgaaaaagaaagtacttaggcggtaa

SEQ ID NO: 534731 - DNA, 144 bp, Stenotrophomonas maltophilia
atgcagaacgttccgcagtggctggtctgggccggcctgtcagcctgcttcgccgcgctgaccgcgctgttcgccaaggtgggcgtcaagggcgtcgactcggacctggccatggcatccgcactctggtggtggcggcggtga

SEQ ID NO: 534732 - DNA, 327 bp, Stenotrophomonas maltophilia
gtggccaagccccgcactgcgccgcccagcgcacccaagaccgtccaggatgaccagtcggcagcggaccaggacgctggcatcgaagcgggagcttcttcgcctgacgctgcgtctctcgacgttgtcactgcgcctgccacttccaccagctcgggcgatgacacgccgagcatctggtggttcgaagtactcagcccgttcaagcacgccgacgtagtcgtcaagccgcccgcgtggatcccgatgacctgggatgaggccgaggactaccaggatgctggcgttctcggtgacgaaccggccaccccggaagagctggagtag

SEQ ID NO: 534733 - DNA, 213 bp, Stenotrophomonas maltophilia
atgaccacccagaagtacacgatcaaaaaggtgggcctgacgcttgcgagcaagcccattgctgaaggcgaaccggtggagctctccgccgatctggtgccttgggcggttgagcgcggcttcatcgacgctcccggcaccgattcttcccccaatccgtcgcgcaaggccaatggccaggcgaccgctgccatcgcccaggaggcgaagtaa

SEQ ID NO: 534734 - DNA, 1803 bp, Stenotrophomonas maltophilia
gtgtccgaggtcctcatccaggctgcggccagccagctgctggcggcgccgcacggtagcaaggggcgcatcgcctccgcgctggccgagcagctgggatgctcggtccagacggcctaccgtcacctgtcgaaggtgacggcagctctcaagccccgcaagcgcaggtccgatgcgggcgaactgtcacttacccgtgacgaagcggcctcgatcgcggccatcgtggaggaaacccggcgcctgaccggtaccggcgcgctgccggtcgaggaggccgtggatgccttgcgtgccaatggcaggatcgaggcaatgcgcgtggacaaggcgacgggcgagattgtcccgctgagcacctcggcaatctgtcgcgccatccgccattacggcttccaccgtgaccagctggcagcggccacaccggctgcacggctgtcctccccgcatcccaaccacctgtggcagatcgacgcctcggtcagccgccagttctacctggctgatgacggcacacgggtgatggacaagcgcgagttctatcgcggcaagcccggcaacttcaccaagatcgcagaacgccgcctgtggcgctatgccatcaccgaccacgccagcggtgcgatcgagctgttctacgtgctgggtgccgaaagcagcgccaacctgctgtcggccctgatccacgcaatgacacggcgcgaaatcggcacgatgcacggcgttcccaagttgctgatgatggatcccggcagtgccatgacggccaccagcaccagcagcttcctggcggcctgcgggatcgagccgatcatcaatgaagtgggcaatgcacgcgccaagggccaggtcgagaacgcgaactacctgatcgaaacccacttcgaggccctgctcaagctgcgtgcaccggtcaccagtctggaggaaatcaataccctggcacagcagtgggcgcaggcctataacgccacccgcacccacagtcgcactggctacacgcgtcgtgatgggtggttgcgcatcacccaggaccagctgcgcctggcaccggccgtgcaggtgctgcgacagctggccaccagcgcgcccaaggcctgcaccgtacgcgattgcatggtccgcttccgggcacagcagtacgacgtgcgtggggtgccgggactgatcaacggtcagcgtgtagacgtggtggtcaatgctctggatccggagggcagcgtacgcgtgctgatgccaggcacacaggactgcgcgcctgtgcactacatcgcaccgcgcatcggacgcgacgactggggcttcctggacagcgctgcccaggttggcacggagtaccggacggctccggagacgccggccgacgcagctcgtaaggaactggatcggctggccatgcaggttcacaccgatgctgaggccgctgtggcacgcaaggccaagcgagtggctttcgggggccaagtggatccgatgaagcacctgcgcgaggccaatgtgacgccgagcctgccgcgctcgggccgcatcgcccaggtcgatgcaccacaggtgctggcggcccaacgcatcgagcctgcgccgatccgcgccgagctgccgccactgaaccatgtggaggcggccatgcgcctgaaaccgctggtggaggcagccggttcggcctggtcgcctgaccactatgcccgcaccgcccagcgctggccggaaggcctgccggtggatcaggtcgaatcctgggcgcaggccttggcgtcgcctgagcgtggcggcctgcgcctggtggaaggaggtgctgcatga

SEQ ID NO: 534735 - DNA, 1527 bp, Stenotrophomonas maltophilia
atgaccaccgcccgcccagagatcggccgcgagattgccaccactgccgatggcatcgacatcacccgtggctacaccgggccgctgctgctgccctttgacagcgtcctgcgcaaccgcggcggctacgacctgcagatctacgaacaggtgctgtccgacccggaggtgaagaccaccttcggctctcgccaggactcggtggtggcctgcgaatggcaggtggaacccggcggtgagaagcgcatcgaccgccaggcggcagagtatctgcaggagcaactgcatggcatcggctgggacaacgtcacccgcaagatgctcttcggcgtgttctacggctatggcgtggcggagatcctgtacaaggtcgacggtactcgcatcggcctgaaggacatcaaggtccgtaaccgtcggcgcttccgttacggcaaggaaggtgatctgcgcctgctcacccagacccagatgaccgagggcgtgccggcgcacgcgccatatttctggaacttctgctccggtgccgaccacgacgatgagccgtacggcctcggcttggcgcactggctgtactggccggtgctgttcaagcgcaacgggctcaagttctggctgatcttccttgagaagttcggcatgcccaccgcggtgggcaagtacgacaccaacgcaaccgatccggagaaggccaagctgctgcaggccacccgcgcgatccagaccgacagcggcattatcatgcccaagggaatggagctggcgttgctggaggccggacgtagtggcacggccgactacaaggccctgcaggactacatggatgccaccatccagaaggtggtgctgggccagaccgccagtacccaaggcacgccaggcaagttgggcaacgaccagctgcagcgcgaggtgcgccgcgacatcatcacctccgatgccgacctggtgtgcgagtccttcaacaaggggccagcgcgctggctcaccgaatggaacttccctggcgcggccattcctcgggtctatcgcgtcacggaagagccggaggatctggacgctaccgccagccgtgacaagaagatccttgacctgggctacaagcccaagcaggtctacatggatcagacctacggcgacaactacgagcctgtccaggcgccgcaggatccgcctgcggtaccgacggcgatcgatggcgcccagttcgccgacgccggcggtgcggtggtcagcttgctgcgcaggcactatcccgccgcctttgccgacggcaccccgaagacgcccgatcccgctgtcgagctgggccaacagctcgatcgccggctgtcgcccattggtgctggatgggtcgagcagatccgccagctggtcgatgaggtcgactcgctggagcaattgcgcgaccggctgtttgagctgcacccgaacatgaccctggacgactacgcctcggtgatggccgatgcgatgacggccgcgacgctggccggtcgcaccgatgtccagggcacgggagactga

SEQ ID NO: 534736 - DNA, 1782 bp, Stenotrophomonas maltophilia
gtgcggcgacacggtcggcgccgtcgacggcggcttcccgcctggctcagttccgacatagaccgagttgggctggctgtagacgtcctcactgcagctgaaggtgatggcgccggacttcagggtgccgccacgcttctcgcccatcagacacaccatgtcggcgatgccccgcttgggcgcctgcaggcggaagtagctgcccggcgaccacgtgcgggccacgggcgtggtggtcaggtcgaacttgcgcagcgaggtggccttggcacgcagattgcgggcgccgatcttcagggccagatccacgttggcgacctcgccggagcgatcctccttctccgagaccacactgccaaaagcctggatcgcgcccagcgactgcagtgcgggggtggtgccgatcgcgttctcgactgggtcgaagtacttcacgaacagctggttgcaggcgttgtccatcgtggcgggctcttcggcccaatccaggatgtcgtcgtcggtcagcaccggaagctcgtccagaacgtacttcccgcgcggcacgttcaggcgataccgaccatccatgccctgcacgagcacggcccctgcagcatcacagatccgttgctggtactgctcgatggactccttatctggatcatagatcgggcacaggcccattccctcttcgaagaagacatccgcggctgcgcggaagctggcatcgtcgatcaccgagatgggttcggcccccatgctttcgtgggtaatgctgtcgtacaggatgtgggcggcattcatcccaaccagcggcaccttggcatccaggctctccactcgcgccgtcagccactggctgggcgcatcctgcaggccatcgatcgtcagcgcctgcagcctgacggtcgcattgctggccacttcgacgttcaatggcgcgccgtcgaggatcaggcgcgaagactcaaaattgggggtgtagttcaggtggtacgtcgccggcggattgctgatctccaggcgatacacgttgtgattgggcaggatgcttcccgaacccgtgccgcccttgatgaagctgggcgagcctggcatcgggaagccaccgctgtagtacttggtctcgaccgagccactgatccgcaagccgacctggaagatcgttgcgccggtgccattgagggtgaagcggtcctcgctatccccaggcactgtgcagtacgtgccctgcatatcgacgcagggcaggctccaggacacggagcggaagccggaaacgacctcgctggcatccttgtcgagcaggatcttcaccttctccggataccagcacacgccatcctgccagccttccttgatccggcgcaggacgaagctgggcgacttcggatagggggtgaaggccgaccaccttccgcccttgaacaggacagtgaccagcccacgataggcgccgtgcgcagcaccgagattcggcggaagccagggattgagctgctggtcctcgcggccgaacatgatctcggcctcgccctcgatgccgccctgctcatcctcaccgccgaacaggttctcggcgtgaatccagatcgacccgttggacgtgaccacgccagcccatgccgttgcatcatccacgtcccactgcacgaactcatccaccggcccctgacacaggccgaaaagcagcttgagcttgtaccagtaaccaacggtcttcttacctccgccgcccatcgctggcctccattcgctgagcgtgcgcaaccaatgccagggccaggccatcacctgtag

SEQ ID NO: 534737 - DNA, 168 bp, Stenotrophomonas maltophilia
atggccacgctgaagtcggccgttcccagactggcctccagctcctgccgcaatccggtgccattgaaacgcaccgaggcaccgccggcgtatggtgactgcgtggggtccagcaccggcaggttggaggaaccgaccgccaccgtgcggccaccggcctcctggtag

SEQ ID NO: 534738 - DNA, 591 bp, Stenotrophomonas maltophilia
gtgagctttgagatcaatctggagaccgggtctggcgatgagagctggatctatgttggcggcaacatcaacaacgtccgcgagtgtaaagtcgggaagacgaccaggaatctaatcgatcgccataggtcgccgcagaacactagcttcttcatctacgccgcattccaaatagttcgcggaagcgtgcatgaaatcgaggcgaacttactcgatcacatcaagcacttccttggctatgagcctctgaagcactttagtactagtggcaccagtgagtgtttcgctgagaatccggatgttatgactggcatagtcgaggatttcatcgagtgcaaatatccctcatctgtccaatatgagaacgagctgcatggctgcatgagccgctatcagtgtgatagtgatatctcgtactacattcagaacttccatccgacactcaatccgatccctcagccgggatctcgaaatttgaccagggctgactatcggacaggtaatcaggaagtgtacgagtcagacttggggggaggcatatacgttgatcatgtatccggcatgcagttcagtcgtgatgataatgattaa

SEQ ID NO: 534739 - DNA, 468 bp, Stenotrophomonas maltophilia
atggcggcgctgtggacaatgcagggcgagaaggcgggcgctttcctcttcaccatcaccgacggcatggaggcggtctcctatgacgtcttccgaggcagcctcgaccgcgtggtaagcgtaatggacgccgccggcgagctggaaggtccccggttcacgcccggcgaccttcggcgcacagtcgagacgcgcctagctgcggctggatactccgaagaggttcgtggccatgtgcagtctcacggtctcagtgacgcacagaagcggcattacaacaaatatgaatacgacacggagaagcgcggcgcgatcagaaccctttacgacctgctcgctggagatggcgcagatattgtgaaactgcgtcaactgaccgcaggccaaatcggcccgttaatcattatcatcacgactgaactgcatgccggatacatgatcaacgtatatgcctccccccaagtctga

SEQ ID NO: 534740 - DNA, 573 bp, Stenotrophomonas maltophilia
atgccgccggcgtcctgcaagctcgcatcaggtgctgtcgggttctactaccgctacaccggccccaatcgagagcaggaccgcctcagcctcggtagcaccctgagcctggcggaggctcgcgcgcaggcgggtggcctggctcgccgctaccaagccggcgagcgcgatttgcgtgccgcccttctcgcagatgaggccgccgcgacgcgcgaggtggcgctggccaaggccacagcttcggcccgcagtgcagcgacgctcggtgcgctgatgaacgcatacgtgtcgagtcttaaggaaacgggcaagatcagcgccggcaatgtcgagaaagcggtggccctgcacatcgagaaggcatggcctgcgctctgggatcggcctgcagcggagatcgaactggacgacctgattccggttctggcgcggctggtgcgcatcaagaggctgcgggcggctgcgggcggcctatgctgcggcaatccgcgggaaacaggatgcggctgcaccagacgctctgcgtgcggcaaacctgtcccgcaaccccgcccaggacctcgccaccgttga

SEQ ID NO: 534741 - DNA, 246 bp, Stenotrophomonas maltophilia
gtggccatcgccgcagccgaactgccgatccgcctcctcgatgcggtggctatcctgctggacgtcgccgcaggtcgtttgcgctatgtcctggcggtggggcgtcctgccttcatggtggtcgacgtggccatctcgaacacaggcgtgagtacggtgcagtcccagttgcaaatgctgatgcccgccgagctccaacgcggaattgctgatggcgcgctgcaactgctgcagggagagctctga

SEQ ID NO: 534742 - DNA, 342 bp, Stenotrophomonas maltophilia
atgtcccagaacatcgctctgctcacgctgtccgtgctggccacggcagccctcacccacaaccgcttcgtctcgccgaccggtggagtcgccgctgccggcggcaatgcctgcggggtaacgcgctcggatgccgccatcgggcagttggcgccggtcgacgccctgggcaccacgcaagtgactgcgggtggcgcaatcgttgccggcgccgccatccaggtgggtgctgatggcaaggccatcaccgccgacacaggcaaggtcgttgcccgtgcggcgcctggcgccacggccaccgccgatggcgacgtcctcgaagtgatcctcatcccgaactga

SEQ ID NO: 534743 - DNA, 465 bp, Stenotrophomonas maltophilia
atgacgcgcgttcgcaaggccggcgacggccgtaaccgggtgctggccgcgatccacgccggcgccaagaagctcggtctctccgaggacgtctaccgtgacctggttgagcgcgtctccaaggagcacggggccgcccagcgaagcgccggcaaatgcgatcgcctgcagctcgatgcgatcgccaacgagctgcgtcgcctgggtggaattcccgccaaggcggcgtacgcagccaaacgttgggcaggccgccccaagggcgacctgtcccctcagctgtccaagatcgaagccctgctggctgattcggggcgtgagtgggaatatgcccattcggtggcccgccacatgttcaaggtaggacgcctggaatggtgcaacccggatcagttgtccaaagtgattgccgctcttcagatcgatgccaatcgccgcgcccggcgggaggccccttcggcatga

SEQ ID NO: 534744 - DNA, 363 bp, Stenotrophomonas maltophilia
gtggcgttcgccgaaggccttgtgaaggaaggcaagttgctgccccgtcagcagccggcggtggtggagcttctgttggcccagccgaatggcaaggaaccgctgaacttcgccgagggcgagacgacggtgtccaagccggctgagtcggtcctgcgcgagctgctgaccagcctgcccaaggcagtggacttcagcgagaagtccggcggcgacgcgcccagcgcggctgtcaacttcgccaccccgccgggcacgcatgtcgatgcgggccgcgcggatctcttcaacaaggccaagtcctaccagcagcagcatcccggcacgtcctgggcggctgcagtcgccgcagtcggcggctga

SEQ ID NO: 534745 - DNA, 189 bp, Stenotrophomonas maltophilia
atgcccaccgccgtgttcaggccggaaagggtcggataccacacccggaagctggagaacgcgcctgcaggcgtgaaccgcaactttcccgtgctgccgccggccgccttcaggtggcgcccgccgaaaatctgggagacggtggagtccggtgcccagcccgtgcccaaggtgatgcgcgggtcgtag

SEQ ID NO: 534746 - DNA, 252 bp, Stenotrophomonas maltophilia
atggcggactaccaggcagccgcactgacgtcgttcgcgttcaacgttggccctggtggtgctggcgtcaaggacggcctgtgcaccctgcgcaacggccagcagccacgcatccgcatctacgccaaccaaggccgatgggatcttgcatgcgcccagctgagcaactgggccaacgccggtggccggccatacaaggggcttgaacgccgccgcacggccgagcgcgcgatgtgcgagggccggtactga

SEQ ID NO: 534747 - DNA, 627 bp, Stenotrophomonas maltophilia
atgaccagtggtgggcgtgaattgctcaagtggctggcgctggtgttgatgaccggggaccacgttgtgacggtgctggatcttggctatgtgcccgtggtgtcggagcttggtcgtgtcgcgttcccggtcttcgcgttggtgatggcgttcaatctggctcagccaggagcgaacacttcgaagtccgtacagcgtttggcaacttggggcatcgccgcaacgcccgttgctgtcctggcattcggccagttgctaccgctgaatgtgctgctgacgttcgctgcggccgctgcttgtgtgtgggccattgagcgccggtactggattctggtcgcgttccttgcggtcatcgcccctgcatggctggactatgcgtggccgggcgtgtggctcgttctcgctggatggcgctggtatagagggcagggtggtcaaccgtggttggtgtggggctgcatgggcctgttgtgcgcctacaacggtaacgggtgggcgttgctcgccattccagcgctgcggctggcccacttcaacgttgctgtgccgcgctccggcaagatcttctatggctactacatcggccatcttgtggcgttgctgctgatcgcagccattcttgtctag

SEQ ID NO: 534748 - DNA, 1191 bp, Stenotrophomonas maltophilia
atgatctactggtacacgggccagcctggacacggaaagacgctgcacggcattgagcggcttcttgaattcaaggatcaggggcggattgtgtacgcctgcaatatccgtgagttcgactacgctaaaacaggcgtactggaaatgacgccggaacagttcaaggactggccgaacttcttgcccgatggtgctgttgcgctcgttgatgaggcgtacgaacacggcatgctgcccaagcgtccgacaggctctaaggtcccgcatcacgttgaacagctggccaagcaccgccacaagggtctggatttcatcttcatcagccagtcgccggataagcagtgcgatcagttcgtgcatgatctgattgagcgccacgtgcatgtgcgccgccgtttcggcacgaagtttgtcgatcttcgcgagttcgacaagtttgaagctagggcagagaaagcaacgccgctggtcacgaagcgtcgcacactgcccaagcgccctatgggcatgtacaagtccactgagctagacaccaccgagcggcgcatcccctggtacgtcatcgcgttgccggttctggccgtcgccgccgtccttatgatgtatttcgcgttcgggcgcatggacaagcgaatgaacggcggagacaacccctcagtcggcgttgctgctcaagcggctacaccgcacgacggagcattggcgacggcgggcggtgcggccgcgccgagcccggcacagccactcaaggaatatgtcgacaagttcctcccgcgcgtcccatcgcaaccgtggagcgcacctgtctatgacggcgcgcttagtcttccggcggaaccgccgcgcatcttctgcatgtcgtcgctcggcggggagaacggtcttggcgaacaggacgatcccagctgtacatgtgtgacggagcaggggacgcggtatgagctggcggatgagccgacttgtcgaatggttgcgcgaagtggtcagtacgaaccctacttgcccaagcgcgaagatcggctcgttgatgggcaaacgcagataaatcgcggtatgcaggaaatcaatgaacgccaagttgacggcacgaccattgctcgcagtcagcgagctatggggagttttccggagtctccgcccataagcacaagcagttacatgacgacaccgccgggggagaatcggctatga

SEQ ID NO: 534749 - DNA, 1380 bp, Stenotrophomonas maltophilia
atgaggcgtgccttactactgttcttcacggcaataccctgcgctggcggcgttgcagttccggagcgggctgaggcgcgcgatgttgtgaaatgcaattcgcagcgcagtccgccgtgcacaatccctgaggcgatggccgagtgcggggggtacaacccgttgccgtatggcaactatgtcgcgatcaatagtcggcggtgtgtgctggagaagaggggtagtgataacggctgggtgattcttgaggcagatttcaagctgcacaacggatcatctagtggctgggtaaataatcagaccttcgattggcggcaaagctgcgaagccaatcagggcaaggtgacgccattcttcccgccttcgggctcagttcgttgcattgacggctgtgaggtcacttaccgcgataacggcgatgacaccacgacctacagcaacaatggtcgctactgtgcaaagaagcccgactgtgctgctcagggcaagaacatggtgtggaacgccatgctcggcgtttgccaacctgtgcagcccgaatgtcctcaaggcaaggtaaaagttggcaatgcctgtgctgaagagaagtcatgtcctgatggcatggcgttggtagcaggctcatgcaagaaggaagacaacgagtgccctgcgggcatgattcgtagcccgcttggcagctgcattccgggtgatggccagtgcgcccagggtgaggtgcgagggccggacgggacctgcaaaagagacaagaacaacgacgggcagcctgacacggatgatcccgagagcttctctggtggtgatacatgcgaatcgcccccgtcatgtagtgggtcgccaatcatgtgcggacaagctcgcattcaatggcgcatcgagtgcaacacgcgccgtaacaacaacatcagtggtggtcagtgtacgcaagccggtatgccgacgtgcactggtgagaaatgcaatgcaatggagtacacccagcttctgatgcaatggcgatctgcatgtgccgtggagaagcttgctgctaagcaagacacgccaggccaaggcggtactcaaggtgatgccaatggcaatggcgtagccgatgtgctggagggcaggggaggcgttaccccaatcggtgatggcgtagccgacgttgctagcgcaaagaagtggggcattccactttcaaccgacaagctcgacaccagcaacatgtttggcggtggcgggtcgtgtccgcagccaccttcaatcacgatcatgggcaagacggtgagtgcaggtgacgtcccatacttctgccgaattgcagcgattctgcgcgggctgatcctcatctttggtgcgtacacggcaattcggattcttatgggagcggtcttctaa

SEQ ID NO: 534750 - DNA, 243 bp, Stenotrophomonas maltophilia
atgaagttcatgaacgctgctcgccgtttcggcgcctctaccgtcgccaagattggcgccggcactaccgctctggtcgcgtcgggtgccgccctggcctctggcggtgcgagttccccaggtgcggccattgcaggcgaaatggccggtggcaaggccgatatcggcgtggtcatcggtgcgtgcgctgtgctgatcggcctgattctggtgtgggcttacacccgcaaggctgcgaagtaa

SEQ ID NO: 534751 - DNA, 162 bp, Stenotrophomonas maltophilia
atgatcccggccccgccaaccttcatcactgcgccggtcgtccatatgtcaggcgatccgctcgacctgttcctgcgcatcaacgtgatcgcattcggcgtgttcgttgtctgcgcctgcctcgtcatctggattgccgacgaccgcgagggcacgcgatga

SEQ ID NO: 534752 - DNA, 999 bp, Stenotrophomonas maltophilia
atgacagaacccctcctggcgttcgccctgctcggcgcgattgcagctacttccatcggtgccgctcgtatcgtgccgtggctgctggaccggcgtgatcgtgccgccgtccagcgcgtcaaggaagcggtcatcgtcgcccaagcacgcgccaaactgactgcgtccggttggagcgctgaagacgaagccgcgttccaagccatccgcgcccggttgccatttggtgcgagccgagtgtcagctgtagacggcatctatggattttgcttgggcaacaagctcctgtctgcgctcgtcttcgtactcgatcaaaagagcgcacagctcattgaggccgacgatctcatcaatcagatcggtcgcaactccatctcttggaagatgttccggggtttcgtcctcatgcatattcgtgcatgccgaaatcttcctaacaatatcccttattcgcatgcgcaatgcggtaagcatgtcgattccggcggcatcgcgagcgatagagtaaatgccttcccagtcctgcgcatcaatgtagatggcggccgcatcacaagcgccgaggaattcagcgccttctatcggaaggctatcgtcaaagatgtcttcgccgaactgcgagagggcgtgttgaaggcagtcaatagtgtgattgagcctattgagcgcggcaaacttctcgtccaattgtgccgcgttctgcgctctcacctcatttctacggagcgcgtgagcttccttcgcgtacttccaggcgccatacccaatcacccacgtgccaatggcggctgcaattgctcctaccgcagcaactacatccgccgcatttcccccagtactaaaaactccgaacaggagacctccagacagcgcgccgatcgaaaagaaaagggttccagcagcccatatctcgactgtggaaatcgtgtgcatatctcccttcaatttcttcactttggcccccctggcgccgatctgaatggggggattttcgcatga

SEQ ID NO: 534753 - DNA, 747 bp, Stenotrophomonas maltophilia
atgaaacagagtccatcgttcttggatcggcttagagccgcctgtggccggatctctcttgggcgagtgatccccgtcgccgtagtgctgctgctgctcgctgtagccataattgggcttctctgccccttcgggctgtctgtatttgacgagcccggctctgctgctgactgggtcgcagccattggcacttgggccattggctatggagcgataagcctttcgataggggatcgcgacctgaagctcagagagcgacaggaacgaagagttatggatctggaaagggatctggaagagatcgagaaggttgcgcgaactgccaggagcgcctactccgagttcaacgatgcccgcgaaagcctggcacaggagatttcggatgcgagcgcggtaaccatcaagcgtaatgaaggcttcggtaaatctgcaggcctggctcacgtccgtcgcactgcctactatcttgcctggacacccactcaactgcgcctgctttcgcctgcagcggccgcacatgcagaagacgtcaaccgaaaggcggaacgcatcatctctaggtccgaccaagttcccgggaagggccacgtggacaggcaagtggacgccgcaaacgaacttcaacgagcggtccgcgaattgcagccggtgctttccgcgctccaagctgcggctgaagccgactccagtgctatcagaatcaccattgaccgaattcaacttcgccttaatcaggggattgactag

SEQ ID NO: 534754 - DNA, 636 bp, Stenotrophomonas maltophilia
atggcggcactgcagaccgaaatggacgaggggcgggaggtccgcgtgcttgaacgcatccccggttgcaaacagctcaagggaatcggaatgaccgacgcgcacatctatgccgtggccctgcggcggaagttcgactacatcaatacctacttccacacccagccgatgctggacatccggcacccggcagagcaatacctggggaaacatgacttcgttgtcagctccgatgtcctggaacacgtggacggaccgtgcgaacgcacgctcgggaacctgcgggcgctgctgaagccgggcggacttcttgcactcaccgttccctatggatatcacgacgtcacgatcgagcactttcccgaactcaacgactaccggatcgagggcacgggcccggaccggatccttgtcaacatcaccaaggatggcagggagcagcgattctctgacctgtccttccacggcggtgacggctccacgctggaactgaggatcttttcatacccgcacttggtgcgattgctggaggaagcaggcttcgtcgatgtcaagctgcacgacagccagtacccacaatggggcatcatccacaacagcccgttgggcctgcccataacggcgcgcgcggcgtag

SEQ ID NO: 534755 - DNA, 147 bp, Stenotrophomonas maltophilia; identical to SEQ ID NO: 515800

SEQ ID NO: 534756 - DNA, 219 bp, Stenotrophomonas maltophilia
atgactgcatcccgccccctttcagcacgcacccgcccgcccgcctgcatcagagggcacttctacgccatggcgtctccggaaaagaaaaagccccggttggaccgaggctttcgtctggatggtggcaagactgcgggcatcgtaaaggccctgcaaatccccacgatgttttcttacgggataatgcaaccgttcgcacgcatgcattgcgtatag

SEQ ID NO: 534757 - DNA, 180 bp, Stenotrophomonas maltophilia
atgctcaacctcacccttgccgaccttgatcgcctgggccgcagcagcggcttccgctatcgcctgccggcgtcggccgccgatctgtcgggtgaacagtgcgtggtgcaaggcagggtggagcagcgtcgcctgcgcccgggcatgaccctggcgctgtcggacgtgatcgcccattag

SEQ ID NO: 534758 - DNA, 426 bp, Stenotrophomonas maltophilia
atgcgcctgatgacctccatctgcccagtttgtggcactagcgggcagcgctttccgctgcgatttgctcgaaagcgtcaagcgaagatgtcctgccgagggtgtcgcgtcgagcttcgttcagatccgcggttgggcacgtactcgctctatcttctgtacacacaggtcatcatcctggtgtcggcattgccgctgatcggggccagtgtcgcgggtgaatgggcgcggctgggaatgatctgtgtggtggtgctggtgctggtgctgtgctggctgcccggcgcgatcaggcacgcgcgaagccagatcgtccgtgccacgctggatcccaatcgcagctatgcgcgcaggccgggtgtttcgagtaagaacgtggctgcagcgcctgcacagggcagtgataccccgagtgccagtccatga

SEQ ID NO: 534759 - DNA, 561 bp, Stenotrophomonas maltophilia
atgcgtcgatacccttctgctgcactgctgatgctcgtgtgtggcatcggcttggtggggtgcacgcctgcgccgcaggcgatgcccgccgacgccgcgcctgcgccgcaggcgatgcccgccgacgccgcgcctgccacgacgccggctccccccgcggcgccagcaaccaccgccgcaacggtcgagtccgcgccggtccctgcccgcagtgaatgcgcctacccggaattcgatacgttcctgaagcatttcggcaacgagatcacgctgcaggaaaaggccactgccgatccactgctggacagctacatcgatgcggaggccgagccggaaccgcgcaaggtggaaagccggttggcgctggccgatgtcgagtggccggtaatgcccgatcctgctgcgttggccgggcagggccgtgaaatgcaggtcagccccctggccgatgggcagcggcaggtgcagatccgtacgccggacagcagcgaccagcagacctataccttcgcgcagacgccttgctggacgctggtcaagcgtgaagacgagtcgatctga

SEQ ID NO: 534760 - DNA, 975 bp, Stenotrophomonas maltophilia
atggacgatgttcagtgggaggcattcatagagcgctgcgcgcgccaacttgagaaagagggcgagtattctcaagtcatcaggcttggaggcgctaacgacaaaggccgagatgtttgtggctacagaagcttcccgccatctgaggactcttgggatctttaccaggcgaagtattacggtagcacgctgacgcccagtgagatcatcggcgaagtggccaagtttctatcgcatgtgctcgacggtgcctacagccgcccgcgtcgatattacttatgcgcgctcaaggtcggggctaccctgcaggactacctgctaaatccggatggaatgagagagtgggtgatgggcgaatgggaacgcaaaaacggggacttcggcccgtttaagcgaccatgggacgttgccatacagacgttcctcatggagtttccattcgaaattttttccagacgaactccggatgagctgctggagatccacgcacgcaatgtctccgagcattgggagcatttcggagtgttgcatacgcgtgagccaaaccctgaaacacctgctacacctgatccaatggaggagcggtatctccaagcactactgggtgtgtaccgagagcggacaggtctaaccatcgcctccatcgaaagcattcccaaagcctatctcaggcattttgcggcgcaacgccgcctgttctatagcgccgagggacttaatcgattcagtcgcgacaagcttcctggggcatttgatgcgctattgggggatgtggaggtcggtgtcgctggagtggcgtatgctccacatgacggctcctgggcacgtctgactcaaacattgctcactgccaattcgctacaaatcaataataatcccctgcactatcgattgcaggcaggcgacctgcaaggaagttgccaccatctggtgaatctgggacgtctggactgggcagataccgatgaagaatag

SEQ ID NO: 534761 - DNA, 423 bp, Stenotrophomonas maltophilia
atggtttacctgctctatgcacttcatccccgtaagcccgacctccagacactgctgtatctggactatgccgtcatctacagcgccgacgtcggcggacctgagagcttgcacactccggttcctctgcgtggcgttgagtatgcaagcaggagagagactatagaggccggcttgctgttgatggcaggtagggcgttcgtagacgctaaggccaccagcgaaggcattcgctatggcatcggcgagagcggcccggcactgatcgacctgctgggtggaccgtacaaccgcgccctgcgccagcgctgtgcttgggtcgctcgtgagcttgggagccgaagcgacgctgagttggaggcgcttcttggtgcccgcggctcgctctggagcgcgcacttcatttccacggacggcagatga

SEQ ID NO: 534762 - DNA, 1806 bp, Stenotrophomonas maltophilia
atgaaaaggctttctctacacagattgatactcactgggcccaccaagccgaacgcggagctgaacctgagtggtgcctcacatttggtgtttggtccgacggatacgggtaaatcctacatcgcgtcatgtattgcgtactgcctcggtagcgatgaaaggcccctcaacgtcggcctatccgaaggttacacgcgagcagcgctgcaggtagaagtggcgccgggctctcggttcacgctatttcgggacctcatcactggaaacgaagcagtgcatgccgggtttcatgatctgcccccagcagcggcgtctccagttgccgacgccatcggcccgctcgttgttcaatggagcgcagccacgggtaagcgaatccttaccaagagtggattgctcggtaacgtagccgccagcgatatgcggcggttgagtgtatttgacgaaatacggaccctggacagggtgcctctggaagggaaggacaatcttttcaagatgcgcaatcgcgcaaccgtttcgctcgttctgacaggcgcggacgactctggtgccgatcttgcggtcaagactgatgccagaaacatcgcaaaaggtcacttgcaagcgctcgaagacgaactaaaagtattgcgggccagcattccaagtggcttgagtcgagctgattgcgaagagggattggatcgcgtcactagtgagattgagggcgttgacgcgttcatgcgcaccaatgcagaagaattggcaaagcttaaagagcagcatcaggtgatcgattcgcaactaaacgttgcgatgacggagctggcgcgcgggcgcgagactcaggatagatttaagttgcttgacgagaagtacgagaacgatggtcatcgcctgacctccctcatcaacgcgatgggagtcgcggcaaccttcgaggcgcgcccctgcccgctgtgcaattcggatatcacgcatcaatttagccacgactttggggaagataccggcctgatggtgcgcgcagctaatgcggagctctcgaaaatcacttcacttagagacggtctcatgttcgcgcttcgggacgtcggcgacgacatagaactgttggaggaaagcgttgatgtcttagctgaggatgcatcaaccaatcttcgcaatcagacgaacttgcttggcttggcaccacgaggcggtgatcgcgatctcttgggtccgctcacggagcggcgggtcgaactcacggtggcgttgcgcagctatgagcgcattgagtcggtagagcaacgcctcagtgaagtgagagaaagggctaagcgcagaaagcaaacagtttctcgggacgtctctgcaagcgccagtgctctttgtcagagaatctcagaacttttgtctgaatggcatgttcctatggtccacgccgtgcacttcgacgaaggtcatgcggatattttcattaataatcgtcagagagtgtcctatggcaaaggcaagcgcgggatatttctaactgccatggttgtggcactgatggaacgtgcgctggagcttggccatccccatatcggaatagtcgcaatcgattccccggttgtcacttacaaagatcccaaacatgggagtcaagatcctgaggaagcgctggatccctcagtgaaagatcggctctacggctggctcgctgatcgcaaggagccaggccaagtcatcattctagaaaacgaggagccgccgcaagacattcgggtgcgcttgggtcataccgaatttgtcggctctggcaaggcgattggtcgacgcggatttttcccgctctag

SEQ ID NO: 534763 - DNA, 1212 bp, Stenotrophomonas maltophilia
atgtcacgctggactgagcaatacactgcccacccttttcacagcacctggcaatcggttactagtactgtggctggaatttcggtttccagcgatgcgcccctgtccgatgctgaggagcttgcccggctcgtgaaggttgtcgcccaactggactccacgttggcggcagtcgacccagaaatggggaacctggaagtgcttggaagcatgcatgcatccgcgcaaacgaccttgggcgaggtgcaggcattcctcagtaacagcaatgtaggccaccttcgcaatgccaatgggcaggtcgacgcgcttgccacccaagtccagcgatatgcgtctacgctgccttctactgattcgccggcggtcgtagctgcagcaacgtcgcttggaaagtacgtgtccgactggcaccgcaacgcttctgctcagctcgaagacctgagcaaggcggtaggacaggtcgacgcccgttcggcggagtccaacctcggcatagataagctcatcgagcgcatgaccgcactcgaaagccaactgcaaagccagatgtcgaccttcacgcaaaccttcacccaagccgaagcgtcacgtgcagaacgctacgataaatggcaggagacacagcataccaaggccgatgatgccttctcagaatttgcaaagaagtatgctgcgggactagttgtcctggccgactatgaggggcaggcaggcaaggtgcttggatcagtgatcaatacgtcacaggcaggcgcatacgccacctacgcaaatgaagagaaggttagcgccaacacttaccggcggcttgccatcagcctgatggttgtagcagctatggtgctgttcttgcctgagctctggcatgttggccaagttgtcagcggttacaccgttgactggcagaaggcgctatatcgtctgcccttctctcttgtcttgtttgcgccagcagtttatctggccaaggaatctagtaggcaccgtaacaacgaggtactcaaccgtcgtcggcagcatatcctgacaaccatcgagccgtatcttgctctgcttgacccgaggaaggctgaggaggtgaaggctgaggtggctaggagtctgttctccgacgccatgggcgcgccgggggagaaggaggaagatgccagcaacatgctcgcacaactttcgaacctcgtagctactgttctaaagcaaaagcgatga

SEQ ID NO: 534764 - DNA, 1278 bp, Stenotrophomonas maltophilia
atgaggcagagaccaatcctcgggtggtgtgcaacgtccttaagcgcgctgctggcggtcagcagcactgcgtctgcacagcagcccaggcggccagagcgcggattcctggatggcggcacggtcgatctgaccgggctgaactactactacaaccgtgactttcgcagtggtgatgggcctggacagcgcaccgagtgggctcagggcctgctcgcacaggtaaggagtggctggacgcctggggcggttggtctgggcatcgatgtgttggctctggcggacgcgaagctggacggcacctctgacgaagtcggcatcggtctattgcagaccaagcgtgacggcgtgcgcagcgcctatgggcgtattggcctcaccgggcggatgcgggttggcgacactgttgtgcgtgcgggcaccctcatccccaaagagccagtgctgatggcaagcaccagccgaatcatgccgcagacattcaggggtgtttcgctccagtcgagcgacctggagatcgtaaatgtgtcgttggcgcgataccggagcacctggtatcgcgatggggttggaaatcagcccctgacactcttcaacaagaatggtcgattccgagccgcgcctgtggctgaccattttgacctcgccacgatctctcatgtctggggcagcaccaaggcgaccctgcaatcggggcagctgcaagacatttaccggcaggacatggtcggactggaccgcgagcactcagccgtcagtggcgtcctgaagactcaggttcggtggttcaggacgcaggatgcgggagaaagcctggctggacctattgagaaccggatgctcaacgcgatggtggcctgggaacggggcgcgcatggatatgcagtgggcttgcagcgcctcagcggtccatctgccatgccctgggtgaacggcaccgatggaggcgtcttcaactggaccttcatcaacgacttcatggaagccagagaatcgagttggcaggctagatacacgttggatggaaaccaagctggggtgccaggactgacgttcatggcccgctatgtgcgcgggcacggtgcgaggccggcaagtcagatcggggaaggcagggaatggcagcgggatgtccaagtggaataccgcttccagcagccagccctacggcatttcagcatcagctggctgaacggaaccttccgttcgaactaccaacgcgacgcggaggagaatcgccttatcctgcgatacgagcagcgctttgaggtggaatga

SEQ ID NO: 534765 - DNA, 636 bp, Stenotrophomonas maltophilia
atgaagctctacatctatgatcattgcccattctgttgccgcgctcgcatggccgcaggcctcaagggcattccagttgatcttgagatcatcatggaaggggacacggagaccccgattcgtctgatgggaaagaagggcgtaccgatccttcagaaagacgatggcacccacatggcagagagcatggacatcgtcgactatctcgatgccctcaagcctcctattcagctcgatgggccagaagatccgtggcttgaggactggtgcaagcgggcctggaagccggcgctcaaactcttcatccctcgtttcacccacgcggactttccggagctttccacgccggaagcccgggctgcttacctggcacgggagacgaaggcgctcggggacatcgacgcgctgctgagcaacacggcggtccacctcgcagagatcgggccgctgctggaagagctggagaaacgcattgcattctccagggatgtatcaaggagcgatttcaaactattcccgatgctgaggtcgctctccatcgtcaagggtattcctttcggccccgccacgaccgactatgtccggaacatggcgtcgacgaccggcgtgccggacttcttcgaccaagctcgctga

SEQ ID NO: 534766 - DNA, 753 bp, Stenotrophomonas maltophilia
atggacctcggcctttccggtcgtcgtgtgctcgtcagtggtgggtcgcgcggtattggcaaagccatcgtcgagtgcttcctgcaggagggggccagcgtggccttctgcgcgcggggccctgagggagtgaaagctgctcagaattcattcggaccgggcgcgtttgggcaggcggtcgatgtcaccgagccatctcagatcaaggcatggatagacagtgctgctgagtccatgggcgggatcgacatcatcgtccccaacgtgagtgcattggccggcggaagcgatctggagacctggaacaaggcgttccagaccgacctgctgggaaccgtcagcatgttccaggccgcgctgccctatctgaagaaatcggatgctgcagccgtcgtcctgatgtccagcctttcaggacgtgaggtggacatcttcgctgagccgtatggcgtcctgaaggcggcgctgatccattacgggaaaaccctttccgcgcggcatgctaatgacggcattcgggtcaacaccgtttcgccgggcaacgtgtatttcgcggacggcgtatggggccagatcgagcgggagcagccggatctatttgcccaatgccttgccgcaaacccgatgggacgcatggccacgcctgaggaagtggcccgcgccacggtgttcctcgccagtgcagcctctggattcaccaccggcaccaacctggtcatcgacggcggcctgggtcgcggcgttcagttctga

SEQ ID NO: 534767 - DNA, 2067 bp, Stenotrophomonas maltophilia
atgatgaccatgactcgcaagaaagcgctggtgctgaccgccctggctgccgctgtgatgaccgccggctgcagccagggcgggctgaccggcgaggcgctgccaacccccggtgagcttcgcgacaccatcggcaaggactggccgttctacggcggcgacgagaatgcacagcgattcagtccgttgagccagatcacgccgcaaaacgtgggtaagctggagcgcgcgtttgtgttccacaccaaggacctgcctggcgaaggcgcacggtattcgccggaagcgacgccgctgaaaatcgatgatgcgctgctgatgtgttcggcgaagaacatcctcatctccatcaacgccgccaccggtgaagagaactggcgacacgacccaggcgtgccggaccatgccattccgcatgcggcggcctgccgtggcattgccgcctacaccgctccccagctgccggaagcggctgcgtgcaaaacacgcgtcatcgaggccaccttggatgcccgcttgatcgccgtggatgcgtccaccggcaagccctgtgccgacttcgggcagaacgggcaggttgacctgtggaagggaattggcgacaaggtccccggctggtatgccgtgacggctccgccgaccatcgtgcgaggcgttgtggtgaccggtgcgcaggtgcgcgatggccaggacaaggacgcgccgtcgggcgtcatccgcggatttgatgcgatctccggtgagatgaaatgggcctgggacttgggcaacccggccaacgtgcatgggccagccgaagggcagacctacacacggggcacgccgaacatgtggacggcgggcgtcggcgacgaaaagctggggttggtctatcttcccctggggtcggcggccatcgactactacggctccaagcgcagcccggaaatcaacaaatacgcgaactcactggtcgccgtcgatgtgaccacgggcaaggatgtttggcatttccaggccacccgccacgacctgtgggactacgacctgggcagccaggccagcttgctggaattcccggataaggcggggaaccaggtccccgcgatcctgttgccgaccaagcagggcgatgtctacgtgctggatcgtgccagcggcaagccgctgatcgacatcggttctgctccaggatccaagcttgggtcggtggagccggatttcgtcgcagacagtcagcctacgtcgctctggcatacgctgcgcaaagagcccaagcaagagaaggacatgtgggggttcacgctggtggaccagatgctgtgccgcatccagttccgcaaggccaactacgacggctacctgacccccccgtcggtggacaaaccctggatccagtatccgggctacaacggtggctcggactggggctcggtggccatcgacccagtgcggcgtctgctcatcgccaactacaacgacatccccaacatcaaccagctgatcccacgtgagaaggccaacgagatgggcctcaagccgatctacgcggtcaagacggacccgtccattcagaagtctggtgggagcaaatcgggcaagggtgagggcggggcctcgacctatccccaagtcaacgcgccgtatgccatcagcgtgaacgcaggatggcgcaactggggcacgggcgtgccgtgctcggcaccgccgtatggcggcatccgtgcggtcagcctggacaccggcaagacggtgtgggacgagcctttgggcaccgcacgccgcaacgggccgttcggcattccttcgcacctgccgttcaccatcggcttgccgaacaacggcggctctgtggcgacagcgggcggcttgatcttcatcggcgctgcaaccgacaacctgttccgcgccatcgacatcaagaccggcgaagtggtctggcaggacgtgctgccggcaggcggccaagccaacccgatctcctatgagatcaacggcgagcaatacgtgctgatcgctgcgacgggccatgccttcatggaaaccggcgtcagcgacgaaatcatcgcctacaagcttcgcaagtaa

SEQ ID NO: 534768 - DNA, 405 bp, Stenotrophomonas maltophilia
atgagtagtctcgcttccatcacaacaccccctaggcacaaaagagccagctcgacgctgtggcgaatcgccgttggtgcgctctcggtgttcattgtgctgttctcgctgccgctggcactgggaggtgcatacctgcttgcgttgggcggtagcccgttctacgtgctgatcggtctggcgttgctggtcgcggcggtgctgctttggaagcgtcgccgcaccgccctgcacgtggtcaccggaaccttgctggtgacgattgcctggtcgttgtgggaggttgggctggatgggtggtcgcttgtcccgcgcttggtatgcatcgccgtgctctggatcctcaccgcgctgacgtggcccgccttgagcgcgccgagcgccgccccgactgcaaagacctga

SEQ ID NO: 534769 - DNA, 1299 bp, Stenotrophomonas maltophilia
atgagcacctctcccgccggtaaaaagcggatctggatctacgttttcctgttcacgctgacactgatcaactacgtggaccgcgtatcgctgtccattgccgccaaggcgctggaagccgagttcaacatctcgccggttgccatggggtatctgttctcctcgttcatctggctttacttctttgccctgattcccatgggctacctcgtcggtcgctttgggcccagaacggtcaacacctggggcatcggggtgtggtcattggcgacggccaccacctcgttggcaaccggctttgcgtcgctgctgacgttccggctcgtcatggggatgggggaggccacgacctatcccgccggcgcgcgcgtgatccgtgactggatgcctgcccgcgaacgcggcatggcgaccgcgatcttccacagcggaagccttgtcggccccgccgtaggggcgatcggctttggctggctgatcagcacgtttggctggcggcctgcgttcgtcgtcgcaggtctgattggctttgtttggttggcggcctggctgaagtggtatcgccatcctgcccaggccacgtggctgggcgaggcggaaagacgggagatccttgaagcggacggcgaaccgagtgtcatcaaggcgaaagtgcccgcgctcggccttcgtggtctggcgcggtctcgcaccgtgtgggctatctcgctgacgcacggctgtgcggtgtatgcgacctacttcttcctgacctggctgccgggctatctccaggcagagaaggggatggacgtgctggacagcggcatttatacggctgttccttatctcggagccgcaatcctggcgatcgtcatcggtcgcctgagtgatcgcgtgctgagccctgctgcgctcgcctccggtgggcgtcgcttggtcatcggcgcggtcctgctggcatctgcattgatcctggtcgtgccgatgctggaatccacctgggccgtcttggcagtgatcaccttgtcgctcgcgacctgcgcgtcagccgtgtccttggacctgtccctgctcaacgacctgctcaagtccgaagacgatatcggcactgcggctggcttcgtcactgcgggcggcaacctctttggcctgctcgctcccatcgtgaccggctatctcgtcgcgggaaccggcggttttgccgcagcgttcatcaccgtgggtgtgctgctggtcatcggtgccgcgctcgccatgttcggcacccgcgctcccatcggccggactgctcagtccgggcgtgcagctgcgcgctga

SEQ ID NO: 534770 - DNA, 1002 bp, Stenotrophomonas maltophilia
atgagcgccgctatccccgccaagcctcggctgaccacctccgcgatgattgcctcgatcgccagcgaagggcagcgaaccaccgccgcaccgtttggccatgccctggtcaaggcggctgaggaaaactcgcgcatcgtcggcatgaccgccgatctggctaaatacaccgacctccacatcttcgctaaagccttcccggaccgcttcttgcagatgggcatggccgagcagttgctgatggccgcggccggaggcacggccaaagaaggctttgttcctttcgctaccacctacgcggtgtttgccacccgccgcgcgtatgacttcattcaccaggtcatcgccgaagagaacctcaacgtcaagatctgtgccgggcttccgggcctgaccacgggttacgggcctagccatcaggccgcggaagacctggcgctgatgcgggcgattccgaatatgaccgtggtcgacccctgcgatgccgtggagaccgagcaagccgtgtcggcgattgcgcgccaccaagggccggtctacatgcgcctgtcccggggcaaggttccgctgatcctcgacgaatacaactacacctttgagctgggcaaagccaagctgctgcgggatggcaaggatgtgctgatcatctcgtcgggcctgatgaccatgcgtgcgcttgaggtggccgaaaagctgtccggtggcacggcggatgtcgcggttctgcacgtgcccacgatcaagccgctggacgtggaaaagatcgtcgagcaatgccggcgcgaaggtcgcttggtggtggtcgctgagaatcacactcagatcggcggtctgggtgaggcgattgccatggcgttgctgcaggccagggttctccccgagcttcggcacgttgcgctgccggaccagttcctcgacgccggtgctctgccgaccctacatgatcgctacggcatctcgaccgacgttctggccgaccgtatcaaggcgtggctgggctga

SEQ ID NO: 534771 - DNA, 870 bp, Stenotrophomonas maltophilia
atggcaacgcaactgaaagagggcgcgccagacgcgcttcaagatctgagccgcagcgcttggaatatccgccgctatgccttgcgcatgggcgaagtccagggacaaggctacgtgggacaggcgctgggctgggcggatgtccttgccacggcctactgccacgccatggcgattcgccccgaggatccggaatgggaagggcgtgatcgcttcctgctgtcccacgggcactacgccatcgccctctacgcggcactgttggaggccaaagttcttccggaagaagagttggaaacctacggctctgacgacagtcggctgcccatgtccgggatggccacctacacacccggcatggaaatctccggcggctcgctgggccaaggcctggccatcggggtgggtcaggccttgggcctacgaatgaagggcagcgattccttcgtctacgtctccatgtccgatggcgaactcaacgaaggtgcagtgtgggaagcggcgatgtcggcggcacaccacggacttggaaacctgatcaacctggtcgatctgaaccgccagcaggccgacggtgcctgcgaggacatcctgcggttcgaaccgctggaagaaaaatggaaggcgtttggctggcacgcccagcgtgtggacggcaatgatctcggcgccgtggtggcggcattcgacgccgcccgggcggtcacggaggctgtgccgcgcgtcatcctgttcgacacattgatgggcaagggcgttccattcctggaaacccgtgagaagaaccatttcatccgcgtggaggccgacgagtggcaggttgcccttgctgagctcgacgcaggctatacccaaggagcccaggcatga

SEQ ID NO: 534772 - DNA, 867 bp, Stenotrophomonas maltophilia
ttgcaggcgctacagatcttcgaggcggccggtcgaaccgggtcgttcgcgcgtgcggcgtcggagctgaatctcagcccgagcgcggtcagccacgccatcaaaaagctggaagcccagctgcaggtgcccttgtttgctcgtcgcacaagagaggtggtcctaagtgctcaaggggaacggctcttggtccatgtgcaacggggcttggtcgagcttcgacaaggcattgccctggtgtccgacagccctccggccccgctgcggcttcacaccgccccgagctttgccacgcagtggctgatcccgcgactggccgggtttgtcagcacccaccccggcattgaccttcgcttctctgccagcaccgattacgcacagttcgacaacgatgactacgatctggacatcgtttacggagaggagtcgctgcacattgagcaccgcctacccctcctgattgaagaggtcaccccgctgtgcagccccgaagtggcgaaggaaatctcgtccatggccgatctctatcggcttcccctgatccagagcacgggcaagtcggtccgctggcctcactggtttgaattgaacggtgccaggaccccgaggctaagcgggctgggcttcgaccgaagctccatggcgatcgtcgcggcaacggatgggctgggggtggtgctcgaatcgaacctgttgaccgaacgagagcgccgggagggccggctcgtcgctccgctggcggaccagaccctctccattcgctatgtgggccattatctggtgcagccccgcaaggccgatcaacccgctgctatggaccagttcaaactttggctccttaaggaactgagtgcagccccacagtag

SEQ ID NO: 534773 - DNA, 4650 bp, Stenotrophomonas maltophilia
atggcagtagcgcttacctcagaccttgaccagctcaaggccctggtgcaggccatcgatccgccgacacgattggagcacctgactgccgcgctgattggcgagctggtcggggtctcggtcgcggtggccaaatcgggcttccagtacggggcggacgccggcaccaccggacgacaagagcggttcttacgcatcgaatgcaagcgctaccgggacgacacctcgctcaatgaccggcttctgctgggcgagatcgatcaggcgatcgtggcggacccggcactggaggcgtggatcctggccgccacgcgcgaggccgatgagcagctcgagcggcagctgttcaagcacggcaacggctacggcatcgccatcctgatcgtcgactggaaatctcacgacgaccctgccatggccgcgctgctggcctccaatcccgtgctcgtatctaagctgctcgatccggccgccggtgccttggccgcccggctggcaaagcccttgggcgcggcgatcgagcgtctgcgccgcgatctggcggcttggcacatcggcaccgccgtcgttcgtcgtcagtcgttcgcgcgcctgcgctcgatatggaccgatccgcgccaatcgcagtctcacttcggccaagtcgtgtccggtggcgccaagcgacacatccaccgcgcgcaggtgttgcgccagttggacgagtggtggagcgaacacaccggtaccgcgtcgccggcctgcgtgaccggcttgttcggcgtgggcaagacttgggcggttatcgattggctgatcgagcgggccaaccacctgccggccaccttgctcatcccggccgctgcggtaggtgggcgggatctagggtcggtgtatgaggtcaagtccttcttggccgagcgcttgctcgagatgatgcatgtgcgcgatgcgcaatattggcgcgcccgactggagcgtatgctgctgcgcccgcccgctgaggggccggtcctgctggtgatcttcgacggcatgagccagcagccgcaggccaactgggaaggcctgctcaaggtcctgcaaggcgtggagttcgtcggtcgcgtgcgcacgatcacgaccactcgcacgcttcatttcgacgtcaagctgcggcggctcgcgtcgctggtggatcgtgccgtggctttcgaggtggagggatacgacctcaagcccgacggcgagttcgatcagatgctcgctttgaacggcttgcgccgcgcggatttacaccctgacctctacacgaccgcgcggataccccggctgttcgatctggtgatccgcttccacgagcggctcgtcgacgccggcgcggtgaccttgcatcggctgttatgggagtatggcagcgatagcgccggcgcgtcggcaaacaaggcgttctccgcgccggaatgggccgaatggctgcgcgcggcggccatcgggtttcagcagggcatccgttcctattcgctcaaggcgctcagtgattccgccgcacgctcggacctggccccaggggaggtataccagcgcctgagcgagctggccgattccgcgttcttcacccggctttcggacggcacgctgcaacttacaccctcgctggtgaaccacgccctcggcgccaccgccgtgcagttgctgtccgccagcccgcacgccacacgcgaggcgctggagtccgcactcgagcagtggctcgatcccatcagtggcctagaccagcgcccggaaatcctgcgtgccgccgtatccatcgccctcgagtcgggaccgccccgccccttgctcggcgtcctcacggcggcgtggctgcaaacgcagaacttggccgagaaccatcaggccgaggtgcaggcgctggcggctgaaatgcccgacgcgttgctcgacgcgatcgagctgtcacatcgctacaaccacgcggccagccggcacaccgcggtcgaggcactgcgtggcattgaccgcggcaatacgtcggtgcgtgcgcgtatattcgtccgcgccgagcaatggctgcgcgtcatctcgcgcgaggtggacctgcgcactaattccgagccggacgcggaaggcgatgcgcaccggcgcaagcgatggatcgagcgcatcggcgtctatgcctcgggcccgattatgctcctgggcgaggcgatggttctggtcgatcgcgatgagggccagtggacagaccacttgcccgccctggtcgagggttacccgctggtcgatgcggtgcccgcgttgcgcgtggctgccattgccgcggccgccggctcgaaccatcgggcgtgggaccagctgcgctgggtgtacctgttcaattcggtcgatgccgatcccgtcgccaaatgcgtgcgggcggccgcagcagacatggcaagccgcgtgcctgaagtcaacgtacatccgcaactggcgcggcgggtgaccgaattactgctgcacgtgtcgggccgtgaagaagacaacgaggccgcagcggcactgaacgtggtcatgggccgaccgtttacgtacgaggagcactacctgtccgatcccggccgaagcctatactttcggctggagcgccgacacgtgtcagcggtgctggtggatgagaccctgccgctgcacgtgcgtctgcgcaaatgcgatgacgtgtggttcgatccgagtttcgagccacccgccaccttctgccaagccgtcgccgacgcggcgcgcgagttcccgctggtcgacatgcgaaccggcccttacgcgacccgcgaagacattagcttcgatgagcagcaggcggtcctggcgcgctgcgcgccgcgggtgctggcggacttgcatcgcaaactggtgacgcgggctccgacgactgtggttgcacgcgccgcgagcgcctggcaccagactgatgcgctcctgttgcacgggcccccgcaggccgcagcggcccgaaccttgcgaacattcgaacgcgatccccgcgaaggcgatgagacccatgccgcgacgcagttgctgctgaccgaactgaccgatctcgacgcactgtcgcaggcggtgctggtcgtggaagccgacctgtcgggcatcgcgacgaggatcaccgatgacctgtgcccgatgaacagcactgaggtcgatcagttgatcgagcgctatcggtttggctcgcccaagcagcagcaggacgtcttggtgctgttgatcaccgagccaccgacgctgagcgatagggcatggggctggctgctggacaagacgaactcgaccgacgagatcgacgtgcgtctggcgttcatggttatgtccgccgccgatccccgtcgccttggtacgcacttggaccaggcgggctggggctttacgctccatggcgacacgttcgcggcgcacgcggcatcaggtgcgctcatcgaggccacacgcggtcagccgttcgagcaggttgccatgcgcctggcgccgtggcgcttgttggaggccgtgcggctgcgcggaaacgacgcctcggaagtccgcgccgccatggagcggctggatgccatcctcgccggtggtccgcatgatgcccccgaccccggcgctcagatcttcgtccagcgcacggacgcatcgaaacgaccgccgtggtactcagttcgacccatgccgcccgaggatccgaactcggccgaagcattcgagcacgcgtttgatgaagcagcgcagcgggaggcgtaccagcgtgcgagcgagacggcacgcgagcgcgtcgccaaggcgcgcaaggagggtgccagcttgtatctagagttcgtcacgctcgaagacgggaaagccatcctacagcacgctcccgacctgctcacgcggtggatcgacggacacgagagttcgagcgcggagttcgtgcggcgcgtgcagttggccgagggcctgttcctggcgatcgccgaagcactgctcattgcgcagccggagcttggggcgagcatatggcggtccgtgggccatgctatgcgcacacgggttatgggcacggcgaatctgcccgacctttggcacatgctgttccgggtcccggcctcggccgaggtcatcgctctgcgcgaggctctccttgacccggagcacactaacaccgatgcgcagttgtacgaactggcgctcgcggcgcaactcaacgacggcatggcctggctcgaggcagtgatcacgcgcgacctgaactcgcatgtaccttggcgccagcagcgtgcggaggtcctgcgcggcttcctagtcggcaacgagccgccggtggccgacgcatggcctgaaggcccgtcgcgctcgtgggcccaggaggtccggcggggtgcagcacgcttgcgctacatggaagcctgcgcccgccattggtggcgcgagtactggcggcgcgacgacccggaagaggccttcgctgcttgggtgttgttcaactactgcgccgaccggcgcgccctgtgctggatgcaggaggaggcggacgccgctacggtggatgcggcgcagcggacccgcaggcaccggcactgggccatgaaccggccacgctggaaacacggggccgagaagtctggtctctccctgcagcggactttcttgcgccgaatcacggacgatatggtgtggccctggcgcgattag

SEQ ID NO: 534774 - DNA, 651 bp, Stenotrophomonas maltophilia
atgaacgtggcggtacaggcagagtcgcagctccgccagatgattctgaacatggatatcggccctggcgagcggattaccgagcgctgggccgagggtcagaccggggcatcacgcagctcggtgcgcagcgctctcatccggctcgaggcagaaggactggtcgttcgcgaggaccgcgggtggtcggtgccgcccatcgatctggacgaagtggacgcgctgttccgctatcgggagattcttgaagtggccgccgtgcaggcgggcgcggctggcctgacggcccaggatcgagcctctatcgaagcgatgctggccagcggcaccgcgcctgctcgggacgatcccaatgacgtcgggtcctcatttcatctctggattgccggacttgcccgcaacgcatttgtcacccgcggcgttgccgatgcgctgacccgcttggagcgcgtgcgctggctagagcgcgatgggaaccatcctgcgtgggacgaacatgcagccatcctctacgccattcgggacggcgacggagacctggcgtctaccctgttggcgggccatctgcatgagaccagagagcggctgatcgagaccatcaatcgggatcgcaggtcactccgggcgcgcggggcgaagatttcgccgtag

SEQ ID NO: 534775 - DNA, 1251 bp, Stenotrophomonas maltophilia
atgaacggcacgccccacgacttcccaaccgctcttgctggcgccagcccggtctggcgcaggaacttggctgtctgcgtttttggcgccttcaccaccacctttgcgatgaccctggtgctgcccttcctgtcggtcttcgtcgagcatctaggcgtcagcggccatgcggccatcgtgcagtggtcaggcatcgccttcagcgccacgttcatcaccgccggactgaccgcgccgctgtggggacggctgggcgaccgctatgggcgcaagcccatactggtgcgggcaagcctgggcatggcgacggtgatggcgctgatgggctttgtcacccacctctggcagctggttgccctgcgcctgctgatcggcattgccggtggctacgcctccggcgcacagattctcatcgcatcgcaggcgccgaaagagcgttccagctgggccttggcgctgttgatgaccggtgtcatggcgggcaacctgctggggccgttggtgggtggtgtgctgccgacgctgattggcatcaaggcgaccttctggtgcgccagcgcgttgatctttgttgccttcctggccacggcctggtgggtgagggaagtgcctgttggtgccggtgtccgccgcgcggagtccgtcagctggtcgaagatgcccggcaagccgatcgtggtgaccatgctggtaaccgggcttctgctgatgatggcgaacatgtccatcgagccgatcatcaccgtctatgtcgcctcactggtaaacgatccgctgcgggtcacgctgctggcaggcgtggtgatctcggctactgcgttgggaagcattctgtctgcgacctaccttgggcgcacagccgaccgtatcggccatgcacgcgtgatcacctgcggccttgcggtagcggcagcgctcctcattccacaggccttcgtaacggccgcatggcagttgattgctttgcgcttcctgatgggcatcgcgctgggcggcctgctgcccagcatcggcgcgatgatccgccaccacgtgcctgagcaggcgctgggcctggcattggggctgtccatcgccgcgcagttcgccggccaggtgatcgggccgttgctgggtggcttcgtcggtggccacgtgagcatgcaagccgtcttcatcaccacaagcgctctgatggccgtcggcgcggttggctgccatttctttgctgggcaccggcacgcctcgccatctccccacgtcccttcctga

SEQ ID NO: 534776 - DNA, 561 bp, Stenotrophomonas maltophilia
atgaacgcatccgttcccaacccaggcaaccaaactgcactgctgttgctggacatgcagaacttcgtgctcgacaacttcatccctgaatcggcgcgcacgcgaatcgttgaagcaagtgctgcgctgctggctgaagcgcgcgccgccggaaatctggtcatccacgtgaatgtgggcttcagccctggctaccccgaggtctccgaccgcaacaaggtcttcgcgtggctgcgtgacagtggcctggtggaaccgggaagtgagagcgtgcgcatccccgacgtgctggcgccccggcaggacgaacctttcgtcatcaagcaccgcgtcggggccttcagtggaacggggctgcatcaactgctgatggatcacggcatcgggaaactcgtgctggccggtgcaacgacgtcgggcgcggtgctgaccaccgtccgccaggcattcgacctcgactacgacatcacggtggtgcaggaggcctgcgctgattcggatgaagccgtacatgagttcatttttgatggtctccttcctatgcatgccagcgtgagctga

SEQ ID NO: 534777 - DNA, 669 bp, Stenotrophomonas maltophilia
atgccctatggagggtacttcgatggagcgattcctcctgaatctgaaatggagcgtgtctggcagcgtagctacgcaaatcccgaggaggcggatgatgacattacccagtacaccgtcggcttctacaacacccaccgcctgcactccgtgctcggctatcagtcaccggcagagtacgaacaagcggccgcttggaaggccttatcttggcgccgacgaaagcttgatcaccacaatccgttgggatgccccccaaagatgcagacggacattggcgctctgagaatccggccaacgaccacagcctccctgttgaagtgttgcgtgcacaggcaattttttcatggccggaatcccgagtgtcgaaacctctccttctgtgctgccagcagtacgatctgcagctacgcacaagtcaggaaatggaatctcctctatgggctctgctgcttctctggccgggtcttgcaaaatagcgcaaccatcgccattcaaattcaacgccaagttctagaaccagttcaggcgcgcgattgctgctctgtattcctctgcggccttcatgaagccctcgtagttgtcaccgaaaaggcccgctttgaacggcgcccaatgttctccctcttcacgcgcgcgcacgaatgcggattcaagagggccccttga

SEQ ID NO: 534778 - DNA, 1737 bp, Stenotrophomonas maltophilia
gtgcgcgatatccggtttcttctcaagccccgctatggtcagagtcacgctctgatcgtcggaattaatcgctacctcaacgctggaccgttgggctacgcagtcaatgatgccaatgccgtgtacgacaggcttacgcgggactatggctttcaagctgagaacgttcaactgcttttggatgaggacgccacatctgaagcgattcgccgggcattccttcgtttcgctgatcaggacgcagtgggcattgatgatcgagtgatagtattctttgctggccatggcaccactcgacgtggagtacgtggcgagattggctacctggtcccgcatgatgccgacttaggtgacctttcgactctacttcgatgggatgaactgacgcgcaatacggagatcatcgcggccaagcacatgctgttcgtgatggatgcttgttacggaggcttagccgtcactcgaaccgtcggtgcaggcagtgttcgctttatcaaagacatgctcaagcgcatctcccgtcaggttttgactgccgggaaagctgatgaaacggtcgccgatgctggtggtccgctgcctggacactccgtattcaccggacacctcctcgaaggtctggacggcgccgccgcaactgccgacggcgtactcaccgccagtggtttgatggcgtatgtgtacggacgcgtatcagcagacgccgggtcgttccaaacaccgcattttggtcatatcgacggtgatggagacttcgtcttccgcatgccgtcggcatcggatgctgaaggcgcaggtgctgatgacacgctgttcgtggtgccctactcggaagagtcagacacgcgctccggacttgaatcgaagatctcacgggcaaagcacttgctggcccagccggaccgggccattgaacttcacgattttgtcattgacgagttaaagcgctttctctccgcgaccgcgcaggacagcttcagtaatgatgtttcgtacagtgatgaggagctgacccggcgactcgctcgttatgaggaatgcacgctggatctatcggtgattgaggcttgtctgtcgtactgggcaggggacgtccatcggccagtactgcgcaagactctggctcgttcggtcgaccgcttggagtcgagcggcggaatggccgtatggtcgaaccttcgctggtacccgcttgtcctacaatcctactgtgccggtatcgctgcagtggctggatcgcgctatgacacgctagcggatgtgctgaccactgagatccatacccctgaagaatctcgcccggcattccgtgcggtagctgatgcgatcctagcattcacccgtgccgatctgttcaattgcctgcctggctacgaacgcaaacgcacaccgatgagcgactatctctttaagttgcttcagccgcggctggatgatgcattgttcatcgggcgtgcctatgagcacgcgtttgacgagtttgaggttctgctcgcattcgcatcagcgcaggcgtatgtaaaggaagagcgaagcgcgtgggggccagtcggccgcttcggatggaagcatcatcacagctcaaggggccctcttgaatccgcattcgtgcgcgcgcgtgaagagggagaacattgggcgccgttcaaagcgggccttttcggtgacaactacgagggcttcatgaaggccgcagaggaatacagagcagcaatcgcgcgcctgaactggttctag

SEQ ID NO: 534779 - DNA, 477 bp, Stenotrophomonas maltophilia
atgatgaagtacggccttgccgcagtggtgtgcgtcgcggtgatgggtgcattgtgggccgcgtggcccgagccagcgggtgatcaggtctgggcctgccagaagctgcaaccggccaactaccgcgtgctgcatagtgatgcgctcggtttcgtggccgcgaaggctgacgagggctttgagttgtacatgcgccatgccgaagatacgtccttcgagatccgttgcaaaggcgttgtggtgatggacgtggagaacgccccctcgcgcgtgctgatccgcatgcccgccgatgcagtgtggcgcgcggcggatatcgaacggctgcgcatctggtttgaacaatggctgtttgtgcagcagagtgagaggcgggtgctggtggagcgcgcggggccgtcgtgggttgaggcgtggttggggcgctttaatcgatcggtgcctgatgaccagaggtgtctaccggggtccccgtaa

SEQ ID NO: 534780 - DNA, 330 bp, Stenotrophomonas maltophilia
atgcctctgaccggcgcagccatcaggcgcgccaagcccagcgacaagccgcagaagatcaccgacggcggcggcctgtacctcttctacctcaccccgaccgatgcacgcagcaggcgctggaagtaccgcttcgccggcaaggagaagccgctgtcgattggcctgcagccggaccaatttctgagtcggttgcccgcctccagctggtcaatccctacgaccattgcaccagcttcggtcgctctcacacaccctcccacttcacgcctgacgggaggcctgcacttcgttgtcgccgaaactcatgatctccgacatcaattctga

SEQ ID NO: 534781 - DNA, 927 bp, Stenotrophomonas maltophilia
atggaggggctgatatctaaggtggcgtcattagtgggaatatcgagcgcaagttgcaggcgcgtagcgcagggcgctcatcggcgctataaggtttttaccatcgcgaagcgaggcggaggcagacgcgtagtagctcagccggcccgtgaggttaaagcagtccagcgagctgtctgtcaattgctaggtccgcagctcattgtccacgactctgctactgcgtataagactggcacttcaatcaacgctaacgccgcagcacatgctggcgcgcgatttctcacgaagcttgatttctcggatttcttcccaagtatcaatgatcgccttattgctgatcttctaagcaggcgatgcgaaggtctggcttccgaagaaatagattttgttgtcgatgtctgtacatggcgacccagtggtgaaagggtgctttgtattggcgctccaagctcgccgctaatggcaaatgcggtcatgtatgatttcgatgatgaggcatttttggccactagcgctctaggtgttaaatatacacgctactccgatgatatagcattgtcgtcaatgattcctgacactcttcgatatggggaggcggttgtgcggaatctcattgcttctcgtccagcacttaggataaatgagcggaaacgcgtcgcggtgggtcgcggaacgtcaatgtccgtcacggggttgactctgacgaatcaaggtggcgttagtgttggtagggaaaggaagcgaggagtcagggcaggcgtgaatagatatctccagggtgcgctagatgaggctgctacgcttaagctcaagggcgaaatcgcatttgttttaagcgtggaagctgcattccggggggtgcttgttcgtacatatggcataagaatatggaatctgctgcccaagatcgtggaaagaagttga

SEQ ID NO: 534782 - DNA, 327 bp, Stenotrophomonas maltophilia
atggggctaatttgtgagctatgcgatctgtttggtgcactaaatgagtcggatatttcgtcgttcttgtctcagctgtcgcttgatattgatgctaaggatctgtcgcagtatctttttctgcttcagaagtgtcagatccttttcatgaagccgaaagggcacgggcgctacttctacgttgaagactggtcatctcgtgtatcgtttgcatatcaggagggggcaagattcaataaggagcgtctcaaggtggatacgatttcctactatgaggacaagcttccaagccgtgcgagcatagtcaagtccataaggagggcttga

SEQ ID NO: 534783 - DNA, 594 bp, Stenotrophomonas maltophilia
atgggctgggtgccgccgcgcctggggcgtgccgactgggacgtctggaattgtttattgtcctatgacaaaactcaagtgccgccatgcagagtgtctatccggtgcaaatggcgcaccatgaatgtcatggagcccaaccttcgccccgtccagcctttgcactacgctcccattgccgattggcttgattccgccgaggccacccagcgctgggcaggcccgggtgtgccgtttccactaccgccggagcggttcgcgcaggtgcttgagctcgaggtgcgcccgggctgggcgctgctggatgagcagggtgtttgtgttggattcggtcagtactggatgaccgcaaccgacacggcgcacttgggtcgcatcattgtttcgccgcatgtgcggggacgcgggctggggcgcgcgctgatgcaggcgctgtgtacccaggcccagcatgaagacggcgttcagcacctcaccctgcgcgtctatcgtgacaacgcggccgccgcagccctctatcgcgatctcggtttccagcaggttgaagcgtcctcaacgccggaacttctgttcatgcagcgcacgtcgggctga

SEQ ID NO: 534784 - DNA, 516 bp, Stenotrophomonas maltophilia
atgaacatcccaaccattgatgtagtgatccaggcagtaggtcaggacaccagctcggcttccctagtcaggttactccaggaattggaaatcgacgaggcagacgtcagccgcaatccgttgaaattgactggaaggcggatctggacggacgaggagggcacgctgcagttgaatttcgaggacataggggtgctcgctgatatcccgtaccacgacgtggacgatgggccttgggtactcacgacggcggtgttctgggcgtctgggaaaaacaagcatgcctactctggcccgttgccccatgggctggatttctcaatgtcgcgtcaccgtgtgagggagcgatttgcggccctgaatgcggggaatccctttgtggtgggaatttcgggcaatgtggatatatggagcattggtggcgtggagttcaaagttaacttcctcggtcccggagattcgattcgctgcgtatccgttggcattccggtggaccgtcctgatcgccgggcgtaa

SEQ ID NO: 534785 - DNA, 1284 bp, Stenotrophomonas maltophilia
atggttatcgccagcattcgtccgtccaccgtggacggcatcaagcagctcgctaagaagattcgccgcgagcacaacatcccctacacccaagccctcgaagatgccagccgccgggcgggctacgagaacttcgtgcatgcaaggcgtcagctggtcggggccggtgcctcgcgccacttccccgtctatctctctgctcattggcagaccccgctcgagcgcaacggcaattccgcgggactgcgcgccggtcgtgaggtcctgcgcgtcgatctaacccacccgttgcctgagatcgtcgccaagcaccgtgtcgcgtacggccgcggcgtctccggattccgcatggaatacgaagatcacttggagcaccgcacgaacgtgatcggccaggaggcggctcgcaaggcactgctgacggcgacacgcagcctgcggttcatggaggcgaccgggctacaacccgtcacaacccagaagggtcgagaccttctgcggccattggagaagctgcccggccgcgaccatcagtcgctgtggttcgatcctgtgaccgagggctacgtctttctcgatgaaccctatgcgcccgcgctagaaagcgtcgcagcagagcgccagcgttggctcgagcgcaacgatttgcacatggtcgcgccggattgggagggcatctactatccgggtcactgcctaccccgcctgattggccccgatatcacgctgctgcagcgtgtcgccgaggcattggccaaggtcgagtccgtcacggagccgacggagtggcctcacgaaaccggccgttgcggcgacgacttcgtcagcccgaagcgtcaggcggatgagaaaccgcgccggccgcggcccggcccctcctggcgggaacataaaggtgcgacaccctacggtggcgcggcaggcatcccttcgcgctggcgaccgaccaaaccgatgccgctcgagctgcatcagcagctgggctccttgttgaagacgctgtgccatgacttttcatggcgcgtgggccagaagctgaacgttgcacgatcgcagctggaggactggtcgctcatcgagcatcggcaggaggagggtgtcgacgacctctactttggcgggcccagtgagtcgatctgcgagacaacggccgaatgtctcgaggcactcacgaaggcccgccggatcgtcgagcgcggctacgacgactgcaaaccgcgacgcgagctactcgcgacattggatctggctatcgcggaactgagcaagcgtcaggcggcctga

SEQ ID NO: 534786 - DNA, 219 bp, Stenotrophomonas maltophilia
atgcttgagaacaacaagcgcgatccgacgctctcaacggtcacaaagattgctgaggcgctgcatattcctgtcggcttgctgttcgttttggcagccgatcaggatgacttgggggaaatcgacgagagcattacggctcagctgatgcaatctgcgctggcatcactggaaacgacggccaacatgaccacgcgggcgggtaatcactatggctaa

SEQ ID NO: 534787 - DNA, 2310 bp, Stenotrophomonas maltophilia
ttgcagctggaaagcgggttaggcctgcagatccagttctccagtcaacccgatgtcaagttggcattcgacagcttggcgaacgagccgaagaagattgagctcctcagtgttcgtcatgaaggcaaccagacatttgccaatgtctttgtccctgatggtggactggcgcacttcgagaaatacatcaccgactacttggcggagaagaaggacagtctgggacgtccacgtgatcatcagaagttgctggatgccatcgactctatccgagtagccgaagtccgggctttgtggactgatgaccctgatctcctccctgcagacctagggcttgccttctggtgggaggtgtggcttccggtgcgaggcccgggtcagcggcaggctgtggtggaagacttcaagaagcttgcgcgcctggcggaatgtgtcgtcagtgacaagcaggtcaatttccccgagcgcacggttctggtgatgtatggctcgcagcagcagctttcgcgatcggtcatgacgctgaactgtgttgctgaactccgctacgccaaggagactgcggagttcttcgatggcatggaagtacgcgagcaaagggaatggagcgatgatttgctgcgtcgactccaagcgccgccatcggacgacgcggccacgcgcgtctgcctattggattccggggtgaatcgcggacatccgctcctagagccactgatggatgccggcgacctgcacacggtggaacccgcatggggcgtggacgatggggccaatcatggcactggcttggccggccttgccgcttatggcgatctcaccgatgccctgtcatccgctgatgccatcaacatccctcatcgcctggagtcggtcaagctgatacccgcggaaggtgcaaacgaaggcgatgcgcgccaccacgcctacctcttcatggaaggcgtcgcgcgtcccgaaatctcagcccctcgccgtgctcgcgttttcacgtcggccgtaaccgcctcggactaccgggaccgtgggcgcccatcctcatggtctgccgccgtcgatggccttgcagccgatacggacggcgctggcgagaatccacgcctgttcgtcctctctgcgggcaacacaagcgatcccaatgcctgggccgggtatcccactagcctatccactaatctcgtgcacgaccctggccaagcgtggaacgctatcaccgtcggggcgtatacgaataaggtcgatacggaaggtcatccgaccttgaaccccatcgcccaagcgggtggcctcagccccttcactaccaccaccagaacgtgggagcgtgtgtggcctttgaaaccggaagtggtgctggaaggaggaaatgcggccaaggacgacgttggccccgtcggaatggcgagcctgaaccttcttaccacccacaaccagccgattgatcggctgtttacgaccagcaatgccaccagtgccgcgtcggccctttgcgccggaatggcagcccagattctggcggcctatccgcatctccgcccggagaccgtacgtgccctactggtgcattcagcacaatggagcgagggtatgcgcgggatgttccttcccgctctgccgaacaaggatgactacgtcaacttgattcgccactgtggttggggcacgccggacctgaatcgagcgctttggagtgcaggggattcgctgaccttgctggtggaggatgaggtgtatccttacaagaaggttcaaggtcagggtgtcgagacacgcgacatgaacttgcattccttgccttggccgaaggaagagctggaagcattgcaggacacgcccgtcgaaatgcgcatcacgctctcctatttcatcgagcccaatccgtctgcgcgtggcgtcgcctcgaagtatcactatccttcgcatcgcctgcgatttgacgtgcagcgtccgctggatggatccaccgagcacttcgtggcacgagtgaacgctgcggcgcaacgcgaggatgacggagatcctgtgaatccctccgaccccaattggctgcttggcgagaggcaacgacaccgtggctcgctccatcaggatgtctggaaggggacggcggctgaactggccagccgtgggttcattgcagtctatccttcggcagggtggtggcggactcggcccgctttggagcgctacgatctgcccgcccgatatagtctcgtggtgtccatacagacgccacaaacagacgtcgatctttacgccgctgtcgctcagaaaatcccggttgccaacgctgttgtcgtggggacatga

SEQ ID NO: 534788 - DNA, 1314 bp, Stenotrophomonas maltophilia
atgccgcttttctcgagaacggaattctatgacctgctttggtcagcgccggtcagtaagatcgcaaaggatctaggcatttcagacgtcgccctcggaaaagcggctaagcgatatggaattccggcgccggaacggggctactgggccaaggtcgcagccggcaagcacgctctgaagagaaggcttccgccaaggggactcggagagtcagaggtggtcagggtaggccgagaggatgaacatagcccgggaagcagcggccggccagaccccgaaatcccgccaatgcctagtccactcaaggtctacgacgaatcactcgatgacctgctcactcggctaaaaactgagattgggacggtgaccatccctaagtctctatctgcgccccaccccgctgtggcaaggatgctagccatagacgcgaagcggatagagaaaatttctcaatccgactatccctggagctacgaccaaccctattacgtttcgcccttcgagaagaggcgcctccgtttgctgagcgcaatattcaaggggatatcgaagacaggacttagctgtcaggccaaagggaaagatgctaacgagttcacggtatttgccaacgagggatccagcgtgacctttcgactagatcaccccaagaagactgattcgcggagcagctacttcgcgatgtcgaaggccgaccgcccagcgtcagaccctttgaaattagaaatctcctggtactttcgctcggccgcacctttccgtcgcgaatggcaggacggcaaggcctcccagattgaagactctgcgagcgagattgcggccaccttggctttggcggtggaggcgatgcatcgccagggagtagcccagtcatatcaattggctattgacatgcacaacggcgcgatacgtagacaggaggagaagaggctccaagcaatacgcgatcgcgaagctgccgaagaggcggatcgcgaggcacgccttcacaagctcttggcggatgccacagcctatcggctcgcgcaggacattcgtagctacgtcgaagcggtcgccgaagcgaacgctggaagtgagtcgcctgtgcacccggaagagatggctgcatggcgagaatccgcgcttcgatgtgcggacgaagtggatccggtgctgacgagagcattcctgaaatcggcacagtcaccggaaccctcagccgctggaacaggcccacaaaacttgccttcgcaatcagtccagtcgcttcacacaagcgtaagcgcaccgtggcacccaaaccgctttagccacttccacggaaaacgatag

SEQ ID NO: 534789 - DNA, 612 bp, Stenotrophomonas maltophilia
atgatcctgagctggaagaccccgatccactacaacgagaagctgattggcacctatgacgcccgcatcggctcctatgaggcgtcctgctccaacttcgactacctcgccctgctggaggggcagccttatccgcaaacgatggacaggccacccgtgttcttccagtgcagcgcgcagaagctgctgcagcatgactgcctgtggctgctgggcggcattcccctggtatcggagcgtctggcggactttctggacgcccaggcgcccactgacatcgagctcatccaaccccggcgcctggtggccgaccatcaggatgtcgatcaacggttctatatcgtcaacgcttccaggagcgtcgaagccatcgaccacgcccgctctgaagccgagcgggacgatgacggcaacatcatctacttcaaccagacctggtttctcgatgcgccctccgaaatgggccggatcgccagggagccacagtccggggatctattgatttcggcaggcctggccgatctgatgatcgactcaggcttcaggggcgacacggggttggggttcttccgcgccgaacggcgtttcatgccctaccgtggccatgcctga

SEQ ID NO: 534790 - DNA, 999 bp, Stenotrophomonas maltophilia
atgattattcctcctgatctggagagaaagcattctcttgttgaggtccacgtaaaggcagtggctagcagggtgcaagatctagtctccggattttgctctaaacagggttttgcttttcttgggcgagtgaaagacacctcttcgctatcggagaagcttgagggagggcgctacagtaaatggagtgacgtcgatgatctgtacgcttgcgcagtcatcattccgactttgagtgaggaaggacgtgttctcgaatttctttccgagcaatttaatgaaagggtattgcgagctcgtggcacgtctaggaaagatccggaggtatttcgctttgacgcgactcgttttattggttcattgagggatgaggctgagctatacggccccttggcatcaattcaattcgaagttcagatcagaactgcgtttgagcatgcttggtctgtatcgactcacgcgctcgcatacaagggaggcaatgttgggtggagatacaaacgattagcatctcagttacgggcgtcaattgaacaacttgaccaatttgttctaggttttcaggagtggtccgggttgattcaggagcaagcttggaacacggttgatgatcagcgggatattgttgaaaaattcacctcctgggtcgcaagtggtgatatcccagcggaaatggcccctcaaagctgggtgcgattttcggaaaatttgtactcatttattggcgcggtgatgaagcgtgatcgcgtgcttggtcacagcgctaatgtaaagtcagcactcctcgcaattgagcgtgagcttgagtctgaaggaggtggcagactaccccggagcatttccctgctgcaattttgtataggggttatgtgtaagggtggaattgttaatgtttcggatcgtaagtattttgctttaattactgatgagctgaagacattgtatccggcagtgagttctgtgactctttcagagttcaatttcgaattcgaagattga

SEQ ID NO: 534791 - DNA, 1032 bp, Stenotrophomonas maltophilia
gtgtcgaggcgccataattttcagacggtgagttggttctatgatattgctcagcgaggtttgcttaacttaaacccgccttatcagcgacgaagtgtttggaatcaggatttcaaggactattttgttgagactgtcctaatgaattatccggcgccagcaatttttcttttcgaagatattagtccagatgggcgctcatcctataacgttgtggatgggaagcagcgactgacgacactcttggagttcattcggggtgacttcccagtgcgtgaaagaggtgcaataagcgctgctagtggaaagtattttttgaatctggatgatgctttgaagaagcaggtctggtcctatcagttccttgttgagtatgttccaagtgatgatgaggagataattaacggaatatttgaccgtattaataggaatgttgcgaaactcacgcagcaggagcttcgccatgcccggcttgatggtgaatttataacggctgcggaggatcagacccaatggcttgcagaggctctgccatctatgccgagatttgcgcctcagtcgaaaaagcaaatgaaggatgtcgagtttgtggctttgctttttcttctccttgaggacgggccgaagggttactcgcaggaggctttggatgaggcctttactgctcgcgatagcgagtgggattccagaaatcaaaccgtttcaaattttcagcgagcaataaattctgttaaatccataatatttgcagcgcaggatccgaaagagctgcagggtagccggttgcgaaaccaggcggatttctattccttggtgggggctgtgcacaatcttcttgaaaatgacaagctcgctccgtttgacgtagcagcgaagtcgctcgcgagctttgcagccagagttgaagtcgaatcggagcgtctgcaggacggcgagctgatggcatacttcgacgccgctcgctcggcttccaatgataaagggccgagagagagaagaatcaactatatgatgcatttgctttcattatga

SEQ ID NO: 534792 - DNA, 297 bp, Stenotrophomonas maltophilia
atggcctggttgtcgctgctgctattcctgccctggttcctgctgctgggcagcctgtactggctgttcccgcgccagccgcgtaccccgcggcggcgcctgttcgacagcaccaccctggtgctggcattcgccctgagcatcgtgtcgatgctgtggggctaccgcatcggcgtggtgcagcccggcgccggacccatctggccacaggtgctggcggtgctgtatgcctacggcgcgttcctggcggtgctggtgctggcgttgatgctgcggccgcgatggctggaccggtag

SEQ ID NO: 534793 - DNA, 3336 bp, Stenotrophomonas maltophilia
ttgtttctggatcagctggatcaccgccattggatcgatgttcggcttggactcgaacacgatgcggccaccgttctcgcccaggtccagcttgcggatgcccagcgtgttggctttcagcttcagctcggcgatggcgaacaggtgcttggccgcatccggcagcaggccgaagcggtcgatcatctccacctgcagttcgcgcagcgcatcactttcgcgcgcgctggaaatgcgcttgtacagggtcaggcgggtgtgcacgtccggcaggtagtcttccggaatcagcgccggcacatgcagctcgacttcggcgccgcgcacttcctcgccggcatccaggtcgggcagcttgccctgcttgatgctgcgcaccgcgcgctccagcagttcggtgtacaggctgaagccgacctcggccatctgtccgctctggtcctcgccgagcagttcaccggcaccgcggatctccagatcgtgcgtggccagggtgaagccggcgcccagttcctccatcgacgcgatcgcttccaggcgcttctccgcatccggggtgatcgatcggcggtccggcgccaccaggtacgcgtaggcgcgatggtgcgaacgaccgacgcggccgcgcagctggtgcagctgggccaggccgaagcggtcggcacggttgatgatgatggtgttggcgttgggaatgtcgatgcccgattcgatgatcgtggtcgacagcagcacgttgaagcgctgcttctggaaatccagcatcaccttttccagctcgcgctccggcatctgcccatgggcgatgccgatgcgcgcctccggcaccagctcggacagctcgcgctgcatgcggccgatgctttccacgtcgttgtgcaggaagtacagctggccaccgcgcgcgagctcgcgctggaaggcctcacgcagcagcgcgttgtcccactgggtgatgaaggtctgcaccgccagccggttcggcggcggcgtggcgatgatcgacaggtcgcgcaggccggccatggccatgttgagcgtacgcgggatcggcgtggcggtcagggtcagcaggtgcacgttggcgcgcagcgccttcagcgcttccttctggcgcacgccgaaacgctgctcctcgtcgacgatgaccatgcccaggtccttgaacttcacgtccggctgcagcaggcggtgcgtgccgacgatgacgtcgatggtgcctgcggcgaccttctccagttcggccttgatctccttggtgctcttgaagcgcgacagcacttcgaccttcagcgggtaatcggcgaaacggtcgcggaagttgcggtagtgctgctcggccagcagcgtggtcggcaccagcacggccacctgcttgccggcactggcggcggcgaacgccgcgcgcaccgcgacctcggtcttgccgaagccgacgtcgccgcagaccacacggtccatcggctggctgctggccaggtcgcgcagggtggcatcgatggcggccaactggtccggcgtttcctcgaacgggaagccggccgcgaacggctcgtacatcgcgcggtccacctgcagcgccaggccggcacgcgcctggcggcgggcctggatctccagcagctcggcagcgacgtcgcgcaccttctcggcggccttgcgcttggccttgctccactgctcgccacccagcgaatgcagcggcgcggtttccgccgaggcgcccgagtagcggctgatcaggtgcagctgggcgaccggcacgtacaggcggtcgcccttggcatattcgatttcgaggaattcgccgggcatgccgccgacgtccatcgcgatcaggccccggtagcggccgacgccatggtcctcatgcacgatcggtgcgccctcggtcagttcgccgaggtcgcggatgatcgcttccggctcgcggccggcacggcgcgtgcggcgggtgctgccggcgcgctcggggaacagctggcgctcggtcagcaccgcgatgcgcgggtcgtccagcgcgaagccatcctccagcggcgccacggcgatcgcgaagcgcgcatcgtcggcgaggaacgcgggcaggtcggccaccaccggcggcttcagctcggcggcctgcagcacttccagcagggcttcacgacggcctggcgaatcggcggcgatcagcacccggcccgggtagtagccgaggaaggatttcagcgcgtcgcctgcgggggcctcgcgtgcggccaccggcagcggcggcagcggctggtcacccagcgcatgggcatcggcgatgcgcgcgtggtcagccgaccacacctcgatgcgcgcggcatcgttcaggcgctcgcgcagcagttccggcgacaggtacagcgccgacggcggcagcagcggccgttcgacgtcgtggcggcgctgctcataacgctcgccggtctgcgcccagaacgcctcggcggcttcgccggcaccggcgcagaccaccggcaagctgccgtcgggcaggtagtcgaacagggtggcggtgcgttcgaagaacagcggcaggtagtactcgacgccggccggggccagcccggacttcagatcctggtacagcgaactgcgccgggtatccacatcgaaacgctcgcgcagcgcggccagcacgcgggcgatgctggcctcgtccatcggcacttcgcggccgggcagcatgtgcacggactcgaccttgtccagcgaacgctggctttccggatcgaacgcacggatcgaatcaatgtcctcgtccagcagttccacccgcagtggctcgtcggtacccatcgggaacacgtcgagcaggccgccgcgcacggcgaagtcgccggggtccatcacctgcggcacgttgcggtagccggcactttccaggcggcgcttctcggcctccagatccaggcgctggccgaccttcaggtcgaagctgccaccgatcacatagctgcgcggggccagctgctgcagcagggtctgcaccggcacgatcaccaggccgcgcttcagcgtgggcaggcgatgcagggcggacaaacgctgcgagatgatgtccggatgcgggctgaagcggtcgtagggcagggtttcccagtccgggaaggcgaccaccggcagggccgggtcgccgccgagcagggtctgcaggtcggcttcgagctggttggcaccgtggttgtcacgggcgatcaccagcagcggcgcgtcgtgcgcgcgcgcggcctgggccaggtaccaggccagggcggtcggcgaggcgggggcgcgccaccaggcgcggagctggccggcgcgcggcagcggcggggcggggtatga

SEQ ID NO: 534794 - DNA, 1194 bp, Stenotrophomonas maltophilia
gtgagcgggactggaagtccttcggctgatgtgcgggggccaaacggatggtctgtcgaaaagctggccacactggtcaacgttgtctacggcaagtctccatctggaatcgagagactcgacgacggaattcccatctttggaactggtggagttgttgggtactcgagtgaggcgctgtgcgacggcccgagtctcatcttgggccgcaagggcacgattgacaaagtccaacgaagtgacgggccattctgggcaattgacactacctatttcacgactccaaagaggcagttcgactggtcgtggctgtactacgccatctcatctttcgacctgagaaaactaaacgaggcgtcaggcgttcccagccttggtaggtcgtcactcgaagctctcaatgtagcaactcctccgctacccgaacagcaaaaaattgccgccatcctgacggcggtggacgacaagttggacgtgattgcacgccagattgacgccacccagaccctcaagcagggcttgatgcagaccctgtttaagcggggcggcggcctccaccatgcagccgattggcctaccgtatcgctgtgcgaggtcgccgaagtccgcactggtgtcgcaaaaggcaagaagggactgaaggagcctgttgagttgccctatctccgcgttgcgaatgtgcaggacgggcatattgacctctctgaggtcaagagcatagaggtagaggcgacccaagttgaacgctttgcgcttcggcccggcgatgtgttgatgaccgagggcggcgacttcgataagctggggcggggtgatgtttgggaaggtcagatttccccctgcttgcaccagaaccatgtctttgcagtgcggcctcaacccggcaagctgaactcctattacctcgcagcattggctgcgagtgactatggtcgccaatactttctgtcgtgtgcgaagcgcacgaccaatctggccagcatcaactcttcgcaactaaaggcattcccggtacttctcccatcgataactgttcaggagagcattgctgagattgtccactccgccaatgcaaaggtggctgtattggaagaaaaggagaagcgtcaccaggtcctcaagcgcggtctgatgcaaaagctcctcactggcgaatggcgggtcaacgtggcccccagcgcgaccggaacgtaa

SEQ ID NO: 534795 - DNA, 894 bp, Stenotrophomonas maltophilia
atggcgtcgcaagcatcgctcaccccagactcaccgcttgaactgcagcgggatgtgcagcgcaggctggggcggtgcctgcttcgcctgcaacagtacgaaatcctgctcaaggcactgttggcccacggcgacattgccgggcggcctgcggagttgcagtcagtgcgagacgcgcaggttgcctgtgcccagaagaagaccttgggcaccttggtcggaatgctgaccgagcgtcatctgacttcggccgaggacgatgacggcaccgatgaaccgcagggcgatggcggcatttggttccgcttccgctttcaggtggggctggatgccagccagcaccaagccaccacggcggcattgaaggagttggtggacctgcgcaacgagttggttcaccacttcctgcagcgcttcaacatctgggagccccagggctgtagggccgccgatgcctatctggatgctagctacgagaccatcgacggccactacttgaccctgcgcggctgggcgcagggcatggatgaggcccgtgcggcgatggcctcgttcatgagcacggcgacgttcgaagacctgctggtcaacggcattgcaccggacggcacggtggactggcctgccagcggggccttgcgctgcctgtgcgaagcagagacccggttcgcgaccgacggctggaccctgctcagcaccgcgaccccatggattcgcgcacgacaccccgaccagcatccccagcgctacgggtgcggcagttggcggcaagtcattcacgaatctcggcaattcgagattcgcaggacggtgaacaaagaacaaggctgcggcgaagtttggtatcgcagccgtcaggaggacgtcagtatgcaaggaaagaaaagctcatga

SEQ ID NO: 534796 - DNA, 711 bp, Stenotrophomonas maltophilia
atgccgctgctccagtacggccaaaccaacattgagtggcggttccagcccgacccaaagctcaaacggcactacgtgaccgtggagcgagggcggccggtgctgctgcgcgggccggtggtggatgtggctgaacaggaggctctagtccgccgccgcgctcgttggattcgcgagaagctgttgctggtcaatcagccgcaggcgagtgatgccatcgttaccggtagccgtttgcgttactgcggcaggagctattttaccgaggtccggcataccccaggcttggacaagcctcggctgaccttcactgcgtcgcgtttcatcattgagagtcccgagggcttgagcatccagcaggacgagctcgcgccctacatcgagcggttctactgggaacgcgccaatgaaaagctattggtccgggtgcggtattgggaacgccaaactggcttgcaggccaagggtgctcgtgttcgactgttccagagccgttgggccagctgtgatgcgagtaacactctcgagttccacccccgagtgatggagttgcccggcagcgtgcaggattacgtcatcgtccacgagttgtgccacacagtagagaaaagccatacaaaggcattctgggcgctagtggggctgcatatgccaggctgggagcgccaccataaggcgttggaggttggctggtcgcagtctcgctggtga

SEQ ID NO: 534797 - DNA, 453 bp, Stenotrophomonas maltophilia
atgaaagagagcatcctggacgtactgctgtacctgtttgaacactatttcagcgaagatgcggacctgatccgtgaccgcgattcgctccagaacggcctgatccaggccggtttcagcccaaccgagatcaacaaggcattcgactggctcgatgccctggccgcgcagcggccgagcgtggcccaggcgcgggtcgatggccccgagctggacaagctggacgtggaatgccgtggtttcctgctgtacctggaacagcacggcatcctcgacgccgaccagcgcgagctggtgctggaccgggccatggccctggaccaggacgaactggacctggacgacctgaagtgggtcgtgctgatggtgctgttcaaccagcccggctccgaggcggcgtacgcctggatggagacgcagatgttcatggacgagccagaacccctgcactga

SEQ ID NO: 534798 - DNA, 156 bp, Stenotrophomonas maltophilia
atggcacagcagaaccagaacccgaaccagaagcagcagggccagcagaaccagcaggatcagcagcagggtcgtggccgcgaccagcagcagcaacagcagcaggaacagcagcagcgcaaccagcagcagggtgggcaggacgaggaagagtga

SEQ ID NO: 534799 - DNA, 1017 bp, Stenotrophomonas maltophilia
gtgcataccaactggccacctccgattcccggtgagttgcttaccagctacttagcgcgtcaggccatcttgtggggggtctcgccccatacgctaatccaacttgcatctccagggacggccgtatggaaccgtgatgtcgacgtcagcgcctcatcccgcctgattgatgatctggctgtcgcatccgggcaacccagagaggtactggaagaattgaccttgggccgctgggaagaggcaacccggcggcggccggaaccgttacagggggcctaccactggatagggagcattggcgtgtaccaccgcaggcgtttgcggcttggtttggcgttctgcccggcctgcttggctgagggtgggggcttcctgaggcaatggcggctttccttttggacggtatgccccatccaccagacgctgatgctcgaccggtgcccccgttgtggtgctccggcccagccacagcgccagggctttgacataactgtctgctggaactgctttgcgaacttggacgctgtaaagacactgcctgcggaagtgaccgctacccagtctctcctcttcaatgctctggtgggaccgtgtgattggttcttaccgtgcaactttcgctgcagtggcaaagacctactctggggcgtcgatgccttgctatccgggtttggggccgcgggtcgccctgcttactcatccacggtacgtatggagttcaggtcagttgaagcccggcatgcggacatgcaactgactgaatcgctgatcggagacgcggtggcgctggaagccagcgcagatcgttgccaccttacgcagcgcagcttccgccagagcatgccaccttggctagtcgccattgtggggcgattgcccccaggccgccggaacaggggatgttgcgtcaacaggcaagagatacgaacggtgggagaggcggagcgaaaaaggcaggctggatggcgcgagaaaagggcagctttgttattcaagatgattggaaaggcacaatga

SEQ ID NO: 534800 - DNA, 855 bp, Stenotrophomonas maltophilia
gtgcgccgggaagttgagcagcagctgccgatcttccagcgatcgtgggtcgccgatctgtaccggcagtatggagagtggctgttggtcaagaacgtgcctacgggcgcgttgccgaagaaagctggaaaggccgcgggatttttcttggcaatcgacggtgatgcccaagctcgccagccactcattgctgccgatcttctccgcatcttcgataccaagacgctccgggcaaacctcaatgccacagagtacgtctgcgaacactacggcctgtccatcgacaagaacgcacgcaatgaagctcgtgacctcgctctcatcgaggatcgcttgtccgctgccgacagcaaaccgtggggtcctttcctgcgcgagtaccgggtgtggctcaccgggaagcagacccgtacggtttcccagtacctaggagttgccgacgcgttctgtgaaagtgcgcaactggaggggccattcagccaagaggaactgctcgcctatctagcgaaggttccgggcgctcgggcaaccatcagtgtctgggtcaccttcgtgcaaaggtgctacgactggcaggtgactatgccgcctcgagcgcccaaggcgccgggcctcaagcggggagcgatgaaactggtggatctgctggcgcgggtcaaggatctgccaaaagcggactacggcgacctggccgccatcctctgtctggtctaccaatttgaacccgcagagctgcgccgggctataaacggggtcacgccggagggggatattgttaccagggatgggcttgttcgggtccaggctgagatgaagggcatcgtgctggaatggtcaaagaggcaaggccggtaa

SEQ ID NO: 534801 - DNA, 468 bp, Stenotrophomonas maltophilia
atgcccatcaaggccgtggtctacgtaagtgaggcaggcccagctttagcgggtgacgttcgggaggcagttgaggagcggctgcaatggctgatcggcgatgcgtcgcggttcaactgcaatgccggcgtaaccggcgtgctgttgttcgatgggggcaggttcctacagtacctggagggcccggatgatggggtcgacgtcgcctattcccgagtggtgggcgcaacgagccattcgggtttggtcgagctccagcggggtcgggttggtcagcgccgactccctttctggtccatgcatcggctatcggtcagtccaaacgaactgagcatcgttgcccatagtgactggacaggcttccgccgacggggtgatgccgaggcggtgaatgctaccgcgatggataggctgactgctctggtgacgcctcacgtcggtggcttagcaccgagtcttaacgattaa

SEQ ID NO: 534802 - DNA, 462 bp, Stenotrophomonas maltophilia
atgaagccgaccatattggcgttggaccttgagggtaccctcatctccaatgcgatcagccagattcccaggcctgggctctacaggttcctggaggacgtatgggagcattttgatcagttggtcatgttcacgactgttccggaagagcgctttcgtaggatcgccttgctactggttcgcgaaggcagcgcgcctgcttggttcgcagaactgcactacgtctgctggtcaggcaagacgaaagacttgcttctagcgtcaccgcggctgggtgatgctctactgcttgatgatcacgcgccctacgtacagcccgggcaagaacacctctggataccaattccgctctttggatctccctacccgtcgaacgacgatggcctcaatgtcgctctccgacgtttgcttgatcgcatcggagatgctggcatcgacttcctagaagatggcagcttgtga

SEQ ID NO: 534803 - DNA, 1734 bp, Stenotrophomonas maltophilia
gtgagaatagtcaagctgtcggttgagaactttagggggctccaagagctggactgggcgccacaacgccagccactgtgttgcttgatcggtcctggcgactctgggaagtccacagttctggatgccatcgaagcggcgctctcttcgcggtggtacacgttcggagaaggggacttcaggggatgtgacacatcccgtccaatcaaaatcgaagtcacgatcgccgagctttccagggcgctactctcagacgaaaagttcggtctctacatacgggggcttgctcctgacggcacattgagggacgagcccgaagatggcgatgaagcgctgctgacggttcgcctgacagtggatgccaccatggagccagtttgggagatcgtcaacgaccgggccccatacccgcggacgatgtccaatcgagaccgcgccctgtttcgcgtggttcgcctgacgggggacgatgctcggcacctgacttggggtcaggggtccatcttgtccaaactcactgagtcaggtgatgaggcggcacaacagttggcggaggcataccgggttgcgaaggcaagtacccggcttcacgagatcgagagcctgatgaaggtggccaccgaagcccaggcacgagcaatcgaagttggagcgatcgtggaggataagtacatcccgggcttggagctgctcaaggggggcttttcctccggcgcaatcgccctccacgacggggcagtgccgctaaggttggccggaaccggaacacgacgcctggccacccttgccattcagcgcgctgcaatcgacgagggcgcgattattctggtcgatgaaatcgagcagggactagagccgcaccgtatcctcggggcaatcgtgcatttgcgacagtcgcaagcggcagcggctgcggcatcgcagccggccggccagattgtaatgaccactcattccgacgtggcgctaagcgagattcccccagagagcctttacgtgtgcaggcgcgaccggggtaacgtgctcaggatcctccatccaaccgatcaagaagcgctgcggaaagtgctaaaacacatgccaagggccttgtttgcccaccggttgctggtatgcgagggcgacacggagttggggctgttgctcggtcttcgggagctcttccctggccgacacggtggtgcatccattgagcaacgtggagcggctatcgtcgacggtgaaggggccaatgctccgcagatggcgaccgccttggcggcactgggatacaagacagcgctatatcgtgactccgacgttcctgtccaaacaaagcagcagaagaagttggagaaggcgggggctcacacgatcacctatccaacagagatggccatcgaagaagcgctgtttgctggagttgccgatgacaagctggtagatgagctcctatgcgaagctgagaagtacaaaggtgaagcgacagtcattgaccagttgaacaaggcctttcctgaagctggtgctcgtggcattggcaactcgtcctttgaggatatggacctgctgttgaatttggagcgggaggaggtcacgcaacggttggggcggttagccaaacagtattcttggttcaagaatcagtacatcgcccgtggattggcccccttggtcgacaaggcgatcgcgcaatcgccaacgtctgagtttgcggttgcgctgaaggaaattgaggagtggctttatgcttga

SEQ ID NO: 534804 - DNA, 1398 bp, Stenotrophomonas maltophilia
atgcttgagccacggagcctgctgggtgcgcgcaggggcagcgtagtagctcctgccggccacggaaagaccgagctcatcgccaagctggcaggcttgggcggcagaaccctgatcctgacgcatacccatgccggtgttcatgcactgcgcgcacgcatgaaccgcctaggaattgatccgcgatccgccgcggtggacaccttagcaagttgggcgtcgcgctatacgtcggcgtttccggctcgtggaaagcctctaggcagaatgcccattggtggtgaatggggacagctttacacaggtgggcgagatgtcctctctatctcgccagtacgggatgttatcgccgcgtcctacgatagagtgctcgtggatgagtaccaagactgcgaccttggacagcatgacttggtcctcgcgttgtccgagcagctgccaacgatcgtgtttggcgatcatatgcagggaattttcggtttccgaggtaaccccagtgtttcctgggagaacgacgtttttcctcagtttccattgctgggcaagctggatgagcccatgcgttggaagaaggcaaacccatatctaggggagtggatcgcacacgtcaggtaccaactggagcatggtcacgttgtagatctgaccacaggaccggcaacctatttgccgtgtgatgacgagtacgatctgtcccctcttttccacgagctgggagaaggacgtgaatctgtagcagcgatacattgtcggcggggagtgtgtgatcagctggccaagctgagcaaagccgcctatcaggcaattgaagacatcgcctgcaaaactctgcaggagttcgccacagcttgggatcagtcgtccaacagcgatcgcgagggcttgcttagcaatcttgtgaagtccgcggtcactacaaagaagctgttggagggagagcaggatacggatcaggatcaggcggccgaacgcctgtatgtctcggcgcgtcaggcgcttggtgcgacaggcgatcctgccgaggcggttagggcgctgtcggcgctccggcttcatagtcgaatcagaacattccgcgcggagctgattcgggatacagcgaaggcgcttgcaggcgttgctgagggtaagcacgccaccctgtcacacagtgctttcgtgatcaggcaacgcgtgagtcacatgggtcggcacctgccaaaacgtactgtgtccacgccattgttgctgaagggtctagagtttgaccgcgtatctatccccgacgcggttcacttcaataacgagaaggatcagggagctcgggcaaagcttttctacgttgcggtatcacgcgctcgctcgtctctggtaatttcatcctccagcccaacggtaggatttccggcaccaagttga

SEQ ID NO: 534805 - DNA, 1140 bp, Stenotrophomonas maltophilia
atgtcctccgcctcagcctccagccccaaagcacagcagatggctacccgcgctgcgttcttcataccaggctttgcggccgcgatatgggccgttcttgtgccctttgcaaaggcgaagacgggcgtagacgacggcctgctgggactgattctgctctgtctcggggctggatccttgaccgcaatgccattggctggggccttggccagccggtttggatacaggcaggtgatgatcggttccaccgctgtcatctgcctcagcctgcctatgctggcaactgcgggaagcccctggctcttgggagcctatctgctgctgtttggggccggcatgggggcgatggactgtgtcatgaacatgcaagcggtcctggttgaacgagaagcaggccgcgccatgatgtccggcttccacgcattcttcagcatcggcggattcataggcgctgtggtcatgacagcgttgctctcggcacacgtcggtccgatcgcagtgtgtcttgctggcagtgtcgcgatggcgctattggcagcggcgtcgattgcgcactggcgcggggagagcccgcatcaggatggaccaatgatcgcctggcctaagggcattgtgctattcctgggcatattggcattcattgtcttcctggccgagggaaccatgctcgactggagcgcagtattccttgcagacgttcgcaaattggctccctcaatggctggtttgggctatggcaccttcgcgctgaccatgaccgcaacccgcctgttcggcgactcagtcgtggaacgattggggcgccgacgctccattgtggtgggtgccttggtggcagcatctggattcatcgtactaacctgggttactccttggcaggcgtcgctggtgggctatgttttgctgggtttgggctgcgcgaacatcgtccccgcactgttctctcttgcgggcaaccagacacgaatgccagagggcatcgctattacggcggtgactacgctgggatactccggcgtccttgcggggcccgcactgattgggctggcggcccatggcatcggattgccaggcgcattcatgggtgtgactgtgctgttggtggccgtcgctctatcgacgcgctggctaaaggcctaa

SEQ ID NO: 534806 - DNA, 990 bp, Stenotrophomonas maltophilia
atgcccgctcgccgacatggcagtagccgcgcgcccgccactctgcgaacggtcgccgagctggtgggcgtttccacgatgacggtctccaatgtgatcaacggcaggggcaaggtgagtccggagacacaggcccgggtgaaggaagcgatcaaggcgaccgggtacgtgcccaatgttgcggcccgacgactggcgggcgccgcgggcgcgcggctagggcttctctatcccgatgtccgctctcccttcctgaccgaggtcctgctggctgcactgtccagtgccaatgcggtgtgcgcccagctgatcgttagagagggacgtgcagccaggcaggaacatgccgaaaagctggtcatggacgcaattgaaggaggggccgaggggctcttgctggtacccccctatgcggaactgttgtctggctccgactacttccaccgcctgcagatgccggcagccgccattgctggcgctgggttactggatggcatgcagaccttccgcatcgataaccgcttggccgcggagcagctgaccacgcatttagcccttttagggcacagacgcatcgcgtttatcaccgggcctatggatcatggggacagccacgagcgtctgctcgggtatcaggacgggatggccgcccatgggctcaatgtcgtcccctccttgatccgcagcggccggttttccttcgagtccggctgtgaggcggcggaggcattgatcgcggaggaacctcggcccacggcggttctggccagtaatgacgacatggcgcttggggtgctttgggtcgcgcaacgggcgggaattggcgtgcccgaagatctatcggtcgtcgctttcgacgatacagcagcatccagaagagcctggccaccgctcacggttgcagcccagccggtgggcgctatgacagatgcggcggtggcggccatcatcagcaatctgctgggtagataccgtgtcgccctcgcctag

SEQ ID NO: 534807 - DNA, 609 bp, Stenotrophomonas maltophilia
atgccatcgatcgggtgcgcccggagggttgagtggcctgctgccgctgggcggccatggtgctgtgcctcacggcagtgctcgggggacagctttggggggcggcgccgcccgtgcctgagcagctcgcgttccagagcatcaccgataatcgcttttcacaactgcgccgccaagcgatgcagttcgtggagtctcggccacgacagggcttccagttcgtggaacggcatcgggatgccgagttccaagttcattgccgaggcatacccgtgctgtggctggagaggcgctcgaaacatctgctgttgcaggtctcactggacgcggagcagcgggcatccgccgttctgcagctgcgggcaatcctccaatggcagttggagccattggatcatctggaacaggtgctggctggtgtgccggagcctgttcttatggatcgggtgctgcagattctcgccggcgaggtccctggtggggtgcgatatggcccgcggtagtcgagcatggctcgactttacagagccgcgggctgcggcggctcaggttcgtggatggagccttcgagcaaggcgacgtaggtgtccaggcggatgcgcatgctga

SEQ ID NO: 534808 - DNA, 309 bp, Stenotrophomonas maltophilia
gtgctggacagattggccgttcagcgcggtttgccgcaagtgatcaggacagacatcggcaaggagttttgcggcaaggcgatggtggcgtgggctcacgagaagggagttgccctgcgcctgatcgagtcgggcaagccgaaccagaacgcttacgttgagtctttcaacgggcgcctacgtgataaatgtctgagcgagcgttggttttcgacgttgttccatgcaaggaccagtagcaaaagctggcggcgtgagtgcaacaacgaagggcctaaacgagcacttggcggactgatgcccgcctag

SEQ ID NO: 534809 - DNA, 2199 bp, Stenotrophomonas maltophilia
atggttaaggaagtcaaaaagaaggggcacttctatacgtcgttcaaagatgccaatccatcattcaccgcagatacctatcgctgtgccgaggagaccgtgtcatcgctactgactacggcaacgtcgtcggatcgtccaggcatgcttctaggcaaggttcagagcggaaagacgcgaaccttcataagcgttcttgcgctagcatttgacaatggcttcgacgtggcaatcgttcttagcaaaaattcgaaagctctaattcaacagacctataagaggctccgaaccgactttggcatgtttgtcgatgaaggagatgtcgacatccatgacatcatgactgcgccgaaggccttcggaaagttcgagctagatgcaaagttaatattcgttgcaaagaagcaggatgacaaccttcgaaggttgatcgagctctttcaggcgcatgctgaaatggcaaagaagcaggtgcttatcattgacgatgaggcagatagtgcatcggtcggctactcaaaaaagggcgagatcacggcagccaataagattgctgcgcaaatcagtcagcttcggacagtaataagaaaatcatcattcctgcaggttacggcgaccccatactcgctttacctgcagcctgctgaggtcgtagtggataacgtactggagttcaaaccgctccgccctgcgttcacaaagctggtccctgtgcctaaagaatacgtagggggagatacctactttggcgagaaatccagaaatgccgatgatacggtagaaagtttgcttcactatcgggttgatcatcgtgagttcgatcgactaaaaaggccggatgcccgctcgctacggcttgagtcggcgctcacgtccaaaagcattgatggattccgtaccgccattatgacgttcattgttggcggagtgattcagatgatcagcggaaaggcggcgggtaagaagaagaagtcacttcgatactcattcttgcttcactccgaggctgccaaagaggctcatgattggcaagagaaggtgacgcgcgcactgctcgaccagatgaagactgccgtgcaggcgcaagatgctgtagttcgagacttggtgcagaggtcatatggcgacttggcccgttcgctaaagctcgacggtaaagtgattcccgccttcaatgacgttttcaatgcagtggttcaagctatatcggacgactatgtgactgtggtaaaggtcaactcagaagaaaatgtcgctgacatgctcgatgatacagggcagctgcggcttcgcagtccattaaatatcttcttgggagggcaggttctggatcgcggcgttacgcttgctaacttgataggcttctattatgggaggcgacccgcgcggtttcagcaagataccgtacttcagcattcgcggatgtatggttatagacgtgatgatctctgcgtaacgcgtttctatacctcgcttccaatcaggctggctatgcagaagatggaggagtttgactcatcccttcgatctgctattgaaacggatggtgacagtgcagtccagttcatccgcaaagcagcaaacggcgcgattgtgccctgtagtcctaacaagattcttgtgtcgaccacgcaaacgcttaggccgctgaagcgaattctcccgattggcttccaaacgggatatcgaacaggcaagggtggaattggcaaggcagtgctttcgattgatcaccttattgagggcattacttcatttgacgcagatcagccagtgttggtgtcacttaattatgtgcaggctatccttaaaaagatcgagccaacacttctgtttgacgatcctgcagatgcgccgccgttcgactgggaggcagcccactcggcacttgtgcacctgagcgctcaacatcccgttgaatcgaagcgcggaaaggtttggctatgggcggccactgggcgcaactccaagcgtttggctggggaaacttcccatgcgaagtacattgaaacacccgactcagagaagaccgaaggtcggctggctaagaagtacgccatcgacagccctatcgtgtttctgctgcggcaggagggaagggcggatcagggctggcgggatgcggcattctattggccagtgatccgggcgcaggtcaatgcaccaaccgctatatttgccacggaggtaatcgattaa

SEQ ID NO: 534810 - DNA, 1572 bp, Stenotrophomonas maltophilia
atggagttctgtatctatctggttgaagatggctgtgccgcgacagatgcagtggtgcccgaagcagggaccccgttgccgatctcaatagccggcgactatggagatctttggatctttcctaaggatccaaccccaccagattgggtcacgacggtatctgcggcttggcccggagccgatcttagtgaagtgctgtcagccaggggcggggctgtcgcagctgtccaagctgctaatcggacatttctattaacgtttgggactggctatttgagagttaacaaggatcgtgtcgcccgagactttggtcgacgaaccgttgtcaactgcgtgaatcaaggccagcttcgatctatatcccgtcaggcgatggaaggcagctacctgcaagcgattgagcagaccccgaagtcagcaaacatcggcgtatatggcatagacgtcgatagggacctcttaaagggattggcaggcgttcccaggaagagggcgttcggcgaattcctcgccggttctgactcgctccggggccgcatcattggcggattagatgagctcctaggagtgttgcgcctatacctgcgggcgtaccgtcagaagaagattctggcagatgacctcaagtggatcgacaggctcaagaaggagactaatgcaagtgtagtgcacgcacttgagcagaagcttgacgcaaaaattcagggtgccagtgtcggtggcgaagtgatgcttctcctgccggagcatctagacctctcatctaccccgagattctccttcgagcaaatcggtaaggttgcggcaccagccatattcaatgatcccagcctcgacgaatgggtgacttggagggcagcccacaaaaaaaagcctgctagctattcagtggcgagagttgaacgcatctatgttcatgttgggggcgtcaacaacaaggtcagctaccccatcgccagatgtatcggatggattactgtgcactccggtgccacgtatgttctgcatgacgcaacttggtacagagtcgatcaggactttgtcaaagacttgtcagtctcactgagaagtatctacagaagtaggagcggagttgcctggccgaaatacacaggcggaagcgagggtgcctacaatgtggatgccgtgaaggctctgtctcccagctcactggagcttttagacaaaagcaacatcatccttccaggcgctcgtacagctgtcgagccctgtgacctattcgacccaagagccaggatgctcgtttacgttaaaaggaaaaaggccggatctgaaggtctcggtcacctgctgatgcaggcccttgttggcgtcgaggcatttatgtcgcacgacgtgactatgcgcaacgccatccatgcaaaactgccgcagccgactattttctcggtggattctcaggttgatccgtccaaatggactgtcgttattctcatctgcggggtaggtgcaaagagggggattcctttcctgacgaacatcgcactaagaagagttgttgcgcagctcaagatgagatatggcctaaaggtgtgcgttgagtacgcttga

SEQ ID NO: 534811 - DNA, 1530 bp, Stenotrophomonas maltophilia
atggcacaagtcatcaacaccaacaccatgtcgctgaacgcccagcgcaacctgggcaccagcggcgccaacctggccaccaccattcagcgcctgtcctcgggcatgcgcatcaacagcgccaaggacgatgccgccggcctggcgatctccgagcgcttcaccacccagatccgcggcgccaaccaagccgcccgcaacgccaacgatggcatctcgctggcccagaccgccgaaggcgcgctgggtgaaatcggcaacaacctgcagcgcgtccgcgagctggccgtgcagtcgcgcagcgccaccaactctgattccgaccggcaggccctgaacgccgaagtgcagctgctgaagcaggaaatccagcgcgtcgccgaacagaccaacttcaacggcaccaacctgctggacggcaccttcaccaaccaggccttccagatcggtgccaaccagggtcagacgatcaacatctcccaggtcaccaacgccaatatcagcaagctgggcaactggacaactgcgtcgaccagcgcatctgtgacgggtgctctgccgacttccgcggcccaggatggcgtagcaagcaagaccacgatcgccaacggtgatttcgccgcccccaccggtacgggtccgtacacctatgccacctcgaccttcaccgtagccggcgtctctctcaacgtcggcagtgtaagcggcaccactgctaccgaggcacaggacaacctcaaggctgcattggcaaccgccatcaatggcaatgacagcctgaaggctgcgggcatctcgatggatggcgcaacgggtgaggtcagcaatctgggggacgccaccactattgcatcttcccttctgaccgctccgaagaccatcgctgtcgcagccaccaaggcgacgcctgcgtttgcagcagttgcgcctggagccctgaagatcaacggagtcgacatcaccgttggtgaggccaagtctgccggcgatcgcgctacctccttggccaacgcgatcaatgcaaagactcacgagaccggcgtcactgcttcgctgatcgaaggcaagctgcagctgacctcgaaggacaaggacttcaagatcgaaagcagcctctccgcagcggacctcagcaaagcaaccggcctggcagcgaccgacaccgcgtctgatactggtgccaatatcgtcaaatttgacaagggcactgcagcagagggctttgcgggcctggacatctcgtctaagggcggcgcagacaacgccatcctggcgatggacgcagccctgaactcgatcaactccgcccgcgctgacctgggtgcaatccagaaccgcttcacctcggtggttgcgaacctgaacacctcgtcggagaacatgtcggctgcccgcagccgcatccgcgacgtggactacgcttcggaaaccgccgagctgacccgcaaccagatcctgcagcaggccggtaccgccatgcttgcccaggccaaccagtccagccagaacgtgctgagcctgctgcgctga

SEQ ID NO: 534812 - DNA, 501 bp, Stenotrophomonas maltophilia
atggattgcggcaggccgatgcaggaagttgaggatccgccagcgacgaacgcctgcatcgtgcccctgcccatcgcattccgtgccgtctctgccttctggctgttcgtatcactcatctggctgctgctggttgctgcgctcatccatgccggattccagccggatcattggcagcggccttacaccgagtccgggacgctgccctaccccatcggctcggtgatcacattcgcgctgatcatcctcgtggaaatgacagtgctgtgcgtggctgtgcagccatggcggttccgccgcctgtggctgcggatgctgctcggcatccttccgtggcttgcctggacggcctattggggcgcgatttccatgcatcaatcacccgtgcgtgccgtgcatatgctctggctgctcggcatgagcgccctcctgctgcttgcactgctcgtggttgtgccggcctcgctttggcctcgcctacgacgttggctcgggaactga

SEQ ID NO: 534813 - DNA, 435 bp, Stenotrophomonas maltophilia
atggaaaataatttggaaaacctgaccattggcgtttttgccaaggcggccggggtcaacgtggagacaatccgcttctatcagcgcaagggcctgttgccggaaccggacaagccttacggcagcatccgccgctatggggaggcggacgtggttcgggtgaaattcgtgaaatcggcacagcggctggggttcagtctggacgagattgccgagctgttgcggctcgacgatggcacccactgcgaggaggccagcagcctggccgaacacaagctcaaggacgtgcgcgagaagatggccgacttggcgcgcatggaaaccgtgctgtctgaactcgtgtgcgcctgccattcgcggcaggggaatgtttcgtgtccgctgattgcgtcgttgcaaggtggaacgagcttggcaggggcttccacagcttag

SEQ ID NO: 534814 - DNA, 618 bp, Stenotrophomonas maltophilia
atgaaagtcgcccgcatctaccttcgcgtcagcaccgacgaacaggacctcagccgccaggccgagatcgagcacagcacgcgggcagctggctactacgtcgccggcgtgtactgcgagaaggcctccggcgcccgcgcggatcggcctgagttgctgcggatgatcgccgacttgcgttccggcgaggtggtggtggccgagaagatcgatcgcatcagccgcttgccgctggcggaagccgagcagctggtcgcctcgatccgcgcccaaggcgcccgtctggctgtacctgggctggtcgatctgaccgatctcgcagcgggtgccgatggcgtggcgaagatcgtgctggagtcggtgcaggaattgctgctgaaactcgccctgcagatggcccgcgacgactacgagacgcgtcgcgagcggcaacgccagggcgtgcagttggccaaggtggccggcaagtacaccgggcgcaaggccgacctcgccacgcaccagcgcatcatcgcgttgcgtggcgccggccacaccatcgaacgcacggccgacctggcgggctgcagcatcagccaggtcaagcggatctgggcgttgcaccgcactgggacctga

SEQ ID NO: 534815 - DNA, 2982 bp, Stenotrophomonas maltophilia
atgcccgtcagttttctgtccaccgagcaacgcgaaaactacgggcgctacacgggcagcccttcaccccatgatctggcccggtacttccacctggatgatgccgatcatgcgctgatcgcacagaagcgcggcaagcacagccggcttggcttcgccgtgcaactcggcaccgtgcgctatctgggtacctttcttgaggatccgttggccgtcccgacgcccgtgctgcacacgctggcgaaacaactgcgcatcgacggactggatggcatccacgactacagtgccagccgccaacgttatcagcatgccatcgagattcgtgtccattacggctacgtcgagatcacccagcgcacgatcggctttcgcctcacgcgctggctgtatgcgctgtgctggaccggcacggatcgtccaagcgtgttgttcgagcgagccgccgcttggttggtgacgcacaaggtgctgctgccgggcgcgaccacgttggagcgttacatcgcccgtctgcgggcgcgggtggaagaacgcctatggcggtcattgggtcgcggtatcggcagcgagcaacaagcgcgactggaaagcctgctggtcgtaccgataggcagccgcaactccgcgcttgaccgattgcgcactggaccattgaccatcagcagtccggctttggtccatgccctgcagcgcctgcgcacggtgcgcgagttgggcatcacgttgccggcgacggcgcgcatcccggccacgcgggtggcggcactggcgcggttcgccggcgccgccaaggccagcgcgatcctgcgcctgccgaacccgcgtcggttggcgacgctggtggcgttcgtgcattgcctggaggccagcgcacaagatgatgcgctggaagtgctggaggcacttctacgcgacctgttcggcaatgccgtcaaggccgatcgcaaggcgcggctacgcacgttgaaggatctcgaccaggccgccgccgtcctggccagcgcgtgtcaggtcgttctcgatgacggactcgccgatgccgagttgcgcgaccgtctgtttgccagaattccccgggccgcgctcacgcaagccatcgagaacgtcaatgcgctgatccggccgtcggacaacgtgtactaccgggaattggacgccaagtacaagacggtgcgccgcttcctgccggccttggtcgagcacatccgtttcggcgccaatgccgccggcgaacccgtggtggccgccttcgcttggctgcgcgccaacctggcgcgcaagaagctgacggaggatgccccgcgcgagatcgtcggcaaggcctggcagcgccacgtcgtgcgcgaggacggcagcctcgatgcccacgcctacaccttctgcgtcctggacgaactgcaaacggcgttgcggcgccgtgacgtgtttgtcgcaccgagctggcgttatgccgatccccgcgccggtctgctcgacggcgccgagtgggaggcgacccggccgatcatctgccgcaccttgggcctgtctgcgggccccgagccgacgttgaacgcattggcagaggaattggaccgcacctatcgcacggtggcggcgcgtctgcctgacaacccggccgttcgctttgatgacgccgaactggtgctcagcccgctggacaaactggaggaaccggcctcgctggtcgcgctgcgggaaaaggtgctcgcactgctgccgcgcctggatctgcccgaactgattctggaaattgcggcccgcaccagattcaccgccgccttcacccacctgtccgagcgcacggcccgcgcagccgacttgcacatcagcgtgtgcgcggtactgatggcggaggcctgcaacaccggactggagccgttgattcgtggcgacgtaccggccctgaagcgggatcggctgtcgtgggtggatcagaactacatccgcgacgacacgctgacggccgccaatgtgatgctggtggcggcgcaaagccgcctggcactggccaacctgtggggcggcggtgaagtggcttcagccgacggcatgcgcttcgtagttccagtgcgcaccgtgcacgccggaccgaacccgaaatacttcgggctgggccgcggcgtcacttggtacaacctgctgtcggatcagttctccggcctgaacgacatcacggtaccggggacactgcgcgatagcctggtgctgctggccgtggtgctcgaacagcaaacagatctgcagccgacgcagatcatgaccgacaccggcgcctacagtgatgtggtcttcggtctgttccgcttgctcggctatcgcttcagcccacgcctggccgacatgggcggcacccgattctggcgaatcgatccccgcgccgattacggcgcgctcaatgccatcgcgacccatcaactcagcctgcagaagatcgcgccgcattgggatgacatgctgcgcctggccggctcgctcaagctcggccgggtgcccgctaccggcatcatgcgcacgctccaggtcggcgatcggccgacgcggctcgcgcaggcgatcgccgagttcggtcgcatcgacaagacgctacacacgctgacctacatcgacgacgaagccaagcgccgtggcacgttgagtcaactcaaccgcggcgaaggccggcatagcgtcgcccgcgccgtcttccacggaaaacgcggcgaactgcgccagcactaccgcgaaggccaggaggaccagcttggcgcgctcgggctggtgctcaacatgatcgtgctctggaacaccgtctacatggaggccgccctcgaccggttgcgccaagacggctacccggtccagaacgaagatgtcgcccggctttcgccgttgctgcacgaacacatcaacatgctcgggcggtactcgttctcggtaccggaagcggtggccaagggcgaattgcgaccgctacgcgacccggccgacgaggcatag

SEQ ID NO: 534816 - DNA, 1701 bp, Stenotrophomonas maltophilia
atgaccggagccatcgcgctgcgcatcgagggcatgacctgcgggtcgtgcgcggagcacatccggcaggcgctggagaaggtgcccggggtgcggttggcccgggtgtcctatccacagcggcgggccgaggtcgagacctatgcggccgctggcctggagacggcgtcgttggtcgcggccatcgccggactcggttaccaggcgcaagcggcggacgcgcaggatgcgcctcgtggcctgtccgaccgagcgcgggactggttgagcgatgaaacgaagccggctcgtgcgggcgccgggccggcgctccacgtggccgtgatcggcagcggcggcgcggccatggcggcagccttgaaggccgtcgaacaaggagcacgcgtcacgctgatcgagcggggcaccctcggcggcacctgcgtcaatgtcggctgcgtgccgtccaagatcatgatccgcgccgcgcacatcgcgcatctgcggcgggaaagtccgttcgatggcggtattgccgccgccgcgccggcgatcctgcgcgagcgtttgctggcgcagcagcaggcgcgcgtcgatgaactgcgccaggccaagtacgaggggattctggacagcaccccggccattaccgtgctgcgcggcgaagcccgcttccaggacaggcacaccctgaaggtacaactcggcgacggtgccgagcgcgtggtcgcgttcgaccgctgcctgatcgccaccggcgcgagtcccgcgcttccaccgatccccggcttgcaagacaccccctactggacctcgaccgaagcactggccagcgacacgatcccgccgcgcctggcggtcatcggctcgtcggtggtcgcggtcgagttggcgcaggcctttgcccggctgggcagccgggtcacgatcctggcgcgcagtacgctgttcttccgcgaagaccctgccatcggcgaagccgtgacggctacgttccgcgcggagggcatcgaggtactggagcatacccaggcgagccaggtcgtctacaccgagggcgcgttcgtgctgaccacggcacacggcgagttgcgcgccgaccggttgctggtcgccaccggccgcaccccgaatacccgcggcctgaatctcgaagcggcaggcgtcgagctcaatgggcaaggagccatcatcatcgaccgcgcgatgcgtacctctgcgcctcacctctacgccgccggcgactgcaccgaccagccgcagttcgtgtacgttgccgcggcggccgggacccgcgccgcgatcaacatgaccggcggcgatgcggcgctggacctgacggccatgccggccgtggtgttcaccgacccgcaggtggccaccgtgggctacagcgaggcggaagcgtaccaagtggggatcgagaccgtcagtcgcacgctcacgctcgataatgtgccgcgagcactggtcaacttcgacacgcgcggcttcatcaagctggtcgccgaagccgattccggccggctgatcggtgtgcaggcggtggcaccggaagcgggtgaactgatccagaccgccgccctggccattcaggcgcggatgaccgtgcaggaactggccgatcagctattcccctatctgaccatggtcgagggcctgaagctcgcggcgcagaccttcaccaaggatgtgaagcaactctcctgctgcgcggggtag

SEQ ID NO: 534817 - DNA, 279 bp, Stenotrophomonas maltophilia
atgaagaaactcgttgccctgctcggtctcaccctggccctgagcgctccggcgtgggcggccacccgaaccgtcacgctgtcggtgccgggcatgacctgcgccacctgtccgatcaccgtcaagaaggcgctgtccaaggtggaaggcgtcatcgcggccaaggtgacgtgggagcccaaggaggcggtggtgacctacgacgacaccaagaccacgccggccgcgctgacccaggcgaccgggaacgcgggctacccctccaccatcaaggagtga

SEQ ID NO: 534818 - DNA, 351 bp, Stenotrophomonas maltophilia
atggcagaaccccgcaacggtcgcggtgcgctagcggccggcggcctcgccgccatcctcgcctccacctgctgtctcggccccctggtgctgatcacgctgggcttttccggcgcctggatcggcaacctgaccgcattggagccgtaccggccgattttcatcggcgcggcactggtcgcgctgttcttcgcctggcgccgcatcttccgtccggcccgcgcctgcgagccggacgaggcgtgcgccgtcccccgagtgaggacgacctacaaagtgctcttctggatcgtcgccgccctggtggtgatcgcgctcgtgtttccgtatctcgcgcccctgttctactga

SEQ ID NO: 534819 - DNA, 417 bp, Stenotrophomonas maltophilia
atggtgaacacaccggaaaccctgaccatcggggccttcgccaaggccgccggggtcaacgtggagaccatccggttctatcagcgcaagggcctgctgccggagccggatcgccccatcggcggcgtacgtcgctacgggccggcggacgtggaccgggtgaagttcgtgaagtccgcccagcgcctggggttcaacctggatgaggtcgcgcaattgctccaactggaagacggcacccattgtcatgaagccgcggacctcgcggccgcacgcctgacggacgtgcgggcgcgactgacggatctgcagcgcatggaatcggcgctgtcccaactggtgaaggcttgcggcacgcacagcggcaaggtgtcgtgcccgctgattgcttccttgcatagcgatcaaagcgcttag

SEQ ID NO: 534820 - DNA, 273 bp, Stenotrophomonas maltophilia
atgtcgcacatccacgagaatccaaagaagctcttgacccgcgtccgtcgcattggcggtcaggtctctgcgctggagaagagtctggagggcggagcagattgtgtggatgtcttgactcagatcgctgcggtacgtggggccatgcacggcctcatgctggaggtgctcaatgctcatctcagggctcatgtggccgacgagccagaacaatccgcccgtaccgaagaggtcgaggctgtggcacgactgatgaagtcgtacttcaagtag

SEQ ID NO: 534821 - DNA, 963 bp, Stenotrophomonas maltophilia
atgcacgaaccccttaacctagtcgccccggccccggtcccggcccacacccaccagttcgggtcgcggaaccccttggccgaactgaacacccgtcgagcattctggttgactgccgtcatgatgatcgtggagatcattggaggctggtggtacaattcgatggcagtcttggcggatggctggcacatgagctcacatgccgtggcccttggtctctccgcatttgcctacgccttcgcgcgcaagcatgcgggcaacccgcgctttgcattcggcacctggaaggtagaagtcctcggcggctacaccagtgccatcttgctgctgttcgtcgcaggcatcatggccttcgagtcggtaaatcgactgttgtcacctaccgagatccactacaaccaagctattgtcatcgccttcgttggcctggccgtcaacctgatctgtgcctggctgctccgcgacaaccacgaccatgatcacggccatggccacgcacatgctgggcacgatgaccaggagcatggcgggcacgcgcacgatctaaatctacgctcggcctatatacacgtcatggcggatgcggcaacctcggtactggcgatcgtcgccctgttcggcggaaagatatggggcgcagcctggctggaccctgtgatgggcattgctggtgctgtcctagtcaccgtctgggccattgggctgctgcgagatacgagcaaggtactcctggatgcggagatggatgccgcggtggttcaggaggtccgtgaggtcattgccgagtcgggtgttgcggctcgcattgaggacatccacgtctggcgcgtcggtcgcaaccactacgcctgcattcttgccctggtgacccaagaggcagtgtctgctgactacttcagggatgccctccgcatccacgaagaactggtccacgttacgattgaagtcaggcgtgaacaatga

SEQ ID NO: 534822 - DNA, 1050 bp, Stenotrophomonas maltophilia
atggctcggtctggcttgtacaaaagcgatgtgcagcgcgctcgggacagcctccgagccgaaggaaagaacccatcggtggatgccgtacgcgtcgcgctaggcaacaccgggtccaaaacgaccatccaccgctacctgaaggagctggaagaagaggacgggcaaggcttaggcgccaagatcgcgatcagcgacgtcctgcaggatttggtagttcgcctggccgaacggctgcatgccgaggccgaaacgctggtcgcccaggagcaggagaggttccaagccgagctgcacgagcgcacccaagccctggaacaagcccggcaagaggccggcaacctcagtgcgcagcttcagcgcaccgagaccctgctacagacagagcgcgaggcgggcgaagtcgccaggggcgacttggccagccgtatcaccgaactagcacagctggaggagcgcattgcgggcctcacagcgcggttgacggagcacgaaagtcacgcgcgctccctagagcagaagcacgagcatgcgagggaggcccttgagcactaccgcacttcggtcaaagaccagcgcgagcaagagcaacgccggcacgagcaccaggtgcaggaactgcaggtcgctctgcgccaagccaatgaagcgttgacctccaaaaaccacgacctggtgcagctcaaccgggaaaacggccagtggcttgcccgccacacccggctggaaagcgagttggtgcagacgcgccaggccgcccacgctcagcagtgcgagctcgatgctctgcgactgaccgcggcagagctgcacggcctgcaggcgcgctgggggcaagatgtccaaacactggatgccgtccgagttgaacttgtccaagcccgggccgatctggctcaagagcgggatcgacgcgaacgagccgagacggaattcttgcgagcatcggtgcgtctgagcacgctggagccccttttggcgcacctacattccgtgaccacggaagtcccggcgacgaagacgatctcgcctaagaagatgccgcggtaa

SEQ ID NO: 534823 - DNA, 963 bp, Stenotrophomonas maltophilia
atgcgctgggctttggattgcccaacatcggagagggtcagtaggtggcggctgaggttgccgaccgccaaagtatcctcatccagcagtgccatccgggtcatccccattcggagcaagttttcggcaacagccgcaccaagggtgcccacccccaaaacgaggatggattttgagcgaactgcctgctctgcctggccacgcttacgcagctggtccggtgcccagtttgcggtgcgtcgccacttcaggggcctgtcagcacctgccgcttctcgatcccattgcgctcgggcagccaacgttgcccggaaaccatttcggacctcgtacctgccgcacaactgcatgtttcgcactgccaaccagtgtagacgctgcagtggcccaccgacgagttcggataacgggaagccgagcaatagagtgacgggcatcgggcgcttggggcgttgcgtacgccgcagtaccgcgccggcctcggcgaggatggaaggaagatcaagcccggcgtgcgcgcacagctgggcgagctggccccacgtcgtgggagcttgccaaggctctaccaagatcaaggaaggcaatccgatccagactgcgtctggcaccagatcgcgatggacgatcgcctcggaccacgaagtctcccgtagggaccgcaagcgctggtccatgaagcggctgacaacggcggtatcgaacgctcccgggaccggcgtgagcgtggcaaagccccaagggtgcgacaggctgtcaagccacttcaattcgtgggcggattcggaaaaccccagcatcgtcctcggcggcgtcgcgaactgcgtaggcagctccagcgcatcgcctgcgatcagcaaggtatcctgcccggctgcttggatccactccaacaaccgaccgacatgccaacgcagccgcagcgacagctcctcgggctcccctgcccatccagctcgctga

SEQ ID NO: 534824 - DNA, 399 bp, Stenotrophomonas maltophilia
atgtgggccgagttcgacgcaggttggcgtcgcttcggcggttcgcttcttgtcgcaatctttatggtccttcagacgatcttcgtgatcatgctgctgagatacttaggagctgacttcctggagggtcgaagtaatccgccattctggatcatgcttgtctcggcgtttgcgctggcttggttcatctccggatcaggcgccaagaatggcgaatctctagctgtcgggcatgacggaaagtgggcaactattcttgcgatctaccttataccaggggtgggcttggcgctgactcttctctggaagcagtacataccatttgcaatcttgcacgcggtgattatcggattcctctatttttcgtatgggaagtatgttgtacggcgactcggttga

SEQ ID NO: 534825 - DNA, 1476 bp, Stenotrophomonas maltophilia
atgtcactaggaaaagagctagaccccatagtctcggaatcagaaccatgggacagagatcctctatctcgggaagccgagggcaggattcttgccaacctgatctctggcctcggcgattccccatttgtcatttctctaaagggcgggtggggaacgggaaagtctgttttccttaaaagactaggctaccacctggaacggttccacaagattcccgttgtgcgaattgacgcgtggcaaagtgactacctcgacgatcctctacttgccatgaccagcgcgcttacggatcgactggcgtctaccgagaaccgagtctctaccgtcgttgactcagtcattacagggctggctggatccgcaggcaaaattgcgctcccggtgctgtctgcgatagcgggcctggcgatgcctggcggctcacaagtagtccagctagcctcaaatcttccagacctcgcgaataattttttggagtgggataaatcaagaaaaacagccgaggaaaaatttaggtcaagcctctccgaagctcgtgaaaaattaaaggcctcgttagaatcagacgacgaatcaccaatagtgataattgtcgatgagctagacagatgccgccctgattttgccattaaatttctggagagagtaaagcatttcttcaacgtacctggaatctgcttccttatcgccacagaccatcaaaacttgccgcaggcggtcaagacagtctatggcgaccaggtcgatggagagctttacctgaggaagttctttgacttcgaattcaatcttcctagacctagcctcaaggaccacgcctatcagattttccaaagttttcccggcaccgacccagccagggatgcctcggctattcgcaaaaggctgttggagcttcgcgatccagagggttacgaacagttttacgacaacacccccgaggagctggagcgcgccgagtacagcatctactttggacatatcgcatctcactttgaaatgcagcttcgtgactccctgcaggcccacacgctgctaatggctttcgtcagaagcttcccgaaaagctctgttcgatttccgtttgtcgactgctacatatcgtgtttgcggtttgctgcgcctggcgaatacatgaagctaatttctaacaccggccctggattacccgacatcctcagggccagtaacaaggcgtcccttagtacgatcggtgccttaaacgcatttctcggcatcaaaccagataccgacgccgaagaattcaaggccgcaacccggagatggatgaacaacaattcggcaacccgaggtatcggcttccttgcctacgcatccttgttcgttcgtggactagaacacgaagcaaggggcacatatccgcgcctcacattcaacgcagacgactaccttggcagcgttctgcgactgaccgctgccttcacagacaccgagaaacccgagggagagtga

SEQ ID NO: 534826 - DNA, 198 bp, Stenotrophomonas maltophilia
atgtccaacacagctcagtgccgacacgcactcattgaggccaccgcctcactccgtctggaaggcctccccatttcacagcgtgatgacgacctctacgcagcggccattgatggacagcgcgttgggaagttgcgcgatctggtattgatgcgtatacgcgccgaattggtatccaagacagggcctgctccctga

SEQ ID NO: 534827 - DNA, 189 bp, Stenotrophomonas maltophilia
atgagtaaccaattcaagtccgtggaagaggagtgcggtccagcgggcgaagaagaggaatgtgcgatgtgcggtggaaccggcggctggcctcgcctcggcgagtgggagatgtgcaagccgtgcaacggtagcgggaacaaccctgcgcatcgatccgggcatggcgagcgcaaggaactacactga

SEQ ID NO: 534828 - DNA, 1290 bp, Stenotrophomonas maltophilia
atgggcctggggacagggctggtggagtcagccgagcattatgttgcgaggcttgcatggacagtgggggtgactgttcgggccctgtgtccccctattcgctccgcaggaggaatcctgcagcgcgcccaggccatgggagccagcgggttctgcggccctggaaggcaattcaagcgtcgagtcgagcaccttgagcggttagctggcgtcgaacacatacggcacggcacgttctgggttgtcgatgacctgttggcggtgaccggcgtggggcgcgacaccaagcggcaacgttggtgcccacaatgcttcttggagtgggatgaagaacactcctacgagcccctaatttggatggttgatgtgcaacagagctgcccggtccaccgttgcgctttggaagcagcttgtcgggcctgcagttccttccagccgactgggcgagactatcgacggcgccgccattgctaccgctgtggtcaaggcttagcggggctaggaaagttggctgctctacctagtcaccacatatgggccgaacatgcgcttgccggattgatcgcgctttgcgcgactccaggacagccgcaaataccgtacgagcagtacgagcgcttcgtacgcggtctcattgagataagtcttgaccaaccgaaccagccggctacgcttcgcgcggcgatggcacgcttgcgctccaatgctatacgtggacgggtcactcttagaacgctagtgaatctatccgcgctgcaggggatcacgattccgcagatgctacttgatcctgtcgcagctgcttcgcgtcccctgattgacctgtggtcagggtatcaggctctggagttccctggcgggaggcatggcaccaaggtcgtggcgtttaggcagtgcatacgcgagatactgagcaaatgcggagagcggtacgtgcctccgatgagattcgtcttaaggagcatgaagatcaacagagattttgcccgcgagatgtgcgtagacgtctacgaagactacgaggccgcgtaccaacgtcagggggggtatcaatcacgactgcatcgagatcgcgcctttgtactcgccttgcgtatgattgggcagaacaatcagagccctttcgcaccctgcgacgcccgaaaagttgccagacatgccgcgaaagccgcgcgggtgtcgttggcagacgcagaggcagcaactaggtcggctattcacagttcgcgggccctggaacgagcaaaaggcgcgatgctgtgctcgaccaaagattactcgagtagttga

SEQ ID NO: 534829 - DNA, 1368 bp, Stenotrophomonas maltophilia
atgatgaaccacgtctacgcaaagtccaacgcgcacgggagcttcagccgctcttcagttgggctagccctgctggtcgcgttcttcgtcggcgcacacctcagattgtccatctatagcggcggcagcgtactggtccctcagttcatctgcctgacggccggcgctgtgcttgtagctctatatcacagggcgcttcttaagacgctgccgctgatgcttctgcttgctgcggcattggtgcttgctcccattctgaactatccacttctctccacctccgcagtatttgagacgtacaagggcagcattcagttactggtgtctatgacgctaatgctcgccgttgtcacactgataaccaccgttgcgccagagcgacttgccagaatttccacgcgtttgtggcttctttttatgctgcttgcacttcttgaattcattgccttgcgcgaagtattcgagatcatcagtcaggctatctattccgcatctggccgtagcgtgtacaacggcatcgagcgggatcagttcttgtatggccagatccgacccaaagtcatggccaccgaaccctcgtttctcgccaccactttgctctgcctatctaccatggcgaccctcagtatgcgctcggcgggcaaaccccacgcggtgaggaacggcctgctcatgctggcggcaacctaccttgtctgccccagcatgatcatcgtgttcttcatggccgccatcgcaacgtggatgtactggccacggacaaagaaagggcgtgcacttgtcctgttccttctgggtggcgcgttggtttcgacgctgatcgcgcagtcgtacatgacccagttggccgccctcagcaagctagtgcttggtgatcacggcgccaccggcagcttctttggacgcatcgccgtgggaccaagcgtcggcatcgatgttctggagcgctatccgttgctgggcgtaggagtcggtaatgcagaggctgcgcgcccgatcatcgacaacaactggctcaacaagggggctttcgccctgttcccttggttcgcagacccgacactgcgggctaatgatctgatgtcgaacggattctggtggcagtggatctatatgggggcagttggtggtctgctattcatggcgctgaccaaggcattgctgcgcacgataggggtggtcctaccgttccgggcgatcgtgtgtgcgtggattgtctggtacgccggtgcggcgttcgtcgatccgatctcctggttcacactggccatattctgtattccacctcgctcggataccgaacctgccccccctatcttggacattgatggcgccgcagtggcacctggagccatgcatgcgcgctag

SEQ ID NO: 534830 - DNA, 858 bp, Stenotrophomonas maltophilia
atgcgcgctagttcccgcactccacgtgcccagttgggcctcggatgcagccgactcgggtcggtcaatggagtagccggtccggatgcagccagcctgctttcggccgcgctcgacgaaggctatcggttcttcgacacctccaacatctatggccagggcgatagcgagcgactgataggcaacgttatcggtaaccgcagtgactgtgtggtgtgcaccaaggggggcaagtacttgcccttccccaaacgcattctggtgccggtaaaaggcctgatccggcttgtcgcgcgacgatccaacacggcacgaaacggcgtcagcagtctgcgtagtcagccgcttcccacgcggtgggacactgacttcatttccgcggcaatcgacggcagtctgcgtcgattgcggcgtgacgcaatcgacatttacctgttgcacagcccacacgaaagcgcactaagcgatggagaagccattcgggcgctgcacaaggcccaaagagcaggcaaagttcatgttgttggcgtatccgtcgatgacgtcggcacggccatggcggcactaagggatccacgggtaggcgccttgcagctcccgctccatccgggcgtccgtgactacgatcaggtgctggagcaggctttccaacagggcgtgaagatcattgctcgtgaagttctaggtgggcagagcgcgatagccgtcgcgcagagtccctcggcatacgcaacggcacgcatccgggaactgcaggatgatcctcgtatcgccacggtcttggtaggcactaccaagatctccaatatgaaggtcgctgcgcgggccgctggcttgaccgccggcacgtctgcctga

SEQ ID NO: 534831 - DNA, 888 bp, Stenotrophomonas maltophilia
atgcgggcggcgctgctgatgctcggcagcacgatggcattcggcctgatggcggtggcgatccgctatgccacgcgctacgtgcccacccaggaagtggcgttcttccgcaacgccttcggcctgctggcgttgctgccgatgctgctgcggccaggccacgcgccgctgaaaacccagcagctgccgcgctacttcgtgcgcagtgcgatcggcctgggttcgatgctgtgcgccttctgggcactgggccacctgccgttggcgcaggcggtgtcgctctcctactccacaccgctgttcgtcaccatcgccgccgtgctgtggctgggcgagaccgttcgcgtgcgccgctgggcggcggtggttgtcggcttcatcggcgtgctggtgatcgtgcgtcccggcaccgccggttttactgcgggcagcctggtggcggtgggtgcggccgtgctcagttcgctggtggcgatccagatcaagcagctcacccgcatcgacagtgccgataccgtagtgctctacacctacgtgttctgggtgccattgtcgttggtgccggccgtgttcgtgtgggtctggcccaccggcatggcgtggctgtggctgctggccaccggcgtgctgggcaccatcggccagctgctgtggacgcgtgcgctgcgcctgggcgaagtctcggcactgaccccgatcagcttcctgcaactgccactggtgacgctgttcggctggctgctgttcaacgaaacggtggaccgctggaccatcatcggtgccggcatcatcctcgccgccaacgcctacatcgcccatcgcgaggccgtgctgtcgcgccgcgccgcgagcgcggccgcctctgcagcggccaagcccgccgagtag

SEQ ID NO: 534832 - DNA, 288 bp, Stenotrophomonas maltophilia
gtggagcacgccgccgagcttagaaagcgcggagccaccgcgagagaacttcggaaggcacacgaagaagacctgtcgggaaagctcgatgatatcttggctgcgacggcctatctgccgttagacgaccttcaggacttggtggtggaactgggagaggacttgagcccatcggtccgcaactgggcacttgccctggctccggccaaggatgctgacgaggtttccgtcatcgacgttctcaagcagatgctcctgcgcatggacgtgctgtcgaagaataaataa

SEQ ID NO: 534833 - DNA, 588 bp, Stenotrophomonas maltophilia
atgaagcttctgcacatcgacgccagcgtgcttggcgacaactccgtctcccgccacctgaccgccgccgtggtggcccagttcacgcagcagatcgacggcctgcaggttgattatcgcgatcttgacgccaatccggtaccgcatctgcgcagcggatcgcttgccaaaaccgacgctgccgaagccgccgatgctgaacaggtactcgagcagttcctggcggccgacatcgtggtgatcggcgcgccgatgtacaacttcagcattccgtccaccctgaaggcctggatcgaccgcgtggccgtggccgggcgcaccttcaagtacaccgagaacggtccggtcggcctggccggtggcaagcgggtgatcatcgccagcagccgtggcggcatctacaccgattcgcccgcggacttccaggagcccttcctgcgccagacgtttgccttctggggcatcaacgatgtcgagttcgtacgcgccgaaggcatcgcctactcgccgcagcaccgcgaagacgccattgctggcgcactggcagcgctgccgtcgcacgaagcggccgcggccgctgctgcataa

SEQ ID NO: 534834 - DNA, 993 bp, Stenotrophomonas maltophilia
atgcatgacctgaatgatctgtactacttcgcgatggtggtcgaccatggcggattcgccgccgccgagcgcgcactgggtatccccaagtcgcgcctgagccgccgcatcagccagctggaaaccgacctgggcgttcgcctgctgcagcgctccacgcgtcgtttcgccgtcaccgatgtcggcaccagcgtgcaccgccacgcgcagacgatgctggccgaggcacaggccgcacgcgaagtggtggaccgcctcagcgcggaaccgcgcggcgtggtgcgcgccagcgtgccggtatcgctggcgcagatgcagctgcccaagctgctgcccaagttccttgagcagtacccgaaggtgcgcctgcagttgaacatcagcaaccgccgcgtggacatcatcaatgaaggctacgacgtggccctgcgcgtgcgctcgcgcctggacgacgatggcagcctggtgatgcgcagcttcggacaggtgcaggaactgctggtggccagcccgaagtacctggatcgcgccggccggccgaaggatcctgaagagctgacccagcacgtcaccctcagcatcagcgaagacgaagcccgccagcgctgggagctgcacggcccggaaggcgaagtgcgccgggtcgacctgcagccgcgcgtggccggtttcgacttcccgctgctgcagagcatggtgaaggacggtttcggcatcaccatgctgccggaaaccgtgtgcgccgatgcggtgcgcaacggcgaactggaagtggtgctgccggactggtcgctgccgcagggcgtgtgccatgccgtgtttgcctcgcgccgcggcctgctgccggcggtgcgcgtgttcatcgacttcctggccgagcacctgccgccgcagctggaggcctcgcgcctggattgcggtggcgcctgtgaaaaggccaaggagcggatcaaggccagtgctctcggcgcgctggcggtggatgcgggctga

SEQ ID NO: 534835 - DNA, 1074 bp, Stenotrophomonas maltophilia
atggcccacctcgatctggccaacctgcgcaccaccctgctggacgacacccagctggccgcagtggccctgcaccgcacgttcgccgggcacctgccggttagcagtgggcatgtggtggtctgcgatccgctggtccaggccgaggcgcccgcgctggccgactacaccgccccgctgggtcggcatccggtcgagatcatcgtgcacagcggccgcccggccctggccgtggcctggttcaagccccgcgaagccctcactgcgtctgccctgcactggcagatggcacgctggaccacgcaggacctgaccggcctggatgaggacagtttcattggctatccggtcgacgccggcatcggctgcttcatggataccaacactcagcaggcactgctggccctgatcgaacagaccgatggcgacgaagacagcgaatggtcggatgcgctgatcgaccatgacggcctggatgaaggcgccgaataccgcccctggggcgaggactctccacacggcctggtcgtattcaccagcggctggggcgacggcgtctatcccagctactgggcgctggatacctccggcattccggtcgccctggtcaccgacttcctgtgcatccagggcggtgatgggcgcgacgagcgcgagatcgccgaccaggcctatcgcgacagtcttccacccgaagaagctgaagcgctggcacggctggttgtcgccgtggaccgcgacgacccggatgcgctgcgagagctgttgaaggatgcgccacaacgcgccaaccagatcgaacccggttgcggcggcaccgccctgttcgaggcgatccgtctggaccgtccgcaggcattgcgcgtgctgctgcagggcggcgcgttgccggcgatgccggagcgcctgcacatgagcaaagtgaccagctacctggactatgcgcgcttcctgaagaagccgcgcagcgtggagctgatggcagtactggaagcgccggtggtggctatcacccccacgccgatgccggcacctcaacgcagtttctgggaccggctgttcgggcggaagtga

SEQ ID NO: 534836 - DNA, 1323 bp, Stenotrophomonas maltophilia
atgaccaagaagggactcacggttgaggatgttctgcgcagcgtcgcggagaacggctcccggcgttatgaaattgacttgccgggcttccgtcttcggaccacggatgcggccgaccatgctcgagcaatggaggcgctggaagaaatcggcaagttccacttccgtgatacgggtgcagttccggcggcggctgggccaaacccgttggaatcagcggcggcgcagcccctgccatctgagaccatcagcctgatcgatgcgaagcgaatctggcaggataaagtcgccgccgaggacatcgaggtcaaaacggtcggcatcaaactgcttcccgtgacagagctgatcgagttcttgggcgccgagcgcgagctgcacaccatcacgcggcctgagatggcccgcttctacgaccatttggccaagcgcgggttaacgcgttctacgctcaacaatcgccagagctacctcgcaggaaagagaggattcttcacttgggcaatggcttcaggctacgtgctcaagggagacaatgtcgccgcaggtcacgtcagcgtttcgatggcggagaagcgcaagcgcagaaaatttggcttccaggcctttaccttggatcaggttcatcaactcttcgcgcctgatagcttcaagcagctttcaacgggagcgcgctgggcggctttgttgggcctgtatacgggcgcccgggcaggtgaggtggggcagctgtttaccctggacgtcaaggaagaggagggaatcccgtgcatacggtttaccgatgagggggaggatcagcgattgaagaccgatgtttccaatcgggtcgtcccgttgcatcccgacctgatcaagcttggtttcttggactacgtcgccgaacgaagggagagcggggactggcgattgtttccgcaggctgacagtaaggcgaagaatggtgcggggaactggatatcgaaggcgttcagctactacctccaaaagcacagtggtgggtggtcgaaagcgaaacgtggtttccatagtctccgaaagaccgtgattcaggagatgcagggcagcggtgtggcctctgagatgcgagcccaaatcgtcggccacgaattggacgacgaacaccacgcgacttacagcaggccctttacggtgagtgagaagctcaacggtgccggaggaacgccagctttgggtgtcctagattacggaatcgacctggaggcgctgcgcaccctgccggcgcgcaaggtcgggcggcgaagcagcaatgctgccgcgcgctcttcaaaggtcggccgtaaggggagcgagccgaactaa

SEQ ID NO: 534837 - DNA, 732 bp, Stenotrophomonas maltophilia
atggcccttactgctgctgatgcttaccgccgcgccatcgatcgctttctcggcaagctctctggcaccgaaaacgtgggccagatggagaagaagatcgcagaccatttgcgcctagcgaaacagcggcccaaggtggacgtggcgttgagcttcaatgaggccgctggggtgttggcgatcagcacggcccaattgcaacacctcttgaaggaacactccccaaaagggacgctgttcacggtgaagggaactcgcaagcgctcgaccacccttgttccgttgatggcctgggcagccgagctcaaggctaagggcctgtggaagccgttgagcgaacggggcgttgcgatcgacaccctcctaactgcagaactgccgtttctggtggccaaagggtccaaggctaagcagttcttcctggagccactgactgaccaacccatcagcgatgcgttaattcgccagctccaagcattgggcgtgcaaatagggcttgggattcgggtctgcacgctgaccgaggccttcgcccagccttggcaaaaccctgacgtcaagcgccagtgggtggacgcattcaacaacgcagcccaagcccaggccagccgtctgcgggacctggctcagcagctcgacgcctcgcgagctggggtgatcgaacaagcgctgcacgaacgcctgcagccggcgcctccaaagatgcccgacaagcgcaatgggcgaatgtaa

SEQ ID NO: 534838 - DNA, 354 bp, Stenotrophomonas maltophilia; identical to SEQ ID NO: 497549

SEQ ID NO: 534839 - DNA, 657 bp, Stenotrophomonas maltophilia; identical to SEQ ID NO: 497550

SEQ ID NO: 534840 - DNA, 252 bp, Stenotrophomonas maltophilia; identical to SEQ ID NO: 497551

SEQ ID NO: 534841 - DNA, 264 bp, Stenotrophomonas maltophilia; identical to SEQ ID NO: 497552

SEQ ID NO: 534842 - DNA, 1419 bp, Stenotrophomonas maltophilia
atgtcgtctgacaatctggttatcgacatcgagaatgtcagcaaggtcttcaatattttcgacaagccgtcggatcgcctgctgcagatgctgctgccccggcttggccgtgtgctgcctggcaaaggggaatggtcctctcgtcagcgcgggcgcgaattctgggcgctgcgcgacgtcagtctgaaggtgaagcgaggtgacgcggtgggcatcatcggacgcaatggttcaggcaagtcgaccctgctgcagatcatcgccggcacgctggcccccaccaccggctcggcgcaggtcaatggtcgtatcgccgcgttgctggagctgggcagcggcttcaatccagacttcaccgggcgtgagaacgtcgttctcaatggcatgatcctgggcctgaccgagcgcgaggtgatgcagcgtttcgatgccatcgccgccttcgccgacatcggcaacttcatcgaccagccggtgcggacctactccagcggcatgatgctgcgactggcgtttgcagtgcagactcaggtggagcccgacatcctgattgtcgatgaggccttggcggtgggtgatgcgctgttccagaagcgctgtttccagcagatggaggcgctgcgtgcaaacggctgcacgctgctgctggtgtcgcacgatcaggagtcgatccgtacgctcacggaccatgccatcctgcttcgtgacggcaccgtgcgcgtggccggcccgtcttcggaggtcgtgttggagtaccgcaagcagctgcacgacgatgagcgcgattactacgcatccatcagtgcccagcacctgcagcacgccaggcaaaccatcgaggcacagtcggatgccgacccggtggccgagcctgccgagcacggcggttcgcctgtgctaggggtgcgcagtgacaagctgtccttcggtgacttcgactgcgtggtggaacatgtgcgggtgctggacaccgacggcaacgaatgtgcgtacttccttccgcgcgaacgcgcgatcatcgaggtcaccgcgcgaccgacgcgggccatggataaactgaacgtcaatgtccgcctgcgcaacaaggaaggcgtgaagctctattcatggggaaccctgaatcaggatgtcagccaatggaccgagcagggcagtgaacaaccgggtgtatgggggaccacgttccccgccgatgagccgtttgttgtgagattcgaattcgactgcgctctgggtgtcaatttctacgaggtgcaggtttcggtttccgaggagctcgagcgttttggcggtgcccagcgcatgctgcactggcgggacgaggctgcgttcttccaagtcgggatgcggcagaaggaatacacgtttggtggcgtctgcgacctccgcatgcgcgcaactgtcgccaccaccccttga

SEQ ID NO: 534843 - DNA, 1800 bp, Stenotrophomonas maltophilia
atggatatgactccatccctttcgaacactgccctgacacccgctgcggcgcgggtcgcagttgagcggctgcgttcctggttgcctgcaggcgcggtagcactacgcggcgacgtaccttcggcgttgttgcaggggcttcgccagactggcatgacgctgcaggatgtcggtcacggcgccgcgtcgggcgtcatcgtgcttgagcagggggatgtgggccacgcgagcgagagaatttcagcactgctgtcggacatcgcaggaccggtttgcctggtgattgtgggtgatgctgcctccacttccagccgtgctgcctgggaagcggcaatcatcaagacggagtggcggaagcatccactcaatgagcgggtggcgccttatggtgagctggatcgagtcaccggcttgctgatgattgccttcgaacgtgtgcctgctgctgctttggcggtctatccgctgaaggcgctcgaagaagaacgggatctgcacaccgacatgacgcgtgaacccggccgtcgctccgacgcgcacatgacgcggtacgcgcaggcagcacagttcatccgccccggggaccgggttgtcgacgtggcctgtggactgggctacggctcctatcagttggcgcacaacagtcatgccgcctcgttcatcggccttgatgccagcgagtatgcggtggactatgccaacgccaatttcgcaccggtttcgcctgtgccaactacgttcgtggtgggcgatgcacaggatctgaccggaatggccgacgggtctgctgatttcgcggtatccgtggaaaccctggagcatctgccggagccggatcggttgttgtccgagctgcaccgagtgttgtctgcacgtgggcgcgtgtacgccagcgtacccaatgactggtcggacgagaccggcgaagatcccaacccgttccacttccatgtttatgactggccgcggctggtggcgcagttcgaacgcaatggtttcgagatcgagaaggcgtggctgcaggatgccggtggtggtcagaaacgccaccttgttgcgcgctcgatgctggagatcgaccctctccagggtcccgtgtgcgatggcgaatggttgctggtgttggcgcgcaaggcgggtgctttctccgaaggtgtctcctgtcctttgcaggaaattcaggtcctgattgcagagggtcgccgtggcgatgcactggaccggctcgatgcaatgcacggtgacgaagatgcgttgttgcggggggcgtcccacgcactgtctgcgattctgaacgtggtcgatgggaatgacgagcaggctcgagtccattggcaacacgtgcggacagctgctcgcgaagcgctggcctctggtgccgatgacgctagagcggcgggactattgcacctcgcctccgaacgtatgaccgacgacactccggcgagcccgggtgcattgcagaggttgcttgagtcgcatccgctggtcatggcggaattgctcggtacatcggctgtcctgccatcggacgaagatgaccgagcgattacttcgggtcccggcgatggagccgaacagatcaatctggggtcccgtgaggtgcgccagttgatggatgccaagcagtggctggacggcaagtaccacgagcacatgcaacgcatcagcgagcttgagcagtacactgcggaacttgaagccgcccggcaatggctggatgcgcaatatcatgcgttgtcggccgaggttcgacgactgtccaccgacgccgcatcgcacgccggtggcaacggataa

SEQ ID NO: 534844 - DNA, 2103 bp, Stenotrophomonas maltophilia
atggcggccccgctgcgtgccgcgggctgcgacgtcgtggaagatgcacgaggggtttttagtttgcctggtcgaagcttgggtatcgcttgggcaggtgatgcggtcgaacgctcgtccgcccttgactgcacgctggattcgctggtgctgattggtccggcagagtgctcgcaggagctggccgactgggtcaagcaggcggtcgcacagggttggcagatgcatccggccacctatgcactggaaggtgcacctgccggtgtagcggtcctgaccctcagccgggaaggcgtgcattccttgcagccgagcgtcgaccttaaggccagctaccatggcttggccgccgcactggtgcggcctggtgatgcggtgatcgcgacggacgccggcgatcgcggcctctggcgcatcgtgcagcagcattcacgctgtcgctggctcggcgtggtcatggagcctgcactggagctggaactggaaccaggcgtggaatggctggagccttcggcatggcgacagaacgcacagccggtcgatgtggtgatcacaagcgtagatcacgagcattcggacctgagtgtttggttacagcacgtgcaggcggtgttggcacgtagtggccgcctggtcgtggcgatcccgcttcacgatggacgtagcgcccaggctcgtgcgctgatggacgcgatggaacaacagggcctcgccatcgatcgtgcatggtggcaaggtctgaatcatccggcaggtctatcccagttcgtggaagttccgcgcgatgctgacgatcacctggtcctggatccaaccgttaccgcaacggcggacctgctggtgttgatggcggtcaagatcaatggacatggcgtcattcgcgatgcctccttgcaggcgccgaacatcatcgcattccagcgtgactaccttgatgcgagcctggtccgcctgatcgtcgcaatggggctccgcctggaatctgcaggcctgcgcaggcagttggctgacagggtgctccgcgagtgccctgatacgtctgccgactatggcgctgcgctctgcgtgcttctgtatgacaccaccgcatcgggtggcgccaagcgagatgcgttgcttgctgctgccaagcgctacatggacctgcccgttgccaacccgacagtgttgcgctggcaggtctcactggccttcgccgctgcgctcctccatcaagcagatggcgagctgtcattggcagcagactgctacacgcgcgtcctcgcgttcgatgtactgcagttcagcccgttgctgggaaccaaaaccactgctgcggctgtgcgcctgggctggatacgattcggccagggcgatgtggcggctgctcgcgaggcatgggcgcgcgggctggatgaggcgcgtcggttgtctgctcaatctctttggagagaggtggtcggcaatgccgatgcgcctgaaacgtttgcgcttccggaacttgcggcagttatggacgaggcgggctgcctcgcatcggcactgcgcctgacagctgaagtcccgctgcggcccggccttgcctggcaatggagcaaccgttcctggcggacgcagttgcacgaactccgcagccagcagcaacactccaagctgtggctggagcaattgcaggatgcgaaggattggctggatggccagtatcatcagttgacggcagcactggagcaatcacggcaggtgatcgaggcagcccagttgcagaaggatctcctggacaaggagattgcaggtattcgtgcggccttccacctggcgcaccagcacgcggaggccaggcaatcggcattgcagggtgagcttcgccaggcccaggcggagaacgcggacctgttggatctctacacccggcagcaggcggtgcatgcacgcttggaggcgtccgcgcgcacgctggcggcagcgaccggcgtggtcatggggaacgcgccgcagccgtgcctaccggccgaatcgctggcggcggagatgtcccggctggccgaggcactggaacgcttgccgatgaagcgcatggtgcgagcgatgctgcgtgcgctgacctcgctgctccggcggaggtga

SEQ ID NO: 534845 - DNA, 732 bp, Stenotrophomonas maltophilia
atggcaccgggcctgagtgttgtagtcaccttccacaaggagggtctgtttgcccacgcagcactgtgcagctatctgaagtcgcgtgcggacgcccgccaggcggggatcgacgtggaagtcgtgcttgtactggacaatgcagatacagagaccacggcgatcattcgaaaccatcccgatctggagggcgatgagctcatcatcgaggttgccgtgggggatgctgcactcgcccggaatctcggcctggcgcgcgcgcgcggtattcatgcttgcacgttggatggtgatgacctgatcagccgcgagtacttccggcgtcacatggcctttgcggtcggcctgcctgagcgcacgatcctgcatccggaagtggtcgtcagcttcggtagggacaacttcttcagctggcagctggaccaggactccacgtacttttccgccgacatgctgatctccgagaacccatgggtcagtgcggtgttcgcacgacgcgatgtgtttgctgaggttccctatgtcgggtgtcgtccgaaacagaccggttttggctatgaggattggcattggagttgccagtccgtggccgcgggcttccggcatgtgaccgtgccggagacagtctacttctatcggttgaagcagagcggctcggtcaacgcgaccagcagtgagctgcaggtcgtcatgccgccaagcgaccttttcggtcgttgggaggatgcatga

SEQ ID NO: 534846 - DNA, 1440 bp, Stenotrophomonas maltophilia
atgatcgggcggctgctggctttgctgcgtcgcgtgagccttcgacagctcctgcgtgatcctcgcgctgaactgggacgcatcctgggcggagtgggcaggcggctggagagcacgggtaaacgcatcagtcatgcgcgccgtgagatgcccgcgtggctggagggtgagatcaacgcgctggcgcacttcgagccagagctgcttggaccggaaggttgcggtgtccactacaggcactatggcgtccccgtcgatacccgggcaggagcgttgtatcgcgagctggctgcagccgtgggcgcccgtcgcgccacgcacgtgctgatcgtgccgtggcttgtgcggggtggtgctgaccgcggagctttgtatcacctgaaagcgtgggtcgagtcaatgccggcggccaatgttctggtgatcctgaccgaagacatcaattcgccttggctggatcgcattcctgccggcatcagggtgttgcatttcgggcggatgctggggccgatgggaatgccgggcagggtgcagttgttgacccggctgctggtgcagatgcagccgaaggtcatccatgtcatcaattcccgcgttgcatgggaatccttcaggctgcatggattggcattgcgccaagcgtcgcggctgttcgcctcgcttttctgcgatgaccgtaacaacgatggcgtgcccgtcggctacgcacgcagctatctgcgtgagtgccgtacgcaccttgcgggggtgttctgcgacaacgacgtattcccggacctgtgggtgcaggaactcggtgtgccgcgtcaattgttcacggtccttcgttttccctatgaccgcacggttgtccgcaaggatgatgattttgggatcgacggcgctccccggatcctgtgggcggggcgttttgatcgacagaagcggccggatgtcctgctggccattgcgcggacgatgccgtcagtgcctttcgatgtgtacggtgtatctgagttgggccgcgtgcatccggcgatcagtgaactgcagaggctgccgaatgtgaaactgcatggttcattttcgcggttcgaggatattgcagggaaggcccatgcggcctacctgttcacctcctcatgggaaggagtgccgacgatactgttggacgccagtgctgccggtttgcccattgttgcccctgccgtgggcggtatcgtggacctgatcgatcgttccatcctggtggacacatcggatgacgttgcggcgtatgtggagcagttgcagcaactcatcgatagtccggcgcttcgccgaaaccgccgggagcagcagtacgccgcattggcggtggggcgtggctggggcgactttgccggcgtgctgcgtgagattccctactatcttccgggggcaccggcgacgttgacccataaaaaaggacgctcatcgtga

SEQ ID NO: 534847 - DNA, 702 bp, Stenotrophomonas maltophilia
gtgattattggacgtggactggttgccacggccttcgtggacgactggctgcaggatgagacgacgatgatcgtcgctgccggcgtgtcgaactcggccgaaacagagcgcgccgcatttgcgcgcgaagagcgcatgctcgacgaggtgcttgcaagcaaacagctgcggcggattgtctatttcggcagctgcgcggtcggcaacccgtcggaacggcagaccccgtatctacggcacaaggcggcaatggaggctcgcattctcgccgacgcgcgtggacaggtgttccgcctcccgcaggtggtggggacgggcggcaatccgcataccctgaccaattttctgtgttcgaggatactttcgggcgagcccttcgacgtgtgggctcgggcggaacgtaatctgatcgacatccaggacgtggcgacacttggcacccatgtgctgcgccatcgggaccagtacccaccgatgatgtcgctggccgatgtctgctccaccaacatgctggcgatcgtgcgttgcatggagggcgtacttgggcggcagggcaattaccgggttctggaccaaggcgtagcgttcccgattgaaacagcggattgcgagcgtgcggcgcaggcatgcgacgttcccctgggtcccggatacatgcgggcgctgattgggaagtactatgccgatgccgtcaatggttga

SEQ ID NO: 534848 - DNA, 756 bp, Stenotrophomonas maltophilia
atgaacgtgccggcactgagtgccattgtcaccttccatggagaagggatactggcgcataccacgttgcgttcctacgcgctgtcgcgcaacatcgcccgccagcagggggtggaggtgcaactggtgctggtgctggatcgggcagatgcccagacgcgtgcgttcgtggtcaatcatccggacctggatggcagcgagaccgtcgtcgaaacccaggttggtgatctggcattggcgcggaatgcgggcgtggctgccagctgcgctgactacatctgcacactggacggcgatgatctgatttcgacccgttactttcttatgcacctgaaggaagccgcgcagctggatggacggttcgtgctgcacccggaaatggtgctgagctttggcatgtacagcgcgttcaactggcaggtcgaccagacgggcccctattacgacgaacacgccctgctcagcgtcaatccgtggatcagcgcggcattctccacgcgcgcgctttatgaggaaatcccatatgtggcctgttatccacggcagaccggattcggctatgaagactggtactggaactcggaaaccatcgcgcgtggcgtcgtgcaccggctcgcttggggcgcggcgtacttctatcggcgcaagtggcatggatcgctcaacgaagccagccatgcgatgaagaccgtcgtcccgatgacatcgctgttcgcgctggggcgtgatcgcggccaagggcgggaccatgcttga

SEQ ID NO: 534849 - DNA, 1449 bp, Stenotrophomonas maltophilia
atgcttgagcgcatgacccacagccgctgggtgcgaaaccgctacacgcgccgtgtcgcccattgggtgcggcgcctttacgcgttgctgttcgggccggacggcctggaacaagccggcacccatggcgcgtctgcaccggccatgcctgcgtggctgcacgaagaaatgcttacgctcgcggcactggagcctgaactgctaccgccagggtcgggtgtggatcgctacgcgttctatgcagtgccaatggatgtggctccaggtcgcgtcttcgatgccgtctcccaggccatcggctcgctgccctacagtcacgtcctgctgattccctggctgaagcaggggggcgcggaccgggggatcctctaccactgcaatgccatcgtggaaagcaacgccaaggcgcggatcctggtgctgtcgacggagaacgcgacgtcaccgtgggcatcacgcctcccgcctcaggctacccacgtagactttggcgggttgtgtgcgtcgctcgacttcaaccagcaagtggcagtgatgacgcgcgtgcttgtgcagctgcgtgcgccgctggtgcatctggtgaactcccgggtcggctgggaaatgatccttcgccacgggctggcgcttacccagcacagccggatctacgcgtccatcttctgtgatgactacgaccagcggatgaacccggtcgggtatgcgcgagattatcttcgctattgctatccctacctgtccgcagtgatctgtgacaattcctgctacccaaggatctggacgcgcgaactgggtatccccgcttcgttgttcacggtggtgcctttcccctatgacggtacccttccggaagcggccgacgtggcacggtctgcggattccgccgcgcgcgttctttgggcggggcgcctggaccggcagaagcggccggacctgctggccgccatcgcggcacagatgcccgatgtacagttcgacgtgtacggtgcccaagtgatgtctggtgctgctgggcaggaccttcaacgactgcgctcgctggccaacgtcacattgcatggtgagttcaatcgactggaagctgtagccagcagcgagcactttgcctacctgcataccactgcatgggaaggcactccgacgatcctgttcgatgtggctgcggcgcgcttgccgatctgtgcagctgcggtaggcggcattgtcgacttcctggctacccaggatatggtcgccgttgcagatgatgtggatggtttcgtgcaggagctgggccggttgcgtgcatcggccgcactgcgcaacgcgcgggtcaagcggcaggttgaatccttgcgacgcgatcgcggttggtctgatttccgccagcgattgcgcgaactggatggatatctgacttcggatacggcggcgcagcacaagtcacagatggatggcactcaagaatga

SEQ ID NO: 534850 - DNA, 1023 bp, Stenotrophomonas maltophilia
atgaaggttctggttacgggcggggccggctttgtcggatcgcatacagttgtggagctactggctgcaggtcatcaggtgcaggtgatcgacaatttctgcaacagcgagcggtggatcgttgatcgcatcgagcgtatcgccgggcagcgacttgcattggatgagctggacatcagggacagcgaggctctcgtggcgagcatgcagcgtttccggcccgacgcggtcattcacttcgctgccttgaagtcggtctcggaaagcacggaacagccggccaggtactacgatgtcaatgtcgcgggaaccacctgcctgttggaggccatgcaggcggtggggagccgccacatcgtgttcagctcttcggcgacggtctatggtcagccggaaacatgcccggtcgccgaaggagcacccgttgggcccggcaacccttacgggcgcaccaaactgatcggggaatggctgatacgtgattgcgtgcatgcgccgggtgcttccctgaacgcggcaattcttcgctacttcaatcctgtcggcgcgcattccagtgggctgatcggcgaactgccgcggggagtgccgaacaatcttgctccctacatcacccagactgctgcggggcaacgcgattacatccgtgtgttcggcgccgactacgcaacgcccgatggaaccggggtgcgcgactacattcacgtgatggatctagccaaggcgcatgttgcggcactcgatgccctcgctacaggtggtgagcgcgaactgacgttgaatctgggaaccggtcgtggctactcggtgctggagctgattgaagccttctcggcggtggtcggccgtccaatcccatatcgcctacaggatcgtcgcgctggtgacatcggcgagtgctgggccgacccctctttggccaatcgagtgctgggttggcgtgcgcagaaggacctccaggacatctgcgctgatgcctggcgctggcagcaggccctctctggaagccccgcgctccgctag

SEQ ID NO: 534851 - DNA, 405 bp, Stenotrophomonas maltophilia
atgaagtcgcaccaggccaagcaactggcggggaagcttgtccgctttggcgcagtgggtggtaccagcacgttgctgttctccgcgctgacctggctgctggtcagcaaaggcggcatgcacccggtactggctaccgtggtggcttatctgctgctgctcccgcccaacttcatcgcccacaagtatttcaccttcgcgtccaagggacaggtgtccacggagtcgacacgattcctgctggtgcatggcctgaacatcgcgttgtcggccgggggcatggcaatcatctcccaggcatccctggactatcgctggggcattctgttctcggccatcgcggtgccgatcatcgtctttgtggtgatgaacgcctgggtcttccgcgctgcgccccgacactga

SEQ ID NO: 534852 - DNA, 975 bp, Stenotrophomonas maltophilia
atggcgaccaacgcggctatgggcgacccgtcaagccagatcgatctttcgatcgttgttccggcttatcgcagcgagaagacgctggcatcgctcgtcgcggccattgaagccgccatcggcgggcgatacgcgctggagttgatcctggtcaacgaccgtagcccggaccgttcctgggcggtcgcatccgagctggcccgaacccattcatgggtccgggcggtgaatctgcgcaagaacgtcggacagcacatggcgatcttcgctgggctccgggagtgtcgtggccgggtcattgttaccatggacgacgacctgcagcatgcgccgtccgatattccgaccctggtggacgccctggatgccgaccatgacgtctgctatggcacgttcaccgggcgcaagcatgctgcctggaaaatcctcggcagccgcttcaacgatcttgtggcgacatggctgctggagaagcccaaagggctttatctgtctccgttcaaagcgttcaagcgtggcgttcgcgatgaggtagtacagttccgcggccctgccatttacctggatggcctgatcctgtcggccacctcacgcatcaccacgcgaagcgtgggccaccatgcccgcgaagacggcacttcaggctacagcctgaagaagtcgatctcgctgtggttgaagatggccaccagcttctcggtcgcaccgctgcggatggcatccctgaccggcatggtcatttcagccattggcttcatcttcgctgcgttcatcaccgtccacaagctgctcgatccgagcattgctgtgggctggtcgtcgctgattgtggccatcctgatcatgggcggcgtgcaactgttggcactgggcgccatcggcgaatacgtcggtcgaatcctgctcaatttcaccacacccacacaatacgccattgccgagcgcgtaaacccggcgccggacacgcaacaatga

SEQ ID NO: 534853 - DNA, 1491 bp, Stenotrophomonas maltophilia
atggcccggtgcacggcgggctgccccgtactggccctgtgccagcagtcccggctgctggattcggggcagctgatggacatcatgccacgtatgaatttgaatcagctggcccgcgcttgtgagagcgggtttgatcgcctggatcgcagctatctgctgtatgccgccctgatactgctgggcatgtacagcctgggtcagctcaccgcgccgttcatcgcccacgatgatttcgactggctgctatccggtttcgaccaggggttcgaaactcctttcagcaaggccggttcagaagggcggtggggcaacttcctgtggtccaagttcagccccaatctcagcatccaggccgcgtttgggttgtatctggtcgcgttttcgctgatgtgcgttgccattgcaagggtggtgtccccgtcgtcaggtgtgttggctgcactgctggtatttctgtcaccaatgactgcagaaaccatgcagtggccggtgacgcaggtcaccggcgtcgtcgtgacggtattgggttgcctggccatgcagcgagcgcaaagtgatgggcgaaggcgcctcgtgatggctgttgcggtcgtcgcgggattccttttctatccttccttcggccctcttttcctgctcatgtacgcggcgcgatgcaacggcagttatcggagcatcgtgctcggggcgttgatatatgtgctggcgtttgcctgcgctgtgctgttggtcttcacgttgaattacgtgtttcacgggacgttctcgatcaagccggcagcgtggcgtgaagctactcctctgatgcatggcggttcgctgcagggaaacatcgagcgctatctggcgtggttccaggcggtcaagccgctttggcccgcccttcttgccgctgctgttgcgtttgccctatgtatccatcagcgcattcgtacccgccaatgccttgcattgctgctgtcagcagcaatgctgctgagcatcgatgcctcgctttcggtgatctctggcttatcgattcccttgcgctcaacagtgtggctctggctgctttgcgctgtgccaatcatctttctggtgtacgagcgcagggctctgctgcctggcctgctgcttgcgctgccgctggcctctaccggcctgctcggctggcaatcggcctattccggcaccaggcatgtttttcccgccatgcagagcaccggaatggagatctcacgggtccaggcggccaatgcgggacgattcgacgatgtgatcctgttcggtgacgtccatggcaatcaaaccatggggtggctgcacagcaatcgagccctgcgcaattacctgttcaaggatatgtcgatctacacccggccctgcgacgatgtgctctgcgcccgtattcagggcgagattgatcagcgtgccgaagtcccacagtggctgatggtcgatcgccatcttgtatgggtgctgtccccacggaacacgagtacgtattga

SEQ ID NO: 534854 - DNA, 1524 bp, Stenotrophomonas maltophilia
atgattgactatggtcccctgcatgcccggctccgtggcttgctgccggcgtctgcgatcgggcagctgctgctgacctgcctggtggtggcaggtctgaccactctggcccggctgccctttgtgctttccccagggctgtcaacggattcctatgcctatctgcagggatggccgacgctcgagcagcttttcagccaaggccggttcgggcagttcctggtcttcaagctgctgggcgcgtttgcgattgatcccttggcattcgcgaccctgttgcagggcgtagggctggcggttttcgctttcagcactcctttgatgtttacagcttttgctgaccggcgacagcgccgtctcggtgcgacaggtcttgccgcattgatggtgaccttgcatccctactcggcggaaatcctgaccttctccgaggcatcattcactgcgcagttggcctgtgcgatgggcgttgccgcgatcttcatcgtggctacgcggccacggttctggtggttggcctggatcatgctggtggcggcgctgtccatgtaccagctgctgatcaacattgcagcattgatgatattgctgggtatcatccagacctatctgcggactgggggctcgttgcgtggtgagtgtgcagcgtaccggcctctgttttacgccattctggtactgggtggtgccttggtggcgtacctgtgtattcacaagtcgctggtgaccgctcttggcatcagtgaagtcggccgagccggctttcttccgttggataagctctatctgcgtgcccaggaaattgtctcgctaggcggatttctgtggcagcgtaccttgctggtagggtacggatctgcagccaaggggctcttctggagtatggttgcgtcgggctggcttctgttgttgcttcgtcttctggtgcgccctcgcatgggttccgtcttgccaatcatcgcaatggggcttgttccggcagccgctatgggcgtgatcgcggtcggtaaggtttggtggcctgcgccgcgcgtgctgggaggggttgttcttgcgtgcgctatgggcatctactgggtgggatggttcgcgcaggggcggttggggcgagcactggttctagtactcgggggaatactgctgctgagctttacagcggtgggtcatcgcgtgcatagcgatcagttgcagttgaacgccttcgatcgcctgcttgcacagcgcatatatgacgaaatgatacgtacgcctggctatacggaccagatgccggttgccgtggtcaatcgccgcctgaactgggcacattccatgcccttggcaacggcttggatggacctgaatctgactgcgttcgccgacaagcgcgcgttgaaagggctgcttgagctttccaatggacgcacgttgaatcacgtgcccgccgagccgggcgatatcgaagaatgtgcgaagcatccggcttggcctgatcccggttttgttttgaagcgacctgaaggcggcattctggtctgtatttga

SEQ ID NO: 534855 - DNA, 813 bp, Stenotrophomonas maltophilia
atgggagaccagggtcagatcgatgcgcaggcccaggttgcggcggaagccagcggcacggtaatcccaccagctgaaggtgcccgcctcgtcgttgtgcaggcggaagccatcgtgcaggcccagctgcagcagcttgttgagcgcgccgcgctcggcggtggaggtcaggatgtggttctcgttccacacctccgggtcgtgcacatcgcgcgcgtccggggcgatgttgaagtcgcccatcacgatcagcttcgggtgccgctgcagttcttcggcgatccaggcatggaccgcttccagccagcgcaacttgtactcgtacttgtcggtgccgatgtcctggccgttgaccacgtacaggttgatcacccgcaggtcgccgaaggtaccggcgatgacgcgcttctgctcgtcctcgaagccgggaatgccgatctgcacgtcctgcgccggctcacgcgacagcagcgccacgccgttgtaggtcttctggccggcgaacacgctgcggtagccggcggcgatcagcgccgaatcggggaacttgtggtcctccagcttggtttcctggataccgacgatgtccgggccgaagtccttgagccactgctccaggtgcggcaggcggacattgagcgaattgacgttccacgaggcgatcttcatgggggccattctacccgggtgggccttgatgggcgcccctataccccggtagacgccaaccttggttggcgccagcaatcaccgtgtgccaaccaaggttggcacccaccggaaggggcagcgcgggttggcacccaccggtag

SEQ ID NO: 534856 - DNA, 504 bp, Stenotrophomonas maltophilia
atgatgaagtacggccttgccgcagcggcggtgtgcgccgcgatcacggtggcggtgtggatggggttgcccgagccagcgggcgatcaggtgtgggcctaccagaagcttcggccggccgactaccggctgctgtacagcgatgcgctcggtttcgtggccgcgaaagcccacgagggctttgaactgcacgcgcgccatgccggggcgacgtccttcgagatccggtgcaagggcgtgctggtgatggacgtggagaatgtgccctcacgtgtgctgatccggttgcccgccgacgcacggtggcgggcgccagatatcgagctgctgcgcggcagtttcgagcgttggttggatcttcaccagagcgagggaaggctgctgatggagcgtgcggggccatcgtgggttgaggcgcggttcgggcgcttcgatgggttggtgcctgatgagcagcggtgtttgtccggggtgtcgcacagcgattggcgagaatccccctga

SEQ ID NO: 534857 - DNA, 2052 bp, Stenotrophomonas maltophilia
atgactgaattcacagacttccctgacgacgaccgcaattggttcattcttcacatggacggctactccaagccgcacaagggcactgactcgaccgcagtagagtgccagctggtcccgatcccgttgggaatggcagcgccagaaaagctctcactccggcaaaccgccgaattgttcggcatgcgcgatggcgaggcattcatcaccacgatcttcgttggcgccgtgtctgtatacgcgatcggcgatgtgtttaggcgcagcaagtacgtaggtgccttgccggctttgcagttgcgaactgggaacgcgttggaagaaggcgagtcctccgcgctctacaccacgcaccacagcacgggccgcttgcaggaagttcatgctcataccgaaatcggtcgtgacagcaaccgctaccccatcaaagtgttgtccaagcgtcagctggaccttgatccgcggtaccgcgccaggagtgaattcttggtcgtcaggaacaccagcgaccccgatccgaccaagcacgtggagttcgtcattcctcgcatggcgatctaccggacgttctacggattcacaaacaaagttgcggatatcttcagcatgggtccatgggacacagttgcttccgaagcggtctactccgaggtctttgctggcaacaggacgggcgcagacgaagagactggcgcttggaacctcgtgctagaactgggcatgtctaaggacgacgccacactgatcgcacttctatatttcgatgagtacgggcgagtgcaagcgaatcggcttgctaccccgatgcagagggcaatggagagagtcgaccttgacccttcccaagatccgcgttggtacaccaacgcgaggcttcccttgcagccaggacgagggccataccgcgctgtggtttccggctatgcgctgcggcggcggaagggagattccttccaagggaagatcctgctggtgcgcgctatccatagcgtcaacatgccggagagaatgccccccgtgggcaagatcctgatcaacgacaacaccgacggcgcccatgtccaggtgacagatgagcagaagacatggaagcccaaaccccgagaccagaggaagcgacccaagggaatgccaagcgttgatacgaaagccggctctaccaaaagagaaggatttgacgtcccagcgctctcctttgaggtcgatccaccgcaccctagccatgacctgaccaaggacaagagcaccactcgaaccggaggtcggcccgcacccaacgctcccccaacgaatgaggggtcacatgggcggcccaatggcgatggtgagtcgatcagccatttgcgctctcgtaaggagaagcgtcccgcgtccgacgtccatgaagggctcattacagcgatggagatgttgcgcaccaaggggcacatccgtgacttcgcgccaatcggtccagtagtcctttgtcagctagtccatgtcgctgcgttcaagtgctggaacttcttgaccgagcaccagcatgaagccctccgcaggaacgcggcggttggctcttacgctgcgaactggtccacacgctgttggccctaccttgtttcgggaagcaccccctttaccgctcaagaacgctctgcactggtgctggaggtcgatcttctcagtggccaaaaggggttctggtttgagattgagatgagggagaccgaaaactactcgtctgcattcgtcttgcaccgcggtggggacgtgcgcaaggagatcaccgaggccctacagatcatcaggcaagcaagcggaatttccatgtcgcgccactttcagtccaagagcatcgaatgctattgccacccccattactttgagaaggtcgccaccaagaagaacaggtcgacgaaaggagaagggtcgccagatgaagctacgcaggatagtgccgagctgacccagatagacgcttgtccagccaagcctaagtccgccgtctggagcgccggcccgcttaccaccttcttcagtagattctccgctgacaagaagatcccggggtga

SEQ ID NO: 534858 - DNA, 168 bp, Stenotrophomonas maltophilia
atgcgcagcctatgcaaatatgcggacattgatgcatacgagggtaccagcgacccgagggaatcgcaggtgctgatggaggccctcgcacacgtctgggatggtaccgatgcccatgccggccgactggccaagctgctttttgcccaccagcgagcccacatgtaa

SEQ ID NO: 534859 - DNA, 672 bp, Stenotrophomonas maltophilia
atgagcgccactcactacctgctagatagcgacgcggcaaagtctctttgtcagtacgggttgattgaagacctggccaccgcgctgggcatcaagctgagtgacttttcaattctttcccagcttcgcttccaactgcatgttgcaaatccagccaaatcgctactcaagcttggtagtgacttggcagtggctcaggtcaatctgctggtgtcccaagccagtgaagttgtggttctcacagagtcggccaactatgcgctgctcgaaggtacaccggatatcgatggtggtgagttggcactttttgccgcactctgcgaggacaatagcgccgggctgatcacgggcgacaagcgttcactggtagcgctgtgcaaagtgggggcgtcaatacaggacagtttcaactgggcgcagatcatctgcctggaggaggctttggccctgcttgtcaaccattttggctgggcgtacgtttccgaccgcgtgcgcgtccgaccggacgtcaatagcgcgattagcaccgtgttcggcagatctgtcgctgctgatgaacaggcaatctccgaggggctgcaaagctacctgagggaccttcagattaagacatctggcaagtaccaatcaccgtacctgatgcagattgatgaccggacgcctgcttcatag

SEQ ID NO: 534860 - DNA, 792 bp, Stenotrophomonas maltophilia
gtgctgaacaacgataagccctattatcttgagcacttggttgactgtgtcaatcgaatgcttcactttcgcgatgtgggcgcccacctcgcacacaatcgtgcgaactctggcgctagtacgctcgataagggcaacaatcgaattatcgagggcaatattgcctgtctggtccttaccagtggactccagtcctacggggtcgaatgggtgggcgctagctttaatctgaaggaataccttaaagagttgctgaaatccgacgggggctacttactgatagagccccaggggaagtgcatacactctcacatcaaaacgggcgacaaaaattcaaaaattcctcccttctctcctttatttcctgcaatggaggatgacaggacacatgactcggaatatcttctactcaacttcctcggtcacgccatcgggaacaattgtgtgccagcttccggaagactttccttaattactgagagaattccttgcgagagctgcactgcagtcatatgtcaatttttaaagaagttttgtgacatcactcttgatgttttctacttgtatgacacgcatgatcgatatcctgcgagctttctcaactccgtgtctgcgtatgacgtccaattgttcaaagtggcgttccatacagttgtcgacctggtaaaagttcatgagaacccaagggttacgctcaagcctagggcacgcgaacaagtaagaatgttcggtgggtctcccaaccagatcctgcaagccgtgaggccgggcaccaaggggtctgccaactaa

SEQ ID NO: 534861 - DNA, 873 bp, Stenotrophomonas maltophilia
atggcgcgccgggttgtgcagcggctgacaccggcggtgctgcgggcgcgtcctctgccggcgcccggtcgcgacaaggaggaccggggccgagtgtgcgttgtgggagggtctcgccaagtgccgggagcggctttgctggcaggcgaagccgctcttcgtgcgggagcgggcaagctgcagattgggaccgtagggagcgtggcgccggcactggcgctggctgtgccagaagcaatggtcctggcactgcgcgagaccgctggaggggaactggctaccagtatggccgcccttgatgctgtgctggaggccagcggggccacagtgatcgggccgggtacgcggccctccgcgtttctagcccgcttggcgcgcaaggccgcaatgctcgatgggaccctggtggtggatgccggcgcgttgcacaaggggctgcgcgccatgcctgcgcggcctttcgttttgaccccgcatgcgggagaaatggcacagctgtgcggtgtggaaaaggaggcaattcttgccgacccgcaggggcatgctctccagatggcgcgagccacacgcagcgttgtggctcttaaaggtccagagacctgggtcgtcggcccggatggcagcacttggttgcacaagggaggtgtatccggccttgggacctcaggctccggcgacgtcttggctggcctcatcgccggcttcgcggcgcgcggcatgtctgcacttgacgcaacgctctggggaatctgggttcacgctgaggcaggaagggctctcggccgagccactggtgcactcggattccttgcgcgtgagatcgcgccgatggtgcctcgaatccttgcccgtttccccttggcccctgagtag

SEQ ID NO: 534862 - DNA, 783 bp, Stenotrophomonas maltophilia
atgcgggaggccatcgtgcagcagagcagtgctatggagggggccaccgcgcggtggccggagcgaatctgggtagtgcggcatggccagagtgctgggaacgtcgcacgtgaccacgccgaggcaaacaacatcactctgatcgagctggaacaccgcgacgcggatgtaccgctctcatcgctcgggcatcgccaatccctggcgcttggcgcatgggttaagggacttcaggaacaccagcgccctcaggtggtactggcctctccatatgtgcgtgcacaacaaaccgcacaggcagtggcagacgtgctcggcaacgatcggcgtctggtcattgatgagcgcttgcgcgagaaggaattcggcattctggaccgctatacctccagcggcatcgtcgccaccttcccagagctggccgctcagcggcgacttgtcggaaagttctattttcgtccgcctggtggcgagagttggtgcgatgtgattctgcggctgcgcggcgtggttggggatcttcagcgaaaccacgccggcgcacgcgtaatgatcgtagcccaccaggtgattgtgaactgcatgcggtacctcttggagggcatggatgaacagacagttcttgacattgaccgccagggcgatgtgccgaactgcggagtcacggagtatcaagctgcccagggtggccggcttgctttagtgcaggccaacttcgtctcgcctgagctcgccgaggcgcccacgaccacttcgcctgaccaacccgctggagccaggtga

SEQ ID NO: 534863 - DNA, 2163 bp, Stenotrophomonas maltophilia
atgagtgatcgaatcgatgcgctgatggcgcagatgacgctggaagagaaggttgggcagctcaacgtcaccgctgacatggtgcgtcccttcgcaccggacatcaaccctgtagccaacgagcagaacgcggatcaagtcctgcagcagattcgccaaggcaaggttggctcgctgttcaatggcaaaggcaaggaaggcgcggtcgagctgcagcgggtggcgttggaagaaagccgcctaggtatcccggtgatcctggctgccgatgtcattcatggcatgagcaccgtattcccgattccgttgggcgagactgccagctttgaacctgacttggcgcgccgcaccgcacgcgccacagccgtcgaagcaactgcggcagccattcactggacctatgcgccggcgatcgacgtcactcgcgatcagcgctggagccgcggcgccgaaggcacgggcgaagacaccctaatggcgtgccggtttggcgctgcccgcgtggaaggtttccagggacctgacctgactgctgagaacgccatgctggcaacggccaagcactatgttgcctatggcgccagcctggccggcttggactacaacaccgtggacatcgcaccgcagacattgcgcgacgttcatctgccaccgttcaaggcagcggtagatgccggcgtggccagcgtgatgagctcgttcaacgacatcaacggcgtaccggccagcgccaacaagccgctgctggtcgacgtgctccgcggggaatggaagttcaatgggataaccatctctgactacacctctgagatggagctggtggcgcatggctatgccgaggacatgaaggatgccgtccggaaggccttcatggctggcctggatctgagcttgcagagtggcttgtatctcgagcacctccccgacctggtcagggagggcgctgttcccatgtggcgcctggaccaggcagttcgtcggatgctggatctcaaggagcgaattggattgctggatgatccctaccgatcgcttcgcatggacgacatctccgctgagcaggtcgcagagcatgaagccctggctcgcgaatcggccaaacgctcgattgtcatgctgaagaatgaaggcggcgttttgccgctgaagaagtccggtcaacgcatcgcagtcgtcgggccgtttggccgggatcgtgacaacattgaaggttgctggacgctgttcggtgacgccggccgctatgtttcgctcgaggacggcctccgcgctgctgtagagaacccggaggatctgcggttcgttgatgggtgtggcctggaagaggacattgaaggcggaatcgaggcggccatagtggcggccaaggcggccgatgttgtggtcctggctctgggcgaaccccagcgttactcgggcgaagctcagtcccgcatcgaaatcaccctgcctgcagcacagcagaggctcgctgatgcaatcggtgagcttggcaagcccgtggttgcactgatccgcaatggtcgtgccctggcgctccatggcggagtccgcaacgcagatgctctactgatcacctggttcctgggttcgcagaccgggcatgcgacagccgacgtcttgttcggcgactacagcccgtccggccgtctgcccatctccttcccccaggagtccggacagcagccgtactactacaaccatccgcggacaggacgtccggaactgccggacatgaaggagttcaagacgcgctggcgcgagatcactcacgaagcgctttatcccttcggtcacggcctgacctacggcaaggttagctacacggcaaccgatgtcagttccagcgttctggaacacggcagttcgattcgtgtcagcgccaacgtaagcaacgatggtgaccggctgatcgaggaagtcgtgcagctgtacatccatgatcgcgtggccagccgcgtgcgtccggttcgcgagctgaagggttttgacaagatcgccatcaaacctggtgagaccgtcgaagtagccttcctgatcaatgaatcgatgcttgagttcaccgatgttgatggggtgcgccgggctgaaccaggcgcattcgatgtctggattgcgccgtcctgcacgagcgggacgccggctcgattcgtgttgtcgtga

SEQ ID NO: 534864 - DNA, 198 bp, Stenotrophomonas maltophilia
atgcagttgccggccagcggccggcactacctaggatcactcaagcaggtgcacgcccagcgccgcgtgtactcgcgcggcgcgcgctatcgccactgcctgcggctgtcgtgctgccagatgctggatgcgcgcttcatcggcgcggtggagcggctcggtgcgatcgcgaaggagctggcagctgcaacacggtag

SEQ ID NO: 534865 - DNA, 198 bp, Stenotrophomonas maltophilia
atgcagttgccggccagcggccggcactacccaggatcactcaagcaggtgcacgcccagcgccgcgtgtactcgcgcggcgcgcgctatcgccactgcctgcggctgtcgtgctgccagatgctggatgcgcgcttcatcggcgcggtggagcggctcggtgcgatcgcgaaggagctggcagctgcaacacggtag

SEQ ID NO: 534866 - DNA, 198 bp, Stenotrophomonas maltophilia
atgcagttgccggccagcggccggcactacccaggatcactcaagcacgtgcgcgcccagcgccgcgtgtactcgcgcggcgcacgctaccgccaatgcctgcggctgtcgtgctgccagaccttggatgcgcgcttcatcggtgcggtggagcggctcggtgcgatcgcgaaggagctggcggctgcggcacggtaa

SEQ ID NO: 534867 - DNA, 609 bp, Stenotrophomonas maltophilia
atggattcgacggtgctggcaggtgtaatgggcttggtcggtgcgtttatcggcggcctagctactctgattgtcggattgctcgccgtttcggcccagaaaacaagagacgctgaagccgagacgacgcaagttcgcgccacgctccaagcgatcagggatgaagtcaatgagttgactcaggtacatatggcctccgccggggccatcatcgacgccgcctccgttgccgaaccgatagcattgctctatcccgtctctgcccactatttcacagccttcgaggccaatgcagacaagatcggtctggtggcagacgatgagctgcgcagtcagatcatcaggacatatgtgcacttcaaggcgctttttgacacggtccgcctgaataatcactttgttgaacagctcgatcaggccgagtctgccgtccgtgcatcccagggggagcgtgaagcgatagcgcgggaggaggctgcgctgcattggaagcaaaccgcaggttatgcgcctctgctgaagcaggcgaacagcagagcaatacggtctagcacggaattggtctccatgatcgaccagtggattgagctgagcgcgtcacgggtgtag

SEQ ID NO: 534868 - DNA, 702 bp, Stenotrophomonas maltophilia
atgtgtataagagacagggccaggtcggccaggtgttccagaaccgccgtcaccactgcggacccgacccgagcgtttacgaggcgtgggctgggtccacgacggccggcagttggaccacgaccagcagcgcctgcgcgccgtgccctgctcccgagacgcgcaacgtgggatgccctgcaggtcagtttggcgcgattgggcagcagcggaccttcgcgtgcacgggcaccggttcgtggaacgcgtggacccagaccaacaccacctgcgcggcttgcccagcgcctttcccacaagccgaaacccagtgggtcgccgcgagtgccgcttgcccggcaggccagagtggatcgcacacgtggcaggccgagcagcggcggacgaggaccgggtcatacaactgcccagccaccacgtggtcgctgcccagcccgacgttcaccacttggacaaattgggcggagactgggtttcgtcgcaacgaggccaatacatgcacccccaacgcaccacctccgacgtttcccgaatacaccgggcgatcttggcattcgtggggagacggagggcactacggctgggcgatcttctgcaacgctccccggaccctggccgagcttcaagccacctcgttggcatgcacttggcaatacgaaacgaacgacacccccacgtttacgccagagccacctggcgtga

SEQ ID NO: 534869 - DNA, 2169 bp, Stenotrophomonas maltophilia
atggtgacgcttagctttgatctcgagaactgctatggcatccggaaacttcgccatgacgtccatctggaccgtaagggttgtgccgctatctatgcgccgaacggctcgatgaagacgtcgctagcaaagtgccttcaggacctaagcaagggcgttgactcttccgatcaaatcttcatcgaccgggtaaccaagcgcgccattttgcttgaacagcaggagctgcagagcgcaggcgtcttcgtggtgcgcagttacgacgagatgttttcgaattccgacaagactgcgatgcttctggtcaaccatgaacttcgtctcaggtacgaagaccagatgggaagcatcctaaaggcaaaggaagcccttttgaaggcgctgaagaaggcttcgggcactaagcgtgacatcgagcgcgaaatctcgcaggtcttcgtaagaaacaacaaagggttcgtcactgccctgcgccgcgtccgagaggaagtacaagccgagcaagcccaggacttttcgaagatcccttatgaagtcctgttcggtgacaagcccgcagcgttcttggagaaagccgatgtaaaggtagcgatcgctggctacatcaagaactacaacgcccttctgtctcgttcaacgtacttccgcaagggcgttttcaactacttcaatgcgagcactatcgcgaagaatcttgcggacaacggattcttcaatgcacagcatacggttaggctgaatggcgccgctgaacccgaggaagtccgcgaccggcagcaactcgagcagatcattgatactgagcgcgatcagatcctcaatgatccagcgctgcgcaggagctttgaagccatcgagaaatcgatcaatgtgaatgcggatctacgcgacctccatgcgttcttgctggacaatgaggaaatcgttccagagctggagaacatggagagcttccgccagaagacttggatctcctacctaaaagcatgcgcgtccgagttcaacaccttccttgagcgggaagcagagtgcgcaggggcactcaaagaaatcgaggatcaagctgcacaagagagcacgcagtggagtgaagtgatccgcatattcaatgagcgcttcagcgtacctttccgactagaagtgcagaaccggattcttgtcatgctagggcaagaaagcgcgccaacccttggcttcagatttgaggatggaaatggagatgtcgctgaagtcgaccgtagtcgactgatgcgtacattaagcaccggtgagctgaaagcgctttacatcttgaacgtcatcttcgagattgagattcggcgtcagcaggatgagcccaccatcttcgtggtagatgacattgcggattctttcgactacaagaataagtacgcgatcatcgagtacctacgcgagatgtccgaggatcccaagttcttgcagctcatcctcacgcataactttgacttcttccgaaccacccagtctcggtacgtcgagcggaacagttgctacatggcggtaaagggtccaaccgaagtgcgtctcgaaagtgcctatgcgctaaagggcatctttcccacatggcgtgacaatttcttcagaagttcgaagatgaagatcgcttgcataccattcatccgcaatcttatcgagtacatcgccgacgaccaagatcgaaactacttgaaactcacttctatgctgcacattcgtgcggacacggcagagatcatgatctccgaccttgatgacatcttccgcgatatcttcggcaaggagggcgcgtctgacgaggcgaacaagagtgtagtcgacttgattaaggaaacggccacaacctgtctgaatgagcccgagggcatcaatctagagaacaagatcgtgctctcgctcggtatccgcctagtcgctgaggagttcatgatcgcaaagatcaacgaccctgatgaagtggccaggatcacatcaagtcagaccggaagattgcatcagctctacagacaacgggtggggaacgaagatcgggaagccattgatgtactccgcaaggtcatgctcatgaccccggaatccatccatctgaactctttcatgtacgagccgattcttgacatggctgacgaccatttgcgcaagttgtacaggcgcgtcagagctcttgcgtaa

SEQ ID NO: 534870 - DNA, 1731 bp, Stenotrophomonas maltophilia
atgaaagagccagagattgcaacgcctagcgaaatcttcagtcagtcagctagatacaaggcacctgctttccaacgctactacgtttggggaaggaaggagtggaacggtctagtcgaagacttggaaacggctagcgggagatccggtcagttcttgggggcaatcgtcctaaaggatttgggaaagcactctggccccatgtcacccacgacctatcttttggtcgacgggcaacagcgcctcacgacgttgtatttactgctgctggcactggcggcggaggctagaaataatggccatcagggggagtgtgagtacatcgtcgagcagtatcttgctgagaaaaacagatcttttctggggtggccaaaacttgttcctacactccaggatcgccatacgttttatgagatcttgcggcatgctctcccggacgtggcctgggacacgaggcatgatcccgtcgagggaaagccgcgagcctcggcgccgctcgtggaccagtggaagcgtatatgtactaccgttgcccagaaaactggttcggatgttggaaagttcaagaaaatccagttggactcaatcttgtccattgtgcagacccagctcaagataattaatattacgctggaaaataacgatgatgcgaacggaatatttaatcgattgaatgccaagggtgttgccctggagcttgctgatctcgttcgaaatgaagtatttagcaagtttgttccagtgaacgctaaggatgccgcgaaagccgagctgttcttctctaagaactggattccgttcgagaagatgtttccggatggaacacttgatgctttcttcccgatatatggccacattgcactgaaggggcgtgcaacaaaggcggctgcattcggggagcttcagcagctatggaggaaagcatcgcccgctactattattagcggaatggcggagtatgcgccattctatgcagcgttgagccgatttgacggcgatattccttctctatcttcggcgattaatcagcaggtcgagaggatatctcgaatgccaaaaactcgcgtcacttggccgttccttatacaggtgcttcactcggtatcggtggaaaaactttcgcagcgtagtgcgcttaaatgtcttaaaattgtagagtcctttcttgtaaggcgcgcacttttcggcgaagagcctacaggtttgcacgctgtattcaaggtgctttgggaaaagactaagggtgatcccaaggtcgtgctggataagatatttactagaaccattactagcccgtcggactcggatttgatcgctcacctcaagaaggagccgagcgatactcgcgcgattctgccatacgtgcttcaggagtgggagcggcatctaatattgacgaataagtatgatccgccaactatcacaagggccactcttgaacatataatgccaaggaatcttggtaagggttgggttaagagtgtaacggcccaggatcaccatagggttcataggctaattggcaatatggctgcgttaagtgaggggcaaaacaagagtctgaaggaccaggcatggtcggagaagcgtaaaagattcaagggttcagactttaagtcgacaaggaagttgtcggctaaggtaagttggactgtagtagatgtagattcgcggaccgctagcatgagtaggtggatagttactcgatggcctgaacttggaaatatatag

SEQ ID NO: 534871 - DNA, 522 bp, Stenotrophomonas maltophilia
atgtggatggatcggaacggcaacgcgtactggggtggggcgctgtctgcaggcattctgcgcaacgctgcgcagagcacctccattcagaccataggcaacagcacactggtcggacctttcgataccaatggccgcaacaagcaggtggtggtcggctataaccgccgtcatcgccgagttaagagcgcatatggcagagatggcttcgttgcgggtgctggtagcaacggcggcgtcatcaatctgtaccgtcagttgaatggtcagtcagaagtgctgtggcagcagatcccgatcaccggcggcgttctaatcacgaacgaggtggacggtcccgatactgccgactcagcgtggaatgcatcggtgaccctcaacgacaacagcgatggttcgacgcgtcgtagctaccgtgccgagatcgtgagcttcaccgaacagactgtcagccaccagtcgggcagttttgacagccagacgatcacccaaagtttgtcgattgtgtccatcgagcagtag

SEQ ID NO: 534872 - DNA, 216 bp, Stenotrophomonas maltophilia
atggacgtgacgatctaccccagccacgccaagtgcctgcgccgtgccggcctcgtccgagcccagctgttcgcccatgtgatcgagggcaagcgctacaccaccgcgcaggtggccgagatcctgggcgtatcccgcagcgccgcatacgaccggatcaagcggcggtcccacccgctcacctgggcgggcctgcagaaggcgtgcacgccatga

SEQ ID NO: 534873 - DNA, 1167 bp, Stenotrophomonas maltophilia
atgatccacatcggcaactgcctggaagtgatgcgcgggatggccgacaactcggtcgacgccatcgtgaccgatccgccctacggcctctccttcatgggcaagcgctgggactacgacgtgcccagcaccgaggtgtgggccgagtgcctgcgtgtgttgaagccgggcgggcatctgctggccttcgccggcacccgcacgcagcaccgcatggccgtgcgcatcgaagatgccggcttcgagattcgcgacatgatcgcgtgggtctatggcagcggcttcccgaagtcgcacaacggaccatggggcggtactgcgctgaagcccgcgctcgagccgatcacagtggcccgcaagccgcttgccggcacggtggcagccaactggcagcagcacggcacgggtggcctgaacatcgcgcggtgccgggtaggctctgatggggagcaactgcgcatcggcgctggcgggataccttgccgccacgacaccgacacaccgcgcacccgggccggtgaggccagtgaagaacgccggtatgtggacatcggcagcacgaactttgcagcaacgccagggccgcgtggaggtgatcccgacggccgctggcctgccaatctcatccacgacggcagcgatgaagtcctggccgctttcccgcaagcgccgggccagcagggcgtagccaggactgacggcagtccgcaaggcaatgcaatctatggtgcgctgaggcacggcaccaagcagcctaacccgcgcggggacactggcagtgcggcccgcttcttctactgtgccaaggcaaccagagcggatcgagaggccgggctagatggcatcaggaaatcagcggccggcatggtgtctaacaccagcgggcagcacatgacccgccgcgatgagggttaccaggtcgctccgcgagcgaacaaccaccccaccgtcaagccgaccgacctcatgcgctacctgtgccgccttgtgacccctgccggcggcgtcgtgctggacccgtacatggggagcggcagcaccggcaaagctgccgttctcgagggcttccagttcatcggcatcgagctggacccggcctatgccgcgatcgccgaggcgcgcatccgcgttgcacagcccggactgccattgggagcaatcgcatga

SEQ ID NO: 534874 - DNA, 309 bp, Stenotrophomonas maltophilia
atgaatcgacgccacatgtacaaggctctccgcaatcgcatgatggccttgtgcagtaagccagttgatcacctcgtcaagcgcatgatctatgccatccccaagcttccgcagatgcaacgcgcgttcgcggagatccagctcactggcgacatgggagctccgagcaagtctgatggcatttttctcgccgacctcccgcagtcgataacggtgatagtagtgagtgatccgggagcccagtatgagcagtgctgcgcccgtgacggccatgatctgctgggttgcgaacgatgcaggatcgaatga

SEQ ID NO: 534875 - DNA, 462 bp, Stenotrophomonas maltophilia
gtggccgatcaaatccacgatgtcccgcaaaccctcatcaagctggaacagctgcggatccgcagcgatctgcatagagccgcacgcgacgcactgaacgagcgccggaaagatcttcgcgcccatcggcgggaaatcgaagaacagatgcgggttgaagccagaagcttcagcggcccgcaaccggccattgagagcgttcccatgcgtggttacgacgccggcgtccgccagggcggaaacagtagtttttcgagtaccgcgagcaagttgaccctcgatgagcaccgggagaagaggctcgcggtgctggaacgtcacttggccgcggtcgatgccgtcgccgccgtcgtggaaaccgcactcgctgaaacggagcggaccagcggcgacgtctcggcgttccgagccgccgagtcccaccttcagaaaacgctggccgattggggcctgagcagctaa

SEQ ID NO: 534876 - DNA, 459 bp, Stenotrophomonas maltophilia
atgatcgatgcccaccccaaactgacgcgcttgcgcgcacagatatctaagctggccgaggatatcgagggtatgcgcgaaggcgtgcagcctgagtcagaggccctcgcagccgttgaccagcatatccagaaaatggcggagggcgtgagaatccagccctttgcgttcgcgcacacctctggcggcggtgaccccgtatcgatgtatccggaagacccccacaggtatgcctgcaagttcttccccgacgtcatccggtcccgcctctacgatgaagtcaaggcgatctatcagagcggcctgacggtcgccgatgacgccgctctcgaaaagatggaagcccgcctgctggacctggagcaccaggaagaagcattcatccgccaggcggctgccgagggaaagagcatccctcgccgcgcggacgcaaaccctgtcgtgctgctggccgactag

SEQ ID NO: 534877 - DNA, 1053 bp, Stenotrophomonas maltophilia
atgtcgcttggcgagctcgttggcatgtatgagaacgacgagctgatcattaggccggagttccagagactctttcgttgggacattggacagaagtctaagctaatcgaatccatcctacttggcattccactgcccccaatctttgtgtttgaaaccgaagacggacggtgggaactgattgatggacttcaaaggctgtcaaccatcttggagttcattggcgcgcttaaggaccacgctggcgctgccatcgctccctctgccctggaggcaacccactatcttccatcactgaagaatgctgtttgggagcagtccgcggatgtggcggacctccagcttgagctgcagcagccgattggcaagccgcagcagctggcgataaagcgcgcacgcattggcgtagaaatactcaaacgacccagcgacaacgacgccaaatacgatctgttccagcgcttgaatgctggcggcaccccggccaatgcgcaagagcttcgcaattgcgtcatgctgatggtagacgcgaattacttccgagccgtcaaagatttcgcagacacccagcagttcaaagagatcactggaaccaatgacgaccaggcggaacgtcaacggcacgtcgaatacgcgaccagactgctagttcacaccttcgtgccgtacaacgggcttttggatgtggaagcctacatcgacgaaggcatcgttgctctcgccaaacaaggcgactcgagcagcgctacgcgcacgctaacacagaccaccgatctcctgtatcaggcgcttggatcgaatgcacttagaccttgggatggcacccgccacattggtagagttggactggtcggcttggaaggcatcgctgtaggcgtggcttctaaccttgcctcgattctcgcaacagacaatcctgtcgattttgttcgatcaaaggcgacggatttctggctctctcctcaagtcgccaccttcaagtctcctggcttgcgcgggacacagcggattcagatgacggttccgttcggggctggcttctttctgccatga

SEQ ID NO: 534878 - DNA, 648 bp, Stenotrophomonas maltophilia
atgactagagtgcgaacggccgagcttcttggcgaggttctaaactccgacagggtctggcgaatcagggagttgtcggacttgaaagcggcgattcggcgctctgacagcatcggccgtcgcgtgcttctgcgcgcgctggtcactattgcgtatgcccactgggagggctacgtgaaactggcagcgaagagctatcttgagttcgtggcgacccaaactctgcgctacgcagatctgaatccacagttcatgaagaaccattttattccaaggcttgccagcctgtatgggtctaagaagaacttcggggatagctgcaagatagtcgaggaaattcttgcaggctcaacacttcacttttccaccgtagatgagtctgtcgtgagtacacgatctaatctgagttgtgcagtgatgactgacatatgcatggtatgcggcgtcgattcaaccccgtataactcactatcgactttcattgataagattcttcttgaccgtcgaaatgcgattgcgcacggcgagaatgcattcatcaatgcgagtcagattgacgaaatcgtcgatactaccgtcacccttatgcgctcattcggggaccaacttgagaacgccgcggcaactgaatcctatcgaacgccttag

SEQ ID NO: 534879 - DNA, 525 bp, Stenotrophomonas maltophilia
gtgagtggggatagccaagagaggcatcggatcgcggccgagtgggaagtgctcataggccgcttctccctagcgatgggagaggtggagctcaacgtgtcccagatgttgatgctcatcggcaggagcacacggggttttctcaacgaacgcttaaaaaggctttcggacaaccttcaggatctggagccgtcacttgtggacccatgccgccgttgtattgaggaggcgaagcggcttaagaaccaccgcaatgagatactgcacgcggcactcagtatctacgtctggtttgagggaattcccttggaaggaacggtaaatgcggacgaaattggtgacaggaagccactactcggctcaaagatcatcagtttcgacgagaggaggtcagagatagatccggaggcgatgagggcgttcatcgctgacgtccgtgccctcaatcgagagctgacctgcttgctgctgcgtcaacaagcattcaatcccgaaccggtcgcagggccggctggcgagcgttga

SEQ ID NO: 534880 - DNA, 534 bp, Stenotrophomonas maltophilia
atggccctggtgctgctgatcaccctgccccgcgcagatgcacgcctgaaatggcgatggctgctggccatcaccgtctccgccggcgtcacgcttgcttcgaagctggccttcatgggctgggggattggcatcaagagccttcatttcaccggcttttccgggcatgcggcaatgtccagcgtcatctatccgaccgttggtgtgctgctcgccggagccggcaagcgtgctcgggcgattggcctgttgatcggcgcgttgttggccgccgccattgcctggtcaagaattccgctgcgtgcgcatagcctcgctgaagtcattgccggacttttgctcggcctgggcttaagcggctgggcattgcgcgccgcgttgccatcaggacgccccactgccctggttgtcgcagttgccatgctcgccgggatggtcctgcctctcaccctgcccgacctccatacccatcaactcgtgatcgcgttggccaagctcatctccgggagggctgagatcttccagcacttctga

SEQ ID NO: 534881 - DNA, 687 bp, Stenotrophomonas maltophilia
atgagcaggagcgctctctccgcgccacactcggcgcagcgcggcgttgccgcgctgttcttgatcatattgggactgtcgggctgtggcgtcgtgggccgtaccagcatcaagacggctcaactggccctgcagggccgccccgacattgaccccaccgctgaggaggtcgccgccaagcgctatgcgcagatcaaggttgtcggccctaatggcggtgccgtgctggtgctaggcaatatcgatggcggccgccaggcttggtacagcagtgagcgcagcatcgtctttctgcaggacggcctgctcgtcggcacctttggtggcagcccggaattgcagaacatgtggatcgagggcgagaacccatttagggcgctacacaagcttgatcgcatggcaactgtgcatcggcactatgacctgatgcccggctaccgctatggggtggaggtgcacggcacgctggagcccatgggcagggaaaccgtcgagattctcggcaaacgtcgtagcttactgcacgtgcgcgaaacacagcacggcaagcggtggagggtcgagaaccacttctgggtagaccctgacaacggcttcatctggaagagtcgccaagcgatcgcgccaggcaccagcctggaaatcacccagctcaagccctatagcccggatctgctacatcgatga

SEQ ID NO: 534882 - DNA, 777 bp, Stenotrophomonas maltophilia
atgagcctgcgtctactcgccctgctgctgggcacaataactgcagccaccgccacagccgctccacagctatcggtggacgtggtgggtcatgtcagccatcccggcctgcagattctgccggccggcgcacgcctcagtgatgccattctgaccgccagtccggagacctccgcctacccattggcagccgcatggctgcgtgcttccgagcagatcgcgcagacccgcctgaagaccggtgttctgttcgacctcgcccaactggtagaaaacacttccgccgacgctgatgatgcaagtgtcgcccgcacccttgcagacgtcatcaaacgcatgccggtaaccggtcgtgtgcccgcactgttgaccgcgcgcgcagtagaagtggcagacgcaagcaaccgccccctcggcgacggagatcgcctggtctatcccggacgcccgaccacggtgaccgtcatgggagtcgttgcccagccctgtacgttgcaccatgttgcccagcaggcgccgctcgactacctgcgtcactgtcccgcgctgcgcgccgcgagcagggacgacctgtacgtgatcgagccagacggcagagtcgaaaagatcggcattgcgctgtggaatcgctcagccccctccacactggcccccggagcagtgctttacgtgccgttgcgcgcgagcgccctggccaaggtgaaccctagcctcaatgaggaaattgcaggcttcctcgcaacccaggtaatggatttaccgggagtttcgccttga

SEQ ID NO: 534883 - DNA, 1509 bp, Stenotrophomonas maltophilia
atgtacaaatatgcagtttttcaaggcggcggcgtcaagggtattgccctggtgggcgcattgcaggtggcagaggagcagggtgtttcatttgaaggcgttgggggcgcatctgccggggcgattgttgcagcgctgtacgcggcaggctacacggccgcagaaatgagattgatttttgaggcaattaattttgacgaaatgcttgacggtgttgggtttgctcgtttggcgctgggtaagagattggggctctaccgagggcgtaagtttcagacgtggctccatgggctactgttaaaaaaaggcgttcgcactttcagcgactgcaagaagaatctaaggatcgttgctactgacctcacagaaagaacgctggtaactctggacatgcagacccacccaagcatggaggtggccgaggcgattaggatgtcgatgagtattcctttcgtttttgagccggttcagatgggacgaagcttgatggttgatggcggggtcttaagtaattttcctctatctttgtttgacggaaatgaaacattgggctttaggcttcattcgaagtcaacgtctgtcaagttctcagccgaaggctacaaggaatatctggtcgcgatcatgggtgctatgttggatgggcgcgataattacgatgttcagacaaagagactcgcaggactgatcgaaattgaccctgggagtgtttccagtacgcagtttggtttgagcgatgctgagaaggcggatctctacgagagaggggtttctgcaggaagtaagttctttgttgagcccgccaatacaagtagaacgcatcatctatcgataagtggggaggcgcctgtcatagggctgacttgccctccggaggttggcaatgacacggaggtccgcttctccatctcagctctagttagcgttaaggttgatgagcaatacttgttggtgaagggaggtcgaatcgatcaatttcaacctgttggtggcgttctaaaggtttataaaagcgcgcatttcaatctcgctaatatgggtgttaaagcggatagtaaaattccaatcgatcaagatagtgaggatgatcttcgagttttcgttccccggcggtcggttgaaccattcttgcgatggttcttggaagggcgtggtcgagaggtttaccccgggcgagagtttggcgaagagttggttcagggtggcatactcagttccgctgctttcagtgttccgttttttgagtatatagggcgacgagtcgagggtattcgctggactaatcatttccagtgttacgaagttttaatttcggaaatatactcacttgttccaaacgacgagcagattcgagagctgagggcagtgaaggggcgtggtgagaatccggatgtaatttgggcaagccctgcgcttattagggcccgtgggtatgatgcaattagtaaaacgcaggttgctagaatttcagagcattcgacctggattcttgacggggttggcgattaa

SEQ ID NO: 534884 - DNA, 1776 bp, Stenotrophomonas maltophilia
atgagcgttgtgcgggtggctatcccccttcttaaaggcaagagaaagttcttcctggagaaggggcggtcttggagccttccggaacatgtgtttcttgcagcgctggtaaagaagcccagaactgtagaagagcttgccgaagatggagatgttcctcgtcgtctagttttggaggcgctgattaggctcatgcgtgccggatgggtcacgctgcagcaggaaggcaggggtgtgatctttagcgccaccgaaatgggacatgtggttgtcgatcaagacgagcttccaaggctagctaaggcgacaagccgctggatgaatttcgtcattgacgaagtcacaggtacgctatatcggagtcgtgagatgccgttctttgaacagcacattgtggaaagcagggcgacaagagagcgattggtatggctaaagacacgtaatctcgatgcgtttgatgacactgcggccgttctggcaaacctctttgaagatgacgagagatttctcggaattgagccctcggcggaaaaaatggtgcgaagattcgccattgcaactgtgcgagacaacaatgtggaggggctgcctccccgtgcgccctcctggctctccgatcttgtcaaggtggctgccggtacagcaaggccttctccgatggcgttgagatcgccgcatttcgactcggatagccactctcctcaacgggaaaggtccgttgcttcaagcatggatgcgacctttaaaatggaagatctactgcttgggggggatgctcatcagaaggtttttcgcgaactgatacgtaaggtaaagcgacggctaataatccactcgacgtttgtttctgaagacggattctcgcaagttcaggatgaactgatctcggctgctaagaggggggccatcattgatattctttggggcgaggatgaaaataagactgattctgttacaactgctaaaactattgcgatcattcgccgccatattgaagctatgggtctggcctcaagcatccgaattagtcctttctccactagatctcatgcgaagattgtcgtttatgatgacgggagaactgagaatctttctacgattgttgggtcatgtaactggctctcaacaggcttcaagaactacgaggcttcggttggatttagtgatcctgtggtggtctcagcggttctcgaacagatcgcggaccttacccgtggcggcgatcgtcattggacagatttgactagtgaaatggcaaggcttgcctcggatgcgcgcattcggaagcaagcctcaactccgaatgcgaaggttactcttgtacttgggccgcaacatgcgcactttgcgcgagttgcacgagacaacgctcgacaccgaatatttgttactagccataagataggagccgcagcccgtccctccgtgttagtgcctgctcttgcggctgtccgagagaatggagtggaagccagaatgttctacggactggagggtccttcggaaatcttcaatgaactgttcattgccgaaaatgttggattgttaccatctccagttctgtctccgcgtcttcatgcgaaggtgctcgcttgggacgatgaccatgctcttattactagtcaaaattggctatcggccgatcccggggagtcgaatgttagaagggaaattgggctgatggtagagtctgctggcgtcgcgaggaagctcatcgaccacttcgatgcagcgcggggttccgacgaaatgattgagacaggggggcgtagctga

SEQ ID NO: 534885 - DNA, 3585 bp, Stenotrophomonas maltophilia
atgaacaaaaactctaggcgtcgtcgcaagactggattcttagctaactacacggtggacgaggcctacctccagaggcccgatggtgcaacaggtcgtcctggagtgaccagcggtagggatattgatggaaactctgttcttattcgtgaatggagtggcattgggaaagcgccagatagcaatctagagcagatttggcgtcatgaactgaggcagctgcatcggttagccggttacccaggttcggcttcctgtattgctcacctccatgatgccggattcgacgctgccggtttctatctcgttattgcgccgggtcaaagacagcctttggagtttcttcgcaagaatctttcgggtgatcattggcttcgacagccgcgcgtcccatcaaatcggttgcgaatgtggacgaatataaagctgcttgttcatggactggagacccttcatgcgcagggaattctccatcgaagcatcgacacctgggctgttctgacggctggggggacggagccagatttccagctcacgggctttgagtggacaatgcggattacaagtgcagagggcctttcaagtcgacgctccaataagggtagtgtcagaatttctgattcatttggccaagactggagggactttggcctgctcgttgcagatcttcttggcgttaagcgtcagcgaattcttgatccggcaatcgcgccctttgaaattgccgaccaccttacgctggaggaagcgcgccttcttcgtattcttgtgcaaatgaatcctgagcagccactagacggtgatggaatatcctcccgaatagatggagcgcttgtcgtcttgaaatcagagatcgctagtcgtcaagcaaagcttcatatggcgattcgactaggaccgggaagcgcgctgagccagcgtattcgagaggtatccgatttcgagatagaaattgacgataccgaggctcaactggatttcgttaagaatgacttgtctggcgagccattgctattgtgtattagacagtcagatacgcatggcgaatttagaatggttctgcgggggcgacacctactatatcgtcttcaggaataccgtgcgccaaacggttccactcttagctgggacttttcttactgcgagagagttgatgctagtccacctgcgccgttcaatttaatggaacagcggagattgagctctgagtcaattgaagtaatgcgacttcgcgaagcgtcaagtatttttccgcgtgttcgggggaggctcatttcttgggatgagattaggagcgattttagaaaagtcagtgagcctgtttcagcggagcagagtgcgcatagagcgcttactcttctgcagttgatcgagtccatttacgcggccgccgacgcatacgcggtcgacctgctccagctacctgagtacaaagaaggtgaggagcatggcagatactggttgtctgttcagcttcgtgcggatgcagaaaggtccgcgctttcttcagtcttgggtctcaagtcgccggcggatcgatttatggatcttgtggaggccgaagggttcggatctgaagattggctgttggtggatggccgatcgctcagcgataaagaagcatctggcgcggaatggacgttcaggcagataatagagcgaccaggtcagcctccagcgttcttatttgatggccccggacctgtgccatttcttcatgatcccgtgatgctgccggcctcggtaggaagggatgtccagtttcgacgaaggctcaaggcgctcagagcccttaaaacacatcatgagttactccagatgatcgtcgatccccggcgtagggttttggatagtcatgatgattttgaggaggatgacgagctcgagaagcttgatgagccgaagcgattggctttggagcagattacgactacattgccgctctttctagtccaggggccgcccggtgtgggtaagacgcgcctggtgcgcgacctagtcagtaggcggttttctcgagaaccgacctcccgaatcctgctaacagcccaaagcaatgccgccattgatcatctaatggatgagctagcaggtgtactgcaggcggatgacccaaacgggccgctcgtcgtgagatctagcaagcgtgatgcaattgaagcgcccagtcagttcgatattagagaacagacttgtcgactggtagggcgccttgcggccagtgccttgacaaaggagatgccgccaagacttcaggcgtcaatttcagagctagcgcatgcagcgaacctctactctgcagcggaccgcaaagctggattggcggccggtagggtcgcggagcagtcgctgcggacctttgaggggcttgtcgctcgcgctgccaacatcgtattcgcgaccaccaactcgggcgagcttgagcgtctgatagatgagagagggcagtttgactgggctattgtagaagaagcagggaaggcgactggaagcgagctcatttcaccgctgcttctttctcaccgaaggctcatgattggcgatcacaagcagcttcccgcgtttgcatccgatcaaatgaagcgcttgcttgcgcagccggaaaaggttcaggaggcactgagaattggagaggaattcctcgggaagtcgcttcgagatgcaaccaccgaagagctattggatggtgtttctgaaaataagcctgattttcctgcactctgctctcaggcgcttcgagttctctcttactttgagtcggccatagaggcagagtttgagcgacaggcgaaggggaagaaggggcgtccaattgccaaaaggcttacctcacagcaccggatgcatcccgcaatcgcctctatagtctcaagttgcttctatggagatctgcaaaccgatcctgcatgtgcggatagatttagggtggagcctaggcctttctgcacggtagataatgtccggcttcctgcggcacctgttgttgtaattgacatgccatatgtgcagtctactcagaatcaaaggtcgggagaccaataccctgcctggcataatcctgccgaagtgaaagcagtgacagaaattctgagtctgcttcgcgcggggcaggatgtcgactatgtgccttcgctggccgtgctgtctccttatggaaggcaggtccgggcgctcaacgatgccattagtgatcagctgaatggaaggcttggccacatgcgggacttccgatctccgacgtctagcggtaattggtgccacaccgtggactctttccaggggagtgaggcggacgtggtagtagtgtccttggtccgtaacaatcaccactcctcgatccggagcgctcttggctttctgggggatgctaggcgtatgaatgtattgctaagtcgcgcgaaatggcagcttgtgcttgttaccagcactgagtttctcggcgaggtgatgcgtgctgagcgtaaccgatcaaatgaaggcaatgttgggttcataagctcgctgcttgatgaactccatcgcggtagagacaacggtgacgtggtgttcgttccattcggcgaactactggggagtagagaatga

SEQ ID NO: 534886 - DNA, 177 bp, Stenotrophomonas maltophilia
atgagcgccgactacaaccccttcctctctcttttcggcggtctgttcgcctcgaaacccgagccgatgaccaacgccggccgctacctgatgcagctcgacaccggtgacccaactggacctgttcgcatgaacaccgccaccgagcagctgcgcgctgcgctggccacgaactga

SEQ ID NO: 534887 - DNA, 720 bp, Stenotrophomonas maltophilia
gtgacaccattgaggatatctaaccggctgtcacggtatggcttctcctctggcgactgcgcgcaaagtcgcgcgagcagtggcagcaccatctcttcccttctccaaggcgtttcgtgccttgtcgatgaaatcctgcgcgagcgggtcctccgctgtgcgcaagccgcgcagcataagcctgagatgatcttgttgagcaataagaacattgacatcgcggccggtggcgcccatcaaatgcaggctgcttcgaaattgatcgaactcaggactccgatcaaatgcttccgctggtatcgccctgcgttgtgcgagcggaagcctgagataggccagaatcgtatcgcagttgctcctgaagctctccatgggctgataaagcgcgacgtgcatcgaagtaatcaacgcttgctcccgggcctctgccttctcatccagcctctttgcatcgttcaattgctggcggcgttgacgccatggaacccagacagcaacgagaatcgccgcgatgctgccgatcgcctgcacccatgcaggagcatcctttccgaaccttatggtgccagtgagccaaagcacaaaaagtgccatagcaaaaccgatggacgcgaacagtacgtgcatcagcacgttgttccaactgacattactctgtgtggtcattcgattgtccccttgttaatggccggaattctaccgttcggagatttcgcatga

SEQ ID NO: 534888 - DNA, 864 bp, Stenotrophomonas maltophilia
atgatgtgcgagcgatctaccggcaacaaggacaaggcccagccgcccagactcaacgccatcaaaggtgacgggtgcatcttttgccactacaccagcttgatactcgacgatgcgcggggagttttggggattggcggggtagaggaggatggttgtgtgatgctaggtgtcgaacatcgtcctgatttgagttgcggcgatcctaatgtgatgagctgcttcttcaagcgtcgcctggtagttctctggatcaggcattggatcctcgtcgcctgtgagctcacagaagtaccggccgcgattcgcataatgaagctcggcatatccaatctcctgtttcgctctgtcggtgcgatcgatagcaagctgaaggtgcatggcagggtcccccagctcatgcagaattgtcacgcgactacgcaacggatcgggtaccgacgtgaatccgcctgcaacgctcaggcatatctcaagatcgttctcaatcctgaaaattttaagggcctcttcgaggtcgcgtttcatcgcttcgatgtcaggaaggaccaccattgccaatccgcgggcgcgaagcaaatccttctttcgttcgctgcgaatcgtctccttgtgcaatctaaaagggacgtggaaggcgacgaggatcgctacaacgctgcctattgcttgaacccatgccggccagtcacttcgcggtgccttgccgctggctggattgccgctcataagcgcccaaacgaagaatgctcccgcgacgaaagtcataacagatacaaccgcccaatctctatcggtccttccttgcttcatggcattcccctgttgttgtgcggaattctacctatcgggctggtcgcgtga

SEQ ID NO: 534889 - DNA, 285 bp, Stenotrophomonas maltophilia
gtgaataccaagaactacaaagtcttcagttacaccgagaagccgcacgtgcgtgccttgaagctagtgccttgcagcgtctgtagccggcctggccccagcgacgcccaccacatcaatcaggtgcagcacttcacgaccgcggccctgtgcaaggactgccatcagggcagtttcaacggcatccacggccagcgccgcatgtggcttgtcatgaagatggacgagctggctgccttgaacgtcaccctttcccggccgcagttgaaggaggcctcacgatga

SEQ ID NO: 534890 - DNA, 474 bp, Stenotrophomonas maltophilia
atgaatgctttgctttcccagatcaatggcgttgcaattgagcacgttctcgagggggataaagccactctcgaggggatgagagatgccatctgcaactggattgagtttgagatccagaaaagccaaccacatgacgtgggcggtgctactgctgcagcaatttctgttgccattcaaaagtttattgcagcggtccatgcagctcagcgttatgccaaggcgaagcaagcggtcgacgcgagcgagagcaagaacaaggtcgagttcgatgagctgcaaagaaagttgagggccgataaggttctgaaaggagctgaagagtcgaggtactatgcgcttcttgatgaactgaaaaagctggacggtgacgccttgaaagagcaattggcttgccacaatgagctggtcgcgatccagggtctaattccatcggaatgcaagccggcgggcggccagtgggggcatagatga

SEQ ID NO: 534891 - DNA, 876 bp, Stenotrophomonas maltophilia
atgaggaagacaattgcattgctgtccgctctcgtcggagcagcattcgcaaccaacgtgcatgcgtatgattactccatacagtgcgagacgtgcgtaactgacgcgcagttccaagcaaaggcccgcgacatcgcagcgttgaacggtagaggtggcggtttcttctacgtgtacaacctcggagcgaatgttgttcaaaagtggtggatcaatggaagtagcggcgggggaggtggcggcgttaagccccgtgctctatccgcagcagccacagcaactcagtcgccggtggagagccacgtaagggtcgaggtagacaagggccacaaactctatgtgattggtggcaatagccttcgccccatttataacgttcccgtccagcatctctctcttcccgctgcgaacggcaagtcaacctatgacgtgctactcgacaacaatctgaaagcgcagatcgagtcagctctgggtgacaccagaaccctaaactcaatcgtcaatgcgaacgttctttcgtcgttgatagacatagcgcagaatgcgacgaacgttcttgggctaaaggaaaagagttttctgctgttccgcgtagtgatgtccgacggctcgtacatggactactccctgctgattgacgatacgactgccgacgcaaaagaggagtctgcacgtacaccgacgggacagctgattcccgcaagtcagtcaaacatacgaggcgtatggaatggcactggcgagaacctgggccagctggtcgactatttgagccagctcggagtacctgtcgagaatgtcggcgttggaaattatataaccgaggttgtatgtgcctcgtcgaagtgctctgtgcgacgcattcagcgatag

SEQ ID NO: 534892 - DNA, 699 bp, Stenotrophomonas maltophilia
atgcttgatccgcccttggcgcactggcacactcggaggccaacccgagggatgattgaaatgacactggcatatgactcaaatgatatcagcaagatgcctttggatattggtggttggctcaaaaagaagaataaagggaatccttgctgcgttctttgcaattcgattttgtcagtacgcaatcttcataatgatagagacactcatttcttgcacggcgctaattctcagtgtcctagcgttgcttcgataaatgtatcaagctcgtatttgaaaaatctgtctaagtcgcgaggggcatccgcacacgttcgagatttcgttcgcgacaatctttatggcgtatttacgcggatgcgggctgtattgtcgacgataacttggtttgaatttaaagagtgttgtgagaatgctaagaggctgcaggtatgggacctggttgatcttccagtcgagctgatcccatatgttcttcttacatgcaaggacagctttcctgtcagtaaatataggacacatagcgcttccttctttttggagccaaacccctcagttggatcatattggaacttctcgcctactcgcaagcgcatcatttatgaagtgcgtggtcagagtgggactatagttgcccatgaaatcgatgctgcgccagctcaagggtctgtaattagtcagataattgcactgctttga

SEQ ID NO: 534893 - DNA, 252 bp, Stenotrophomonas maltophilia
atggtctctaggcttaacataaataccggcaacggccgccttactccaatcggggaaaaggagacggttgcctttggattctcgggagactacgccaacgtcaatgtcaacctcaagaaactattttctgagaaccttgatgagaataatggcgtcccatccaaccaaaggaaattcattgacttccgcgctcagacaattcgactgagagatggcaaagtcgtcaagtacatcatccggagaatgaagtga

SEQ ID NO: 534894 - DNA, 744 bp, Stenotrophomonas maltophilia
gtgagtattcgcttcagtctgatctgtgctgggatcatcgtcgcagtattggcctcatatgtgtacgcctttgctttccacttcaagctccccgtctcgagcgacccttcgcactggggtgctcttggtgactatgttgggggaatacttaatccagggctatcattcgcatcaattctccttatcattcgcacaattaagttgcagcgcgaatctaatgacatcctaagggctgagctcgacagcacaaagcgcgagtcaaagttgcgcgccctggatggcaagctgcagcttcttattgcagcccagtcagaagagcttaagaatttcaagctaagctttgagttagcagatggcaccacgaaaattcggggcggcgtgaccgcaattctgtatcttgaggagcttattctagattgcttggagaagggcgggagtccaaatttcgagctactgctggaacacctggacttcgaggacagtcttcttggcgcacttcgccgattttacatacccctccgtactattgtgcaggacctcagcgacagcaatggattttccgaagaggttcgcgaccagtacatggagaatctgatcgggctaactgacttttcactacttagacttatcatgctgagtgcgagacatattaactctgcgcctacagagtacatacgaaacagcccagatctcgatcgcgtcctcgtctctatgcagttttcgagctggcccacgtcccgatag

SEQ ID NO: 534895 - DNA, 132 bp, Stenotrophomonas maltophilia
atgaaggatctttgtcctggcacgggttgcgaggtgctctgctacatgcggcaaaacaagttcgtcggtatgagcgagccggtggggccgcggcttaatgagctgcagtcggagaatacgcggctggtctag

SEQ ID NO: 534896 - DNA, 669 bp, Stenotrophomonas maltophilia
atgagcgtcgatccgcgggtggacggagaagagcgtgcaacgctcttcttcgacatggacggcacgctgatcgattcggaagtgggcatcaccacttgcatcgcctatgcgctgcagaagatggatcacccggtgccttcgcaggaaacgctgctgggctggatcggtccgtcgctgcgcaccacgttcgcgccgttgttcggtgagcccgagcgggtggagcaggccgtggccttctatcgcgagcgcttcgacgtggaaggttggcgcgagcatacgatctacccggacatcgaagcggtggtacgcgcgctgcacgcacgcggccatcgccttgcggtggtcaccgccaagaacgagccgcatgcccgccgcatcgtcgagcatctgccgttcggtggcctgttcgaggacgtgatcggttcaaccccggatggctcgcgcagcagcaagccgcagctggtgggcgaggcgctgcatcgcctgcagctggcgccggaacgctgctggatgatcggcgaccgccgcatggacatcgagggcgcccgtcaccacgggctgcgcagtgtgggcgtgctgtggggctttggtggcgagcaggagctgaccgaggccggtgccgggcagctggcccgtgatccggcgcagctgctggccttgctcgcctga

SEQ ID NO: 534897 - DNA, 1011 bp, Stenotrophomonas maltophilia
atgcgccatgccctggcgcgtgcgctggatgcagctccggatgtgctgctgctggacgaacccagcaaccacctggaccgcagcgcacggcgctcgctgctggcccggctacgccagtaccacggcaccttggtgattgcctcacacgacaccgccctgatcgaggcgctgtgcggcacgctgtggcatatccacaaccagcgtatcgaggtcttccagggccgctaccacgaccaccagctggagctgcagcgccgacgcgacgcgctggatcgtaccgtgcgcgacctcgaccgcgcgcagtcgcaggcccacgacgctctcatgcgcgaacaggaacgcgccgcctcctcacgcaagcgtggcgcggtgaaggtggagcagcgcaaatggggcacggtgcgctcggccaccaagctggagcgcggtaacaccacggcgggacagaaacgccagcagatccgagacgtgcaggaagacatcgccgagcgccgccggcagctgcagcgcgacgaggccatcgcgccgcgcttccagcttcccgcgggctggcgacgggagggcgtggtggtgcaggtcaccgacggcgcatgcggctaccacgcgcccctggtcgtgcagcagctgcaggtacgcctggaggtgggcgactgcctgctggtgaccggcgacaatggcagcggcaaatccaccttcgcccgcgcattgcagggtgccaccgatgtccagcgtgagggcgactggctgctgccagcggcggagcaggtcgcgctgatcgaccagcactacgatgcactgccgagcgcgctgacgccggtgcaggcgatggccgcatgccaaccccaatggaccccctccgaatgccgcctgcatctggccgacttcctgttccgtggtgaggctccggcgcagacgaccatcggccagctgtcagggggcgaacgcgcacgcctggcgatggcccctgtctcttatacacatctgacgctgccgacgactccttacgtgtag

SEQ ID NO: 534898 - DNA, 480 bp, Stenotrophomonas maltophilia
atggatatgaggtgctgggcattggtgggtcttctagcgttcgctgtttccgccgaggcagcgcccagcctgtcgtgtcaactgcagagcggtcagttcaaggcgggtgggggagggaagcccaaggtctccgctttcatctgggccacgggtcatggctctgcaacgcctactggccccatcagaaccagcatcggccgcatcgaacctgtggaaggccgggactacaaaggcgttatcaagctcgatggcaagcccattctgctgcctccggaagcacatagcgtggtgggcttcggcaaggtttacgacttcgggggagttgttgccttggcttacctgggcgagcgcgatgaagactcgtctgcccggcctagccagatcgtcgtcgtcatcaacaaggcgggttcagtgatcgatagcgaagtcctacctggcgcgagcctcaacccgggcaagcactgcttgctcatcgactga

SEQ ID NO: 534899 - DNA, 183 bp, Stenotrophomonas maltophilia
atgcgccgacacgccatattgttcctgctgccacgggcttcgagccatccgaccatcgccaatgcgataccgatcctggacatgccgggcatgaagcaaccggcgaaaccctgtgcgtgcggtgctgcgatcagcagcatcgcgccccgccgcaatgagtggggcgcggtgggcggccgttag

SEQ ID NO: 534900 - DNA, 285 bp, Stenotrophomonas maltophilia
atgccgaaagtccccgccgcaaacctcgcccacctgggcgcagcagtcgacgcaatcgttgcgagcaacgcaatgctcttcagcatgctggcttctccagagcttgttgaagctgccgcgaggctgtttgaccagcttgctgccagcccggtccaaagtccgggcgatgagcttcggttcgacatctttggactgacggcccagcagctaaggcagatcgcgaaatctgatgtcctgccacaccgtagtgctgccgcaagcaccgagcagcatcaagagagctga

SEQ ID NO: 534901 - DNA, 1092 bp, Stenotrophomonas maltophilia
atgccggccgctgacaccaaccaggaaagcgatgtcggcgacgtaagcgttgccgacgtcctggcagcgcaggcccgcctgcgccgcttcctgccgcccaccccgctgcaccatgccgagcgcttcggcacctggctgaagctggagaacctgcagcgcaccggttcctacaaggtacgcggcgccctgaacgcgctgctggccggccgcgagcgcggtgacacccggccggtgatctgcgcctcggccggcaaccacgcccagggcgtggcatgggccgcctaccgcctggacgtgccggccatcaccgtgatgccgcatggcgcaccggccaccaagatcgccggcgtcgcccattggggcgccaccgtgcgccagcatggcaccagctacgacgaggcctacgccttcgccgtcgaactggcgcaacgccacggttaccgcttcctgtccgctttcgacgacgccgacgtgatcgccggccagggcaccgtcggcatcgagctggccccgcacgcgccggacgtggtgatcgtgccgatcggtggcggcgggctggcttccggcgttgcactggcgctgaaatcacagggcgtgcgcgtggtcggcgcgcaggtggaaggcgttgattcgatggcacgcgcgatccgcggcgacgtgcgcgagatcgcccccgtcgcctcgctggccgacggcgtgcgggtcaagattcccggtttcctcacccgccgcctgtgcacctcactgctggatgacgtggtgatcgtgcgcgaggccgagctgcgcgaaaccctggtccggctggcactggaagaacacatcatcgccgagggcgccggcgcgctggcgctggccgcaggccgccgcgtggccggccgccgcaagtgcgcggtggtatccggcggcaacatcgatgccggtgtcctggccggcctgctcaccgacatccgtccgcgcccgccgcgcaagcctcggcgacggcgcagcgaaacaccgcgctcgcccagcaaggccagcgccctcgcctcccccgcctcttccccttcccccctgcaagccgtcgcacccgctgtcgaggagatttccctgtga

SEQ ID NO: 534902 - DNA, 240 bp, Stenotrophomonas maltophilia
gtgctgaagggcgggttcgaggcggccaagcgcttctgcgagaagaccgaactgttcaccctggccgagtcgctgggcggcgtggaaagcctggtgaaccatccggcggtgatgacgcatgcctcgatcccggtcgcgcgccgggagcagctggggatcagcgatgcgctggtgcggctgagcgtgggtgtggaggagctgggggatctgcaggtggatctggagagggcgctggcgtga

SEQ ID NO: 534903 - DNA, 837 bp, Stenotrophomonas maltophilia
atgcggcgccatcctcgccggtgcgccaggccagccagaaggtctcctccggcttgtgttcctccacctcgcggatcaccagctggccgcgcgccaccgcagcgcgcgcgcacggttcgggcaggaaaccgaagcccacgccttcgcactgcaacttcaatttgctggccatgtccggcaccgtcagcatctcctgccccatcaacaagccgaccgtgcgcggcagcagcctgcgcgcggaatcagagaccgcgatcgcgcagtgctcgaccagctgctcgcgacccagcacacccggcactgcggccaacggatgaccgggcgcgaccgcgaacacgaactccaccgtgcccagcggctcgaccacgtaaccaccgccactggggccctcacccggcgcgccgaccagcaggtcggcacggcggtccagcagggcctcccaggtgccggacagggcctcgccgatcaatcgcagccgggtcggtgcctcggcctcacgaaacgcggcgatatccgggccgagcagccaggtcgggaacaccgaatccaccgccagcgtcagttcggtctcccagcccgacgccacccggcgcacccgcagttccaactcgcgggcggcgcgcagcaggtgccggccctcgtccagcagcgcgcggccggcctcggtcggttcggcgcgcgggccgacccggtcgaacagctgaacacccaggtcctcctccagcttggccacggtgtaggagatggtcgagggcactttgtgcagggccttgccggcgccggcaaacgagccgcggcggtcgatggcatccaggatctgcagggcatcgaggctga

SEQ ID NO: 534904 - DNA, 240 bp, Stenotrophomonas maltophilia
atgatcgaagtgatcttgagttggtctgtccgtgaggtacggaatggggtgtctggtccagaggtccaagcggtgaccgacttccggctgggtgtggcggcgcgggactcgggcactgaggcgtttagagatagccttctccgacagttgtcgatctatcttgcggaaaccgtgttcttggacgtcgtccgggttgcagagcgcaaccgggaccttctcactggcgaaggtgtcctatga

SEQ ID NO: 534905 - DNA, 1050 bp, Stenotrophomonas maltophilia
atgcgccttcaggaatcaagcatttcggtagcggaactaattgatcagttcaaccgcggcgacatggtcgtgaacaacgagtaccaacggcaggcgcggctatggccaggcgccgcccgcagctatttcatcgatacaatcctctgcggatttccgttccccaagatctatgtcttagagcagctacgcttgccccagatgcgtcctttcaaggagatcgtcgacggacagcaacgcgtaacaactattatcgactacgcgcaggggcgctttgccctgggtaaaaattcgctacagtttgcgggaaggcgctatccggatctcgatcctgaagaccaaattagattcatgagctacgcgatctcttgtgatgtcattcgagatgctgagcgctcagacattcttcagatgttccgtcgaatgaatgcttatacgctccctttgaacgaggcagaaaagcgccatagcgagttcttcggtacctttaaggactgggtgactgaacgtctcgaaaagtgggggcgcctcatagctgaatggaagatcctgtcgtccagaggcatcgtccgcatggaagatgcggagcttatcgttgagattgcgctcgcaatggaggctggaatccaaagcaccagcgcggcgaagctacgcaagctctataagacgtacgactctgagttccctcttcatgcggagtgggcaaatcgaatcgacgaaacactccagttcatccaggcggacctttcgccactgcagtcaacgtacatgacaaagtcatatgcattcctgtcgttggtggttgcccttattcataacagatggggcattcctgggctcgctgatagcactcaaatccagccaaccggagccttcactaacacccccgacgcgcttaatcggctctcggacctcgcatatgcccatgagaacaaggatctcgacagcccctatcgccgctatgtagaggcttgcattgcgggatctaatcgcgcgccacagcgcctggtgcgagcggagttcatcctcaaggccatacagggcgcccagtga

SEQ ID NO: 534906 - DNA, 639 bp, Stenotrophomonas maltophilia
atggatctacagtggctgcagagccgcttggataggcggcttgacgaggttcgcgatcatctagttgcgacactatccaccgcagtttttccgatcagggatgaggcaaagcttcacgaactcgaaggcatcctgtcgaccctgtggcaaagctggaatcggtattgcaggcacgtcatcatggcgtcttgcctcgggtgcgacacaaagacactcgggaacattgcgggcgtccagaattccgaacccgaaattgcctacatcgcaaagaagcaacagaacggggttccgcctagtacggtgtccactctcgtcgtgacgaggctggagccgacctggggcgacatgggtaaattgatgcagatcatcaccgcgctttctccagtaaacgctcctcagcttttggctgcgtttggcaatgtaccgagaatcgcccacatacagaccattcgaaacgcaaccgcccacaggaacactcaggcgatggaagcgatttctgcgtggcaggcttcatacgttgctaagagagtgcgacaccccttggaagctctcttttggacagatcctaacgtaggcaagtacttggtacttgctcgcatagatgacatgagccaagccgctttcatggcgagttgctga

SEQ ID NO: 534907 - DNA, 1350 bp, Stenotrophomonas maltophilia
ttgcagtatcctgattggccgaatcggttggaattaataagtgtgaagatccgaggcgcaattttttttgagtttggaggcatctaccagcggcttgttagagtatttccgaacaagccttggctgagggcagtggcggatactgaggcgctggttcagcagttccctggaagaggaatacaagagcaactggagcaggaagtcgcattcggactcgcgttctgggagcgaaatggctacttgactcccgaggggtatcagtggagggtgctctatcacgcgatgtacttttctcgtcgcctggttgatcttattgaagctggtgaggcgaatggtggtcgcgtcggactgcgcgagcgcttcatgggagcgctgaagcttccctctgacatgagggcattgcagttcgagctctacatagcgaatcaactggaaatgcgcggttgtcgcattgaatggcccgatgaatgcgctggagaagaaacattcgatctccttgttcatcctccggagggtggccctacttttgaactggagtgcaagtcatttgctggcgacaagggtggcgttgtccatcttaaggaggctcatcgcttacttggtgctcttgcgtcttccactaagctcgggccattgcttccctgcagggatgggtatgcaagcatcttgacgataaggattgctgagcggctcccaagccgagacggccaattcaagacgcttgtaaataacttggtcgagatcattgaacgtgggggtggtgaatctaagtgcaagggagtgagcgtagctgtagagtttgcgccgctcgtcggagatctagatgatatggacgtgtgcttcaacgcagctgcacggctctcaggcgacctagcagctttctacgcatgcgctgaagatgaagatcgattcaagggcgtgcgagttgtcgccgataggccttccaaactctggaaggaggttgtagggatttctaagcgtgccttccaggagcagctcactggtaagcgaccgggcgcccttgcattgcagttgaccagtgaatcagacgattcattccttacggtattcgagtctggaaatagatatgaacgtctttcagaaaagctgatcaaagactacaatgcactgatgctgctcgttacgaacgatactactttgtctgtggcatgccattgcgttccatttaggtccgacgcatttatggaagagcggtcgatcatgttcgcaatgctcaaccctgagcatgatcagtacactatagcgttagagtctatgattgctatgctctgcgaagctcaggaacgtaccgatcagggtttcgtagacagaggtgtttatggtgagtaa

SEQ ID NO: 534908 - DNA, 189 bp, Stenotrophomonas maltophilia
atgctacgggagcagacgccaagcctcttggaaaccttcgcaaccgcgaagcctctttcggtcaactgcttaaccgcctcggccttgagcacctccgtgaactacttactcaccataaacacctctgtctacgaaaccctgatcggtacgttcctgagcttcgcagagcatagcaatcatagactctaa

SEQ ID NO: 534909 - DNA, 207 bp, Stenotrophomonas maltophilia
atgagcttgaagctgacccacagccgtgctcgcgacggagtcgctgccccgctggtgcgggtggaagtgcatctctctggcgacctgactgcaactaagatcgtgggcttggccggaactagcgtgcacgaatcctgcgggcgagcgcatgcgtaccgcctcgctgtgagcgcgcttcgactttccaagctggcacatcacccctaa

SEQ ID NO: 534910 - DNA, 321 bp, Stenotrophomonas maltophilia
atgtctggatctggtggtggtagttttgtaggcggtggggctcaggagatctcctgcgaccggctctcttttgacacgcagctgagctctcccaagtctgcggttgtagcggggatcgacatcgacgatgttctgtcggttgccatcgagcagcagggcgctgcacaggtagtggtgatcaagcacggcaatcaagtagccggcggcataacctctcccaagatgtcccgtttgcttgagtgcatgcggcagggaacccagtaccaagctagggtgctgagcaaggtcggcggtcaggtgaccatacgcatctcgccttga

SEQ ID NO: 534911 - DNA, 1182 bp, Stenotrophomonas maltophilia
atgatcagtgatgaagacttgggccagctgcgctacaagggagagggcgcggacttggactttaaagaggctcagtaccccttctcgttcgccagcgaacaccagaagtccgagctgctcaaagacatcatggcgatggcaaatgcctatcgctcgggccctggatacattctgattggcttcaaggacctggccccacacccggctgaaattgttggcatctccgcagaagaccatatagacgatgcagcactgcagcaacttgtgcgtagcaagatcgagcctcctcttgagtttcagtatgaggagcgtttacttgagggcaaacacatagctgtcattactatacctagtcaagtccgccccttcgtgccaaagcaggatttcggcaagctcaagaagcacgttgcgctagtccgtcgcggcagctctacagatgaggcgtccatcgcagagatgatgaagatgacgttgactgatagcggttcgtccaagacagctcgcgttgatctaagcatactgactgaggagaaccaacttctgcccaatagcctgacgctgaccttccttaggtttggtgagctgccggactaccaagaggaatacacaacaaactctgcgtatgggttcatgccacctaggccgttgacgaggttcgtcaaccgacactactaccgcgacgctgcgcagtaccatgcagagcgcaacagacttgtgcttgtaagattatcgctctcaaaccagtcagactttgcgatgcaagaggtaaaacttgagctcacctgcttagcgcccagcggagagaccgttcagatgctgcgatccgacgatctagcgggtgagcctgaacccggacacgagctccactccatgctcgggcatgtcgccccaagggatgatcatcgcgagactgtcagcgtggatgaccgcgcaagagagccagcttgcaaaattctccttggaacgcttcgacctggagagacaggtacggctgacacggatattgcgctgctacccacggctccaggtgactacatgattcgctgccgaattctcgccaaggaaatcgcgatacctattgccaaagaacatgccatcagaattgatggcgaaatcaaagaaatggaactggatgatctggagcgactgctttccgcaaagtacctggacgaaatgaaatag

SEQ ID NO: 534912 - DNA, 588 bp, Stenotrophomonas maltophilia
atgaaagggcttcgctttgcgaaggagatcagcgtccggtttcaattgtgcattgagaacccagagcttgtgatctcccgccagtgctttgaggatgagcttgcgaccatcgagaggaatggatcggagctaatcaccgccgtcgtgctacttgaagagcggatgattgaggccgtctccttgcttctctttggccgccaaagtgaacgagacctcgagcgcaacttcttcagcaatgagatcatggggacctcggaatttcccttcgcgtccaagaggagggtctttaccgctcttcttgaacgcaccggagcggtcagcaccgaccaagccaaggagctcagatcggcacttggcaaggtaatgaagtggcgcaatgcgtttgcccatgggagagtcttgtatcagcatgatggccaattctgccttgcacactacagcggtggaccgcaagagttgatcttggacgacaccttctttgagcttgtcgaaagcacggttcgccattgtctctacatgtgcaatgacgtcatccgtcaggcttcgctgagggcgagtgttgcaactggcgctctgacgcacggttag

SEQ ID NO: 534913 - DNA, 684 bp, Stenotrophomonas maltophilia
atgtacgcttctggccgagagcagacggggaagcgtcgaaggtcggttcgacctctgccaagtcattctagcgaaggtcccttcagggcccgaggcgctccaatttccagatgcgaaggtgcgagcatggatgccccagaggtgaggaacttcggcgaatcgggagttgagtcattcgatgcgtactacgccagatggccgagcgcgctaggaaatgttccgcgacccgttgtgcagcattggatctaccgccactggcaggatttcaaaagggattggctgaagcggggactgcgtagctttgagttcacgctggttgaactcaacaacagtgaagtcatgactatcgggcacgttcgagactggatgcagaccttagactattggggcgatgaactctttcgagacataaggcgccgcgagacgtggctggggaggttcatgcttcagtccgggacgtcgcccgccccaatcatcatcgccccagacgcgttaggtctgcaacacccgacgggcgcccagatgaagccagtccaattgattgagggccacatgcgacttgcgtacctgcgagcaatggtcaggcacggacaccgctctctgcagccaatgcatgaagtttggaaggtcaagttgccacgagagtcttttcgatgtgctaatccggcggtggaggccccatga

SEQ ID NO: 534914 - DNA, 2976 bp, Stenotrophomonas maltophilia
atgcgcacctccctacagcggtggattaacaacgccgatactgcccggcacatgcgctacttccagtatgcccagcttccagttgagctgggccccatcgatcaaaggctagacgattacttcataagcctggtcggtgagctatttgccaatctgcacgacccccaagttccgctgtccgactgggcgcagttgggaaacgcattcctgcagttctcgacagagatgcccttagaccagttgcaaagccggggcatatctgccgatgatgctgcgttgttcgcttctgcctcattctatttcggcgacttcccggcatcagcctgtctggcgatgcggcgctcagcacgaccgcctgatccgggaagcccgcgtgccgcatgctacgactttctagcgcggccaagcacactgcaatcggcttttgcactcgaggttcaggatgatctgaaggccggcgcgctcgaccgacttgcgacgcgaagcgcggagctacaacggcgcgagtccaccgcgctcaatgaggggccagaagagtggatcgtggcacggttgctgagccgctgcttcgcacgattccagctcaccaatgttcgcgccgtacttcccgagggcggccgtcaattctggaccccgctcgtgcactccctcgtcgatcgtcagccatccacctgggaattcttcccttcacaaatccaagcgattcgaggcggactgcttggcaacgacactagctatgccttgcagatgcctaccggcgctggaaaaacgacgctgtgcgagacgctcttatactggcacctgcacgcgcatccacaggacgtcgcactgctgctggtcccattccgctctttggcatcggagctgcgtggcacactcgtccgccgactaaacgcaatgggcttgtcggcgcgctgcgcttatggcgggactgtgcctaccggggatgaagcgcaaggacttgatcgcatccgcgcaatggtagccacgcccgaagcaatttccggcatacttagcgcagattctgccttcgcgcagcgcgtatctttagtgatctgcgatgaaggacacctgctcgatggcggcagccgcggcattggcctggaattgctgcttgctcgcctgaagacgcgtcccggtcgccttgcccgtttcgtgttcgtctcggctatcgtccccaacattgaggagatcaatgcttggctaggcggcaacgatcagaccgtcattcggagtagctaccgaccagcgacggccgagtatgctgttctaagaccccaaggtactggcgcgaacatgtctatcgatctagatatgcacccgcatgagcctgtcgagcgtcgattccaaatcaatggttttctgggtcgcgagagcttcacgttcctcaatccgaacaccggtcgtgccaatacgtatccgttttcatcggtcaaggcgcaggcgatcgcagcggcacgcaaggtgctgccgatggggtgcaccgcgatcttcgcggccaataaacgcgggcaccagggagcggtcggcttggcagaggaactggtcaagcagttggcccttcccttgtcattgccggcacctagcgggtacacacagttggccgagctgcctcgctatgttgcgtatctcgaagccgagtacggtccgggttggattgggtcgcagattgttcgtcatggagcggcgctgcatcatggcgacatcccgcaggaaacccgcgaggtgctagaagccttgattcgtgagtcagtggttcggctggtcatctgtaccagcacgttggccgaaggcgtcaatctaccgattcgctgcttagtactgtactccgtgcagcgccaaggccacgacggtcgacgcgaagctatgctcgcgcgcgatatcaaaaacttggtaggacgtgcaggtcgtgctggcgcgaacactaaaggcctggtcatttgcgccaaccccgagcagtggccgattgttcagcccgtcgccacccagggcgaaggtgaagcggttcgaggctctcttctggagctgatcaagctcctggaccagttcttggcgcaaaaaggtctacagataaataacgagttcatggaacgcagcgatgcggtccacccgatcgttgacggcgtcgattcaacgctcatcgatctgataagcgaggaggtcggcgaagaggcattcgtggcgcatgcacgacagctggcagaggatacgtttgcggcccagcagctgcctcagccgcaggtagatttgctgcgaagcgtgtttgagttgcgggcgcgccggctcatcggccttcgtactaccggccagctagcgtgggtacgcgatagcggagcgaaggtgcgtatgctcgactccgtcgcacatggactacggccaatgcggccagactggcaggcgccgatcgatccgctgaacgatgcactacgagtcgttctgttggaatgggcgtggtcacatcctgagctgcagcaggccgttgtcgagggctttcgtccgcctaacgacgatgccaattcggtcaaaggcactttcttcgacatcgttcggcgctggatgcacggcgagagattcattgtaattgcgcaggagcgacggctcgagatggacgacttgctcgcgatccacacgcgagcagtcacgtacacccttcagacgctgatcgaacagggcatcagcttgctggcgcgccaactgcaagccgaccaaattgagctggcagcaggcgtggcgagttttacagaacaactgcgcttcggcgctccaaattacgtggcgcgatggctggcggccgctggcgtgcgacatcgtctggcatatgtcagcatcggcaaagccatcaccgcgcagcagtccattgtagattccagcctgatcaaggagcacgccttgcagagcttgcgcgagcatgccgacgcttggagagccgcgttaggcgagctcatatacgcgaatacgctcaaagacctctcctga

SEQ ID NO: 534915 - DNA, 792 bp, Stenotrophomonas maltophilia
atggatgaactcggaatcgactttttggacgcggccccatggtttgcacactcccaagaccagccatacgtcctggtccgtgtgagcctggaaagcgtagctagtttggcggcaaggattggcgagcctttgcggcgttgctacatcagtgatgacgagctgagtgcggcggctgatcgtcacaacctacctcgttccgaaattcttcgctctaggcttcctgacgccggcgcaactatgtctggagatttcggcgaagtgatcggttacttctaccaggcggctcgcgagctgccatccgtagcgattggccccaagaagtggcgcctcaagcaagaccgcaccaagcccgccccgaagtccgacgtcgtgcacttcgtcatgccaaaccgtcctcatcccagcaatgaggacgccattctgtgtgccgaggttaaggccaaggccacacgcggaacttcaacgccaatcgcagatgcgatcactgattgcgagaaggatcggacgagccgtttggcgagcacattggtatggttgcgcgatcgcgcattgacgactgacctcggcgacgtggacgtgcaattgctcgatcgcttcatcagcgcgatcgaccatcccgtggtgactaaacgctaccgcgctgtcgccgtaatctgcgaagcattgctggacgaggagctccttgctgcacccgacgtggccgatccacagttcacgctagtcgtcatcggcgttcccaacctccatgccacgtacacggcggcattcgctgccgcccaagcttcggtctga

SEQ ID NO: 534916 - DNA, 330 bp, Stenotrophomonas maltophilia
atgccaagactcctggtcgtgatcgcggcgacgctgacgctgagttcgtgcgcatctggcgcgaggccaacgccggccacgccctaccgcgctgacctcagcatcgcacctgcccagctgcttcccccaccccgcctgccggacctgcacgcagccagcgatgacgcgctgctgcgcaatcacgttgcggtcgcacagcagtaccacgcgctggccgaccagctgagtgcgctgctgtgcagcctcggcagccagcgcggcatcaccatcaatggcgccgcgccggcagcacccgccgactgcggcaacagtgccactcccacgcactga

SEQ ID NO: 534917 - DNA, 639 bp, Stenotrophomonas maltophilia
atgattcccgcctccctcgacagcggtcatcgcctgattgccgacacactggccgcgttccgtgccggccctgcactgggcagcgttgccctgcggccggcgccacgctctcgtgtgccgctctacatcggcatcgccggcagcaagcgctcgggcaaggacacactcgccaatggactggcgtcggcgttgtcactgccatgcgacagcttcgcggccccgctgcggcaattggtcgcctccctcctcgggctctccctgcacgaactggacagccgcaaggaggacgccatcgactggctggccgaactcaccccgcgccacctgatgcagaccgccggtaccgagtgggggcgtgaccgcgtccatcccgagctgtgggtacgctcgctgttcgcacgcctgcccgagggcgggctggtacccgacgtccgcttcgccaatgaggcccgcgcgatccggcgtcgtggtggtgtcgtgatccgcgtcaatcgcccaggccatcgcagcagcgaccctcatgccagcgagcagccgctgccgcatgagctggtcgacatcgaagtcgacaatgacagcaccccggccgatctggtccgcagatcgctggaccagctgcgttcgcgcggtgtgatctga

SEQ ID NO: 534918 - DNA, 1155 bp, Stenotrophomonas maltophilia
atgcctcccgtcccgccccgacccgacgacgccgacaacgtaaccccaccgccgccgaccgacgcggcgcctgcccctacgccggtagaacccgctgtcgcgccgaagtacctcaagcccagcgcgcgcagcgtggtggtgatggtggtggtggccctgctgggcattgcgctgatcctgcgcgcctggcacctgtggccgttcaccagcagcgtgatggtgaccgacaacgcgtatgtacgcggacagatcacggtgatggcgccacaggtcaacggctatgtaaccgaggtgctggtgaaggacttccagcacgtgaaggaaggcgagccgctgctgcgcatcgatgaccgcatctatgcgcagcgggtcgcccaggcgcaggcgacgctggacagcgcacgcgcggccctggccaactcggaccagtcgcaggcgcagaaccgtgcgcagattgcctccgcccgcgccacgttgtcggccgggcaggcggagctgcaacgctcacgcaacgagaccaagcgctacgaggaactggccgcgcagcagctggtgtcgatcaacgatcgcgacaagttccgcaccgcgcaggcctcggcgcaggccagcgtgcagcagtcgcaggcgcagatccgcatcgccgaggagaccctggtatcgacccaggtagcgcgcaagagcctcgaggcccaggtggagagcgcgcaggcgcagctggaactggcgcgcatcgatctggccaacacggtgatccacgcgccgcgcgacggccagatcagcgaagccagcgtacgcgtgggccagtacgtcgccgccggttcgcagctgctgttcctggtacctgacacgctgtgggtggtggccaactacaaggaaggccagacctgggggatggcgatcggccagccggccacgttctcggtggacgcgttccagggccaggtgctgcggggccgcgtgcaggagatcgcgccggccaccgggtcggaattcagcgtgctgcgcccggacaacgccagcggcaatttcaccaaggtggtgcagcggctgccggtgcggatatcgatcaacaaaggccagaagctggccgcgcagctgcgccccggcatgtcggtgatcgtgcgggtggatacggcaagcaagcccatggactag

SEQ ID NO: 534919 - DNA, 642 bp, Stenotrophomonas maltophilia
atgccggcatccagtgccgggtacatcagcaactggtggcgtggctgcggcaggccgagatcgcgcagccgcaggcagcaggcagcaggcggctgccagattgccgccggcactgtcgccaccgatcgccagccgctgtgggtccagcccgaggcgcctggcgttgtcctgcaaccagtgccaggcgtcggcgacgtcatgcagtggaaccgggaacggatgttccggcgccagccggtagcccacggcgacaatcacgcagccgccggcattggccaaagcgcgacagggaccgtcgtagaccgccagcgaacactggaaccagccgccgccatgcgcgaacagcagggccggcgccggtccatcgggcagcccttccggtgtgtaaaggcggacttccaatgcatgcccgtcgcgtgcgatcaccgcatgttcgatcacatgcgcaaccggctgcggcgcgccctgcagctggggcagcgcgctctcgctgatcgcacgcagttcccgcaggtcgtcgggcaatggctgcgacgccacggcgtcgacgaactgctgcagcgccggttcaagctgcatggtgtgcctcctgcaggaacggcagcagctgtgcaaggaatgcctgcggcgcttcttccatga

SEQ ID NO: 534920 - DNA, 717 bp, Stenotrophomonas maltophilia
atgaattcgaagaagtcgttatgcggctgcagctgccccctcgctcaagctgaaggcgaaggcgaaggcgaaaagacaattagtagattccaggaagcaattttgaagaccatagcgctgatcactttcgataacttcaccgatatcgacctttttttgatgtgggacattttgggcaggaacacagacgactggaatgtgcgaatcttagccgcaagccctagagttcggtcctccaatggtctgttcatcacggttcacggccccctttgcgaagcaaatcgagcggacgtggtattgattgcaagcggaaagcagggcattccagacgcccttagcgaccccaacttcttgccttcccttaagctggatccgtccaagcagtacatcggttcaatctgcgcaggagctttcgttctcgagagccttggactgctgccgacccgacgtgcaacgacgcacccagacgctcgcggaagcctggaagccttgggggtcgagccgattgacagccccctggtttgccatggacgggttgctacggccggaggctgcctcgcagccctgtatctgattggctgggcagtcgaatctctgttcaacgccgacaagcgccgcgccacgctgcagactgtacttccgaccggtcaacaggaggtgttccaaggcctaatcgatgcaaccgtgcaagaaggcatgcgaggcagtctaagctga

SEQ ID NO: 534921 - DNA, 669 bp, Stenotrophomonas maltophilia
atggagcagattccggagcatcacattgctcgtaaggacgcagcgattggcgctttgatcgcagcggcggttggcgcaggcatggcgttgctcacgacagacgctctcttccatatctttgaagagactggaaacatggccgactgggctgccgcgatcggaacttgggtgattggctacggcgcttggaagtacgcgcgtgaagcccatttgcttagagcgcgtgaattgcagcagggggagcgaagagacctgtatatgcacgccggtcgagtccaagccattcgcgagtgggcgaagattgttcgtcgaccattcaaggttgcggagatggctgagaaagatatagagggcggactgaccacgggcgccgccgaaggggttgcagagggggctctgttgcttctcaagctgatcccgcttgatgacgaggcttggcgctacctgagcgagggcgacgttgagttgaagatcaggctgtccactcttacggtgctcctggaacaggaagggcgcagctttcttgatcgtgccaaggcatcgaagggcaacgataaaatcgccacgatgaaaaactccaattggccttccgttcgtcgaacgatcaaggaccttgactcgcttggagctgccctcgatgaggctgcgggccgaattccacccgtttaa

SEQ ID NO: 534922 - DNA, 282 bp, Stenotrophomonas maltophilia
atgacagaaccccttcttgccctcgccctgttaggggccatcgcagccgcgtccatcggcggcgcaaggtttgtttcgtggctgctcgactggcgttactacaccgcctcgcagcagtcccgagaagccgccttcgtcgccgaggcacgtgccgacctggccgcgaccggttggaccccggatcacgaatccctctaccaggccgagatcgccgctaccaagcgcggtgacctcctggccgcagccacctacgccgagcagcgggaggccgctcatggataa

SEQ ID NO: 534923 - DNA, 1497 bp, Stenotrophomonas maltophilia
gtgagcaacaggcaaatttatgcgctcggttcagggcaggttgacattgttcggaagcgttggctgaaagatccttcagcgtttggattcccaaatgctgagcgcgattctcaccaagatggctggtatgacagtctgctggtgcagccagactggttttcaagggctatcgcgccaagcgcgacgattgcggttgcgcgaaagggtgctggtaagtcggcagtcagaattgcaagtagcgaaaggcggcgaacggagcgaaatactctggtaatagaagcgtctgccgacgagttggcgtccttccactctgagcgtctttctaagtccttggccggacaatacggaactgtatcggattgggttcagatttacgctgagctgatcgtcagggaactggcaaggactatgggcgggtcgctcttgactggagacgacgagattgctgtaagggcttgggcaagaactaaaggtattaccgagcgcgatttcggtgagcgtattgtcgatgccataaaagtgctcgtgccctgggctcaaaaactcgctggtgagaatgcagagcagctgaaggacagccaagaccgtatagcgcgtgttgcatcagcatcgaaatttgtcctctacgtcgatgattttgacaaccttcaggaagagggtggtgccactaatatccgcctgatcagagactcgattgaggctgcagaccgtattaccaacggtagcaagaatggcgaagtgcacttgttcatgaggcaggatctctggctgaatgtacttccgggttggcactatgcggacaaggtggaaggcgttgcgttgctcaattgggatgtttccgatcttaagcaatggatgaatcagcgactcaggtatgccatagctcaagcgctccgagtcgagccttcggatgttaggttgcccttcgaagatatgtggcacatatttttcgcgccggaggttcggctaaaagacggcagtcaaagtgaatcgtttagctactttgtaaggcggactatgtacacgcctcgcagtcttctgagctttatcaagtcggcgcttgagggggctcagagattgccggctgatcaactggccatcgaggaagctgagtttagatactcaacgaatcagcttgaatttatgaagaccgaatttggctcactttgcgctggtcttgatatttgtcttcagtcctttactggcaagcctcttgaatggatcgcgtctgacctctataagcatctgcgtggtttaatcggtaacggccaagtgaagctgcagaagggggtgtcggaaggtgttgatgaggtcgcactgtcgaggttcctgtatcgcattggattccttgaggtccgataccctcaagatggtaggtatgaggttcgcgacgtcatgagatatcctgaacactggcgtagcattcggacggatgatgcagtgaaatgggcagtgcgaagcgccttctacaatggtttgaaatcctacggccggtag

SEQ ID NO: 534924 - DNA, 849 bp, Stenotrophomonas maltophilia
atggctgattcacgaacaagggcgagcgctctactcagcgtcaaacgctgtggcagcgcgcgcggtcatcacatccgccaggccgaggcgctccatagcagccgcactggcctgctgcacgactgtgagatccgtgcggatcagtggcagcaagaattccaaggcgtcatacagggcggccagatcttcagcagacgcatcgtcgggcagaacacgatagctctcttgtgtaatcgccatgagtccggttgcccgcaacaggcagcccgcgacctttcggtccaagtagtgcaagcggtcccgggccgctccggtcattgggaagttgagtcgatcaagatccttcaggatcggatcccggtatctcctctccgccaggaagagctgcttaccgactccaccgcctataagagattcaatggcgttgcttatgaggccagaagcgactcccacctctcctgtgatctgagcaagaaccaagagttcttcagtttcctcccggtattcccggcggaccgattcgctcgcgttgcggcttgcttcaccggcagcgatgcgggtcgcctctgcactagcgtcgttcgcagtaactccgagcttccacacggcgaaggccgaggcagttgtaacgcctatgccaatccaagagacaaccaaggccgcaatagctatgccggccgcacttccaccaaacagcgctgcccaggcgtcccaccacacaacgcaatcgccctcgcccggcggccaacatgtactgaggccattccaccagctcattccctgattcccctgtggactgccggggattctgccatggcaggcgtctcgagggagcccatccatggctga

SEQ ID NO: 534925 - DNA, 648 bp, Stenotrophomonas maltophilia
atgagcaacgacaacaagaccctggcggacgtgcagcccggtgggagggtgaggctgggggaccaggccgagcgggcgcggtttgagcagtatcgcggcgttgatttcgagcttgattcgcagggctattacgcgaacccacgtaccgcacaggattgggccatttggcaagccgccctctccgcccagccctccccgggtggtcaggatgctcatgaaatggccgatgccttggagcggattgcctcagggtcgctttctgactatgagggcgtggacgccgatgagctgcacatccttcgatgcgcaaagctgatccgtgacctcgccgcccgccagccggtgggggagccgttcgcttacacgcgagccaacaccgttgtggacccgttgcccgtcatcacacctgctgagtacgcagggcttcgggagcaggggcttggtgagcgattccgcgcactgctgttctccgacgccgccccacccgcgcaggcagtggacctcgaagaactgcgccgagccgcctgcgttgtcaacgtagtcggccagatcgatgggcacgacgtggtgcgccgcaactcggtgctggatgtgatcgacaaccggcgacagcggctggtcgacagccaggcggtgggcaatggctaa

SEQ ID NO: 534926 - DNA, 291 bp, Stenotrophomonas maltophilia
atgtcgacccgcctgccttatcaatgtctgccatggtcagcttgccgcaggatcagccgcgccagcgtgaagattttgggccatcatcagatcccgagcctgttcggcctttccaagagcatcgcgcattttgcagagcgcgtcgcaaaattcactgagcttaggaactggaatgatcatcgtcgagacgtcttctcggaaatgctcaacagcgttcccttgcggcgtcatcttggcgacctgaacgtcttcgtggtggaagatctcttgctcaaaatactcttccgttag

SEQ ID NO: 534927 - DNA, 960 bp, Stenotrophomonas maltophilia
atgacccgcagcctgctgatcttcggccagggtgcgatcctctgccacccgtgggtactgaaggaaatgaaggccgcgcaggatccggatacccgtgccggcctgcaggacttcgaccgcagcctgttcggccacatccgcttcggcatctccaatgccgtgcgctcgttctggttcggcctgaccggggcacgcttcggtgccgccccgggtgacgcctacacccgccgctacttccgcaagctggaccgttactcggccaacctggcgctgatggccgacatctcgatgatgaccctcggcggcaagctgaagttcaaggaatcgctgtccggccgcctgggcgacgtgctgagccacgtctacatgaccagcgccatgctcaagcgctaccacgacgagggcgcaccgcaggccgaccagccgctgctggcctgggccttccatgacagcgtgcacaagatcgaggaatcgctgtcggcggccctgcgcaacttcccgatccgtccgatcggctggctgatgtgggcgctgatcttcccgctgggccgtcgtgccgaggccccgggcgaccgcctgagccgccgcgtcgccgccctgctgatggcgccgaacgaagcccgagaccgcctggccagtggcgtgttcctgaccccgtgcgagaacaacccgggtggccgcatcaacagctacctgagcaaggcgatcatggccgagccggtggagcgcaagttcctgaaggcgctgaagagcaagggcatcgaggcgctggacttcaagagccagctggacgaagccgtggccgagggcgtgatcacccaggacgagcgcagcctgctggaagagctgcgcacgctgactctggatacgatcaccgtggacgacttcgacacccacgaactgcgcgcggccagctactacgaccgccagcacaaggatccgcattcgcaggccgcctga

SEQ ID NO: 534928 - DNA, 606 bp, Stenotrophomonas maltophilia
atgcccggctcaaagaggttgccggccagcggccggcactacccgaagcgcgaacccaggtcggggacaagccctggtagagccggcagctgccggctgctctcgatgcctggctcaaaggggttgccggccagcggccggcacacccgaagcgcgaacccaggtggaggacaagccctggtagagccggccgctggccggctgctctcgatgctggattcaatgaggttaccggccagcggccggcactacccgaagcgcgaatccaggtcggggacaagccctggtagagccggccgctggccggctgctctcgatgcctggctcaaaggggttgccggccagcggccggcactacccgaagcgcgaacccggtcggggacaagccctggtagagccggccgctggccggctgctctcgatgcccggttcaatgaggttgccggccagcggccggcactacccgaagcgcgaacccggtcggggacaaaccctggtagagccggccgctggccggctgctctcgatgcctggttcaaagaggttgccggccagcggccggcactacccgaagcgcgaatccaggtcggggacaagccctggtag

SEQ ID NO: 534929 - DNA, 606 bp, Stenotrophomonas maltophilia
atgccgttgcccgccacgctgccgcccgccctgttcgtcaccggcaccgataccgagatcggcaagaccgcggccagcaccgcgctgctgcacacgcttcgccggcgcggcctgcgtgcggtgggcatgaagccggtggccagcggcagcgaagacctgggccagggcctgcgcaacgaggatgcattggcgctgcaggcggccagttgcccggtaccggactatgccgatctgaacccgtatgcgctgcgcctgccactggcgccggagctggccgctgtggtggagggggttggcggttggctggcaccagtctcggccacgctcgaccagctcgacctggtgcgcacattgcggttgccggtgttgctggtggtgggcatgcggctgggctgtgtcaaccacgcgcgtctgaccgcgcagtcgttgcaggccagcggcgtggagtgcctgggctggatcggcaaccacatcgacccggcgatgcagcgccaggatgagaacatcgcaacgctgcagcagcgcctgccgatgccgtgctgggggcggctgccacatctgccgggagcggatggccagatcctgagcacgcatctgctcgattga

SEQ ID NO: 534930 - DNA, 2592 bp, Stenotrophomonas maltophilia
atgtcaaaagacaagtccgccgaacacaccccgctgatgaagcagttcttcgcagccaagtccgactacccggacctgctgctgttcttccgcatgggcgacttctacgagctgttctacgacgacgcgcgcaaggccgcgcggctgctcgacatcaccctgacccagcgtggcagctccggcggcgcgccgatcccgatggccggcgtgccggtgcatgcctacgaaggctacctggcacggctggtggcgctgggcgagtcggtggcgatctgcgagcagatcggcgacccggcgctcgccaagggcctggtcgaacgcaaggtggtgcgcatcgtcacccccggcacggtcaccgacgaagcgctgctggacgagcgccgcgacaccctgctgatggcgttgtcgcgcagcaagcagggctacggcctggcctgggccgacctggccggtggccgcttcctggtcaacgaagtggagaccgacgacgccctggaagccgagctggcacggctggagccggccgagctgctggtgcccgacgaggagaactggccgcagttcctgcgccagcgcaccggcgtgcgccgccgtgcgccgtggctgttcgacgcggacagcggccgccgccagctgctgaacttcttcaagctgcacgatctgagcggcttcggtatcgatgacaagccccgtgccaccgccgccgccggcgccctgctcgggtatgtcgaagaaacccagaagcagcgcctgccgcacctgacttcgatcgcgatggaaaccgccggcgaggcgatcgcgatgaacgccgccacccgccgccacctggaattggacacgcgtgtcgacggtgatacccgcaataccctactgggcgtgctcgacagcacggtgacacccatgggtgggcgcctgctgcgccgctggctgcatcgcccgctgcgcctgcgcgaggtgctggtgcagcgccaccacgcggtggaaaccctgatcgatcgcggtgcggacgccgacatccgcgagcagttccgccgcctcggcgatctggaacgcatcctcacccgcgtcgcgctgcgctcggcgcgcccgcgcgatttctccaccctgcgtgacggcctgggcctgctgccggcggtgcgcgaagtgctggccccgctggactcgccgcgcctgcaggccctgcatgcggcgctgggcgaacacgacgcgtgcgcgcagctgctggccagcgccatcgccgagatgccgccgctgaagctgagcgacggcggcgtgctggccgatggcttcgatgaagaactggacgagctgcgccggctgtccacccatgccgaccagttcctggtcgacctggaactgcgcgagcgcgagagcagcggtattcccaccctgaaggtgggctacaaccgcgttcacggttactacatcgaaatcagcaagggccagtccgatcgtgcgccggtgcactacacccgccgccagacgctgaccaatgccgagcgctacatcaccgaagaactgaaggcattcgaggacaaggtgctgtccgcgcgcgaccgttcgctgtcgcgcgagaagtacctgtacgagcagctgctggacacccttggtgggcagctggaaccgctgaagcagtgtgccgctgcgctgagcgaactggacgtgctggccgccttcgccgaacgcgcgcaggcgctggactgggcgcgcccggagctgcaggccgagccgtgcctgaagatcgaacgcggccgccatccagtggtcgaagcggtacgcgaacagccgttcgaacccaatgacctggacctgcatccggaccgtcgcatgctggtcatcaccggcccgaacatgggcggtaaatcgacctacatgcggcagaacgcgctgatcgtgctgctggcccacatcggcagcttcgtgccggccagccgggcggtgatcggcccgatcgaccgcatcctgacccgcatcggcgccggcgacgacctcgcccgcgggcagtcgaccttcatggtcgagatggccgagaccagctacatcctgcaccacgccaccgcccattcgctggtgctgatggacgagatcggccgtggcacctccacctacgatggcctggcgctggccgacgcggtggcccgccacctggcctaccagaaccgctgctacacgctgttcgccacccactacttcgagctgaccgcgctggccgacgaacagcatgagggtggccgcagcggcatcgccaacgtgcacctggacgcggtcgagcacggcgaagcgctggtgttcatgcacgcagtgaaggacggcccggccaaccgcagctttggcctgcaggtggccgcactggccggcctgccgcgcgccaccgtggcgcaggcacggcgtcgactggccgagctggaacagcgcggcgctgaaagccatgccgccgagctggcgccgcaggcgctggatgccccgcagcagttcgggctgttcgcggcgccatccagcaaggcgcaggaagcgctggcggcgatcgatccggacgaactgacgccgaagcaggcgctggaagcgctgtaccggctgaaaacgctgctgtaa

SEQ ID NO: 534931 - DNA, 5121 bp, Stenotrophomonas maltophilia
atggctctgttcgctgttggtgcgctggctgccggcagtcaccacggtcgaagtcgtggccgcgcgcaggccggaggctgcgccttcagcggtgcgggtgatccgccccatcgccgagccactgtcggccatgccgtcggtggtcgaatcgcgggcgctgcggtaggccttggtcgggtcgtaggtcacgcccacggagaagccgctggacttgctggcctgactggattggttgtccgtggtgtcctgtcgcgccagcagcgcaatgtccttgcccaccagtgtcaggttctcgcctgcggcgacgtccgaggcctcgatcgtcagcgtgttgccagcattgatcagcacattgccgtcgcgcgaggcgatcgccgatcccacctgggtggtggactgctcggcgcgggtgctgctgttcttcgcgctactgtagccgaccgatgccacgccgttgccgaagcctccggtaacgccggatttcttcttgctctcgttggactcactgctgtgatggtcctctgcggcggtgatcaatacgttgttgcccgcccccagaatcacattaccagtggcatcgaccaccgcaccaaccgcagtcagatcgcggccggcggtgatgttgatgcgctcgccctggatcgccgtaccgatggcataactgtcgctgttgtcgacgctgcgcgtggtggtggtactggaaagcgtcttctttttcttgtcgtagctgtccaggctgtagtcgtgcgtctcgttggccgagagcaggttgacgtcgcggcccgcggccacgcttaccgcgccgtcattgctgtcgaccaacgcggctgtcaggttcacgtcccggcccgcggtcagcagcagattgtccccggcctgcaacaggctgccgcgcaccgtctcatcacgctggctgacctgcagcgagctgcgcttgcccgcactggagaagtcgcggctctcactgtccaccagcgcctggctgttgatgtcaccgccggcctgcaatgccagacctcccgccgctttgatctgcgcggcggccaggttgatgtccttgccagcggccagcaccacatcgccagcgccctgcaccgagctggcagcatgtgttgtcctgctgctgcgctggtggttgcgctcatcgaaggtggcgtcgcggcgttcttccagcgcaatcgcgccaacatccagagtgccgcctgcggccagctgggtaaggccgtcggcgccggcgttgcggatctgtgcggcctgcaggctgatgtcaccgccagccaccaccgacagcatgccgtcgccactggggttggtcacatacagaccagcaacccgatcgatgcggttggtctcgtactggtaggtgccaccgccccgctgtgtctccaccgtggaggccaccgtgacattgcccgcggccttgaccgacagcgcatcggtggccgtcacggtggcaccggcaatgcggatgtccttgtccgacgacagcccgacgtactggccggaaatgctgccacccagatgctcgatgttgcctgcatcgatggttaccagcttgcggccggcgatgttgccggtgttgaccaggccattgcccagtttgatatcgacattggcgccggccagcagtgcaccctgcccgtccagatcgcccgggcgcaggcgcaggtagacctgcggcaccagcgcggtggtggtgctgccatcggccagggtgacggtctgctcgaccagccagacgatgtcgctggtcagctgtgccatctgcgcttcggtcagcgccacgccgggccgcaggccccattcgctggcgaccgtggcaccggcctccagcagcgcgcggtattgcgcctcgtcactggcgtagccgtcgaggaagcggcgaccggtcaactggccgatctgctcacgcaccagcttctgctcgtagtacccatcacccaaccgcttctgcacggtatcgggcgagtagcccatctggcccagcaggtggtccgagctcagccaggtcttgtggtcggtgaagcgcggatcggtctcgaccagatagtggcccccgttgggattgacgttgaacaggctggcgctcggcgcgcgcgtgtccggtgcgcccatcgcgatgcgatccggcgatccgccactggccgcgactacgcgcggcccagacgtgccggtgttgccgctcacgccgccgacgttgccgccctgctgggtaccggcggcatcggccgcctgtgccagcgcgcgttcggcaccggtgccggtggactggcccggcccctgcgcaccgccatgacccggcccatccggcagcgccttgggcccctgcacgttgaggttggccatggccgaaccgttctgcacgttcggtgcgttgcgcccctggttgaggttgctcaggtcaccgacatcgatgctcaacgtgccgttggcggtaatctgcccccccagctggccgatcttttcggagatgggctcggcggtccattgcgttcgggtgccgtcgtaggcgatggaggtgttgttgaaggtatgcgtgcggaacaattcgagaccgacgttactgacacggctgtcggcgccgtgaccgacgatctgcagattgccgcccgcagcaatctgcgcgtagcggttgttcagctcgtccaccgacaggcgcatgttgccgccggaacggatcaccgcatcggtaccggcaccgggctgcagctggtcctcatgggccacgtggtgagcaacgcgcttttcttcattgaggccgtgttcctgcgtgtgctggcggcgaccgacgatggtcgcatcgggattgctcaacgacgccggggtgatgaactggatgcaggtagtgctgcaggtaccgtaggcgctggagaacgtcaggcggtcgttctggtaggtgaacttctccttcgacttcagcacgtcgaacggatcgccgcccggcacctggtccggattggcggcggtacccttgctcacgtaatagatcgtgacggtaccggtgaccggatccatgcgccagcgctcaccgcgcacgtcatagcccaatccaccagagccgaagaagaagcgcgaggtgttcgcggtcaggcgaaccaccgccttgcccaggcgggtgccgtccggagcgatgtagggctcgtcctgcagcacgtcttccggcgcgatgtaatagaactcccaggccttgtaattgctggtatcgctgaccgtgcctgcggtgttcttcgagttcttctgccacgccgccaccatcatgttgacggtagtgtcgatggtcttgacctgggtcggggcgatcgccacgttctcgcggatgttgttgaccacctgcgcatcgatggacagattgctgcccacatcgatgaccgagctgatgttgtcgatccgccctgcaatgccgctggcgatccggtcggcgccgagcgcgccaccgatggccgcatcaccgccgctgtagatcaggcccttgccggtgttctgcagttcgcgcacgcccaggtccagccgctcgcgtgcggccacggtgccgacccgggtggcaccaccggtctcttcggcgcggttcttcagcacgccggtggagatcgccacgtggtcaccgtagatgcgcccggtgccgagattgtcgatctcgccggcctccaggtgcgtcagcgcgccatcgatcaggccgcggttggtcagctggccacgggcattgaggtgggtcgtaccctggctggagatctcacccgaggctgcgttggtgatgttctgggcgttgaggtcgaggttgccaccgcgcacgacaccctggttgtcgaggtcgccggacaggttcagcgacagcgtgccgttggcgatccattcgccacggttgcgcatgccctgctgcagggtgaggccgaggtcacgctgcgcatgtacctggccatcttcgctgagcgcacgtgccaccaggctctggctgccatcagcgcgcagcaggccaccgctgttggcgacgttgtccgcctggctgtccaggttgccgccggtgctgatcacgccaccggtgttctgcagctggccgttgatctgcagccgcgcactgccgtcgatgacgacctggccctggctgttgtccagccactgtgcaccgaactgcagctggcccgcctgcagcccacgcgtgccgtcaccgccacgggtgttgcggttgtccacgctggcggccgtgagggtcaaccgctggccggccgcgatcgcgccggcggcgttgtccacgtgcccgtcgagggtcaggtcgaggttgcgtccggcctgcacgcgaccaccggcattgaccaggctcgccgcccgcagcgaaagatccgcagcgctggcaagtgttccaccggcactgttgtcaacgcgggccagcagcagacgcgcatcgccttgtgcattgactgcgccgccacggttgtccagcacaccgccttccagctgcagcttcccggccgccagcagcccaccgctgccggccgtgaaacggttgtcgatgtcctgcccggccgtgttgatggtcaggtcggccgccgactgcacgcgaccgccctggttgtccagaacgccactgtgcacactcagcgcgcccttctgcgtacccagcgtgccggcgcggttgtccagccgctggccgcgggtctcgatgtccagctggccacccagcagcgtgccccgctggttgtccaggccgttaccctgcagctgcagccgttcgccggcctgcatcgcgccgtcgctgttgtccacgcctgccgccgtggtcaccgtcaggtccttgccagcgaccagggtgccgtggcggttgtcgagactgccggcgtccagggtcaccatgccggtgctggacagcaggccctgctcgccattgtcgagacgaccgtcaacgcccagcaccagcgcgctgccgcccgcgtgcacggtgccgccctggttaccaaggctggccgcggtgactgtgccggcaccgccgagcaggatccggcccttctggttgtccagcgcctggccgatcgccagcgtggagtgcccggtgcctgcgccctgcagcgtgccctgcgcattgttcagctgctgcgcgatgacatccagcgcgccattgctggcgagtga

SEQ ID NO: 534932 - DNA, 639 bp, Stenotrophomonas maltophilia
gtgactgacggcggatatactgcgcttaacagtggcgcgcgatgtgctgccggcaaatccactcgtgctggacgcactctgtgttgctggcgggatctaccttccctatccagtccattctcatggcctctaaagtgcgcaaaaactcaaggacgtttgccgttgcagctcccgcagtggcaccggcggaaggcgaacgccgagctcttcgtggatttatcggacaattcgagcgctctggggctgcaatctacgctgcgcttgagcgcgacgagctacgttggattggcgtcgccgatcgcaatgccggaattgcagacgacctggtgcttggattcgacggattggttgtcggtcaccagttcaagacgtccaagttccctaaagctttcactgttgagacgttacttactggtgccaatggcctcttgcagccattggtctatgcttggcaatctttgcgcaatgacaatctgggaagtcgtgttgagattcacttggttgtcaatgactttccatcgaccactgacaagccaggtgacggtaccccatcacacagcgcggcattccttgaagagtttcaactgcatccagatcggtcgctgtcggattggtgcaagtcaaaatggggacgactaa

SEQ ID NO: 534933 - DNA, 636 bp, Stenotrophomonas maltophilia
atggcaactgctgacaatgatcttccattcttcgagcgccctgatctttccccgtttttggttcacctcacaagaaatacggtaaagaccgacaaattcactgcctatgagaatctggttagcattcttggcactggtgagatatttggtagcacaaccaagtctggctacatcaagggcgggtcatccgctgcttgcttcatggatgtcccgctgggctcactcaagtatgtgctcaatgagtccaatacagatcccaagaagcctcgatatgaagcgtacggggtggtcataacaaagagacgcgcgtacaaagatggctgcaggcctgttctgtacctttcagacgaggaactaggcctccttggcattccaaaaagtgagctgtggcgtgtcgtaagacttgaagccgtcgatggaacaggcataaattgggttcacgaacgggagtggcgctgcgagggcagctttacacttccatccaagccgattgccgttctcgtccagacgaccaaagatgcagtcaggcttcgaaaccacatcaacaatgagcctgagttctttagatctatacccagctcaatcatccctctagaagtgctatgccagggccttccgtatttggccgcagagtag

SEQ ID NO: 534934 - DNA, 402 bp, Stenotrophomonas maltophilia
atgaaaggaactagcctcgtttggaccttggcgatctgcgctctgatcactggctgcgcaggaggcacaccgaattgcgcagactccgacaccctcgcggtcctggatgaagctgtaaaggcagaggtcgataagtacgcagaccgcaaccgctctaatgcgtcagaggactttcgcgtgctcggggagacctacgagatatcaaacatccgcacgcttgagtacgacgacaacatcgacagctatcagtgcgacgcacgcatcacatatcaattcaaagcgcgccaacagtccgtggacttctcttatagggtcgataccgatcaaagcgatgggggcgtcctagtggagtatcagttgaaaatgctcaagccaatcgtaagcttcttcatgtcaggttga

SEQ ID NO: 534935 - DNA, 1293 bp, Stenotrophomonas maltophilia
atgatcgaacagctcgcactgcgcaatgttggcccagctccgtcaatggatctggagtttggacgtcgtctcaacctgctgaccggtgacaatggtctgggcaagagcttcctgctggacatcgcatggtggtcactgactcgcaaatggccagctgagctgaatcgtcgtctgcctatgggccttccggccaagccgcatggggatgagccggcgtctattacgttttcagtgacaggccagtcaaaatctgtcacctatcaaagcaagtttgatcggaaggaccaggcttggaagggtgcagctggaagaccggtcaatccggggttggtgctgtacgctcaggccgacggtagctttgccgcatgggatccggcgcgtaactattggcgaaagaagggaaacgtggatgtgcaggatcgtccgcctgcttacgttttctccacccaagaaatctgggacggtctgagggactctgaaggccgggtgctgtgtaatggactcatctctgattgggcgagttggcagaaggagcggggtgaggcattcaagcgccttgaggccgtgctttcatcattgtcgccatcagcaatggagcgtatccagcttggcaatctgactcgcatcagcctcgacgatgctcgtgacattccgacgataaggatgccgtacggtcaggacgtgccagttctacatgcatctgcgggccttcgccgcatcctggctttggcctatctgcttgtatggacatgggaagagcacctgaaggctgctgcgctgattgatatgaagcctacgcatcaagtgaccttccttgtggacgagatcgaatgccacctgcaccccaagtggcaaaggcgaattgtcgccgcgcttctggaggtagtgaagtcattggctgccaaagccagcgtgcaggtgatcgccgcaacgcattcgcctttggtgatggcgtcagtggagcctattttcgatgccaaggaggatgcttggtttgatctggactttgaaacgattggcaagcgccagtcagtggtggtgcggcaacgccagtttgtagtacacggagaggctggaaactggttgaccagtgaggcattcgatcttcgatcatcccgctcgattgaggcagaagaggcccttgaacgtgcggcattggctatggcgcgtaaagacttcagcaagtccgatgcccaggcaattcatctcgaacttcagaaagtaatcggtgataccgatccgttttggctgcgctggcgctttgtcggcgagaagaaggggtggttgccatga

SEQ ID NO: 534936 - DNA, 600 bp, Stenotrophomonas maltophilia
atgattcctgttgtcgctaaggcagagcccgcagactttaacgccaatgttcgggcgcgcggcgctaaatcgatgcgcgccaagggcatcgacccggatgttccgctaccgtctggaaagaagctcagtcccttctggcgtgactgcctggatgatctttatcgggagtacaaccagacttgtgcatatctggcggtctacattgagagggccgtgggtggtgtgactgccgaccactttgtggctaagtccaagttgccgcgaagagcctatgagtgggataacttccgtctggcaagcgcaatcgtcaatgcgcgcaagtgtgattttgatgatgtcctggatcctttcgtcttgcctccacaatggtttcaaatcgaactggtatcaggacgtatctatccaaatccgggtattaatccggtcgacattgatcgagttgatgaaacgatcaagcgcgtgggcctggacaatgacatcaatcgaaagatgcgtgctacgcattttcaggactattgcgcgggcgacatcagcgagaattttttgcgaaggcactcgccgctggttcacttcgaagcccagcggcaaggacttttgtag

SEQ ID NO: 534937 - DNA, 378 bp, Stenotrophomonas maltophilia
atgaaacgtgatagcgaactgattcgccagctgatgctggctctagagacaagcgaacgccccttcagcgccaccaacccgattgagggattcactcaaccccaagttgcctatcacttggcgttgatcgtcgattccggtctcgcggtaggcaacgttcagtactccttgggcagtcgcgactcaaccgtacccacagcagccctagcattccgtctcacgccagaagggcatgatttcatcgatacgatccgcgatgagacgatctggaataagaccaagcaaaaagtcgccactgttggcggctcggtcagcatcggcgtgctcaaagagatcgccacagcgctggccaagtccgcactggggttggccaactaa

SEQ ID NO: 534938 - DNA, 3732 bp, Stenotrophomonas maltophilia
atggcaagcaaccttatcaatagctggctgaattcacttgatagcgagaagttcgaggagcttgtgctcctccacgttaacgagaggcatcagcccgagctggaggcccagcgcattggcgttagcgggcaggcccagaatggcgtcgacgtgtacgttcacgcccgcaatcccaacctcggacactggggataccagtgcaaggcatatgctcgatcaaagctcactacagccatcttcgacaaggagttggagctgtgccacgagttcgtgccacccctggactactacagcatcgttaccctaaacagcagagatgcaagattgcagcagcatgccaggactgctcgtctgcatggaaaggtcaacagggtatcaataattgcactcgaagacctggcgtccatcgtccaatcttccaacctactgaagaagcatctcattgacttcgtgtttcaaccatcagatgtgcgggtaatcagtgagtacctagggctcgtaaacggcatgatgccgagcttaaccaccgagattgaccaatcactaccggatgacctcagaaccgcagaagattgggttaataatgggatgccactgcgagcgttagccatactcgacgcgcggagcggctctacaaatgagaatgcggtcaagcgtatccggtgccgcgcactctatgggatggaaagctatgcggacgttctggcaattgcaaatactgaggccgaataccaattgccgaatgcgcaacttctcattcttggagcattggcagccgaagaacttgacgagactgaggtagcagagagactcgccgatctcgccctctcttcagcaacagaagctacgctcgcagaggctgttggcggctgcgttcggcttcgcgccaggcgcggaggtgcggaaatttctgacctcgaggcattcgcgaaggttcatcttggcgaccggctagatagaatagcggtagcacttgccgattcagcagcagcgcttggtgcaccacatcgcgccgctcattggttttcagtcgcgcgatccactcgaccgcatttggctctcggcgttcaaatcaatgagctcgcaaatgccctagcaattgcaacagacaatttcgatcagggtgagatttcccgaataatttctctcctgcagcaacaccttgattcaatcaaaggtccggagaattcatcactccagagggttctcctgaccaatctcggcgcagcctaccgtgccgccggacgatttgccgattccgctagctcgtgggatgaggcgcttgcaattaagagcgggcaacgtgacatctggatccaccgatgccttctctgtgaacatgacagtgacattcagcctccagatgagggcgctgcctccgaccatgccattgatgcgattgcgaagctcgcctatgcatcttcactcacttcggcaaatcgattacacgaggcaaggaccatcgtacagcaggtgctttctgaccccagagtgacgcccatagagagttcgattgcacatgtagagcgattgcgaatttgtttacgaaccgacgacccgcagagcgtcatcagtgacggcattgcgcatgtcagtgaccacggcgaatccctaccgcttctcggatggttggcgacgcagcatagtcgcgcctccgattccaacaagcgagagatcgaccgcattcttcgacagatagatccgacaggcatgacttccgaagctgcgctcggaatcgcaactcccttggcaatgagcggagccggcatcgcactcggccgatggatcccccgccttaaggagatcgcgttcgcagaatcgggagagctgatcaacgagcatgccgcgatggtcctggcagagacgcaatgcgacaacttagatttttctggatccatcctcacattggagaaagtccatcaaagcaaccccgacagcgccgaagtgcagacacgacttgcgcaggcgtactatcaggctggcgatcgcggccaagccttgctcgcactccaagaagcaatcgctactcccaatgcgacgacccagtctgtacgtgactgggcacggcttgctgcaaatatggggcgaacacgcgaggcaagaaagctttttctgacgctgaacaagcccaccgccaagtcggccgatgattacattttcctgatgcaggctagggttattcttgggatcaaggaagacgatgcagacgccattgaactgttgcgcaatgatctagttacgccggaacgcgcgtcacaggtcttcgcgcttggagtcaaccgcaagtcacataggcgcgttgataccgtgcagcgcggcacgatcgtggccatttacatcgaaaaccaggtagacgacaaattctacatcagcaaggctggtgcaccgtcgctaccgggtattcgctcgttagatcccatccgtcatccttggatcgagcagcttataggacagcaatccggtgccaccgtgacgcttatgggggagccgtttgatgggaaggtagcggagatcagatccattcgcggtccttccgaaatcctttatgccgaggcagtgcagcagatcggcttgagctcaaaggagcagacgggcgttcagcgcatcagtggagatatcgagttccaactggcagaggccaagaggatgctgagtgcgcgccaccgggaggtggaggaacggcttgatctggcgaagcgaggacacttcccagctgtgctgatggccaagcagttccaaacaagccctagagagttcatcttcaagtccaaattctggataccacattctcactctgggaccactcccgacattgaggctgacgaatccatactggaggcatcggctgggtggattctggacgcgacaactgttcttctgctcgccacaatcgacgccgaggactttgccggccgcctattcaagccaccgcgcatcactaagctcgcggttgctcagctttgtgactggcgcgccgaggagcgtgaacgacgtcgatcagtcgggcatatgaatcttgacgagcagggcaacctttacatcacaagcagaagcgccgccgagcgggttgccctgcttaagttctggaaaagagtgtcgaagatcattagccagtgcagaattatcgatgtgccgacagtcccgttgtccggtgaagccgctcagcttttggatgccttcggatcagagacgttcgccaccttccacgccgcaaagtttcacggcctcacgctgattgcagaagagctcagcctccgggccatcgcaactgcttctaccggaattccatctgcggcgttgcattccctgatcattacggcttctcggcacggatggatcacacccaggcaagccatgctttggattgctcagctcattgagctcggctggacatgggtgggcttcccagttgactggctttgggcctgcatgaatcttcccgaggatgaacgctggagagtgctcaaggcgctttcgagccgaattcgattggctgatccacgtacatcggtagttgggctactttcatccttagccatgctagatgccggtgtcattcaggtcgcggaccctacgcagtacagacagaccatattggccagtttgccagaacttgagcagtccattcgcacgggaattttccgagcctatcggtcacgggcgccacgaacttcagaagccaagaagacagtgaagctacttatggactgggctaagaacggcggaggatga

SEQ ID NO: 534939 - DNA, 285 bp, Stenotrophomonas maltophilia
atggctgtctacgttgtgacttggaacctgaacaaagaacgcagcaactatgacgctgcgcgccgccagttcatccagcacttggagcgatatcccaacgcgcaagatggtggattggaaagcgtgcgttgggtgcaaagctcagggactgcccagcagctgagcgatgaccttcgtcaaaagctcgacaacaatgaccgcctctttgttagcaagctcactgccgggcaatttggggggtggctcaacaaggacgtgggcagctggattaacgctcgcctgtaa

SEQ ID NO: 534940 - DNA, 171 bp, Stenotrophomonas maltophilia
atgagcacccgtaagccgatcggaacgaccgccaagactggcgaaacctgccctgagagtggtgtgtggcagccctcgggctactccaccacggcacccattgctaagggcaaccgcatgccgccctacgatgggaaggccgtgacctgggtgttgaagcaacacgcctaa

SEQ ID NO: 534941 - DNA, 828 bp, Stenotrophomonas maltophilia
atggatagttatcgtcggcagcagatcgaagccaaagcgcaggacatgcttaacgatgcgggagttgtatcactcccaattaatcccatggaaattgcagagcacttggacatccaggtgcatgcaaagccggctggttcctcgggggcatcaggatggctagtccggcagggtagcgattttgccattatttacgccacgcatatcgaaagccccggatttcaaaatttcagcgtggctcatgaattgggccacttctgcctcgatggtcatcccgagcatatttttaagcaaggtagcgaacacgcatcgcggggcggttttggatcctcagatccaatcgagcgagaggcggattattttgcatcgtgcttaatgatgccaaaatcgctgtgcaagcccattattaataagaacggcgatggcttggctgctgttcgttcactagcagaaacctgcaatacctcattgactgccgccgcattgcgttatgcggaaatagggcacctgcccacgggggtgttgcagtgtttgaatggtcgggtggagttctgtgcgatctatccactccaatcccacgtagggtgggcaaaacccttaagtcgcaacacgaaggtcccagctgacagcgctacgcagaggttggcagacgatcccgatgcaataagagtggcgatggaagacagtgatagtgcggaagccagtgattggttcttcggcgccaagggtggcgtttacctcacagaggaagtgattggcttaggctcttatggccgcaccctgaccctcttgacgttggaagaaggagaagaggtcgaggaagactga

SEQ ID NO: 534942 - DNA, 183 bp, Stenotrophomonas maltophilia
atgggaaagtttacaagcaagaagaagcggtatcgcgtggacccggttaagcgccccggtgaaaaggacggctaccaaatctacgatacagagaccaggacttatattgggcctgtttacgacagcctcgatgaggcacaaaaggcttgcgatagggcgaatctaggttctaggccttcataa

SEQ ID NO: 534943 - DNA, 1281 bp, Stenotrophomonas maltophilia
atgccctcggcgcagctaagcgagcttgcagagagaaaatgtgaggagcttaaagaaagcgtttccgacttcaagagctttgcctttgagtattggaacgcggaaagtctaatcgagtcgtttaagcaggtggagaaccagttcgaagtcgagctgcggattaagaataacctaacgctcgacaccattcggggcgttgatcaagcatatattggcttcgtggaagtcggtgaattcataaaattgataagagcgccggacggcggaattcgcagaaacgtcttctacgacaacgttagagacttccagggggaggataactcggtaaataaagaaatcgccgaggctgtttcatctaaggattcctcggataagttcgtgctatacaataacggcgttacagtcgtctcttcgtttatgaagaatctcggcgcacatcgtttcttgctccgcaattaccagatcgtgaatggttgccagacgagtaacgtccttttctctaatcaaggaaagcccggcttcgacgacgcgctgatacctattaaggttgtccatacctccgacgctgacgtggtctcgaaaatcattagggcgaacaataggcagacacctgttccgaatgaggcattcctcacgcttgataagtggcataaggaccttcaggaatatgtttccctggaatccaaaagaataggcgagagcctctactatgaacgacgctcccgagagttcactcttttggatgatgcccccgataagaagagggtggtcggtcttcatggcatggtgcgagcttatgccgccgtgttcatgcaaaagccacacatggtcatggcgaacaacccaagctccatcctccgcgaaaagggcagcgtcgcagtttttggcaaggaccataagttctcgccttatcttgcgtctgccatgttggtttacaaaataaacgagcatgcaaatggtaaccccagaggagcccatcttatgaggttccgattccatgttgcgatgcttattgccgccgttatcgctaatgacagaattctgccgatagcaagcgcgaagtcggtggataagctctgcgacagtattctggaagtttgcatggcgccggaaaaattctcccttgcagtgaccacagcattcaagcttgcggagcaggcggaaaaggatttcctttaccgacgtgagcaccgctcgcagaatgcgaggggcaattctccggctcgttcatcgaatttcacggagttcctacttgatcgcgtcttcggtgctgggcgataa

SEQ ID NO: 534944 - DNA, 1380 bp, Stenotrophomonas maltophilia
atgaaccaaaacagctccaacggcattggccacgacgtcaacatatgctcaaccgggaaaattacggtcgggccattgaccatagacaatatcaagttcgagggacctgatgccgcccatgaatttcgaaggacgcttcgggagctcttcgaccaggctcacaagaagggatatacagcccccccaccctcaaatccctccgatgcggaaactgaggtggggccactgtcaatagaaatagaaaagttcatcacgggaatgcacctcgacagagacacgcctcaaaacataacaaccacacatcacaccctcaaattgctgttaggaattattggagataagagaattgcggatatcaatcaggacgacattcatgcattcaaggagggaattaggtggtggccagctaaggccaatcttaaagccgcgtatcgcggcctttcggtaaaacaaattattgatcatggcagatccctgggtctggacgaaccgtctgggcatacagtgaacaatcacatggccaagctcaataaattctttagcaagcttgttcgccagagaaaactcaaatactcccctctttcaggtataactctccgagtcaatggtcacgttggccccattgaagagcgttattattcggaagctgaacttggtaggatattcgacgcgaaggcttatatgagctgggcgaaaggcagaccgcactgctactggccgccacttctaagctactatactggcgcgcgcatcaatgaaattgcgcaactcaagcttagtgattttgaaaccgttcggggagttttgtgcatccaaattcgggtgagcaaagatataggagaggatggtcttccgttagatacagttaaccaaaagttgaagacgaaatcctcagcccgaaccattccggtgtcgcccgagcttatcgctctcggtctgaaagactatcttgaagatgtgcgtcttaccgggcatccacgcctattccctcacttgtctgcgggtatttccgtcaagaacggtaggcgccaagtgctgggttactcgcatagccttacccctgcattttcgagatacttgaaagtcaagggcttcccatctggcgttgtctttcatgcttttaggcacaccttcgtgagcctgctttatgagcaaggagcgacaattgagcagatcgagagcatcactggccatctcgactcgcccggaaatggaggtggcgggacactacatcgacactatctgcacaagaaggcaactgaaagcatccaggacgcgcttgaaaccctcaaaatgctcaggccgctggaaggtgtgccagcttatgagtcgaagctatttgccgcgtcattaggtgaaaagaggaaatttcatccataa

SEQ ID NO: 534945 - DNA, 384 bp, Stenotrophomonas maltophilia
atgactgtcggcacctttctccttttgtttgtcctgggcgcagctgggctggtcgccatcgggatcagccgatccttccagtcccgcagccagcgggcggcctttggtcgggactttgaccacttctactatggtggcccaagcggcttggcgatctccgtcgagcgatccaggttgaagatccgtgctggcaaggcagtgaagatttatcccttcatggatgtgcgttcttgggaaaagcactggcacaattcaaagcgggaaggcacgatcattgtcagtgttcgtgatgtggatcatccggtctggaccatccgattcagtagcgaaagcgagatgaaccggtggtatgaaatttttaaccaagccatcaacgacacttga

SEQ ID NO: 534946 - DNA, 312 bp, Stenotrophomonas maltophilia
atgtcaaaaggtcgcattgccgtcgccagtgtgttgatcgcctgcctggctgcttgctcaggtggcgggccctcgcacgacgaccggcagaacgcgttcttgcaatacgtgaaagacaacagcaacgacaaggcaaagattcgggagttccagagcggggaatgcgtcaaagccgagggcacccccagctacaactgcgccgtgtcgagcaatgtgatggcgatggaccgggacttcggccacgaaatggatggggtctacacgttcactgaggtcggtgacgcctggaagatcactggtcgggtccagtaa

SEQ ID NO: 534947 - DNA, 264 bp, Stenotrophomonas maltophilia
gtggccgcaggggtaggccctgacgtggcacgcacacgcatcaaccggtatgagaagggcgtcaacgagtgcgatctgcggactgctcagcgtctggccgaggccctagagatgcctttggctgcgtttttcgccaatgatgacgatctgcaagatttaatcattctttattccaagctccccacattcgagcagcagctgcttctttcctactttaagaaatttttacacagaaggaataaaaaggaagtcgaccccaagtaa

SEQ ID NO: 534948 - DNA, 1461 bp, Stenotrophomonas maltophilia
atgctcgcacccaggcatgcaccggactggtgtctcgatccaaatttattttgggatatcaacgagtctcatgaaaccagagcaaacgcacgggttgcccgagaggtggaaatttctttgcctgcagaactcgatgaaggccagcgccaggtcttggcactagctctgggtcaaatgctcgtggagcgctaccaagttgcagtgcttgtcgcgatccatcatccgagtgggcagggcgatcaacgcaaccatcatgtccaccttcttctgtctgctagaaccattacagatgaaggcctaggcgaacgggcctgcctggaatttgatgcaaagcagggtgggggcgcaaaggccattcgtggcttgcgcaaggtcgttggcgaagtcatcaatgagcatctgggaagatgcggggcatcggccaaggtcgatcatcgttcattgcgagcacaagctgcggatgctgcattccgtggtgactttgagcgagcacgtgagctgacccgtcaacccaccaagcacttgggaaaatgccaggtcgctatggttagaaagacgaagttgtcgacgaagatcaccggcccagaggccgaggtgaagaagctgacgcttgacctgatttcagccatgtttgacaaagcaacgcatgaagcaccccaaggtcatagtcacgaagcagcactgcgtgaccgtctgagagagagaagatcaagggcttgtgctgggcaaaatcattcggagatcaggttctctccaatggtgcatgtgacgccgggtcccgttggtcgtcccaaacatcctctgggcccaagggtccgtcagtcagctccgaacctcactcggcatctcagccggaccagtcgattggctcgctcgcacggtcgcgatgcagaagtgctcaatgccgaggccgagctcattgagaagtggcttgaaattcaacgccaggcagctgaggactcgtttgagttgcttcggaccatccctgggatagcggtagaaccagccttccaggaggcctatggggcgctcgttcgtcgttccgcaggcgaatacaaaggaaagccgttcctcttcgaggacacggaggcgttggcaagatccgtcatgcgctacgcgtgcatgatcgcaaggcctcacagagctcggatggcctatttgatggcgagggccaagctgtcggagcatgaagatgaccccacctcaccagcagcggctcgggctcggcagacctaccagcgaaagaaaaatctggtgtccaagcgcatgctcgcgattcaggagaaacgaacaaattatgctcgcacctcgatgcttgctgcatgccggtcactgaataaagcattaggggtagtagatcaaattagggactcaataccgcaacccgagcaacctgagtcgatgtcttctgagggtggtaagtgggagctaaaatttaaacccaagcgccctggattttga

SEQ ID NO: 534949 - DNA, 1899 bp, Stenotrophomonas maltophilia
gtgcgaacttggccacccgcccaccgtccagtggctaggtcgtcgctcgatccagtgctatcgtcatccaattcttgggtgccaggagtctctcctggcaccctccaacggtctaagttcatgaatttaaaggcatcttccattcaggcccaaagcggcctatctgctctccaacgctatcaggcttgtaaggcgatggcacgagggtatgcggagtcgcagaagccggagaagagcaggcttgctcatggcagggctttctgcgctgcggtgattgagacctattgggagtccttggcaagaaagaacgagacttccatgaaggttcgtccctgtccagaggatctgccggttctccctgatgacgttgcaggagtagcgaaagctattggtgagctaatcactgagtttccagtggaggacgcgggttacttgattgggtccatctatacggtaactttgcccccaactttgcgttcagagcttggagcgttttatacgcctccgccgctcgtggcacggttgcttgatcttgctgaagaagcaggctttgattttaaaaaaggcagtgtcatcgatcccgcttgtggcggtggtgctttcttggcacccgttgcacttcgcatgattgcaagctctgatgcgtctcctgactggctcgtgcgcagtttgggtaaacgccttcgcggtattgagatcgatccgttcgcggcgtggatgaccagagtgctgcttgaagctgccgtaatgccgctctgtgttgtggcgcagcgccgactagcggatgtggtcgatgtcgccgatgctttgcgcccaagaaatatcggggagttcgatctggtgatcggcaatccaccatacgggcgtttgaaattgagtgcatcacttcggaagcactacgcacgttcgctatatggacatgccaatctgtacggcctattcactgatttggcgcttcgtctcgttaagaaaaaaggagtcattgcttatttgactccgacctccttcttgggtggccaatactttaaatcacttagagagctcgtgacgaaggaggcaacgcctgttgccttgaactttgtttctgaccgaaatgacgtctttgacgatgttcttcaagaaaccttgctcaccacctatgttcgggaagagagagtcgatcctgtctctgtttccgttctcgtgccacaagggttgaacgccgcgaaggtggagaaggttggcgacattacgattgataagactggtgagccatgggttcttcccaggtccagcggtgacgcaatttttctgaagaagatttcgtcaatgaaaacgcgctttgctgaccttggatatgccgtatctacgggtccgctcgtgtggaaccgccacaaagatcagctctctaataaagaatcagataaatcgcttcctctcatctgggctgagtcgatcacgagcgctggatttaattttagcgctgaacgtcgcaaccattcgccgtttattgaagttcaagcagaccagaaacatctgattaccaaaaaatcttgcgtcattcttcaacgcaccacatcgaaggagcaggataggaggctcctggcggcagttcttccccaagagttcatcgaccgcaccagtggatgtgttatcgagaaccacctcaacatgatccaagcaccttctgcgaagcttatgcaggttcagccttcaacaattgccgcactcctgaacagcaaggccgtggatcgggccttccgatgcatcagtggtagcgttgctgtttctgcttatgaactcaacgcaatcccgcttccttcggttgctgagcttaaaaagattgaacttttggtgatcaacggagcttccgttgaagccatcgaccgtgccgttaacgcttgctatggagagccttga

SEQ ID NO: 534950 - DNA, 1092 bp, Stenotrophomonas maltophilia
atgagtttgcctgatgtgccttcgctggatctgatccgagagagacttccacaaatttttcctgaaggtttcgagcagcgtgggtatgctacgagagatgtcgcagcccgtgtaatttttgtaatgttttatgctggtgcggttgagggtatggatggctggcttcgtccaagccaagtcaccgacatgtcggatgatcaagctgctttattggatgctcaggatcgcaagtcttgggtcacttggtctttatccaacaaaaaaacaagggtggctcagccctggtatgccacaaacagccgggagcaggtcagagacgagacgatcaaggacgcctttattcctgcgggtgccgtcgtggaacgtgcgggcgtaacgacaacctcttcgaagccccggtatgcattaggtgctggttttgccgcgttgtttgatcccactctgctggcagaagacttagagaaggcaattgccgcttggcagaagaagcatctttcgaaaggtgctttgatgcggatccacctcgtcaatcatggtagaacttccgccgcaaatgtggtgacggtcaattttcctaacggcaaaggcgtccgtgatttggcacccgggccatccagtgtcattacaaaagcggtgatcgaggttttcgcgcccaatttcctccgtgatcctgcagttctatgggttagtgagtccggcaacaaagtagtggtcagtgacgatgccttgatgaaggcattagggttgaacatcaatcccgcaaaaacacttcccgatatcattttggttgatttggagtcgaactctgatgatcaccaagatgtgcttgtcgtttttgtggaggttgttgcatcggatgggccgatcacgagggagcgcaaggtggctttaaccaccattgcactggaagctgggtttagtgagaaaaacctggcgttcctgactgcttaccaggatagaggtaagagtgtattcaagaagggtgtttccaatattgcctggggatcttacatctggtttgcttctgagccagacaacttgatagagatgcacaagggagttgggttcaagttggctgacaatacaaaataa

SEQ ID NO: 534951 - DNA, 996 bp, Stenotrophomonas maltophilia
gtgtcttatcagaaatcatggaagagttatcaagatcaactggatcagctgaaatcccgtaacatgggggtgactgatgaggcgaaggcgctctcctatttggagaggattggctattacaggttgagtggctattggtatccgtttcgatttcgtgcgaaatacatcgaattaaccgaaagccatcagaagcctgatgacttaagaattaaaagtattgcgactgatgattttttgcctggaacattattcagtcaagtcatcgacctttatgtcttcgacaaaaggttgcgccatcttgttggtgatgcgctggaacgtattgaagttgctctccgagtcgatatctctcacacattgggaaagctagatacgttcgcttataccaaccctagtcttttgcatcagaagttcacaacgcagtgcaatcctcgaagacaagagacacaccatgaggtatggctgagcaagaacgatcagcttgtcgataggtcgagagaggatttcgtcaagcacaataaagcgaggtatgggctaccacttgccatatgggtggtatgcgaagtgtgggacttcggtgcgctgtcggtgctttacggtgggatgcgcgagtcagaacaggacgcaattgctaagaaatatgggatctctaacgggcgtattttcgcaacttggctgcggagcttgaactatttaagaaacgtatgcgcccatcacagcagattgtggaatcggaatatcgacgagcagcccagattgcctgatctgtctgagttgccatgggtgacgcatttccaaacagacagatttgcaagagcacgctgcttcatgcttttgaaaatggttcgccatcttctgatggtcatcaatccgagctcaacttgggcagaccgcaccaaggcgcatctcgatggttttccaagtcttgctggccatgggttgggtgtgtcccaaatgggggcccgagcaaactggaagcaaatatgggatcaataa

SEQ ID NO: 534952 - DNA, 735 bp, Stenotrophomonas maltophilia
atgttcagcgattacatgctctttatcgacgaaagcggagaccatggcctggagtctattgatcgtcactatcccgttttcgttttgtgcggcgtccttgttgagaaggacgagtatgtcggcaccttgttgcccgctttgagccgtttgaagctcaagcactgggggcatacagaagtgatcctccatgagcgggagatccggaagccaagtgggccgttctcatttctgcaaattgcggagcagcgtgacgcctttaatcaggaggtcgctgagatctttcaccagggccagttccagctgatttacagcgtcatccacaaggagcgttacattcaacgctatgcggtcccgcgcaatccgtacgagctctcgatgagcttcgtgctcgagcgcgctttccttgaactcaatgagagggggcacggcgctcggcgcacaacagtaatcgtggagtgccggggtaggaaggaggatgcccagctgaaggtggcgtttgagcagatcgtcagtggaaacaacgcctgccgtcgggcactaccgttcgatctgctgatggttcccaagtcagccaactcagcaggtcttcagatcgcggacctcgcggcccggccgcttggggcgcatgtgttgcgtcctgatcagcagagcagggcatacgacgcgattcgcgcacgaataaggcgctcgccgactggagtcgtgcctggcttcggagttaaggtaagcccttaa

SEQ ID NO: 534953 - DNA, 222 bp, Stenotrophomonas maltophilia
atgagtaagcgcgcgctgcgcgcaaagctgggcctgagcaccgacaagcagctggcaaaggttctgcagctgcctgtggaagatgtgagcgcctgggcggacgaggacatggtcccggctttgccgcaggtgatgaagttgcttggggacgccgcgcagccggagccgccggcaaacgacgaccccgatgcagaccgcatcgcaccgattgaggtggcgtga

SEQ ID NO: 534954 - DNA, 237 bp, Stenotrophomonas maltophilia
atgaagaagaccgaaccgcggccgaggcaattcctgctgctgttgtttctgacctgcgcaatgggaatctccgcctgcgcaacgacctcgccacctgccacaccgctcgcctgtccgaagccgcagccggcgccgtcgaacgtgatgcgcaagccgaactacgtccagagattgtcggagctgttgttcgaatcgtcaccgaagccgaagaccacgttctggcctgccaagcggtaa

SEQ ID NO: 534955 - DNA, 177 bp, Stenotrophomonas maltophilia
atgggcaagcagctctatgagaagagtgaactctatagggctattcacaatgccagcgactggaccacgcgcgggcgtgttggctccatcattccatctgttgcaccgaggtctgcgcaggtggaagaggctcttgcccgcttgaggcgctatgaccaacgaagggggaagcgctga

SEQ ID NO: 534956 - DNA, 543 bp, Stenotrophomonas maltophilia
atggcgaaacgaatcgaggtggagtctttaggcgggctggatcatttggtggccgccgtggagacggaagacgtgctcggggcggttcttaggatgcagctccaagtcgagcagcaaattgagcttttcctcatggcgaatgttgccgacgacatgtgggatgtggccgactctctccctcagaattttcaccagaaggtcacgctggcggcggccctaggcttcccgaaggagctgtgctttgcagccacagcgctcaatcagattaggaacaagttcgcccacaaggccggctgggccctaagtcaagctgacatcgataacttggtcaacaagtacgaagcggcgcgggccgccgtggacccggaattctatgaaatgcgcaagtcatctatccaggtccacagccggggcggcaagaaaattggcttcggtacgaatggccctgagtgggacttcaagatggtttctggagggattgtgtcgctgatcgtaaagtatctagtgatgaaaaatttggagaacggtttcgacccgccgtaa

SEQ ID NO: 534957 - DNA, 615 bp, Stenotrophomonas maltophilia
atgagcatcctcaacgtcctgatcagccgcgaccagcttgtcgttgcagtggacacccttgcggaggatgccttgaccggcgcccactctgccggcgccaagatgctcctgattccgcagcacaacgtactgctggctaccagaggcggagcccagtttttcctgaagatctacgagctggtcctgcaggccagcttccgtgcggatttttccattgaaaagctgtccgccgagatgggatcagtaatggaccagctgtggccgaactacgagagggcggcggcggaggctgacctgccaatcgaacagctggggacggagattgtcctgggtggttggtcgcccagaagcggcaggatgatggccactgcctatgccaagagcgacagtcggcgtgcaaccacggtccagctgatcggtggccagttcgcatcacctggtgatccactcaacggcgtcgcgcccagcatgatgcaggtcgatctgatgacggctgggcggctccaggccaactacctcaatgagcagatgggacggcaagtggccggcggtcgtctgctgatcggctttctccagcagggacaggcggtcgtgaaggatctgggaccaatctga

SEQ ID NO: 534958 - DNA, 306 bp, Stenotrophomonas maltophilia
atgtggaaaatcatgctgggcgcattcttggcgggctttgcttttccggccttggctgacaaaggagtagtcgtcaaagaggatgtttgcggatctggcaactcgatcattgagacaaccgacggatggtatgtcgctgcagagtactactccggcgtgaatctatacgaaggcgacgttgtctacggcaagctaaagacgtatggcttcgaagaactgacccgcgcggatgggcggtccgggcgcttctacatcgaaaactgggtgtcggacatcgaggaggctctcgaggagctctgcagctag

SEQ ID NO: 534959 - DNA, 342 bp, Stenotrophomonas maltophilia
atgcctgtgaagtcgccagacagctatttgtcggccgttatctcactgggaggggtgcttaccggctttatggccaccctgaaggcgcttctctatgggatgagtgacgtgacatataaacgattgaaggacagcggatacctgaaggacctcctcagttttcttcgtgaggcactctggggaagcgtgagtatgtgtgtcgtggccctgctggctttctacgtttctggaagcgtttctttgcatgccgctgtgataggtgtatcggcgtttgcgctgggggccgtagctagaattgcgtctatcaccgccaagcttcttgaacagcgtccggatacctga

SEQ ID NO: 534960 - DNA, 876 bp, Stenotrophomonas maltophilia
atgacacccgccagcgttaagttccaactttttaaggtcacgaaagctgttaaggaatctcaggatgtcgaggctgttctatcggctattgccaaggacccactggcaggtcgcgcaagagttgtacgcgggtctaagattaggcttgagcgtgttgaagaagtagcggctgatccaaagctatcaaggcgctgggagcttgattttgttcggcttagagacgtgtctggacctggcaaaggttctgacctcaccgctgttgaagatctggacatcaaagccaatgaatttttcggcgaggaggcggcggcgctgttctttccggaaaagggctatctagtggtccagtacaaccaccatggggttcggccagcggctatggttcagtacttgtcgcaatacatggaacaggaggcgaatgacttcgagattgctgcggttctggatgctgatgcagatgcgaaatttggtcgaatgaagcatgtgcgtaggttctcagttgcggtggacctagataagctcaccgacaagcagcgagaagctggcgtcggattgggcgaggctctgaatcgggcctccaaaatgaatggagcgcggatctctatccaagtttctgtgggtcatgaccccaatagaaccctccatggtgtgaaaacttggctgaacaagatgcttaagacagatgcccttatttctgccgaggtggccgggcgagaggctccagatggagagattagtccgctcgatcttatcgctgagcagttgacgaacgttattgacatcaatccaggcacgggcaagaggcttccgtgggatgcgcgattgcgtgccttgggggacacggcaataaggtggaaggagagaatgaaaaattga

SEQ ID NO: 534961 - DNA, 306 bp, Stenotrophomonas maltophilia
gtggctgatgatcaagtgaccaactctactgtagagtcaggctctcccgaggcttgggacggcgtcacctacgtggtgtttgccgctgagaggcagtgcctgccggaggacttcgagggcagagcggaggtggctaaggaagctattggcgaaccctggggggcctacgacctgcacgaccggcggtgtccagtctgggcgggtgggcgctgccaatgtggcctgattagctgtttcagcaatgaccggtgggtggcggagatcgacatgttccactccgtgcaggcaatttacgcgatccattga

SEQ ID NO: 534962 - DNA, 828 bp, Stenotrophomonas maltophilia
ttgaaccaatcggcacattaccgaaccaagtccaagcaggtgctagcccctgaagcttccagtcccgccaagccctggagagaggggtcaatcaacgtagatcgggcttctcgggcgttagctgctgcattcggttgcgggccctgcatggcggtgtcgtggcaggcgtcgtgggtggaatccttgccagatgaggagggggcctttgatcccgatgggctcgctattcacgcgcgaggaagagtggtgcaggacgctaggagatatctcccctcacatgcagcctccagggccatcgcactgcgcggcctccgtgcggcagctcgttccttggcggaggactttgatcgtaaggcgaacatgcgtgccgacgcgtgcgccacgcgtgtacggcgcatgcggcgttgggacaaccacaggtttgcgggcaccgtagtcatcccagctgtgaggccggtgcgcccggtattactggcgctttctgaggcatcacttgatggtccgctcgaagcttggttgatggtctacgccactcaacggatggagttttggcccaaggttgaaatgtacctgacggccatgggacataggccggaagtagcacgagaggcggcggccaagcttctgaagcctaaggaggctcgaagctatagagacggtgcgcgctcgttccgaatgcgagagtccacgtatcgagaactggtgtgcaaggcacaggccattctgtgggactggctggagcgagcttgctacgcgcttctggaagagttgggcgaaagcaatgggtgggaagtcggcgaggggaaagcgctcgatctatcgatgtga

SEQ ID NO: 534963 - DNA, 834 bp, Stenotrophomonas maltophilia
atgactgctaaagatccattcgattttctggacgccagccctgtcgagttcttcgatgaaggatcgtgggacgacagcaacttgctgactcgacactacgatcctgatctggcctttggcgcggtgaagacgttgatcgagggtgcgaggaaggcgctggctggggttccctctgaaggagttcgtccgattcttcgtttcggggatatcctgctacaagctggcgcatgcgagggtctactgaggaacgagcgcgatgagaccttggaatggacccgagaagtagccctaaaggtgagtcaccttgatcttctccccctaatcttggaacccctgagaaggaattcgttccttcttcaggactccgaattgggcttcgagcccttcgaagtgactcctgaaagattctgtgctgcttatgttctgagggcaacgttctctgcgctcgatttcggttataccgctgggctggatgatctcccgatctgctatctgatgcaggcatcggcggtctacggctatctaactgtactcgccagtgagccagctgatcccgtccgtcagatcgttgtcaacgacgcgaagacccaaagcgctcgctcaatggcctgcaatcgatggtcgaaagacccacatcgcgtgatgtgggcatccatcttttctgagtggtctcgatggcggggtgaccgaagcaccatgccaaagccttcagatttccggagagccatgcagcttcgattccccgatcttgtcgatgggactctaaagaacaagatgtcgctttgggagcgccagttccgtaacgatgcaagcacagtgtcacgctacccgtag

SEQ ID NO: 534964 - DNA, 219 bp, Stenotrophomonas maltophilia
atgaatgaagctattgatttctacatggaggtggaggtcgttgatccccggtctgtatacgttggtcgacgtggtggtgtgctggggataagtcaggaggaagatggcgtcgtcaagggctatgcagtgatgctgcatgggatggatacatctgtcttctttgagtcgggtgacgtggttgcgacaggtgtcaggtttgatcgatcgcattattattga

SEQ ID NO: 534965 - DNA, 666 bp, Stenotrophomonas maltophilia
ttgaactcgtatcaactcttctgccgcggtgaatccggcaactcctacaaagtggccttgatgctcaacctcctaggggttcggtgggagcctcggttcgtcgatttctttaacgaaacgagcaagaccaaatttcaagaaaacttgaatgagatgggggaactgccagtccttcagttagaagacgggcgtaagctttcgcagagcggttccattctccagttcttggcgcgtacccaccgtcggttcctcccggttgatgagggacagtgtgacgaagttctgcggtggctactgttcgataaccatcgctttactgcgccttttgcgacgcttcgctacctagtgggcctacgcggaggccaggaatcacagctgacgacccatttgcgggcacaagctgataccgcgtatcgagtggtagacgcgcacttggcttctcgcacattcatcgtcggctcagcacctacgatcgctgacatctcgatggttggatatctctactacgacgaagagactcgtttcgaccgcaccagctttacgaacatccagagttgggcgaagcgcattgctgagttgccagggtgggcgcatccatacgacttgatgcctcgggcgatcacggcagatcaacccacggcccaagtcccagaggcgggtcgctga

SEQ ID NO: 534966 - DNA, 987 bp, Stenotrophomonas maltophilia
atgagcggccagccgcgcgagctggcggtgttcgagccgggcgacgacggccgcaccatcgtcggccgcgtgtctgccaaggggctggccgacgaactgcatgaccgcggctatctggtcatcgacggcgtggacggcaaggcccactacgtcgcgttgaacgcccgcgacgagctggcgaactatcccaccggagccgtggtggaggtacgcggttccgccgaggtgcgggcggccgacaagaacatcgccgcgctggcgagcgatggcctgtaccgcaccgatcaccacttggcgatcgagcaaggccgggccaagctcggccgcgacccgcaggaagtcgtcgcgacccacgtccgccggctggaagccctgcgccgggccggcattgtggaacgtgtggcggacggactatggaaggtgccggacgatctggcggagcgtggccgccagtacgacgcccagcgcctgggcggcgtggcggtggagctaaaatcgcacctgtccatcgagcggcaggcccgcgtgatcggcgcgacctggctggatcagcagttgatcgggggcggcaaggggctgggcgacttgggcttcggtggcgacaccaagcaagccttgcagcagcgtgccgatttcctcgaagaacaggggctggcccagcggcgcgggcagcgcgtgatcctggcgcgcaacctgctaggcacgctgcgcaaccgggagctggcgcaggtcgccaaggacattgccgccgaaactggcctggagcatcgcctggcggcggacgggcagcgggtcaccggtatctaccggcgctcggtcatgctggcgagcgggcgctacgccatgcttgatgacggcatgggattcagcttggtgccgtggcggccggtgatcgagcagcggctgggacagcagcttatcgcgacagtgcgcggcagtggcgtgtcgtgggaaataggtcggcaacggggcccgtcgccgggttga

SEQ ID NO: 534967 - DNA, 1086 bp, Stenotrophomonas maltophilia
atgagctgcggtttcaagcgccacggcgccttccagatcatcggggcagctgacctagaggttgcaaagcctagctacggcgtgggcgcgacgaactgcaatgccacatacgagcacaaccacggcctgcgccccgccaatgtcaatctcgctactacggggccggaagaactagcagaacattttgggttcaccccagaggatgtggatgttctcatctcgtgcgcgccttgcactgggttcagccaaaaacaggctcgaaaccatgtaaatgatgatgcgaggaatcaactcgtgcggcggaccgccctgtttgcagcggtctggaggcctcgctacatcctcatggaaaacgtcaaagagctgctgagtggccggcaccgtcaccattttgaggggctatacaaagacctgaccgagctgggctacgaggtctttgcggaggtgcatgacctctccgaatttgggcttcctcaacggcggctcagagcattggttgtcgccaagctcgggggccgtcttgtccccatgcttcgtcctgcgcctagggttcgcactgtccgggatgcaatcggccatctacctcgacttgaagcgggcgaaactcacccagatgaccccatgcacgtctgccccacgatgaacgacgtcactcgtgcccgaatgcaagcgatccccaaagacggtggtagctggatagacatacctgaagacaaggcccatcttagaatccccagcatgaacgtcgaaaagcctggctcatacccagacgtgtacggccgcctcgcttgggataagcctgcgccgactgtgacgcgtgagtgcagctctccaggaaatggccgctacacacatcccgagcaagacagattgttgtcggttcgcgagatgtcgttgctccaaggctatcccgaggactatgtattcctcggctcgctctcatcgaagtatcgccagattggtgacgcggttccgcccttagtcagcgcgatgctggccgaggctgtcgcatcagacgcattaggtgaagcgtcgacaggcgtggaacatctgcaagtccggggacagctcgctctgagtgtctga

SEQ ID NO: 534968 - DNA, 762 bp, Stenotrophomonas maltophilia
gtgagcttgagcatcgaggaaaagcaagagttgttgagggcattggatggattgaccaactctcagcaacggcgcatccaagagaccatcttggcctacgcgcgctcgcggcgattttggcggcggccggattctgaccttgtcactgatgttgttctcgacgacctaggcgacaggttgctgacccaccatgcgagcagccgtcaagcactgagcaaggatcggttcgaatacgcgctggaggcttcgctcaatgcggcaggcatcgaggcggccttggagaagaacccgaccaaccgtggccatgacatcaccatcaatggagtacctgtcaatctcaagacccaggcgaacgcggccatccgtgaggaccgcatccacgttagcaaatggatggagctcggccgtggtgagtgggacattgacttccagcgccaacagtttttgacgcacctcaacggctacgaccgcatctttaccatgcgttgcttgagcaaagagctggagcacgtgaggtacgagctggtcgaaattccgaagagtctgctgctggaaagcgcgactgccccgattgaacacatggcgaattcgacgcagtcactcatcccggcatacgtcaaggtcagggacgcgacaggaggcatcaagttcgagctctacttcgatgccggcggtgagaggaagttgcaggtgaagaacatccgtaaggacctctgccgggttcatgccacatgggcgttcggtcgggatattgctgcctga

SEQ ID NO: 534969 - DNA, 888 bp, Stenotrophomonas maltophilia
atgaactcgcgcagcccccttaccgtcgccctgatccaggagcgcaaccacggtgatgccgccgccaacctggcggtgatcgaagcacgcgtggccgaggcggctgcgcagggtgccaagctggtgctgctgcaggaactgcataacggtccgtacttctgccagcacgaatcggtggacgaattcgacctggccgagccgattccgggccccagcaccgagcgcctgggcgcactggcgaagcagcacggcgtggtgctggtcggctcgctgttcgaacgccgcgccgccggcctgtaccacaacaccgccgtggtgttcgagaaggacggtacgctgctcggcaagtaccgcaagatgcatattccggacgatccgggcttctacgagaagttctacttcaccccgggcgacatcggcttcgagccgatcgatacctcggtgggtcgccttggcgtgctggtgtgctgggaccagtggtacccggaagcggcgcgcctgatggcgctggccggtgccgaactgctgctctacccgaccgcgatcggctgggacccggacgacgtgcaggacgagaagacccgccagcgcgacgcctgggtgctgagccaccgcggccacgccgtggccaacggcctgccggtgctgagctgcaaccgcgtcggccacgaggcctcgccgctgggcgcctccggcatccagttctggggcaacagccacgtgctgggcccgcagggcgaattcctggccgaagccggcaccgatgccacggttctgctgtgcgatgtcgacctgcagcgcagcgagcatgtgcgccgcatctggccgttcctgcgcgaccgccgcatcgatgcctacggcgacctgctcaagcgctacatcgactga

SEQ ID NO: 534970 - DNA, 279 bp, Stenotrophomonas maltophilia
atgaccaccgacaacaagaccccggctgttgatgttctccagtggctgggcgacgagcgcttcatgtacgggccagacaccgagagccgcgccaagtgcgaagaggcccgtgccgcagtcgccgagctgattgagaggatcgaggcggcgctgaggggtgagtgtcagtacttcgtgctcggaacagacggaatccagatacgagaggttcgtatcaccaaagccaacttggacagcttgaaagccgccctcgcccgcgtaaaaggagaagcagcatga

SEQ ID NO: 534971 - DNA, 414 bp, Stenotrophomonas maltophilia
atgagcatcaaggattacaagataggcgacgagctgttccgctatgtcgagatggctggcgttttccgctacgtcgttaccggtcgccgcgagtaccagcaagaggtgcagctggaagtcgagtgcaaaacctgcagccacggctggcagtgccagctcctgctggcgcagagcgactacggcaaggtcgtagccgtccacatgctcaatgaagacgaggacgagccgcagcgcagctggcacgggaacgaaggattccacttctggccgactgtcgagcaatgcaaggccgagggtctgcagaaggcgcttgtgaatcgaaaggaagctgtgcgcattgcgcaggaacgccttgattcggcgaagaagagcctcgctgagattcaggcgctaatggatggggtgcagccatga

SEQ ID NO: 534972 - DNA, 684 bp, Stenotrophomonas maltophilia
atgaagaccgacaacccgaccgttgcaacccgtcgccgccgcctgcgtgagtggatagaccaacatcacggggggagccaagcagcgttcgtcagcgcaaccggaatcaaccagggggagctgtctgggctactgcgagataagtctttcggggagaagaaggcggccgcgatcgagacggcggcatcgatgccatctggctacctgtcgggcatcgatggtggcgttgtggccgtcgcagcccctgcgatcccgtctgattacgttcgcgtggaacaaatcgacgcggaggcgcagatgggaagcatgggtcgcgtgaacgaggatttcccggaagtcatccgcgcgatggactttgcgccaacctacatccggtccgtggtcggcttcatgccgccgcccggccggctgaagctcgttaccggcgtcggcgattcaatgtccccgaagatcaagcctggagagatggtgctggtcgacactggctgcaacgaattcgtaggggacggcctctacctgatcaacactggctacggccagcagatcaaggccctgcaggcgcagccggatggcctatgggcccgtagcgccgaccaagttctgtatccgccatttaggctcaccgacgacgcgatcatcggcggcagggtctacctgatccagcacttggagcgggtagcctag

SEQ ID NO: 534973 - DNA, 240 bp, Stenotrophomonas maltophilia
atggacacccttcgaacctacctctcgacgttgagcccggctgaccaggcggagtacgccaagcgcgccggaacttccatcggatacctgagaaaagccctgagcgtgggacagcgttttgatggtgggctggtgcgccagctccatcttcacagcgatggcttcgtttccctgaacgaactgcggcccgacatctggccgtcggaagaatcgaccccagacgctggggccgtggcctga

SEQ ID NO: 534974 - DNA, 600 bp, Stenotrophomonas maltophilia
atgatcgacgttaatgtggcggagactatctattgctctccgctcaacctgttctgccatcccctcgattggtggtcctctgcggccagctgggcgcaagcaatcctcactgtcgctaccttccttggcaccgttatctaccaggccaagcagacttccgcccgagacttggcagagcgaaatcgcgaaagccgagagacaatcgtcagacgccgccgggagatggcgctcgccagagtcatcgccgcccgcgaactccgacgctggcggcgcgcagttcgatcgctcgcaagccagaaattcgagaacgaagagaaggaaatcgcttgtgcgcgacagacactcgaacagatccgctgggagggaacgtcggatgaattggtgatgcttggcgaggtagccgaaattctggtggacctgatcgccaccgccgacgagatctccgacagcctcgcccatccgtctttccaacctcagccccttgggccaaatgtgactatccaggagctgcgagagctctggacgcggctggagatcggtatcacccgcgcactggagtcgatggaaaggacgcataatcgcctttctgagcatcagtga

SEQ ID NO: 534975 - DNA, 207 bp, Stenotrophomonas maltophilia
atgttcgtattcttcggcggcgtgcacgttcgtgcagagcacatcaccacaatcgccccaattttcgaccatggggagcatgccgggagcagccgctacgtgatccggatctccctcatcaatggtgaagatctgcgagatggcagcgggagcgctgaggacgccaatgcaatgtacaaccgcctacgccaggcggtgaacatttaa

SEQ ID NO: 534976 - DNA, 216 bp, Stenotrophomonas maltophilia
gtgaagctgcagctgatcgacgactggcgtaaggcctggaagctggcatccgtgtgggtgttcggtctggtgaccttgttcccggacatctacgacgcgatcgctgccatgggctggatggacgaactgccggactcggcgaagtggtccatccgtgggcttggcgtcctgggcgtcattgcccgcgtgctatcccggaggaagccaccgtgctga

SEQ ID NO: 534977 - DNA, 636 bp, Stenotrophomonas maltophilia
gtgcatgccgccgatggcacggccccgcagagtgaacttgccattgctggcaccgtccacctgcaccagcggaataccgttgacggtctgcgcgccagcaccggcaatgttgttgacggtgacctgggtggtgccgctggtatcgccggtgacatgcacgcgcgagcttgctgcgtcgtcgccggccagcacggtgttgaagtgcagggtgccgccattgccggtgtagttgccattgactgtcagctgcggatacgccgcagtgcccgctgcaccgaggaagatgttgctgcctgcacccagggtgaggttgccggtgttgctgtcgccggacagcgtccagcgaccgccctggtcgacgatgacgtcggccgggccgaggatgcggccggtgaggtcgaggccgtcgaggaagcgcagcgtgccgctggcggtatcggcaatggtgatgtcgcccttgagcgtggaggtgcgggcggtgaggtcgaagtgggcgttgtcgcgggtagagatgatgacgccgttgctccccaccagagtcgcatcattctgtatcaacagcgtatccgggcgggatacagaaggcagatgagcgccgaacagaatggcgctgccgttgcttgcttcgacgtgtga

SEQ ID NO: 534978 - DNA, 555 bp, Stenotrophomonas maltophilia; identical to SEQ ID NO: 507079

SEQ ID NO: 534979 - DNA, 201 bp, Stenotrophomonas maltophilia
gtgggcgtgcgggttcgtctcggttggttcggccgcccggtgatgcagatccagcggcagttgagccgaaccaggttcactgggccgggacccgatggggtggtggttgaggcttgcggctccaccgaatggcgggacgcagccaaggcggacgccatcgagctggcgcagttcatcggttcgctccaggtgcatgaatga

SEQ ID NO: 534980 - DNA, 780 bp, Stenotrophomonas maltophilia
atggcacagcaagaaatcgacaccaccaccgatcatggaagctacaagggtgacccagccaaggttgccttcgagaaggccaaccaaaacttcgcagagctctacacgatggctccaggtggcatctcggggctgaagatgacgagagccggtgtcaatgtcgtcaccgtgggcactggtgcagcgcatattcctgggaccaaccgaatcgcttctctggctgcgccagtgtccaagaccgtgtctggcccagccagcagctggctccacggctacatcttcgagtcaaacggggttgtagatgttgagtgggtgactaccgcgccagcagcaccttactttggctccgcaagaagcaagtccggggattcaagccgtaggtacattgggagcattcgaacaaacgcttcatcgcaggttgttaacttcactcacaaccaaatcaacggaaacgttcgctacttgagcgacatcaatgcccagattgcactcactggtggaaaagcgacgaccactactgaagtgagccttgccccattcgtaccagtgacagcgggtgtcgctgacatcttcgcagagaccggggtcaacgatctggcattcatttccaaccctgatgctggatccgtcgcgtcggccgcaatcctcttcttcgtaagggcatcgcaacaggtagctggagcgatcgcactgtccgcgaatcagaggctcacctacatgcttgggccagccacaacaggcctgagcatctggtgttcgggctattactacgagaggtga

SEQ ID NO: 534981 - DNA, 942 bp, Stenotrophomonas maltophilia
ttgaacctgccagtcgcaactccaatcgcccgcgggctgcagctggccggcgccggcggcaagagcggcagcaacgaccgcacgccggtggagaccccggacagcctgcactcgatggccgtggccaggatcatcgaccttgtcagcgagggcgagatccggggcttggtggccggcaaccagtcgatctacctgaaccaggttcccattcagaaccccgacggcgggtggaacttcgctggcgtcaccgtcgacacccgatcgggcacgcaggaccaggaatacatccccggcttcccatcggtcgaaaacgaaatctctgtgaacgtggagctgcgcagcgaccagccggtcgttcgcaccgtaagcgggtctgatctctcggccgtgcgcatccggctggccgtccccgccctgcagaaggtggatgaggaaaacggtgaccggaacggctactcgatcagctacgcagtggacgtgtcggtcgacggtggcgcctacaccaccgtgctcaacgatgcgatcaccggcaagaccaccacgcaatatgagcgcagccgtcgaattgacctgccggctggctcgcagtggcaagtgcgcattcgcaggctgaccccgaaccagaacaactcgctgatctcggacgtggtcaatgtgctctcgatgaccgagatcatcgacgtcaagcttcgctaccccaacagtgcactgtgcgccgtccaggtcgacgcgagtcagttccagaacatcccgtcgcggtcctacggggtgtgggggcggatcatccgcgttcccagcaactacgatcccattggccgcacctatagcggcgtgtgggatggcaccttcaagtcggcgtggacgaacaatcccgcatgggtgttcttcgacatcgtcaccaacgaccggttcggcctgggcaaccgaatcccgctggactag

SEQ ID NO: 534982 - DNA, 228 bp, Stenotrophomonas maltophilia
atgaaattcgtcattgaagttatcgaacctgaggactaccccgagtcgctcacttcccagattgatacccacggatatgtggaaaccaatacgatgggtaaaatgtctttttattttgcaatatcggaggacggactaaccactacgcctgtgttgatgcagtgtccaatgtttgattccattcctagaggttcactaataagaattaaagaacagcttagcgattga

SEQ ID NO: 534983 - DNA, 1377 bp, Stenotrophomonas maltophilia
atgaacgaggacagcacccccggcaacagccaagatcttaaccgttgctccaccggcaaaattacagttggccccctcgctttggagtcaattacatttgaggggcccgatgctccctaccaactcagaaaaactctgcgcgaacttttcgaacaggcacatagacgcggatacaacacagcactccccgcaaacgctcctgctgacgtagaagcagccaagctgtccgtggaaatagataggttcattacgggaatgcatctagatagagaagcaaatcagaatataagcactacgcatcactctcttaaattgcttctcggaataatcggcaacaaaattatcacggacatcgaccaagaagacattcacgccttcaaagaagggatcagatggtggccagccaaggcaaaccttaaagcagaatatcgcaacctttcagtgaaagagattattgatcgtggcagaacacttgggcttgcagaaccgtctggccataccgtaaacaatcacttagccaagctaaacaagtttttcaataagttggttcggcaaagaaaactcaaatattcgccactggaaggcatcaacctaagggtcaataaacaggttggaccaattgatgaacgactgttttctcaatctgaactcaacaccatatttgatgccaactcttacttgacttgggttaacggctcaccacaccggtattgggctcccctattcgcctactatacaggcgcacgcatcaacgaaattgctcagctgaaaatttctgatttcgaaacaattaatgatgttctttgcatccaaattcgcgttggcaaagatgtgggcgaggacggcctcccattagggacagtcagccaaaaagtgaaggggaacgcgtcaatccgcaccattccagtatcgcccgagctacttgctcttggtttgaaagaatatattgatgatgtgcgtcgcactggacacccccgcctattcccccacctgtctcctggtgtctccataaagaacggcagacgggaggtgttaggctactcgcatcgactagtcccagttttttcgaaatacctgaaaaccaagggcttccccaatggcgtcgtttttcatgcatttaggcatacgtttgtaagcgtgcttcatgagcaaggtgcatccattgagcagatcgagagcatcaccggtcatctcgactcttccggaaatcgaagcggcaggacgctgcatcgacactatctgcataagaaggtgaatgggagtgcccaagacgaccttaaaactatcaatatgctgcgtccgctggaaggtgtgccagtctatgactcgaagcaattcgctggatcattagctcggaagaataaatttcatccataa

SEQ ID NO: 534984 - DNA, 225 bp, Stenotrophomonas maltophilia
atggaaaacgaccgcataaccgaagaagagtggaaagaattactgacagatccgggcttccgaagatctttggtggacctcgccatcgagaagcatacaaacaacgacggcacgatcacgatggagatcaccgctgagctgctgaggttcttagacttttctatcgacgatgaaggtctcgacgcggcccttggtcgggtggagaacggggacaagctccactga

SEQ ID NO: 534985 - DNA, 384 bp, Stenotrophomonas maltophilia
atgactgttggcacctttctcattctgcttgtcctgagcgcagcggcgctggtcgccattgccgtcaatcggaccttccagttccgcagccagcgggaggcctttggtcggggctttgaacactcctactatggtgccttgggcggcttggcgatctccgtcgagcggtctagggtgaagatccgtgctggtaaggcagtgaagatttatcccttcatggatgtgcgttcttgggaaaagcactggcacaattcaaagcgggaaggcacgatcacagtcagtgtccgggatacggatcatccggtctggactatccgattcagtagcgaaagcgagatgaaccggtggtatgaaatttttaaccaagcgatcaacgacacttga

SEQ ID NO: 534986 - DNA, 312 bp, Stenotrophomonas maltophilia
atgttgaagtctcgccttgccgccattggcgcgctgatcgtctctctggctgcctgctccggtgctgggccctcgcacgacgaccgtgagaacgccttcttgcaatacgtaaaagacaacagcaatgacaaggccaagatcaggggtttcgaaagcggcaagtgcgtcaaggccgagggcacccccagctacaactgcgcggtgtcgagtcaggttgaagccatgcaacgagatttcggccatgggatggatggcgtctacacgttcaccgaagtaggcggtgcctggaagattactgggcgagtgcagtga

SEQ ID NO: 534987 - DNA, 237 bp, Stenotrophomonas maltophilia
atgggactgccagaggacgttgcaggcgttcggatcaaccgatacgagcgggctgtgcacgattgcgatacggagacggctcagaagatggccaaggccctgggcgtgtcattggcttatctctatgcagagacagatgagcttgctgagctcataaaggagttcagtgtgttaccagaaaaagagcagcagtcgatcttggccgaagtcaaggcgagaagatcatctaaagtctaa

SEQ ID NO: 534988 - DNA, 1185 bp, Stenotrophomonas maltophilia
gtggacgaccaaaaaatcagagagtgggttacgaggcaagtccagcccaatgctgagaaagatgaaataaatgcactgcgagctgcatttcgtctctccgtcatctctcttctaagatcccaactatcacgtcttgtttcagaagaaacgatgaccggagcatttcttggcgcagccgcagcctctgttggcatttgtgccgaggcttactccggggaaggctcgcccgcgtgcagctggattcagtattcaaagagcggtggtcatgaaaattccgaaagtgttaacggtgctgattttgcacttctgatccgcatgagagatggccgagcacgcttggccatttttcaggctaagcggaagatgaccgaatcaaacaaaatcaatctcagtcgagccaagaagggctcggaaacctcttccggaaaagaacaacttcttaggctggtcgattacggcacaagtgtgtacggcgacacattcaattctgataccgaagtcgaccagttgcactggattcattacctcctttatcagaaagaagaattaaactgctgctctatagatcaactgaaagaaattcatattgcttttaaagcagactcagatggtggcaaattagataaaaaaaagattaatattttagatgaaaatggagaaaaagataaatcggataatggtgttgtcgacctgagtgagaagaaacttgtctcgttggtcagccttctggatatcggagcgaccgagcccgaccccgttaaggaaggtaaaaatagttctatcgcagatcgaaatacacccggctggctggaaatacaggacgaacggcagctcactctaattatcagcagactggccaacaaggttgatctctattttgccgaagagaatggagcgcaggattatgaaccaagtcccacaaatgcgataagcaaggagcatcgttatacgattaaagaaatcgtcggcatgctattcaatcaagatggcaactttaatccgccaagtttcggaaggacggaacgcgaagccctcaaacgcgagaaagagaataagaactctcgcaatcaagcgcctgtagataattcgcttgaatcagggaaggttggaagacactctaagagcgtcggccaagcagttcagtccaccagcagtttctacaaaaagaaaaatagaaagatgtaa

SEQ ID NO: 534989 - DNA, 1593 bp, Stenotrophomonas maltophilia
atgaaatcgtttggacgcggcaaaggggagtcttctgtcgcagcagctgcttatcgggctggcctccacctcatcgactcacggacatcgatccgatacgactactcgaaacgctccggcgtagcgtcccaccacatgctcgcacccaggcatgcacccgattggtgtctcgatccaaatttattttgggacatcaacgagtctcacgaaaccagagcaaacgcacgtgtggcgcgtgaggtggaaatcgccctgcctgccgaactcgatgaaagacagcgccaggtcttggcagtagctctgggtcaaatgctcgtagatcgctaccaagtggcagtccttgttgcgatccatcatccaagcggacaaggcgatcaacgcaaccatcatgttcaccttcttctgtcagctagaacgatcacagacgaaggcctaggcggacgggcttgtctggaatttgatgccaaacaaggcggaggtgcaaaggctattcgtggcttgcgcaaggtcgttggtgaagtcattaatgagcatctgagaagatgtggggcgtcggccaaggtcgatcatcgatcattgagagcacaagctgcggatgctgcattccgtggtgactttgagcgagcacgtgagctgacccgtcaacccaccaagcacttgggaaaaagccaggttgctatggtgagaaagacgaagttgtcgacgaagatcacaggaccagaagcggaagtgaagaagctgacgcttgatctgatctcagcgatgttcgaaaaagagacgcacgaagtgccgaacggccacagccatggagcagcactgcgtgaccgtctgagagagagaagatcaagggcttgtgctgggcaaaataattcggagatcaggttctccccaacaggacacgtgactccggggcccgttggtcgtcccaaacatactctgggcccaaggggccgtcagtcagctccgaacctcactcggcatctcagccggacagttcgattgactcgctcacacggtcgagatgcagaagtgctcaacgcggaagccgagctcattgagaagtggcttgaagttcaacgccaggcagccgaggactcgtttgagttgcttcggacaataccgggcattgaagtagaaccagccttccaagaggcctacgggacgcttgtatgtcgttccccaggagactactcgggaaagccgttccttttcgaggacacggaggcgttggcaagatcagtcatgcgctacgcctgcatgattgcaaggccttacagagcccggatggcttacctgatggcaaacgcaaagctgtcggagcatgacgataacccgacctcaccagaggcagctcgggcttggcagacctaccagcggaagaaaaatctagtgtccaagcgcatcttgcagatccaggagcgacggactgaccgtgggcgcaggacaatgatggatgcatgcttagggcttcgcaaacacttcggcccacgcttcaagcctgacggtaatgttgcgtgtgagtctcacctgtcggacgaagccggaagatgtgaaggatggcagctcaagatgcgccatcggccgaggttctga

SEQ ID NO: 534990 - DNA, 1005 bp, Stenotrophomonas maltophilia
atggcaatcgtagctcccaatttggaccagctttctgcggcagaagtgcagccaggatcgcaagaaggctgccatggatacagcggaggcgtgggcaactcagcagggctgatgcatggaagctctgctgaaatgctcaggaagttgccaagtaacgtgttcaacgtggctgtgacctctcctccttacttttgggtgagggactacggctatgaggggcagttggggcatgaagagtcggtcgacaactatgttgaagccttgatggaggtgttcgatgaagtcaagcggacgcttcatccggaaggtgtgtttttcctcaatattggagacacatattattcaggtaacgggcagcctcacggaaatgatccgaaatgttcctcccggaacttctcacgacagaaggtccgtccggtggataaaagtgggtgggacattccgaaaaagagcatgatcggtatcccatggaaggttgcatttgcaatgcaggcgcgaggttggacccttcgcagctcaatcatttggaaccgttgcaacgcgttcgtcgaaccaacagcaagggatcggccttatcggcagtacgaaaatctcttcatgttctccaagagccgcttttatagctttgatcggtcaaagctggtggaggaagatgtgtggaacatcccaattgagcgcagccgccgagccaatcataacgccgcgtttccgtctgaactggtgaggcggtgtatcgaagtcgcaagtccgccgaatggccatgtgctcgatccattcgtcggaagtggcacaactatcttcactgctctgcaacaccatcgaaacgtggtgggagtggacatgagcgatcattacgttgacttcatccaaagtgagttggaagctgagggattgttgcctcaaaactgggatgagcttgtagcaaagctctcgaagccatctgcattgtgggatgagtgggaagggaatcgactcaatttccggaagcccggaacgaaaggataa

SEQ ID NO: 534991 - DNA, 1650 bp, Stenotrophomonas maltophilia
atgaaatattttcagatccaaacgatcaaggattcgatcagcaagttgaaaggagtgagtgcgaactggctcattcctgcatttgtgtttgctgccaacgatgtgggcgtcggtgaatatgtcgacatttcaaaggcgaaagggacggatcagtttctaaacaaatatttctttggcagcttaattgggttgcctgatttttcgtcaggcaacaacttgatgcgcccccttcttaaaggcgtcaaaaatgaacacgagggagaccttgttgttcgtcaagatactaaaatgtgggcgaacttgttctcgagtcggggctatcgagacatgcgccagcgtggcgaaattgaagctgacaagtcaaatgttcggctgaccgataattttaaaccggcattcgagaacgaaattgcgtccagctttgagttcgaagacttccttgtatggatttttgccttcaagggttttcctgatgaagtgaactcttggcaagaacttcttggagttttgttaaaagatcttggcctcgaagacttcaagcctgcatataaaggccgattcaagctcacgcctgggcgagcctggccagcgacgctagatgagcgaccgactgatcatgagttccaacaatcgcttgcgccagggctagtcgccgcgctgcagggggaggcaccttctccctcagctgaggaagaggacgtccaagagctagactcaatactgccggaggatgatgcagtgttgtctctcgttcaaggtgcgattgagcgtgggttgagtctttcttttctgctcgcagggcctcctggcaccggaaaaactcattacgctcacggcttggccgcgagtttggccgagggccaggccgaccgggttttatcccttcaattccatccagcctttggatatgacgacttcgtggaaggatttcgtcccgtcgaagtgaagaacgacgacgaaaaagttacgggagtcgcttacaagctggacgataggcatgttttaaagttcgcaaaaaaggctaaattgcgcccggacgatatatttgtcttggtcattgatgagctgaatcgtggcgacgtagctagaatatttggcgagcttttgacttatcttgaggttgactaccggaacaagcctttcacactggccgtgtctggggattcaatgagcctgcccaagaatctggtagtcatagcaaccgccaatcctttcgaccgttctgtaactgatctggatgacgcgcttctccgacgtttcattgtcgtaccgatggagcctgatagagtatttttagaagctcacttgcaaaaggcaggggtctctaatttagttataaagcgagttcttcacctcttcgatatgctaaatgaaagccttccggttggttttggacacacaagcttcttaaaggttcggtctctggaagacctggctgacgtttggactggtcgggttcagttaggcgtaaggcgaacgcttttccacgaaaagcagaaactcaagaaatttgaagaggatgttgagcaactccttaaggtcaatgaggcgcaggaagccttgcctgatccaggagatcatctagtccagccagggggccaagtcacagcagtcgttcacgatccgcaagtccagcagcctcagccatga

SEQ ID NO: 534992 - DNA, 1245 bp, Stenotrophomonas maltophilia
atgagtgtgagaatcgttgacgttgaggagcgtgggaatgtctacttccctcgctccgatcttatgtctcaaaatgggcagtctttgatcctcacggagacatggcggcgtaaggtcatcgaggtaaaggatattgaagacggctcgcgactgatggcgctgggctctattggatttcttcctctcactgcatccatcatccttaatattattccaaagtttcccatggaaaatctttgggcgatgttggaggttggtggtgagtcttatagccggatacttccggtgttgaagcgctatcagaccagtgagggtcctaccccatccttcttgcttgctaggagcttttgcttttatttgaaagaagcgctctcgattggactggtgcgtgactactacaaagaagagcgatcaggtcattatcggccaaaggttgagtttggcccgacgatcaacagatatatatctcgcggcgacccaattaacacgatttcgcaatcatacagctacggtttgaataatttggcaaatcgaattgtcaaggccgcctgtgtggatttcattagaattattccaagcgatgctgcttggaaagaagagcgcgatttgatccgcgaggcgctagacaatgtagcaatgttgccaacttctaggcccagttattctgatcttgttctcgagccgaacgtcccaactcggctgaaaccgagctatcttgggatggcagaggtgtatcgactttccttagggggcggcggaatttcgtttgcctacgaggagagtggccgagaactcccgtccttcctcttcaagcttgaagacatcttcgagagctttattcgaaagagctttgcagccgtttcgagagagagtggcgtgagcatagtggatggtaatgctaagcctggaaagttgttcacagacaacaagtcatatgacattaagtcagatatattttttaagcgagggaagaaaaacgtcattgccataggtgaggtcaaatacaagccttctattaaagaaacggaccgataccagctgataagccacgtgacagcttcaaagtgcaaaattggggtgatgttcagccccgctaatccaggtgaaccccagagcctctcacggataggccgaatgcctactgatgccgttttttatcactatcgtcttagcttggatggagacatcagaaaaaatgcagagaagatggtttgggaggttttagatttaatgcctcccccatag

SEQ ID NO: 534993 - DNA, 969 bp, Stenotrophomonas maltophilia
atgaacctgcccattcggagcaaagtgaattccatgattcgcctgccactggcgcatgggcccaagctgctcccccaacgccaaacgccgcaacaactgagcagcacgaccaacaaagtcccaacgaatgggagacacttcgtccgcgcgtaccaaggcatcatcagccaacatcagccagccgcaatcggcaaccgccgctttaaaggcctctgttggcggacaacgcgcctgttcccgcgcaggaatcggcaccaaccactgtcgcaacacttgatcgttgcgcctgaactgcttgaacacctgctcaacttcaacagcgcccaagctcttgcgatacttgcgatcaacttggatgacggcgcagacgccgccggcctcgggcagacacgacagcacggcggtgcttggcgaagactctccctttttaacggaaatcacctggatgtcggttaccgacagctccgccaacaactcttccacgctggcgacaaaatcttggtacacaaaaaggtagcgcattgggctgaccgtccatggttcagttcagatcagccagctcgcttgatggcatccattaccgcacccaaaggcaacttcagcgcgcggagatcttcctcgctcatcgatccgaccgcatccattgccaactggcgaagagcggacagcgactggcctggaccggccagttccaccggccgagacttgctgacctcgggcttcatagacgcgcgaagttggatcacagcactgtcccgaaatccctcagcgacgttctgctgcttcagttcctcggtgaacagagagagcagccgatggaagcggaactgcccccagctcgcagacaaaccgcgcttcttgacctccttcatccactgctgccaccaatgggggccactaccaatcaactgctccagatcggacgacgtcccctggaactggtggtcaagaaaatcgcgagcaatttga

SEQ ID NO: 534994 - DNA, 639 bp, Stenotrophomonas maltophilia
atgcagcggtggttcatcgcggaatttgcgtttctcagtaagaacgtgacgctcgtgggggagatgattgaggcgcagtgcaatcgatacgaccaggcgttcaaagaagtgatcgccgacatgaactcttacgatgcagaccgctacgccgacgcgatggttgaagaaacggcattcattgagatgcttccgaagctgcaatggcgcagccagtacctgatgatctacgcgacctttgagcatgcgttgcttaagattcgcatgattgcgcgccaacgcttcgggatgacaaagcgagagccgatgagcaagcaatcggctttggagcgcaccaagtcgtgcatgaaggagtgtgggatccaagtcgattggtcgatgcccgacgttgagcgtatcaacattcattcggtgttacgcaacaagatcagccacgctgatggggtttttctcgccgagggattcaagaacacccgggtggggacattgccgggggtcgaggtaacgagcgaggacgacagcgaggacgacactgtcacagtccacctgagtgcggaaaccttgctggacgccattgccgccatgcatggattgttgacacggctggcgaactccgaacatccggacttggcgaacccttga

SEQ ID NO: 534995 - DNA, 1686 bp, Stenotrophomonas maltophilia
atgagtgagcttgccaagctaaaggcctgcactacgattggcgaactggcacggctgctgggctttcaagctaagacgctcggctacgtagcatggggtgccccacctgctacaaagtacagcaccttcgacatccctaaacgttcgggcggcaagcgaacgatccaagcgccgtctccacagttgaagcttgctcagggaaagctctcgacattgctgcaggcatgcgaaggggagatcgaagcgaaattgggtatcaagcgcaccgtcgctcatggattcaagaagggacgatctatcctcaccaacgcggacgtgcaccggcgtcagcgttacgtactcaatttcgatctatcggacttcttcggaaccatcaattttggacgggttcgcggatttctcattggcaatcgaaattttcagcttcacccagatattgcaacgctgattgctcaaatagcttgtcacaaggacatgctccctcagggagccccaacttcgcccgtaatctccaatctgattggaaacatcctggacgtcaggctgtcgaagattgcgcgagctcacggctgcgcctacacccgctacgcagatgacataacaatgtccacttcgcagcccgattttccaagctcaatcgccgcccaagcagatcccacctcaaagtggataatcgcgaaagacatcgagcaggcggttacagcttgtggcttccgcattaaccacgcgaagacacgacttttaccccgccgctcccgccaagacgtcactggaattgtcgtcaacagacacgtcaatgtaaacactgattatcgcagatccgttcgagcaatggtcaacagtctgtgctcaacgggatcgtaccaccgcaaaaaacccattgtcgcagcagacaacacgaccatggcgaccgtcgaaggcactcggccacagctggagggaatgctaggatttttgctgcaggtagagcgttaccgcaggccagatgactttaccccacccactttaagctctgcagagctgctgttacaccgctttctcttcttcacaactttcgcaagcaacaataagccggccattctttttgaaggaaagaccgacaacgtatacataagttccgcaatcagacgtctcagggcgtcctacccgctacttatggcaccgggctcacaggacctacttgtcagtctccttccccacacgaagacacgggagaggatctttggcctcacgggtggcgacagcgctttgaccaacttcatcgtctcctaccgagaaaactaccgccgcatcaaaggtccgaagggcgccaagcctgtcatagtagttttcgataacgacaagggctcgaatgccgtcattgcagcgatcaagaagcactataagttggatatgccgaacgggacccagtatttgcgcatttacgacaatctctatgtcctactaacttcgagcaagggctctgcaagtcattgcattgagcacttcttcactgaagacacgttagccaagacgctttccgggaaaaagctcagtttatccaacaaaaagctgaacgacgacgaatatgggaaagcatggtttgctgagaagatcgtgaagccatactacaaagatatcgacttctctggcttcagcggaattctagaccctatttccgagatcattaaaacccactccccataa

SEQ ID NO: 534996 - DNA, 444 bp, Stenotrophomonas maltophilia
atgcacgcagatactgcagccgccatgggcttcgacgacctctacagtggaagtgaggccttccgtgagcgcttcgatgagatgctggacgcggtgaaagcgctgccagaaggcctccaagagcgcgggcggtcactgatgtatccccaactgcacaacgcttgcgtgataggggatgtagagcttgtgagggcgcttttggctaccgggctggacccggacgcgtattcctacacagacgacgatgaggatcagcctcccttggtctggctggcccgtgacatggagctcgatttcgatattaagtgtcaggtcgtcgaggtactgattggtgcaggggcgagcgtggaagagggggatccagaagcggaggccaagagcattggcgaccacgatttcgctaattttttgcgttccaaggttctgtcctcgggcgggggctaa

SEQ ID NO: 534997 - DNA, 228 bp, Stenotrophomonas maltophilia
atgaccgaacccgtcctggctctcgcctttctagcagcaatcacggccgtttcaatcggctgcgctcgcatcgcttcgtggctgcttgaccggcgtgattacaccgcctctcagcagtcccgcgaagcccaggtcatcgcactcgcaaaggctgagattgccgccaccaagcgcggcgatctgctggccgcagccacgttcgccgaagagcaggagcgcgccgcatga

SEQ ID NO: 534998 - DNA, 684 bp, Stenotrophomonas maltophilia
atggaagagcgggaaaagttcgtgacgcgtcgtgatgccacgctggtagcgatagttagcgcaatgcttggtggagtgcttagctggatactctttaccgcgccaggtcgcacatggatcacagaagacaaggggagcgcggccgattggcttgcggcgatatttgcagctatagccgcttttgcgacgctggctattggtaggggtgcaaatagatacgcacacgaggcacatcggcagcgacttcgtgaggatcggagggatcaggcgcaagcgaagaagtcgcgcaagctgacgttcgacgggatcattctccgcttgcatcgcgccaaactgctgcatcgcttgtacgaagaagttccaagcggtgggactgtgcaggatcttcctttcgaccagcttgaaagaatcctgttgatactgcgcggggcactgcgttcggttcgatggccgatcgaggagcttcgccttctttctggcccatcgcaggtcttgatcgggcagatcgagaactacgtcaatgccttggacagcctgattgaaattgcgcgggatgatgaaaaggctggaagaattgatgactgcatgaagaagcatgaagcgatgcgatatctctgcttggagatctccagggtttgcgatcaaacgcagccacgtttgctcgtcgaacgcgaggagccctag

SEQ ID NO: 534999 - DNA, 423 bp, Stenotrophomonas maltophilia
atgaagccaccaagactattggcgtatgcatgcgcggtgctcctggccggttgttcgactgttccagtcgccgatgggcagggtaaggctgttccagccgaccgcatctatgcttcagagtatctgcaggcttcgccagatcgcactgcgtcgatctacattgcgcgtgacaagggctactttggttccggctgctctcacgacattctgctcaacaaccataaggtgctcgctcttcgccagggcgaggcagcaacgcttcatgtcataccgggggcatacttcctgaagttggagaccggtggcggcctttgcccaaacgtttccacctcccagaacctctcccttgagaacggagaaagccagtcgtacagggttctgctcccatctgatggaagtctacggctgacccgcgagaagtga

SEQ ID NO: 535000 - DNA, 237 bp, Stenotrophomonas maltophilia
atggctttggggtcggatcccttgctgcaggcaagggctctgaccccgtccccgtacagcgtggatctcctggtagagccggccgctggccggcttcccgtaattgccggccagcggccggcactacccccctatgccggccatgccaggtgggatgaggccgatggctttggggtcggatccctggccgcaggcaagggctctgaccccatccccgtacagcgtggatcctggtag

SEQ ID NO: 535001 - DNA, 942 bp, Stenotrophomonas maltophilia
atgacctcccccattccctgcggtcgtttcgcgccctcgccgaccggcctgctccatcccggatccctgctcgccgccttcggcagctggctgctcgcgcgacataacggcggcttgtggcggctgcgcatcgaagacgtcgatccaccacgcaccgtgcccggcgccgccgagtcacagctgcgggcgctggccgcgttcggcctggtccacgatggcccgatcctctggcagagcacccgcggcgaggcctaccaggccgcgctggacgtgctgctggccagcgaccaggcctttgtctgccactgcagccgcagcgacctggccgccaacggcggcatccaccatcgttgcgtcgcccggcaacctcgaccggaccctgccgtccgcttccgcgtgccaccgggcagcatcgtgcacttcgacgatggcctgcgcggcccgcagcagcaggacgtgcacgccgaagtcggcgacttcgtgctgcgccgcgccgatggctgctgggcctaccagttggccgtggtggtcgatgacgccgcacaaggagtgaccgaagtggtgcgcggcgccgacctgctcgactccaccgcgcggcagatcctgctgcagcaggcattggggctggcggtgccgcgctactggcacctgccgctgctgctggatgcgccgggccacaaactgtccaagtcgctggcggcgctgccggtggacagttcgcacccgctgcccgtgctgcgccagctctggaagctgctcggccaggcacccggggcgctggaacctgcgcacgacctggatacgctgctggccaccgctcggcaggccttcgacccggcacgactggcgcggaccgacatcctgttgccagccggcgcactttccgcgccgatgttgcagaatcccccttcccccacccgacacccggacaacactccatga

SEQ ID NO: 535002 - DNA, 1113 bp, Stenotrophomonas maltophilia; identical to SEQ ID NO: 498207

SEQ ID NO: 535003 - DNA, 1011 bp, Stenotrophomonas maltophilia
atggcgaagctggaagtgcaagcaatgaagcgctggaccgcagtcgtgggaatggccggtctcgggctggtgttctctggcgcggcgtgggcgcgctgtgacaagttcagtgacgcgttgagcgaagttgtgtcgaccaccttggttaccaacggcaccagcaacggccgtcccgtctccccgtggctgccggagcatacagatgaccgttacatagccggttgcacatcgggggggaccgtcttcttcttcggccatcgcgatcagattggcagttactccgaaaatggactcgcctacagcgtttatgcgtcgggcattgagggactgggcatgatcttcgccgttcgctcacgggacgacgggggcccgttcgtgccgatccatgcggacagttcgagtacgatcaactttcgccagcagtggatgttcccgcaggtgcgtgcgcgcttcatccggatggcggacatcgctgccggaacccatgcaacgcgggcgttcgagttcggcagcgggttgtacagcgacgggacgtccatcaaggcgacggtcaattacgcggtttccagcaccacggttacggttgtccaccggccactgtgcaggcccctgccggttgtggttcgaatgggcagcgttcccgcgacagatttccgcggccagtacagtggcagccgtagccggggctttcagatccaactggattgcgagagcggcgtaggggaggtgcgttactacctggaggccaccgacacgagcccgattgtggatgtggatcgaggtatcgtcgctgtcactgggggcgcggcaggggttgggctacagatgctccagagtgacagcggaacgccgattgcgcttgagaaagtccatccgtttggcacaagcacggatgccgggcggatcagcaagcagttccatgcacggtacgtgcagacggccgaggaaagcaaagacattcagcccggggcggccaatgcatccatacggattgtgatggactacccctga

SEQ ID NO: 535004 - DNA, 765 bp, Stenotrophomonas maltophilia
atgagtggaatgaattggttggcctgctctgcgccggcccggcggatcgtctgctggggtcttctatcgctcagcgcattggccccggcgcacgcccaggtggccgttgacggtacgcgggtgattttccctgctggcgcaggcgaggtgaccgttggcatccagaaccgcagcgagcagcctgccctggtgcaggcgtggataggcggcgaagacgcgaaactgcccccggaagcttcgacggcccccttcgtcgtagggccgccgctgctgcggctggatgccggcaaggaccagaagctgagggtgcgcctgatccgcgaccgggccccggatgatgatcgggagcacatgtattggctcaacgtgctggctgcgccaccgcagtctgcgccagccgatgatgagaacctgttgcaggtggccattcgtagccggttcaaggtgctgtaccgaccgtcggcactggctgcgagtcttcctgcaaactttgcggaccgcatgacatttgccatgcgcagaagcgattcgggcctgcagctcgtgatcagcaacccaaccccctatcatttcaatctggggaaattggccctggaatctgacggcaagctgctgccgctcgacaacccctatgtggcgccattctccgagaagcccgtgcctttaccggctgaggccggccaaggccccagcagcgtgaaattcgcctggcttgatgataacgggcagctgcaggacgggagtcgggcattggaatccccatga

SEQ ID NO: 535005 - DNA, 495 bp, Stenotrophomonas maltophilia
gtgtgggacggaagttccgttggctacacggtcccgatgaccatcaactctgccagaatcaccgttgagcatcgcccggtctgctatccggagccggtgacggtgcgtatgggcagcgtggccaagacgctcttcgacgggaaatacagtggcggacccgagcgcgggttccacgttgcgatcaactgcgaggccttcatgggggatgtggactactatctagagggaacggagagcagtccggcgaacgattcggaacgcgggatcattgaagtgagtggcggggcggtgggcgtaggcctgcagatgctgcgcgatacggcgggttatccgccgattcccttggagcaggcccagaatttcggcaccaacagaggcggcggaaggatcagccgatacttcaaggcacggtacgtgcagaccgtggacaaggcggaggatattgtgccgggaatcgccaatgccgccatgcgaattgttatggattatccttga

SEQ ID NO: 535006 - DNA, 2580 bp, Stenotrophomonas maltophilia
atgaatcaacttcattcgaccgctgctccgaagccctgccgcctggcgagcgcggtgctgggcgtgctgttgccgatggcagggttcgccgcacccaacgtggaattcaataccgacttcctgctgggcggaagtgcgatggatctcagccgctaccagcgggggggcgttctgccgggcacctacatcgccgatgtccggatcaacgacatcatcgtgggtcgccgcgaaatcacggtttccgaggacgaccagggccttggccagatctgttgggacccggaactgctcggcatgatcggcctcgatgctgagcgcctggccgctgccattgccgaccatgccaaccgtgacgactatctggcattgccggaagggcgcacctgcgccgctctggatacctatgttccttccgcgtctgcatcgctggatgccggcgagcagatcctggacgtttccgtgcctcaggcctatctctcgcgggcgcctaagggctgggtggatccggcatcctgggatcatggcatcaatgccgccacgctcagctacagcgcaaatcacagccgtcagcagagccgtggcaacagccgcaacagcaccagcgtgatgctggacgcaggcgtcaacctgggtgcatggcgcctgcgccatagcggctatctgaaccacggtgagcagggaactggctatgcggccagccgcagcttcatacagcgcgacctgcaatccatcggcgcgcagctcacgctgggcgacgcagcgaccaacggcgacatgttcgacggcgtttcctatcgcggcgtgaacatcagcaccgacccgcgcatgctgcctgactcgcagcgcctgtatgcaccgatcgtgcgcggcgttgcgcagaccaatgcccgtgtggtgatccgtcagcgcggctatgtcgtgcatgagagcacggtggcgccgggcccctacgagattgatgatctggagggaaccgggagcagcggtgatcttgaagtggaagtgactgagaccgatggccgtgtggagcgcttcacgctgccgttcacggcaatgccgcagttgctgcggcagggtcagcagcgtttcagcctcacggcgggtcaactgcgcgacccggcaaccggcaatgcagggtttgccgaggccactgtgcgccgtggcctgggtaatcaattcaccggttttgccggcgttaccgtggcggatggctatcgcgccgcggtgctcggcggcgcgctcaatacccgttttggctccctctcgggtgacgtcacgctcagtgatgcctggctgccgcaggccgccgacgctgcggccgaacgccgccgggggcagtcctatcgccttgcgtacagcaagagcctgttctcgtccaccaccaacatcaccatggcggcgtaccgctattcaacagcggacttcctgtcgctgtccgatgcggcgcggctgcgcgagcagcgcgcgcaaggcagcgatgcctttgcgccgatgcgccagcgcagccgcctcgacctgaccgtcagccagaagctgggcgacaggggcggcagcctgttcgtcaatggcagcacggcagactactgggatcatggcaagcggcagaccaatttctcggtggggtacagcaaccgaattggtcgtgcgtcctacagtctcaccgctcgccgcaccctggaaagctcgctgttcacctcgggccctgcgcggcagagcaacagcatccatcttggcgtcagcatgccgcttggcgttgcgccatcggcgccgcgtgccacggcgaatctcagccacgaaagcaatggccgttcgtcgcgccgcctcggcgtggccggctcgctgggcgctgaagcccagggcaactacaacgcgtcggtgagcgatcagggcaagggcaccagcttcaacgccggcctgaactaccagcttccggtcgctaccgttggcgcaagctacgggcagtcccagggcaaccggcagttgtccttgtccgccagtggcggcctggtgctgcatgccgacggcatgacgctggcgcaatcgctgggcgagaccatcgggattgtccacgtgccgggcgccgagggcgcgggcgtgggcaacatggaccgcatccgcaccgaccgccgcggctatgcggtggccccgcacctgaatgcctatcgccgcaacgaagtgaacatcgacccggcaggcctgccgctggacgtcgagctcagtgcgggttcggtctcggccgttcctaccgctggtgcggtggtgaagatggtgctgcccaccgccgttggccgcaatgcgctgatcgaggcgttcacgccggatggcacgccgctgccgtttggtgccgatgtctacaacgaggccggcgacgtggtgggcgtggtggggcagggaagtcgcctgtgggtgcgtggcctggaggagcgcggtgtcctggcggtccgccagggcgatgacctgcgttgcgagattccctatgacttgagtgcagggtcgggtgatgaactgcgcgtcagtgcctgtggtccgcagagtctgtcggcgcaggctgacacccagctacccgcattgcgtaattga

SEQ ID NO: 535007 - DNA, 753 bp, Stenotrophomonas maltophilia
atgaatgccatgtatcgcaccgccttccgcgtcggctttgcgttcagtgccctttcgatggcactcgccgcgaatgccggggtccagattgacggaacccgggtcatcttcaatgaaggaatgccggaagccactatccgcgtcagcaacaagaacaatgtgccagtccttctgcagtcctgggtggacacgctggccgtgtctgcaacgccgacctcaacaacggcccccttcctggtgctgccgccgatctcgcgggtagaggcgggaaagggccaggtgctgagaatgaggatgaccagccaaagcctgccgaaggatcaggaaagcgccttctggctcaacatgctggaagttccggctgtcgtatccgaaagagagccccatgatggccacctgcaggtcaccgtccggaatcggataaagatcttctatcgacccaagggcctggattcgaagggcgccggcagggccgcaggcaacgtgcaatggacgctgtcggcgggtgcggacggagcgacactgcaggccaagaatgacagcccctatcacgtcagcatggtcaaggcctggctggtggaagggcagaaagaaaccgaagcacagggcatgcagatgctcgcgccccatagcacgacctccttcaccgtgccgggtatcgggcgcctgccgcccaacgccacgctgaaggtccgctacatcaatgattttggcggtgtggtcaatacaaccctgccgcttgcgatgccctga

SEQ ID NO: 535008 - DNA, 546 bp, Stenotrophomonas maltophilia
atgaacaagcttgcaattgctctgtccgccgcgctgtcgctgggcgctgctgcttcggcctcggcccaggacgccaccatcaactttgtcggcaacatcactgccacctcttgcgacatcgccattggcggcgaagctgcctcaaacaccgtcaccctgcccacgctgtccaagggcgcgctggccaccaaggatgccggtatccgcaagttcacggtgacgctgggcgacggcacggttgacggttgctcgggcaacaccgcagaactggttctcgacaaggaccatgtggacaacggcactggccgcctggtcaatcaacacgccggcactgtggatgagccgaaggcagagggcgtcgacattctgatccgtgatggcgatggcaacgacatccatctcgccaccgatcgcgtcaccgtcgccaagacgggcaacaacttcgtcttcaatttccaggcgctctaccacgtcacgggcgacatcgccgatgtcgaagcgggccgattcactgccgcactgccgttcattgtcgagcactactga

SEQ ID NO: 535009 - DNA, 651 bp, Stenotrophomonas maltophilia
atgaaatggacttatctaggcgccatcggaattgtggcccttgcctcaatcgccttggtcgcgctgacctacaggttacattttcccggttctgtatcccctgacccttccatctggggctccttcggagattactttgggggcatcctcaatccgctattcgcgttcctcgcctttctaggcgtcctttggtcgatcgaaatgcagaatcagcagctgagagacgcatcgattgagaaaaagagtgcggagattcttctggtcatccgagacatggatgcgcgaattcatacccttcttgaaaccgaggtcggcaagacattcgatagcgtaggagcaacttctctaagaattagacatatggtatcggaggcggggaagaaggaccgagcatcaggaccaagcgacagctacttctcattcctgagcacagcacgagtagagggcagcatcgttgagtcgtccaccagggatctccgtcacctggtgatctcgatgcaggaattaattgctttgcacccggtcggtccacgcaacgaactacttccaatcacgaagtactattcgaacaagaccagacccgtcgcaatcctgatcaacgacatagaagctctctcaggtgaactcaagcacttctactcactgaagtaa

SEQ ID NO: 535010 - DNA, 486 bp, Stenotrophomonas maltophilia
atggggctggaggaggcgtaccaagtggcgcgcgagctcatccaagagctcaaggtttccggggagaacccaaagctcaaggcggtgcgggcgagccaacaggaggaggacaggcggctggagcagctcaccgtggctgaccgctccgccgtctacattgcggacatgacggatcgggtgcccgccaccgtcagcctcaagggcaaggagctgccggtaggcgtggagatcggggagaccgagaagcaggccgtggcgccccaccaaggtggcacccgggtgacattcccagtcctgactcggaacgcctgggcctccaccctgacaggggcgaccatcgagcagggcagtatggcctcaacgccgaaggaatcagcgattgtgggctacgacggagcgctctacttggaacaccccgagcctgggatggtcgtcgaggtgtcggacgtgtgcaaagccgtattgccttcgcccctgccggcgtag

SEQ ID NO: 535011 - DNA, 672 bp, Stenotrophomonas maltophilia
atggactatcgcgaaccggcagaaaaccagcgacatgatagttggcctgagcttcaagctgcggtatctgagacatcggggcttaatgtccacgaatacgcgtccaagctgctcctgcagctcaaccgggacttgacggtactgccggaccctggcctctttggatcgaaggtgtccgtcaccgatacgcgcttcttagatctggccgccagtgcactgaaagtcgccgacggcttgcgtgcacgtgccatacgggccggcaatgaatcgtcggcctttcaccaagagttgaaaactgctcttcgacaaatcggaagcctgctccgccggctggacatgggcgatccgcaagaaacgctggatcgctattactttaatgaagctgcgctggactggatgaagacactgggcattcactcctcgaacgtccggcgcgctttcacgcgctacacctcagagtctgcactcctgcccctcactgagattcaccgtcgcattctcaacaatgacaggcttctcagagaaatgctttccccgtcggaccaaatgacgacggctgactgggttcgccaagccgaccattggcaatcattgcatcgcgcctgggtgccggtgcttgaagagttctgcactcaatcggcgaccatcagcggagagctggagccggtgtag

SEQ ID NO: 535012 - DNA, 579 bp, Stenotrophomonas maltophilia
atggtattcgactggacccagctcccgctcgccaacaccccttggcgcatcaaagtggtggctcacatccttctgatcttgatccgccgggccaaagaggggcggccgatctactacagcgagctggccgagaagttggaaagcgagttcgggcacgagcccaaagctcggaaggccgtttatggttcccccgtgggtgcagtggggcaggcgattgagcagttgggccggcgaccggagtggcgaggcgaacggattcctccgatcaacactatcgtggtcagtaaaagcactggctacccgagcgcgggagcggacgaggttgcccactacttcttcggggacaacggcgccgggatggctaaaagccgcaaggcctacctcgatgctgccatgaacgcgatctaccactttgacaagtgggatcagatcgccgcagccccggggcgtggtccgattggaggctgcttccggagcgctggagaccgatcaaggcgatgtgctgcccttgctcagggttcaacagtgtggtgcaccggagagtccgggacatcaggcattgaagatgtgggtgcgtga

SEQ ID NO: 535013 - DNA, 939 bp, Stenotrophomonas maltophilia
atggacaatggcaacgacaagcaacgggtagctgaatggcgagcgaagcgacgccagcagcgttttgaacaagagcgggaacgagacagcgcgcgtcagtttggcgggcactactttcttgaggatgacaaggaggaaggcatcgatcctgccgacgccgctgcagacgcagaggagctggccttggtccagcgaaagtcggtgcccgcagggagcccgcctcgcctcacgagtagcgagctaaggcttgcattgtggtcatgggattttgacgcactacgccagttgtggggccagcgggaccaaaagctgacctacttggaggatgccgctcggttgcttgcccacattcgtcaccgatctgggattgatcccctccttcgtaccccggcgcagatgatgaagaacgacgccatccaggccctcaagggggcgctggaggaatccggccgcttgagttcgagctctttgcccgcctcactgccgcccccggaaggcaagattgatggcaagcgcgttgagcaggttctacgggtgatccgagacgggcaagctgacttcaggaaacggctgattgagcactacgggaccgtatgcatggtcacgggcacatcacacgcggccgtgatcgatgccgcgcacatcacgccctacaacggcacgtctaccaatgcgctcagcaacgggctactgcttcggaaggacatccacgccctgttcgatgccggtttgctcctcgtatccccgagcctgatcatctccgtctccacggccctttctgatgcctgctatcgcgatctcgatgggcggccactgagacttctagccccctccaagatctctactaccgctctgcgctcccggatgctcggcaaggcagcggacgaaatcagtctttcaggtctcactatcgggaacaaagatggtcctcgcacctga

SEQ ID NO: 535014 - DNA, 1416 bp, Stenotrophomonas maltophilia
atgaagcagcttccccattgcgttttcaacgtctatgctctggccctgccgagaggacttggtttcggggataacccgccaaggagcatctgggctagcgcagatggggtgacggtttgtgccctcacgaagaacactgcttctggtcgattcggtgtgttggtcatgcgtcgccgagaggacgaagtgtgggttgttttgcgacgggaggacgatgcgttcacggaagccgaagccatggacatcatccagcaggcatgtgacgaagttgcaggcaaagtccccttgccccccggcacaaagcggcggccaccgctgcctccgcttgaagggaagaatcccagcaacgttttcaagctcctgggtcagcgacatagagaacgtggggcatgggtgctcaatcagctgtatctggcgatgcccaatccagacgacaactgggcaagcgactgccgcacggacagctttcacacgcggctatgggaggcgttgctgtttgccagcttaagagagcaggggttgttggtgatgcaggatgtgccatcgccagacttccacgtatccaatcgaaaaggcggcgaggcttggattgaagcggtaacgaccaatcctccagtccgatatgaccatgccaacgcggttgaagtgcccccccctctagagcgtatggaaagaatgctggggcctgctgcggttcggtttgccaagacgatcaagagcaagctggaaaaatgctacacacgaatgccacacgtgcagggcaagccgtttgtcctcgcagttgctgactttcatgcgcctgggtcgatggtttggagtcgaaccgcgttggtgagctacctctatggcttcgctgctcatgaggtgggggtggagagagagaaagtggccgtgtcggaaacggccgactacctgctcggcgagcagaagatcccggcaggtttgtttctcactgaagaaggtgaagagctttcggcggttatcttcagccaaggagcgactatagcgaagttgagccgggtgcctgtttcttttggtggaccgactggggactatcgttacgttcggattggggagtttgcggatttcaggcctggggccctgcgcggcaagcctttcagtatgaacgtgaacagtgatgagtatcgagcgctatgggcaccctacgactacgagccctggactgctgagatggaggtgttccacaaccccaatgccaagcatccgctcaacaccgacctcttaccagaggcaacgcactggctgccggtggatggagttttggattgcaggtgtttcttcaaggagagcattctcaagtcccatacgcttgtgcagaaagccagcgatcctgtgccgaaagtcgaggatctgaggttccaagagacattggacagcacgacaggcgagccttga

SEQ ID NO: 535015 - DNA, 177 bp, Stenotrophomonas maltophilia
ttggaggtgggcaggaactctcagatgcttgactaccgcgacgagcagggcgcgaagaccgagcgaacgatggtcaccgtgccacccaagcttcgggagcagattcaggacgttgccggggaagagcagccgattttcaccaccgcgcctatcgcgctggcgtcctgggcctgctaa

SEQ ID NO: 535016 - DNA, 705 bp, Stenotrophomonas maltophilia
atgaaaaagcagttggaacggacgcagcgcaagctacaaagggggcgtaggagggcattcattagtcgtgtggcatggcttgatgttgagcgcaggcttgatcgacttttaaaggaggcccgaagcctaggatgtgcggaagcgggcggtatctacatgtccaatttccgagacatggcggaactcaagaattcttacgcagactcagtgctgaacacagtttggatcataatcggcagtaggtccctcaatgccgactacctgaccaaggaccaaggaatggtgcttcttactgagggcggagcccagctatggttgtcacaggatgcaacgggatgcgtcacggtgttcatgtcaccctacaggtccacgcacaggaggatgaatgagaacgagttgatccttgggcgatacggctgcgcgacgtctcttacagaagacaagctccggaagcactttggaacgttcttccgttatttggccgtcaccagctcacatggtgatcttggcattcgtggctatgcgttcaggacgaagctgcgcatggcggatcggcgatttgctagtgagtggtggtcgaatgcccacaaggtctatgtccccgttctcatctgtttgatcggcttgattgcgacgctttacgcaggtgataagttgagttggctaacatccaatgaatcgaaagtcagtcgtgttgggacatga

SEQ ID NO: 535017 - DNA, 798 bp, Stenotrophomonas maltophilia
gtgactgcgccggaggatctggcgcagtccgcgatctaccggcatccgtccgacaccctggtcgggcggatgctgccgcgcctgctgcacgccccgcgctggacccggctgcgccgtgcactgtcgcggcgctggccgatgccaccaccaggccatcactacgtggtccatgccggacgcacgccttacaccatcctcagctaccgtcacggccacttcgggcccgcgctggctgggccgctgcgttccctgatgccgtcgccacggcagagcaactggcgctggtacctgcgtcgtgacgaccatccggacgggacgccggtggtgctgtttgatcgcaacgtgatggaccagctggccttcgtcgccggcgcgcgcgttttcagcgatgccatgcagccgcatctgtccacccgcttcgagcatgtggtgcgcaccgatggcgatgggcacaccctgatcgaaggcgggcagggcagtgcgcctgcgctgcacctgcagtggcaggccgctgcgggctgggaggatgcggcggcgtggtcggcggccttcggcggccaccaggccctgctgcgtttcctcacctgccaggacgaggccatcgcccgtacctgcgatggccgctgggccagcacccgcatcgtgctgccggtggagatcgcgcagctgcaaccgctgcagctggaaggcgaaccgcagtgcccgcgtctgcaggcaatgggcgtggcgctgcacgaggggctggtcttccggctgccaagggtgccgttccgggtcgtgtccgagcgcctgttgtga

SEQ ID NO: 535018 - DNA, 174 bp, Stenotrophomonas maltophilia
atggctgagccgctgtcgcaggacgaacaggatgctttgaggtttgtgttcgcgcgatatcttggcgatgtcgtgcacgaacatcacggcggcaaatggactctgccactggacgatcccaacgacatcagtttcaacatgccggttatcctggggcactcatcctgcccgtag

SEQ ID NO: 535019 - DNA, 1488 bp, Stenotrophomonas maltophilia
atggataattcaaaaatcgaagaggaagggcagctcgtactagctgccgaagagtgttctgatgagttatttcctctcattcataagttttctcattacgaagagaaaatcataaggtcgctcgtagctcacggtcctgtgcttctgcgaggagggagggggagtgggaagagcgcactcatgcgagaagcctccatccgtaccagagccgcggagtcaaaggtctttggtgtatatctcagtctgcgctatctcccgcttttgcgagaaaccggtctggaatacgagaagtttcttgttcaactaatttgtgactcagtgtcgattgaccttgatgctcaaggcgtcgatgtggatttttcgtgggaaggcgtgctgcacggcggtgatttgcagcgctcactggccgcgctttcattgaagatagatcgcagaatagttcttttcctggatgatgcagctcacttggggcgagaaaattcctcttctgaatttttcgatatatttagaacgatttcgagtcggagtgtatcttgcaaggctgccatttatccgggtgtaactaattttgggaaaagatttgacgtatttaatgacgctaccgtcattgatgtttctcgagatgagtcaaatcaggatttcgggccgttcttctcctccgtagtagcagcgcgatatccggatctcctgcagaagttttctaggatgaggtccggagacattcctgcatttttgggaagggctgttcttggaaatatgcgtgcatttgtttttgcctgcaatcgtctttctgggctgccgggcactgtcggaatgccggagttgacgcgctgtttaatcgatctttgtgcgggctactactggccacttctcgacgaagtacagccgaaacttggccgctatgagcccttagtggatacgagccgtgctctcgctgttgccatttttcaggcatgtgcagaaagtagagcaccttcggtcatcattcatagggatttttgtcagaatttttcaaaatcaattgaagttcttgagtatgcgggtttcatagcaaaacgagaggcctcgcgcgctctaaagaaaggcggtcgtggcccaagatacgccgtcaatctggcgaatcttttggaagttgttcctggtgctcgacttactcaagatttgtatcagcagtggaatacatttgatcgggatgatctcgctgaaattcagaaatcaagttcggtgttcgaagcaattgccatgcctccgctgccggaggtggccgatcttggtattctctcaagccctataaatgccctagcaaaatctgcaatttatccatacgggcttacccctaaaagaattgaaattctcaccgatgctggttacaaaacggtggggcaggttgccgaagcttctgatgccgatcttatgtcgctaccactgatcaaagacgctacattgaataggattagatcagtgctgatgcaggcaatatggatgtag

SEQ ID NO: 535020 - DNA, 702 bp, Stenotrophomonas maltophilia
gtgacggtgctgaaggggatgggaagaatggttaattcctacttttccttcggcattgagttcaagaaggatttttctagctcaatgtcatcctatttccttcctgtcgcccttcgaagcctaatggaggcgtcttctgttgctttgcttacgagattggatccgctgcgcgtggtgcattcaagtaaatctcagagcaatgaaaagtatgacaaatctaggccgcaggcctcagctattaaatggaagggtgacgtaatagaagaaggtaatgcatcactatgggattcggctgtctcatcacaaaaattacctcgatctcttctgtctgcaactgcttgcgaggctgtatgggtccccgcgcatcgaaatgctgttcagtggatagagaaaagcggccttaacgactccgtgtggctacatgcagttgagaagcagaattcagaggattttaggaaaatattcgttggagaaggctctcagttatatagtgagctttctaaagggattcaccctgaatttgctgttaggagagagtctgagtttgatgcggagacattgtcatctcttctcgaacgaacttcgaaatgggtaagtcagatttccttcttatctcattttgcgccgggcctaagcttctccatggatagagaggccgtctataattctgttctagaagttgagagaacggtaaatggataa

SEQ ID NO: 535021 - DNA, 351 bp, Stenotrophomonas maltophilia
atgaacccgccgctcattaccgccgaacagcgcgtgcagctactcgccgtaggcgaggtacgcactgccggccggcgcatcgacccgttgccggcggtgcgcctgttcactcccgacgcgcacgccatctggctgctggccgcgcttgacccggacgacggcgatacggcctggggactgatcgacctgggtatcggcctgccgacgttggggacggtaaagctgtccgatctggcatccatcgtcgggccgcgccagcagccggtgatgcgtgatctctactttctggcagagcgcccgctgtcggagtacgcccgacgggcgcaggagaacggctcgatcacggattga

SEQ ID NO: 535022 - DNA, 339 bp, Stenotrophomonas maltophilia
atgggctgtcatcttggtttttgcgggggaaccaagttggcgacggcgaaacactcattggcagcggcgatacggacagttaggaaggcgcgtggcttgagccaggaagcgttctccgacgtgtccagtcgcacctacatgagcacgctggaacgcgacctgaaaagcccgaccatccacaagctggccgaactgtgcgaagtcatggaagtgcatcccctcacgctgctgacgctggcatatgtaggacgcgacccgctcaacgccgatcagctccttgctcaagtccagcgggaactgaaggaaatcgttgcagcatcgaagatagagaactcatga

SEQ ID NO: 535023 - DNA, 669 bp, Stenotrophomonas maltophilia
atgccgccgcttcatcagaacattgaaggtcttcgctcgcatgccatgcttataagcatatttatgcccgagccagatgtttcagtcgagaaaagaaagtggcgctcctggttggtgcattgtcttgtcaagacggcccgccactacaatgatgcgcggtcgttaatacttgcgcagataagtgaaggccaacgatcttctgccgagatggcaaaaggccgacttttgcctgtgttcgacttcgcatttgctatggaagactgcatcacatcgcttgaaaaagcggtagcgtgcatccgggctttgtcagacaaaggagaaatgccatcggcatttgttctcgcgttatataacgagcggcagtccctaaacgattttcgtaggcaacaggaacacatgcactctcagatcgccgcaggccaaaccggcgatggcccgatcctcgtgacgctatcggacgatggtgacggcatgagactccgcggtcttacgatgtcgttcgtcgctctgtttaagttgatcgatgctatctaccgcgatatagcgaccttcttccctgcgcacgatattcagtcgccgccatcgccgggaggtgtacctcaaatctcaatgtccatgacaattgaggttgtccagggtgagcccaaaccgccggacgttccgtcgtag

SEQ ID NO: 535024 - DNA, 729 bp, Stenotrophomonas maltophilia
atgggatatcttatggaaggcatgccctcttgggttaatactgttattgccgttggcggtgtcctaggaacgatagttaccgctgtcgcaactttttttctatggcgcgtaaccaagactcttgcgcatgaaacgacaaggatggctgaagccgcagctcaaccacatgtcgtcgtgacactcactcccaatcggtggtcaatgcggcattttgatattcacatcgacaataccggaaatgcgacagcatatgacatttctatcgccttcgatcctccactagaaaatggggaggcacgcggagaccgggtcgaaatcccattccagaaaataagtgtcctcaaacccggtcaaggcatggtgagttatttgtctgaattcggaaaactgaagggcaagacctacgaagttgacattagctggaagcgtgatgcatccagccaacagcgtcagaaaaattcatataccttaagtatgctcgaccatgagggagtcagtcgtctcggagatgagccattggttgagatcgccaaacacatcaagaaaattgaggaaaactggagtccggttgccaaagggcaaaagcgcacaaaggtagatgtgtttagcggttttgataggctgcatgagcgtcgagaagcgaatcggatgcgtcgtcggtggcaaagagaacaagaggatcattcttcaaagaatgcgcaatctgacactccgaattctcagcaataa

SEQ ID NO: 535025 - DNA, 2037 bp, Stenotrophomonas maltophilia
atgaacgccatcccccaaagcgaagcccgcgccatccaagtccccgcgctggaaactgccgacccgaccaagaacctgattctggttccgctgtcgcggctggtgtcgcgcccgactggtcgcaacgtgcgcaagaccccacgcatgtccatccccgagctggccgcgagcatccagcgtgtcggcctgctgcaaaacctcatcgtcataaccaccgccgatggcgagcattacgaagtggtggccggtggccgtcgtcttgccgcgttgaagctgctggcgaagaagcaccgcatcagcaaagaatgggaagtgccttgcctgctggtggccgatggcaccgcccgcacggccagcctcaccgagaacgtgcagcgcgaagccatgcacccggcagaccagtttgaagcctttgccgcgctggtggccgaaggccggcccatcgaggacattgccgccgacttcggcgtgtccccgctggtggtgcagcgccgtctcaaactcgccaacgtctcgccgcgcctgctggccgactaccggggcggagccgtcacgctggaacagttgatggccctgaccatcaccgacgaccacgccgcgcaggaaagcgcgttctacggcgcgcccgaatggcagcgtggcgcgtccccgctgcgcgaacgcctgaccgagcgcgaaatcgacgcttcgcatccgctggtgcgctttgccggtctggacgcctacacggcggcgggcggcggcatccgccgcgacctgttcgccgaaggcgatgccggaacctacctgaccgacgccgcgctgctggaaacgctggtgcgcagcaagctggatgcgctggccggggacgtgcgcgccgagggttgggcgtgggtcgaagccgtgccgcatatgagctacgccgagcggcaggcgttccagaacgcgccgcgccagcgccgcgaaccgaacgcccgcgaagcccgccgcatcgcctcgctgcaaacccgcctcgacaagatcgacgccgaactggaagaagcctacgacgccgaggacgaggacaagaccgaagcgctggaaccgcgccgcgaacaggttgccggggaactgcaagccgtggaggaagccttgcagggctacgccccggatgtgcgcgccgtggccggtgccatcgtcaccctcgaccgcagcggcgaagccgtgattcattgcgggctgctgcgcgaggcagaagccaaggcgctgcgcacgctggaacgcttgcagcagggtttcggcagcgcggaaggcgaagcagggaacgacgacgaaggcgaggacaccgagcagcccaaggccgcgagcctgtccgaccggctggcgcagcggttgagcgcgcaccgcaccgtcgcgctgcaaatcgaagtcgcccgccatccgcaagtcgcgctggccgcgctggtgcatggcatggtgcggagcgtcttgcaggacaaccactacggccacgacttgccgctgggcgtgagcctgaaagtgcaagaccggctggaaggcatggccccggactggccggaatcgcccgccgccgtggcgctgcgtgaactgcaacaggtggcgggtgaagccttgccggaggacagcgccgaactgttcgccgcgctgctggcgaagccgcaggatgaactggtgcgcctgttggccgtgtgcgtggcgtccacggtggacgtggtgacgccccgcgctatggcacagcagccgggcgcggaactggcgcaggccgtgaggctggacatggcggcatggtggaagccgaccgcagacggctacttccagcatgtaccgaaggccgcgattctggaagccgttgagcagtacgcccccgcgcacatcacccggctggcgaagttgaagaaaggcgacattgccagcgaagccgaacggctggcgaacggtacgagctggatgcctgctatcttcaaggctgaaacgtcggaaaccatgcgggagcaagacaacgccccggcggatgccgaagcaatggcggatgaactcacgcaggcgctggccgcttga

SEQ ID NO: 535026 - DNA, 831 bp, Stenotrophomonas maltophilia
atgcaactcgcatcccgttttgcttcccgttcgccgtcgctgcgcagcgactacccgctgaccgatgaccagattcaccgcgtggccccgtccatcttcgcggaggccccgcacgaaagccgttcgcagcggtacgcctatatccccaccgccgccgtgctggccgaactgcgcaaagagggttttcagccgttcatggcgtgccaaacccgcgtgcgcgacgaaggcaagcgcgaacacaccaagcacatgctgcgcttgcgccacgccagccagatcaacggcgcggaagccaatgaaatcatcctgctgaactcgcacgacggcaccagcagctaccagatgctggccggcatgttccggttcgtgtgcagcaatggccttgtgtgcggggacaccgtggcggatgtgcgcgtgccgcacaaaggcgacgtggcaggttccgtcatcgaaggcgcttacgaagtcttgcagggcttcgagcgggtgaaggaatcccgcgatgccatgcgcgcgatcacgctggatgaaggcgaagccgaagtgttcgcccgcgccgcgctggccctcaagtacgaccccaccggcaacaagcccgcgcccatcaccgaatcgcaaatcctgatgccgcgccggttcgacgaccgccgcccggacttgtggagcgtgttcaaccgcacccaagaaaacctgaccaaaggcggattgcatggccgcagcgccaatggtcgccgccagaaaacccgcccggtgcagggcattgattccgatgtgcgcctgaaccgcgccctctggatgctggccgatggcctgcgccagttgaaagcctga

SEQ ID NO: 535027 - DNA, 1077 bp, Stenotrophomonas maltophilia
atgaaaaagcagaaagaactggtgctcatcaagtccgagggcgagatcgcacaagccgaagctcagatcgtcgagctttccaagcggatcgagttctatttgacggagtattccgtcgaactcttggccaacaaaatgagcaagggcgagtttgtcgttcctgcgtatcaacgtgaatacacctgggaacacgatcgcaaatcgcgcttcatcgaatcactgatcttgggtcttcccattccattccttttcttctgggaaatgccgaatggaaagctggagatcgtggatggctcgcagcgactgcgatcgatcgaggagttcgtactcggcgaccttcggctcggtgaactgcaaagcctgacggcattgtctggcttcaagttctccgatcttcccgaatcccgtcagaggaagatcaacaatcgctcgatacgcggcatcgtgctcaacgaacatgccgatgagcaggctcgcttcgacatgttcgagcggatcaacacgggcagcaagatcgccaacatggcagaagtccgccgtggtgctcttgctggcccgttcatggatctcatcatcgaactctcggtgcttccgaagttcgttgctctcgcacctgtatccaagaaggatttggacgagcgtgagcatgaagaactcgtggctcgcttcttcgcctatagcgatggattggaggggtacaaggatcgtccctcggagttcatcttcaactatgtcaagaagatgaatgtcgaagcagccaatgatccggcgttgaccgatcgttaccgtgcgcggttccaggaggccatcgacttcatcgaacgggtgttcccgtatggattccgcaggaatccaaaaggaaaggccactcccagagctaggttcgaagccattgccgtgggatcgcgcctcgctctcgacgagcgccccggccttgtcggcggcgacattgaggacgtaacgccgtggctgaccagtgacgactttacgaaagtcactggttcggacggtgccaatgccatcgcgcgcctgcgggagcgtacaggcttcgtgcgaaatcgactgctgggtgagtga

SEQ ID NO: 535028 - DNA, 738 bp, Stenotrophomonas maltophilia
atgagcagcaacctagccatcggattccaagagcggttggccgaagtcgaggcgtatctggagttcctttcgaccatggaagcccaggcccaagaagggccgccacggatcgcaggcgcagaacatccaattaccacccaacaacaacgaatcctctattcgagcgtgtacttgcagttgtacaaccttgtcgaagcaacgatgtcccgctgcatcgaagcagtttctgaagctgccaaagagaatgcgcaatggaaacctggtgacctgagcgattcgatgaggcgcgagtgggtgcgcgtgactgctcgcacacatgtcgaattggcgccggaaaatcgactggagagtgcattgcgcctttgcgagcatctggtggcttcattgccgatcagcgccttcgacatcgaaaaaggaggcggtggcaattgggacgacttcgagatcgaagcattcagtaagcgattaggcttccaattggtcgtgagtcagcccgtctatagcgccatcaaacaacctttccgggacgacctggggccgctcgctttggtgaagcaactgaggaatcgtctcgcgcacggatccatctcgttcgcacagtgcgctgaagatgtcactgtcggacggctcgtcgaactgaaggatagaaccgtcaattacctgagagaagtcgtggattgcttcaccagatacatcgatagctttgaatatctccttccggagaggcgccctgcatga

SEQ ID NO: 535029 - DNA, 1059 bp, Stenotrophomonas maltophilia
atgagtcgcaaccaaaagaatatgccccgaatcgtgggggtcgatctcttctgcggtgtgggcggcctgactcacggcctcgttcgtggcggcatccaggtagccgcagggatcgatatcgacccgagttgcaaatttcccttcgaggcgaacaattccgcctcgtttatcgagtgcgatgtcgggaagctgaaagccgacgacatcgcgcccttctatgagggcgctgacttcacattgctcgcggggtgtgcaccatgccaaccgttctccacctacagccgtagcggaaggaatagcgagtatgaatcgcagtggccgttggtgtcctccttcggccgtttggtcaagaaggtcaagcctgatctggtgaccatggagaatgtcccacaactcgcggatcacccggtcttccaacagttcctcaagagcctttccggctacaagaagtggtggcaggtcgtggaatgctcgtcgatcggtattccgcagactcggaagcgtctagtgctgcttgcgtcgagacttggcagcgatggtctggaactttcgcaggatcaggttcggacgatgactgtgcgcgagactatcggctcacttcccccgatcaaggctggcgagcgtgatccccaagacgaattgcacaccgcttcctctctgagtcctttgaacctgtcgaggattcgcgtgtcccgccccggagggacgtggcgagattggcctgaagagttgcaggcatcgtgtcatcggaaggataccggcgccacctatccaagcgtctacggacggatggaatgggatcgacccgctccgactatcaccacgcaatgttttggatacggcaacggacggttcgggcatccagagcaggatcgcgccatttcgctccgagaggcggcaatgcttcaaacgttcccggagtcctacgcattcgccccgcctggcgctccgatcaagttcaacaagatggggcgactgatcggaaatgccgtgcccgttcggcttggggaagtcatcgctcgttcgctcgttgggcacgtgcaggctcacgtgcactga

SEQ ID NO: 535030 - DNA, 147 bp, Stenotrophomonas maltophilia
atgacatgggggccgctgcaaatccctgaccgctacgctcgccgggtcgtgcccggcggaagcgcaatgctgggcccctacacccgccgtgcgatcaccgtagccagcacggccagcccgcaggtgatcgccaggcacagcaggtag

SEQ ID NO: 535031 - DNA, 357 bp, Stenotrophomonas maltophilia
atgaaccctatcgtacaccaaccgttgccagccgcaatcagggttgtccccgaccccgtaccggacttctctgacaccgcgcgctgggcccaggtgctggtgcgggacaatctcaacgccccgcgcttccagcagggtgacgtgctgcacgtggacctgacccggaaccgcttctgcggcgggagctactacgccatccagatcggcggccagcagatggtgcgcgtggtcgaagcgcgcccaggcggcctgtgggtccatccggtcagccggccgggcagtgcttttccggtagcccgcgaactgctgacgatcctcggcgaagtgatgttcgtgactgccacccggaggccctga

SEQ ID NO: 535032 - DNA, 399 bp, Stenotrophomonas maltophilia
atgagcgctcagctaatggctatcggcgacagcggccgccccgagccggccacgccggacgacacccacgccccgcgcgcgctgccagtggggccgcgcaacgctgtgacgccggccagcatccgtttcatctattgggggcggccagggaacgaatgccgagcagtgcgggtgaaacgcatctgccggccgcacacccgctccaaccggggcccgttcgtgaaggtggtgtttgagtgcacaccgttcacccgcgccacgctgccagaaggcccgctaatggccgatgagaagcacgtagcgctgacctgcccagccgaggccgccgatcctttgtgggcaaccctgccgccacgcgaccagcagcgcctgcataaggcaatgggagcatccgaatga

SEQ ID NO: 535033 - DNA, 849 bp, Stenotrophomonas maltophilia
atgttcaaccctcagacctcgccggataccggcagtgccacttcttcgccggcatcgccggttggtcccttgcagctcgacttgctgggtggcccgacgaccgcgagctctggaccggcagcgccccgtgccagccgttctccgtcgcgggcaaaggaaaagcccaggatgacgatcggcacctgtggccccacttccttcgcctcatccgtgcccgacggcccgctgtcgtcatgggagaacaggttgcggcggcggttggcaagaactggctcgacggagtgtctgctgacctggaagcagaggactacgcctgccgggcggtcgttgtcccagcttgtgccgtcgacgcgccccaccggcgcgaccgcctctggtttgtggcccacgccgacagcgtccctggccgacaagggtgtgcggtcgacggagggcgcaatcagagaggcggcgcggagccatgggccggatctggcagcggtgacagcggcggcactgtgggccaccccgacgtcgctggcgccggcgaagaacggcaacaacgaggcgggcaactctgcggggctggtgtcgatccgagcgcatgcaatggcggcaatgtggccgactgcaaccgcgacggatgcgagccgcggcatgttgccacccaggccgcaggacaccggcgttccattgaatcaggcagtagcgctggccactggggtgaatgcggatggctcaacggccacgacggaaaggcccggcgctttgaacccagcattcgtctgctggctcatggggttcctgcccgagtgggacgcctgcgcgcctacggcaatgccatcgtcccgcaagtcgcggccgaagtga

SEQ ID NO: 535034 - DNA, 222 bp, Stenotrophomonas maltophilia
atggcaactgaagaacagctgcaaaaactgctgaacaagatcagcgccgacagtcgccgcgcacaaaagatggcgcgagagctttatggccccgaggcgtggatctatgccgagtccgaaggcggaatctacgcaatggacggtgacgacctgagccgccgacagcggtttgtgaagctgcaatccaccggttctcacggccttggggtgggcgcatggtga

SEQ ID NO: 535035 - DNA, 339 bp, Stenotrophomonas maltophilia
atgagcggtaagcacacgccggggccgtgggtcgcctatgaaatcgccccggacgatccggattggggcgcatgcgaaatctggccagctgaaaacgaccgcgaggacgaggaaggcacggtgaagccggtggcgacgatggtcatgggcgttgagaacgcccgcctgatcgctgccgcgccggagatgtttgaggccctggacaccatcggcggcctctcgcgtgcgctgcgccaaggcggtccggatccgatggatctgcaaggactgtccgatgcgctggaagaggcggtcgacctggcaaacagcttggtcgcacagatcgaaggccgcgtctga

SEQ ID NO: 535036 - DNA, 327 bp, Stenotrophomonas maltophilia
atgagcgcctacgagatcaaggtgtcgatcaccccgctttgcccctgctgcggcaaggaaagccagtcgagcggctttgtggccgagagccgcgcaccgcagggcgtgtttgatcgcgacaacccgtacgaacgcacagaccaacgtgtgttcttctcgccctgccctgaatgcttcgtcttccgaggcgatgtcatcaagctgatcgaggcggctcaggcagtacgcgcgtcgatgcagcacatgcgcgggccggaatccatcatccacgaacgcactgcagaactcgatgccgccctcgcccacgtcaaaggcggtgccgcatga

SEQ ID NO: 535037 - DNA, 666 bp, Stenotrophomonas maltophilia
atgtctagcgtttccaaggaatggcttgaacgaaccgcagcggactgcatagacgaatccgccaagtgggatttcgtaggctgggtggactcatactttggcggccttgatcctgccggcggagggaacacctggcgccatgttccgttggatcatatgaccatcacggacacttacgtcgctggaaactatgtaaagccgttggccgcgcagtacatagcgttcccgtcaaccgttcaaaacgctcacgccgattggctcgttgcagatagtctttgctatgcagaggtgaacgctactctggtccattggaggatgatgaaggccgggaagcaggccattcctttcgggttgagagcgggccttgtaggttggtcgctgtttctgtggttgatttggatttgtgttttgggcgttggcttcgcgctgaacacatggatcggcgtaggtcttctggctttgacagcatgggtgcagtactcaaagttaagggtgtcgatgcagcgaagaaggcttgtggctgaaatgctcggaacctatcaagcactgagctcgtccactttcagctgggccgtactctgggaacacatggccgaatctcgaaagctcggagccgtttggccgcctgagttgtaccggctggtcgagctgagaatgcacagatag

SEQ ID NO: 535038 - DNA, 333 bp, Stenotrophomonas maltophilia
ttgaacgcacaatgcagcagcgagcgcatcacagccttcagcttcgggctggatttcggtagtgcgctggagtatctgaaggcggggcgacagctcgcccgcgacggctggaacgggaaaggtatgtttgtctacctcgttccgcctgcgagctatgccgtgcaatccggggctgcgacgagccacttcggcgaaggcgcgatggttccgtataacgcctacttcgccatcaagaacgtcaacgacacagtcagcacctgggttcccagcgtcaacgactgcctcgccgaagactggtttgtcgttgaccacgtcagcgcgcaggaatcctga

SEQ ID NO: 535039 - DNA, 1065 bp, Stenotrophomonas maltophilia
atgccgcttaccgctgcgcagctgatttctggctccaatacccagctgcagtcgttctccaaagaagatccgatcgatcagttcaccactgatcgcccattcgccgattggctgatccgcaacaaggtggattcggtcttcggcaacggcgtctacaacgagaaggtgcgctacaccaacgactcgaactaccagaactacaccggtgacgaccaggtcacctacaaccgcaagaagaccatgcgtctggcgccgtaccagtcgtatgaggccttcgacggcttcaccctcaacgaaaccgagctggccaacaacggcatcctcttgaccgatgaccgcaatgcggtgatgaccgaggccgagaagatccagatcgtcaacatcctgacggaaaaccgtgccaccctgaaggacggtttccaggaaaactgggatatcgaggtccatctggatggctcgaccaatcccaaggctgttcctggcctggatgcactggtcagcaccacgccggcggttggcaccattggtggcattgatgcggccaccacgccctactggcgtaattgggccgatatcggcatcagcaccaccacgcccggcaccctgatcaagcgcatggaaacgctgtggcgcaagaccatcgcctacggaaagatgggcgctccggacttcatcccgatgggttcggacatgtacgacgcgctgcaggccgacgcgctggcggtcatgggccgtcagatcaccattggcacgggcggcccgggtggcggtgtgacgctggacccgaccaccaaggaactgcgctttaagaacgtgctgtgcgtgtgggatcccaccttcgacgcactggacgaccgcctgggcaccatcgcggtgccgtggaagaagcgcggctatttcctcaacagcaagaccatcaagctgcgccccgtgaagggccgctggatgatctcgcgcactccgccgcgcgtatatgaccgccatacgcactacttcggcgtcacggcccactacggcctgaccatgaagaagcgcaacagcaacgcggtcttctcgatctcgtaa

SEQ ID NO: 535040 - DNA, 540 bp, Stenotrophomonas maltophilia
atggccaagaccgtatccctgctgttgctgacgctggtcatcgaccgcgatgcaaccaccaaactgcccgtgcaggttttcgactacgagctgccgattctcgaagagctgttcgctgaaggagcggtgatcaccgaggtcaagagcgagaagttcgatgtacagaacttcgatgaggctgaggtgtttgccggtttgaagaacaagtatggcagcacggaagaaggggctgaggccctgaaagccgcttaccgcaacgaacgcgccttctccaaggcagtggcggcgagcatcgcggcggccaagaccagcagctccgctgaaagcttcgaagctgtggacgaggaagaggaagaccaggccgatgatctggaagctctcgccggcaagaccgtcgccgagatcgaggcggcgctggacaacctgaccgatgaagagctgcaggaactggccgagatcgagaaggccagcaagaaccgcaagggcgtgatcgacgccatcagcgcggcgctgggcgaccagggcagcgaaaccgtttaa

SEQ ID NO: 535041 - DNA, 1170 bp, Stenotrophomonas maltophilia
atggctacaaacggatgggcctctcttggccaagcatttgcaggcggtggtgcggggcaggagcgggcatatcaggctggccagacgcgtgctgcgcagctggccacgctgctggccggtgcacagatcaagcgcgacgaggcgatggcgcgtgatcagctgcaggcaagcattggcggcgtggtcgccgaccctgcacaggccagtctcctggccacggcgctgcgcggcggtttcgacccgaccaagatcaccgggtacaccggcgatgtgcaggaacaggggttccgcggcgatgccgtaacccgggctcttgccggcgactgggccggagccaatgccaatctggtgggtgtggccaatggcccggtggagctggccactatccaaggccagaacctgatcaacaaccggctgctgcccggcggcggcgggatcagcacgaccgaccagggccgggcaagcatcgcggcggatgccgcccgtgcgcgcgcatcggatgcaagcgccgccagttcctacgccaccgcagcgaaaacgcagcaggcgatggcactggatggacagcagcacgcgctttcggtggccggcaggtggaaccccggcggcaagaacggcggtggtgcttctccgttgccggtgtctgcgctgaaggagctgctgggcgtggaggatgccttgggcggcacgcaggtgttggccgacatcatcagcaagaacgctcagcgcctcgcagatggatcgctgcgggtcagtccgaccagctctctgctggcacgcggccgcacgttcgccggcatcgctacccctggcgacgtgaattacaacgaatggcaggccgaccttaccaagatcgtcaacgaatcccttcgcctcaacaagggcgtgcagaccgaaggggatgcacaacgcgctgccaacgagttgatgagcgccaatgacccggccaccgcagcggcggcgctgaagcgcctggcagctttcaaccagcaggcggtcgagctgcagcagcgcaaggctgcgctgatcaacggcaactacggccgcgtcaccagcccgggcgcaatgcccagtgcggtggaggccttcggcggtggtgctgcaccagcaccggtgccggctgttcctgcgcgccgtcgcttcaacccggccacggggaggatcgagtaa

SEQ ID NO: 535042 - DNA, 198 bp, Stenotrophomonas maltophilia
atgaagaaggaagaagagcagcgccgcgacgcaatcgcagacgcgatctatgtgcgattggtcgctgcagcccttgcggtacctggcaatacggttgataccggcgcagcgtggaaatcagcgaagctggcatccgaaacgccggtacggcttaagccgaccgaccttatcgcagcgccggtaacggcaaagaaatga

SEQ ID NO: 535043 - DNA, 2493 bp, Stenotrophomonas maltophilia
atgactacgaaattccccgatgaacttgatcagttcgagaatcctcgacccgacagcagtcaggccactgcgcgtactcactcgcagcagcatggtgatgccaacgacgccatcgaggcgttgcaacggaaagtgggtatcaatcagtctaccgatccgaacagccttgactaccaagtcgaggagttgaaggactttgtcgagaacatcaacgagatgatctctcggctgtctggcagcatgcctggcccctctggaagcgcagcgatcgacacaatcattctccgttcggcgttggccatcggtggcgaaattcgatacacagttccaggggtatatcagtggcttggtgcttctacgattcgctctgggacccacatcagcatggcatccggtgtgatttggcgacagagtccggcgagccgatcgcccttcctcgtaaactctggctactccgcgatgaaagccacggtacaggcaatggaggtcgtcacggactatgttgatcctgacaagagccattctggaatcaactcgtacgtgcgcgtttcttgcgtgtcgcacggattcgccaagggtgagtttgtagcattgggtggcgctgtcgagtatgggtacgacggatgcatgcgtgtatgtgaggttatcaatccaaatgagttcattgttgaaacagctgtcccggttcgagcgtccggtgcaagctccgacccgtggagtgggcggttgtatgcatcacgcgccgacacaaatgtaagcatcgatatccagggagatgtggactacaactataggaacctggtggcgcccattcctgcggatcctatctggttgtacaccatgggaatcgtgctatatggcgtcgtcaacggtagtgtcagcgtttctcgattcaggaacgtagccaagtattgcgttctggctgcaaatgttcgcaactttgatatccataggattaattttgacacccacagcgatggtgttcattttcagccgccgttcgctggtgtgaggattggcacgctctctggtacgactggggatgatcttctctcactcaccggcggtgacttcaccagctacgaaatttcccgtggccatggctacgacatcaaggttgatcacctgatgccacagaatgctctcacggcgttgaaagttacaggtaactcgcctcacaagttctgggatattggggttggaaccatttccggctcaactattctgcagggtgtatcgattattcgtgatcagaatctgacgcacaccgatataggtaagctccgtattgactccatgcgtgtaaagcctcagacgaccgaagagttcagaatgactatggactcagtggacgacctttcgatcggagatctgtcactgatggcagctcctgttggccgatcagtgatgccaattgggagggcgacaagctacccaatgacaattggatccctcactattgaacggctgtcctatgctgaggcggcggtaggtcgaactattgttgatgcgggcttcaactgcaccatagggtccgtttcgataggcctgaatggtgtggtctatacaggagcaacgcctctgactcttgtgaatattgaggaggcccaatccggtggggcaccttccgcgaagattgacacaatcctcttgagtgggaaggtccagtcgagttcagctgctgggcgcttggttcgacaagctggtcagcttggaacgctcatgttgtccagcctcgactatcgccggggtgagaatgtcctgcatcaggtggaaggttgctcgggcctctccgacaccaacgagacgcgtgtgctcatggatgctgtccacctttgggaaacacagtacttgattcgagcagtcggtaaggttcgttgttgctttggtggcaattacctgcagactccgcaaccgcctatccaggcggtggtcgctgggtctgaagttaccgtcgaaggatgcccaaagggaacgttctcgcgtgctaccacgcgcggcgcgggtactacggtttacatcaacgatccgaagatccgcgccgacatcgtcaaccatgtgacacccaggcgcggtgattcggcctacaacgtcaacacgtcgtttgagtacggcgagtgcagggttcgctacaacggcacgcgatgggttcgcgatgaactaaacgacggcgtgcagactccctcggactcgacggcatcgtcctacaaccctgactggacgcagggcaggacgttccgcattcccagcctcacccaggcggtcacgttctacggcccgaacgctgcatcgaaactgatcccaggcgatcgcgtcgttttcatcatcaagcaggatggagtaggcggtcgatcagtacagttcgcgagcgcctactacaagtttgtgacgccattctctctgactggcaacgtggcaggcgccacaacgactgtcgagttcgtatacgacggccagtacctggtctccaccgccggcaacacttggatctag

SEQ ID NO: 535044 - DNA, 1098 bp, Stenotrophomonas maltophilia
atgtcgtatctgcccaagctcaccttgaagtcggatgctctgatcaacttggacgccctgcgcttcctcgctgctgcgggcgtaatggtcttccacgctgcccactacttcgaactgggcagctggtgggacagctcggttcttgacccgctgaggcttctggtcgacctatttttcgcgatttcaggcttcgtgatcggcttcagctatctcgacagggtcgcgaccaaagatcaacgatcgcgtttctggaaaggccggttcgcctacatctatccgcttcacttcgtcacattcttggcggcgcttgccgtggggatcgcaggcgcaggacagacggaccatccggagaactacgatcctcgctgcatacccgcgaatgtcgtccttggccaggcttggggactctgcagccacctgagcttcaacggtccatcctggtccctaagtgccgaagctgtgatgtacctgctgttcccggtattcgtgctgatcgcgaaaagatcgcgcttggcaatcccggtcctgtgcgtgctcagcttcctggcgctgacctatgccagcagctacacgtcgcggccgtggcatgaatggatggctccgaaaggtgctcttcgagcatttccctcgttcctgtttggcctgagcctctggctctaccgagacagtgtgcgccggatccccgcagcgcatgccgccctttacgtagccctggctgtggttgcgacgctgattgccatgcgagcggcagatgtcgcaattctgctgtcgatctacgcggtgatggctttcgcctgttctgcagacctgaagaagcagcgcaccaagctggcgcgacgcgtagcaccgctaggcggcctgaccatggagatctacctgctgcaccacctggcgttcattgcgatgctcacagttggcgctaagcgcgtcctgcatctggaaggggtcgccatgaacgcggccatccttggcacgttcgccacggtgatcgcggcggcatacgtggcgaaattcgcctttgtagatccagtgcgccgcaagatccttacagggcgcttccatcagaccggccgcgaaccggctacgcaatccgcgtag

SEQ ID NO: 535045 - DNA, 852 bp, Stenotrophomonas maltophilia
atgggtcaggcccagcgcgcgcaggtgttcccagtcggcatcggacaggccgcgggtgtcgcccagggccaaggcctgcacgaatcgcgcggcaggatgtgccacctgcgtggcgatggcatcactgctgcgctcgcgccaggccggcaggccctgcgcaggcgcgcgctcacgcgcagcgccggggtcgcgcaccgtgccattgccggaaataccgcgcagcaatgcatggcgttcgccgtcatagcctccaggattgatccgcgaacgcggtgcccgcacccgcagcgccagctcccagtacgcgccagcttgaaccgcatggcgcccaccatcggtgccgctcgcaggcggtccacgccatggatcgttccaggtgatctgcaggcgcttgccacgcaacgagggcagcgcatcggcctcgtcgaccttcaacacgaaacgggtatagccggggccactgtgtggaagatcaaccactcggccaaggacctgcgcgtcctgcgcgggccctccgggtggaagctggccctgcaggacccagtgtccgtgcaatgccgcccacgacaggccgaacagcgcagccgtccaggcgcggccgcgccaaggcacgatccagcctgtggcgctggcaatggccaacggcatgcacagccacagcggcggcagcaccggcagctgcacgcaggccagcgcacccagcaccagaccggcggcacaaccactgccaaacagcggtggagcggatcgttcggcgaccatcaccccagcctgccgccggggcagcagcgtgcctatcgggctttagcccgtattggcgtcagcggcggacgctaccgcgatggaagttga

SEQ ID NO: 535046 - DNA, 915 bp, Stenotrophomonas maltophilia
atgggcaggggtctgggcaaagtaaaggaggaggtgccggccaacggccggcgccgggggacatttgcccaggcccctgcccaccccgggaaggcccttcagttcgcggcgaatccggacgaagacgcgcttgtggcggtttgttcagcgtggcgcagggcggaggcccttgcgtacgaatgtcctccggcgccggccgttggccgtcacctccccctttacttcgtacgcaagggcatccgccccgcgttcggagttcgtcggcgcctcattgagacgctgtcgcgagcgctgcgctctgctcaccgcacgccgagcctcgtcgggatgggcaggggtctgggcaaagtaaaggaggaggtgccggccaacggccggcgccgggggacatttgcccaggcccctgcccaccccgggaaggcccttcagttcgcggcgaatccggacgaagacgcgcttgtggcggtttgttcagcgtggcgcagggcggaggcccttgcgtacgaatgtcctccggcgccggccgttggccgtcacctccccctttacttcgtacgcaagggcatccgccctgcgttcgaagtttgtcggcgcctcattgagaggttgccgcgagcgctgcgccttgcgcaccgcacgccgagcctcgtcggggtgggcaggggtctgggcaaagtaaaggaggaggtgacggccaacggccggcgccgggggacatttgcccaggcccctgcccgccccggcggggcccctcagctcgcagagagtccagacgaggaagcgctttggaatcagaacgccaggcaaaaaaagacccggcagagggagggatctgccgggtccggattgcatggggggagggacccacgcaatgagcgttgcgtcgcgtcagtggttgttcgcgtccgccgttga

SEQ ID NO: 535047 - DNA, 1140 bp, Stenotrophomonas maltophilia
gtgtctagtaataagaatggcaagagtcgagtccatcctcgtacctggaaagagtcggatgttatcgcgtgcgacttgttcgcgggtgctggaggcttctcactcggagcgcatcttgccgggatcaaggtggcgtccgcggtagagtggaactctcacgcgtgctccacatacaggaaaaacctagtccactcaaagttgaccaatgcgactttgttcgaggctgacataacatcgctcgacccgcgtgccgtcttcagctcctccggattcaaacagcatgggtgcgacctgctcctcggcgggcctccttgccagggattctcagcgcaccgaatcaacgacgcaggcgtggacgatccaaggaacgaactgctcctaaagtacttcgagtatgtgcaagtacttcgccctgttttctttctcgtggaaaatgtgcctggtttgctttggccgaggcacagaaaatatcttgagagattctatgcgctggccaaggcggccggatacggcgtgatggagccgcaagtggtcaacgcgagagattatggcgtgccccagaatcgcaagcgggtgttcattcttggctatgacctccgacgcgtatcttctccgccagcttggccccctaaacctacgcatatgcaggccgcttcttctggtgggcagaagacttgggttccagcaagggaggttttcaacagggcagtgccagcgggcgatgccaacaacgttcacatgaagcatagcagtgagctcactgaggcattcaagcgaacgccactaaatggagggtcgcgcagagactctggacgtgtgctgccatgtcataaggagcatagaggtcataatgatgtatacggacggatagatccaagtgctccagcgcctacgatgacaacagcttgtatcaacccttccaagggtcgattcgttcatccgacagaacatcacggcatcacacttcgtcaggcagcacggattcagtcttttcccgattggtatatatttgagggggggctgatggcaggtggtgctcaggtcggcaacgctgttccggtagacttggccactgcactattgaggccattaaagacgtcggtaaggaaaatccgcaagttaaaagggagttcgagatga

SEQ ID NO: 535048 - DNA, 2919 bp, Stenotrophomonas maltophilia
atgagtatcagcggggttgcctcatttcaagcaagagcgcgtgcaatcgaccacttggggagggggcagattgctgatgccccaactgcgataagcgagttgtggaagaacgcctacgacgcctacgcaaggaacgtggagctgcacatctacgatggcgatccctcacttgccgcagtgctggatgacggcgtcggcatgaatgctgaagacatattggatcgttggctggtaatcgggactgagagcaagatagagaacacaccggcagtcctcgagacactcggactgccgcctcgcactcgccaaggtgagaagggtattgggaggctatcggcagcatttctcgctcccggcacgatactggtatccaagcggagtcatgaggactacgttgtagtgcttatagattggcgcttgtttgaaaatccgtatctctcgcttgaagatataaagttgccggtcgaaaccttcagtagtcctgatgagctaatcgcaggtctgcctgggatgctgccaaaactactcgacaacttgggcgggaggaaggacgacagggggcttcacttggcggaatgctggagtcgattctccgagtacgagactcagcaagggacggccctgacctcgaacgcaatcgcaaactgttggcgaacgatgccgcttcaacctcgtcatctcgaggagtggctggtttacgctggcctctcagatcacggcaccgccatgtacctgattgatctgaataatgaattagcagtatgggtgcggccggatgaggcgggagaagaggttgatgaagtaaaaaatcgccttcgcgagactctaactgcgttcaccgatccatacttggataggcgcataaagtttgattacgaggtgtttgttcatcgtgccggaagcgatcagcgaattatcgcggcaaacgacgtgtttggaatcgattcgctgcgagatctagaacatcatatagaaggtaaattcgacgaggatggggtttttaccgggcgaattgttgcattcggaaaggatctcggggagaagatgtatcggcctaagcgcgccatcagggcgaactcgaaggatagtcttggcccattttcatttgttataggtacattcgagcaggacgaaaagaagtccactcacgattcaaatcagcatgcgtttctggagcagcaggctgaaagatattcagggatatttgttttcagggatggactgcgcgttatgccctacggccgccccaacgcggactttctcggtctcgaagagaggagaagtatgcacgcgggtcgctatttcttctcgcatcgtaagagctttgggcgaatttcgttctctcgacaaggcaacccgcacctccgtgataaggctggtagagaagggctggttgataatagagcttttcgtgagatgcgaatcttgctcgttgagttcttggtggatgcggcaaggagatacttcggcacagattccattgttaggcaggagtcgcttcccgggattattcagaaaaagctttcccaaagagcagtggcggacaagttaaaggtggcgcgaagaaaatcaatgcgtcagttcttgcgcgacaatgtcgatcagttgcaggcactagtagctgaggcgcatctcttgatcgagcgagctgatgatatttcaaataaccaagacgccgaagagctcgcagtccttgcgtcgcaatccaacagtattagatcgattgcagtgcagctgagaccgccaactcctccctctaagttgggcgatttggaggagccttggcgtgactataggaatggctacctcgagttacaggagaatttggagaggttgcgccattggcagtcagagctcgaggcgaagattggtatagatgctccatcgactgtgcttgagcgtcgtattaataatcgggaacacgatctttgcgcgcagctcgcgggatacaaaattgaacttgaagcacggctccagcggctctccgatgtttggcgagagcagatcaagaaagatcaagggattttccgagttcaagctgacgatgcgatcaggaattcaagatcagaaccagacctggctcctctgttgggcgcgatcgacgcgctgcatgaagagctctccgacaaatttgcatcggactacccctctctgatttctacgatcgcccagctgattgatggcgtggacctcttaggggccgttgatatatccaatgagcttagggaggagcttgaggatcagctaaatgatattcgtgcggtcgcgcagataggggtcaccgtggaaataattggtcatgagttcgagactctagaatctgaagtccgacgtcatttgtcgcgcctgcctgcgtcggtgaagagttctcctgactatcaagcggcactgtctgcacatcaggctttgggggatcgtctccgattcctggctccaatgaagattgcaggttatcgctctcgtgagattattagcggtgagaaaattgccgcttacgtcgaggaattctttcgcagggcttttcttgagaaaaagattgactttagtgctaccgatggatttaagtcgatggagatcgtggatattccttcgagaatatatccagtctttataaatctcataaataactctgtttattgggtgtcgcagcgaaatgatcgaaggattgtcctcgactttcagtgcgggctggctatcgtttctgattctggtccgggtgtcgatccggacgacgtgtcgcggctcttcaccctcttcttcaccacgcgcaggtcggggcgaggtgttggtcttttcctaagtagggcaaatcttgcggtggccggtcacaagattagatacgcaacgccggatgatccgcgcgtccttggtggagcaaatttcgttattgatttcaaaggagtgagagcggatgtctga

SEQ ID NO: 535049 - DNA, 1818 bp, Stenotrophomonas maltophilia
atgtctgattcggcctatgaatctgcggttaagagtactttcgaaacaaagccgctcaagaccgtactgatgatagatgatgaattccccacctatacggatctggccgccggaccatcagagggcaatgcaaaagttttccggcagcgagagttggcgcagcgactgtacgcatcctttcgaaagaacaacatgctttgcgatattgaaaatgttgcagatgaagttccgttggactctattgggaagagtgatcttgtcgtacttgattaccatctcggaccgggtgaacgcgatagttcgcgctccataaagatcatgagggagttggcatcatcagcgcacttcaatacagtcgttgtctttactgctgagcccaatctagatgaggtgtggcttgaggtgatggcaagtctcggaggtgcgtggacgagtcttcctggcgagctgagtggagaggctaaggagcactgggaacgactttctgacgaggttgcgcttccggaggcgtctctagatgccgtcatggagtacgctcggcgccgcaacattcgggatctttctcagaatgtaagagcgaacgctcagcgcgaactaatcgaactcggcgttccgcccgctgcatgcggcgacgtgattgaggcatcgataaatgtggagatcgccaagcgtgctggtgactacaggggagcacccagaagccatgctgttggtggttgcagtggtggggatcgatgggttcagtgtaagaactgctttattgtgattcacaagaaaggcgctgaacttacagatgacgagaaggatcctgccgggatattggctggacttggaaagtcgctacttgcctggcggccaaatctcatccagatagtagtctcggaaatgcagaatgttcttgagctcgaagcgctaatatcaggggatgagcttctcaaggatcctgctactcacgcatcgctttggtactaccttgtcgaagctctcggtccggtggatgcagcagccaatccagacgtgcgtgtgccgctctcggctttgattgacggcatcctcgacggagtcaagcggcgactctctctggatccccaattgctttccctggcgagcgacgcgcttctgggtgagattcgcgatgctggttgggaacgtgataagtggccagttggggcggggaggattgacgctgttctggatatttcgagaactaaaagtcttgccaagcctgctcaggtattctttaggctgaatagcttctttagtaccgaaatattccgaaggactcacgtaacgttgggttccataattcagagtaggcggacggggaattacttcgtggtcgcatcacctgcttgcgatctgacgccgagggtgccctctaaggaccagctctgggtgggggggatacatccgttgaggccggttgtgtgcgtctatatggagaggcttgcgtcgccagacaaagctctcgccagtgccagtagcgggaaattcatatttgttgaaattggttcggaacaggttgcatttgccgttgccaataattctgccccgtcatacgaggttatgttcttcaaggattctggtgctgttaccgaggttggtggaaagaagataattcgatcaaggcaagtcggaatcgctcctatagctgttccagcgccagcgattgttgccgcggatgaacgcgaacttgtggacgacgactttgaaatcgtcggtcaactccggtcgtcaaatgcaaaccgaatccttcagctggtcacgcaacatctgtccagaatagggctggatcatatcagtatgccgtcgggttga

SEQ ID NO: 535050 - DNA, 462 bp, Stenotrophomonas maltophilia
atgggcatctactgggtgggatggttcgcgcaggggcggttggggcgggcactggttctagtactcggggggatactgctgctgagctttacagcggtgggtcatcgcgtgcacagcgatcagttgcagttgaacgccttcgatcgcctgcttgcacagcgcatatatgacgaaatgatccgtacgcctggctatacggaccagatgccggttgccgtggtcaatcgccgcctgaactgggcacattccatgcccttggcaacggcttggatggacctgaatctgactgcgttcgccgacaagcgcgcgttgaaagggctgcttgagctttccaatggacgcacgttgaatcacgtgcccgccgagccgggcgatatcgaagaatgtgcgaagcatccggcttggcctgatcccggttttgttttgaagcgacctgaaggcggcattctggtctgtatttga

SEQ ID NO: 535051 - DNA, 600 bp, Stenotrophomonas maltophilia
atgcgccgggtagatgccgaccttggtcggcaggcgtgcgccaaccaaggttggcgactaccggtaagccctggccacgcatggcgtggctctactgatcttgcgggtgcagtagattcaggccatgcgtggatgcgccgggtagatgccgaccttggtcggcaggcgtgcgccaaccaaggttggcgactaccggtaagccctggccacgcatggcgtggctctactgatcttgcgggtgcagtagattcaggccatgcgtggatgcgccgggtagatgccgaccttggtcggcaggcgtgcgccaaccaaggttggcgactaccggtaagccctggccacgcatggcgtggctccactgatcttgcgggtgcagtagattcaggccctgcgtggatgtgttgggtagatgccgaccttggtcggcaggtgtacgccaaccaaggttggcgactaccggtaagccccggccacgcatggcgtggcgctactgcgttgctgcctctggttcacgggctgccgcgctccatgcgcgcaggccgaacacggccaggccgaggaagaacacgtacagcgcggcggtcacgtgcagcgacttga

SEQ ID NO: 535052 - DNA, 1374 bp, Stenotrophomonas maltophilia
atgttcgacaagatcatcaatgaagtaatggacgggaagttccagctgattgcgaagggaactctgacgcaacgagcggtgtcggaccccatcgtgttcactggcaccgccgtgatcgaccaaggcgatgacagcaatctccgcttgcagttcatctgtgaagggttcaccggcccgttcgatcccaaggccgggctacccgagccagagcaagggaaggcaattggagagagcttccactttgacttgtcggccatcgacagggagggggacgagtgggctgcccagcatctacggcttgacttagatcgcccatacgctttgcctggcttatcagcggtgccgtccgggttcgacacgctgaccggacgcatccaggagctggcgttgcgcgtgccaacagagaactctaacgctgagcgccatcacatcgagtggattgttcctggaacatttcagttcccgttgcgaggctctccgaagccctggacgcatgaggcgtcagctttcgcatggtctgtgaacggcatcgatcctcgtttcacccgagttcagttccacggtgcagctacggacttccctaagcaaagtcgagacttcctccgtgggttgtctatgctttgctctcagcacctgatgcaaaagtgcatcaccgacattgattcggacgcttggacgctcaaaatccgcagcatgaagcgacatttcgatagcgaccctctgctgtggattcatccaaattacaaagagggttgggagtcgttcttggagaaatggctgctggccgagaagagtgtcaatgccagtcgttatgaaaaggatgatcgttcagtccaggatgtgatctatcaacactggtatcgagttcatcggggtcacactgtggatttcgagaacggtgcacaggtgctttcaagcactattgaaggcatggtcaagaaatattttgacggagccgaaccgagcacagagtctgataaagcaaagagcttgcggggaaccatcgagcatctgcaagctcaggacaggatcttgcacgcccctgctttatctcttttgaccagcaagctcgacatgactcgccgcaaggatgagagctttgacggaaagttcgacgcactcattgtccgaggtattgcgactgacgagatgaagacagcatggcatgcggtgcggaatgatgcggcgcatggagaccacctcatcaagaactctgacgacatggaaggtttggtcgatcacttctacccaagctttgaactcttcaaacgcttggttatggtgaccattggctaccacggcccagcgaccgatctatctgcgccagggtggcccacgttacgggttcctggcgagaggaacgaaaaagagtaa

SEQ ID NO: 535053 - DNA, 798 bp, Stenotrophomonas maltophilia
atgggaatcatccggcatttgaagtctttctttggtgggcaaaccgccactgcaccacgggtgacagagacagagcctccttacaaggcgctcgaaatcaagccggcacaggacgtgttcgattgctacgccgtagtgttcgaccaggtgatgtccaaagtagagggaattcctcctgaggatctggatgcagccaaggattacgtcatggcgggggatggaggcttcctcaacgctcaccgctactatgaccacgtgtggacccgctacttctctgagcacgaatggcgatggttggaatatgacgaatgggtccaagtgtttactgaccttggacgtttcccaatcgctttcccgaggccggtgtcgaatgagaaaccatcaacccggatgcttctggaccgattgaaagttcccgaattgaagctgctctgcaaacagcattctgtaaatttcaaatctaagaccacgaagtcacaactggttgagatgttggaatttgttcctggtattgaacagtatcctcagcttcaaaccatggatgagatggcggcgtcagacgcaaagcgttcgctctatacagtgctgatgcggacgacccagttccgggctgtgagcttgcacaacaggcggaaggcgcagagcgttggcgtcactaagttcgaggtgttgcacaccttggaacaggatagagagttcgtggagctggctctaagaagaaagcccgatggcttgtcgcctctctatcctggggatataagtagcgtgcgatcagtcatcgatttgttcgaccgctaa

SEQ ID NO: 535054 - DNA, 339 bp, Stenotrophomonas maltophilia
atgatctgggagaccgcagagggcaaggtggattggtctttctcagagccgcccaaggttcttactgagggaactcattacctgatcccgtcttacatcacatgtaagtataaggataagcagagaattgcggtgtatgagcgccgattcaagcatttcacagatgtagacgagtggttctggacaagcatgaacattttcctgatgcttgataattgggggcgggtaatcttcgaatcagaagaagctgataacaagatcaatagcctcttcaatgttgcgaaagacagtgcctccaaagtgaatgacatcatcaaagggcttcttgaagaagattga

SEQ ID NO: 535055 - DNA, 141 bp, Stenotrophomonas maltophilia
atgaaaaagtattcgccgtcagcaacgctcgaaattggcagcaaagaatgggaagaggcccgcaagtgggagcagcacgaaaggattaggcttgcgactccgcagggaaatgccgaaaagcccaaaggccgtaaaatgtaa

SEQ ID NO: 535056 - DNA, 756 bp, Stenotrophomonas maltophilia
atgggtcgcgcgggttgcggccttgcggacccggcgccgggtccgctccagcccggcgcggacgtcccgacggcgcagtgcgtgccagggctggtcctgcagctgccgggcgacgcgccgaagcgtcatggccctgcgctgcagcccgggatcccgccgcagcagctgctcgagaatgcgtgcacgcctggccgagagcacatcgatcaccgctgcccagcccggtgccggatgaagctgctgcagccgctgcgccgcttccaccacgacatgcgcatcgcgtgcatcggacaggctgacgcccaggcggcgcagcgtggcatccaggtcctgcagatcgaacgctggattgcgcaccagcgccagcagcgaacgcagtttcctgatgtgcttgcggacggaatggatcgcggcatgcggatcggcgagcagcgaaagctgctggagtgcctcctggcactcacgctgcgcgcgcttgctgatgatcggccctgcaccaacggctggcatggagatatccagcgcatgggtggggtcgagtgtacccgccggtcgcgaacagaccaacgacgagtccttgaggggggatgtgctgcatcgccgtatcaccaccgtcgcaatgggcgacggacggagccacctctgccggacaaccgatacagtgatcgacatcgtccggcgcatctgcgccagagcggctacggcacccacgaggcctgggcagcatcgcgtgccagcggaaacagctgcgaatga

SEQ ID NO: 535057 - DNA, 1326 bp, Stenotrophomonas maltophilia
atgaacactgtttcccgcgccgaccgtcgccttccggtcaccgtgctgtccggcttccttggggccggcaagaccaccctgctcaaccagatcctgcgcaaccgcgagggcctgcgcgtggcggtcatcgtcaacgacatgagcgaggtcaacatcgatgcgcagttggtgcgcgaaggtggggccgagctgcgccgcactgaagagacgctggtggagttcagcaacggctgcatctgctgcacgctgcgcgacgacctgctgcaggaagtgcagcgcctggccgaggccggccgctatgactatctgttgatcgagtcgacgggcatcggtgagccgatgccggtggcggctacgttcgcggtgcgcgacgagcacggcttcagcctgagtgatatcgcgcggctggacacgatggtgacggtggtcgacggcagcgcgttccttgccgacttcggctcgaccctgcgcttggccgagcgcggccagcaggccgggccggatgacgaccgaggagtggtcgatctgctgtgcgagcaggtggagttcgccgacgtgatcgtggtcagcaaggtcgaccaggtggacgacgaggtgctgcaggacacgctggcggtactgcgtggcttgaaccgggatgcgaagctgctgctgtccagcttcggtgatgtgccgttggccgagctgctggataccggccgcttcgacatggagcgtgcgcaacgtgcgccgggttgggtgaaggagctgcgtggcgagcacacgccggagaccgaggaatacggcattggcagcttcgtctaccgttcgcggcgtccgttccaccccgcgcgattcgcccgcgcgctgcagtccggcatgcccggcgtgatccgcagcaagggctggttctggctggccaaccgcatggattgggtaggcgagttgaacaccgtgggcgcggcgacgcggacgcaggcggcgggcttctggtatgccgcgcgcgaccgcgtgcgtgccggcctggaagacaccgcaccgttgttgccgccgacaccgctgccctacagcgaccttggctgggcacggcagcaggccgactgctggagcgcgccgctgccggggctggaagagtttccggatgcagccgcgcacacggcgatgcagcggctgtggcacccgttgtggggtgatcggcgccaggagctggtggtgattggtgtgcacatggacgagcgcgcggtgcgcgcggaactggatgcgtgcctgctcaatgaccaggagctgcgggcggggccactgctgtggcagcagatgccacaggcgttcccggtgtggaagcgctga

SEQ ID NO: 535058 - DNA, 963 bp, Stenotrophomonas maltophilia
atggcggagccgtccgctacagccgcgccgacctaccctgccgctttcattgcccgcacgcccatgtcagtcctggacaacctcgccaatctgcagaccttcgtgcacgcggccgacacccgcagcttcgtcgagaccgggcgcctgcagggcatctcggcctcggccgccggcaaatgcgttgcccggctggaacaggcactgggcgtgcgcctgttccaccgcagcacgcgcagcatcaccctcaccgccgagggccagctgttcctggcacgctgccggcgcatcctcgacgagcgcgatgccgcgcgcaccgaactggcgcaaccgcatgccgcaccaagtggcacgctgcgcatcggtctgccgctggtgggtgatctcactctgccactgatggccgagttcatgtccgcgtatccggacatccgcctcgatctggatttcagcgaccgcctggtcgatgtcatcgaggagggtttcgatgccgtgctgcgcgtcggcgagcccagcgactcacgcatgaacgcacgacgcctgggcgtgttcccacgccgcatcgtcgcctcgccggcgtacctgcagcggcgcggcacgccgcgcacgccggccgatctgatgcagcacacgctgctgcactatcgcttccccagcaccggcaagctggaactgtggccgatccactggcccgaccatgaaacaccgcaggaactgccggtacacatggtggccaataccatcgaagcgcgggtggcgcttgcattgcgcgatattggcctggcattcgtgccggtgcactcggtgcgcgatgcactggccgatggacgcctgctgaccgtgctcgacgagcatgtgcactcctgcggcatcttccacctgctgtggccgtcgggccgccacgtgcttccgaagctgcgggcattcatcgacttcgtcagcgcgcgcctggaaaccgtgccgtag

SEQ ID NO: 535059 - DNA, 1260 bp, Stenotrophomonas maltophilia
atgatgcccggagcggcaaccggctttttgcacgagggcgtggtgcctaacgtggcgggcctctccccacggatcaccgcgatgaacgctgttccttcccttgcacctgcgccgacgctgccgtcggtgcagcggctgctgcagcaggtccacccacagcgcctggtcggtacggtagtgctggtgcgcgagcacggtgtgctgcgccacgccagcgcgaccgggctggccgatcgcgagtcggccacgccgatgcagcgcgatcagttgttccggctggcatcggtcagcaagccgctgttgaccacggtgatcctgcgcctggtagccgaaggtgtgctggacctggatgcgccggtacagcgctggctgccggacttccgcccggcgctggccgatggcagcacgccgccgatcagcctgcgccaactgctcagccatagcagcgggctgggttaccgcttcctcgaagccgatgcggatggcccgtacgcacaggccggcgtcagcgatggcatggatgcgaatccgctgacgctgaccgacaacgtgcatcgcatcgcgcaggcgccgctgttgttcgcgccgggcagccaatggttgtactcgttgggcgtggacgtcgcgggcgccgtggctgaagccgcgaccggtgaaacgctgcaggcactgttcgagcacttgttggccgcgccactggggctggccgacaccgcattcgcgaccaccgatgccgcgcggctggccacgccgtatgtgagtgacacgccgcagccgcatcgcctgcaggaaggcgaagtggtcgcaccgttcgagggtacggtcggcatcgagtacagcctcgcccgtgctaccgatgccagccgtttcccttcggccggtgctggactgattggcagcgccgacgaggtgatggcggtgttggaggccttgcgcgatgtgcaagcttcgaatctgttgccgcccgcgctggtggcggagatggccagcccgcaggtgggcgagcaggggccgccggaaccggtcggctggggcttcgggttgggctttgcggtgctgcgcgatgccgccgccagtggcacaccgcagagcgaaggcacctggcgctggggcggtgcctacggccatagctggtttgtcgatcctgcgcgtgggctgagcgtggtggcgctgaccaacaccctgtacgaaggcatggacggtgccttcgttgatgagctgcgtgacgcggtctatgccgatctggaggctgcacgatga

SEQ ID NO: 535060 - DNA, 1185 bp, Stenotrophomonas maltophilia
atgagcggccatgccattgatgcggcgagtcctgccggcgaagctacacgcctgccgtgggccggcctgctggcgcttgcaggtggcggcttcatcaccctgctgaccgaaaccctgccggccggtgtactgcggccgatgggcgagagcctgggcgtgagtgatgcggcggtgggccagctggtcagcgtgtacgcgctgggatcggtgatggccgcactgccgatgaccgcgttgacccagcgcctgccgcgacgccccttgttgctggccgccattgctggcttcgtggtggtcaacacgctgaccgccgtgagcagcagctatccgctgatccttgccgcgcgtttcctggccggtgtgagtggtggcctgctgtggtcgctggtggccggctacgcggcgcgcatggtggtgccgtcgctgcagggccgggcaattgcggtggcgatggttggatcgccgttggcgctgtcgctgggtgtaccggcgggcacgttgctgggccagcagatcggctggcgctgggcgttcgcgttgatgagcgtgctgggggtcggcctgctggcgtacgcgcgctgggcactgccggcgctaccggcggccgcggccggtcagcgcacgtcgttgggtacggtgtggcgcatgcccggcgtgcgcagcgcgctggcggtgatggtgctgtacgtgctggcgcacaacgtgctctacacctacatcgaaccgctggcggtggaggccggcgccggcccgtggctggaccgcctgctgctggccttcggcgtggctgccatcgttggtatcggcattgccggttggggcgtggaccgttatctgcgcacgctggtgtgggcggccgtgatcggtttcattcttccggtgtcggccctgctgttgtggccaggacaggccacaccgctgctgctggcaacgatcctgtggggcgtggcgttcggcgccgtgccaaccctgttccagaccgcactggcacgtcgcgcgggtgctgccgcggatctggcgcagtcgatgctggtgaccggttggaacctggcgattgcagccggcggcgtagcgggcggcgtactgctgcaggccagcggcccgagccagctgggatggctgccgttgttgttgctggcggtgagcgtggcgtggctgctggcacggccgaaggcctgggcgtag

SEQ ID NO: 535061 - DNA, 1617 bp, Stenotrophomonas maltophilia
ttgagtcggctgcgcgtgatcattggtggcaccgcgctggcgctgctggccgcggccgtgccgatcgcggtgatggcctatgccacctgggaccgtgcagtcagcgtcgagcagcagcggctacgcgacatcgccggtcgcgccctgcgccgcgccgaccagtcctaccaggaagcgctggcggcactgcagtcggccgaggccagcgcccacgacgcctgcgggcccgaccatatccggcgcatgcagacgctggtgatgacctcgccgtcggtcgaccagatgggctacttcgagggtggcaagctgcgctgtacgtcgtgggggccgttcctgtccgacgtcaaccagcccaaggccgaccacgtcaccagtgatggcgccggcatcgccgtggatgtgcgccccgaggccagcggacggcgccaggtcctgtcgttcctgtacggcaactacgacgtgctggtcgatccgcgccgcttcgtcgatgtcatcgccgacccgaacgtgcgccttgccctggccagccccgatgggcgtctcctggccaggcaggacggcatggatccggcattgctggagaccctgctgcgcacccccgatgaaggcttggaccaccacaccctgtatgccaccgcccgcaacgaagagtggttggcgatcgcgaccatgccgcgtaccgcgcttgccgcgaccttccgccagcaggcgtggctgttcgtgccgatcggcgttctgctggccgctgccggtgccggcctggtgatctggctgtcgcgtcgccgcctgtccctgcgcggcgagctggccacagcgatccgccgccgcgagctgtacctgcactaccagccgatcatcgagctggataccggcatctgtgtcggcgccgaagcgctggtgcgctggcagcgcccggatggcacccaggtgcggccggacctgttcattccgctggccgaagaggccggcatgatcggcgcggtcaccgatctggtgatcgagaacgtggtgcgcgacatgcgtgaactgctggtggccgaccgcagcgcgcacatcgcgatcaacctggccgccgaagatatcagcagcggccgtgcgttgaagatgatctccaagcacatggccggcagcggcatcctgccgcagcagatctggatggaggccaccgagcgcggcttcctggatctggaccgcgcccgcacgatgctggcgcaggcgcgtcgggccgggcacagcgtggccattgacgatttcggcgtcggcttctccagcctgcagtacctggaacagctgccgctggacgcgttgaagatcgacaaatcattcatcgatgcgatcgacaccgagagcgccaccagcccggtaaccccgcacatcatcgacatggccaaggagctgggcctgtgggtggtggccgagggcgtggagaccgaggcacagctggcgtatctgcatacccggaaggtcgagttcgcgcagggttggctgttctcgcggccgctgccgcgggatgagttcgtggtgttccatcacaagcggcagcagcgctatggcgcggcgcgggagcacatgcagaatccgcgcagcgtgccgatcgagcgtgaggggatcgagtag

SEQ ID NO: 535062 - DNA, 1374 bp, Stenotrophomonas maltophilia
atgaccgagcccgcaacgccccccgagcacctgcgccgcagcctgtccaaccgccacctgcagttgatcgccatcggtggtgccatcggcaccggcctgttcatgggctcgggcaagaccatcagcctggccggcccgtccatcgtcttcgtctacctgatcatcggcgcgatgctgttcttcgtgatgcgcgcgatgggcgagctgctgctgtccaacctgcagtacaaatccttcatcgatttctccaccgatctgctcggtccctgggccggcttcttctgtggatggacgtactggttctgctggatcgtcaccgccatcgccgacgtgatcgcgattgccgcctacgcgcagttctggttccctgggctggatgcgtggataccggcactggcctgcgtgctgctgttgctggcactgaacctggtgacggtgaagctgttcggcgagatggaattctggttcgcgctgatcaagatcgtggcgatctgtgcgctgatcatcaccggcgccggtctggtggcgtggggcttcacctcgcccagtggccacaccgcgtcgttgtcgaacctgtggaatgacggcggcatgttcccgatgggactggtcggtttcttcgccggtttccagatcgcggtgttcgctttcgtcggcatcgagctggtggggaccaccgccgccgaaaccgcagaccccgagcgcaacctgccgaaggcgatcaactcgatcccggtgcgcatcatcatcttctacgtgctggcgctgatcgcgatcatggcggtcaccccgtggcgccaggtggtgccggacaagagcccgttcgtgcagctgttcgtgctggccggcattcccgccgccgccagcctgatcaacttcgtggtgctgacttcggccacgtcctcggccaacagcggcatcttctccaccagccgcatgctgtacggtctggccgaagagggccacgcaccgcgcgggttgtcgaagttgtcacgcgccgcagtgcccgcccgtggcctgctgttctcgtgcctgtgcctgctgggcggcacgttgctgatctacctcatcccgaacctggtgaccgccttcaccctggtgacgacgctggccaccgtgctcttcatcttcgtctggtcgctgatcctggtggcctacatggcctaccgccgccgctacccggaacgccacgctgcctcgatcttcaagatgcccggcggcgtcgccatgtgctgggcctgcctggtgttcttcgccgccgtgctggtgctgctgagcctgcaggccgacacccgccaggcgctggtcgccagcccggtgtggttcgtgctgttgggtgtggggtactgggtgcggcggaggaccgcgaagtaa

SEQ ID NO: 535063 - DNA, 777 bp, Stenotrophomonas maltophilia
atgtcccgtcgccctctcctgcttgcgctgttgctgctgcccagcctgtggcccgggctggccgccgcgcgcaccgtctaccgctgcgtgcagggcaacaccgtcagcctggccaccgcgccggaacccggttcacgctgcaccccgaaggaaatcgacgacaacgccatccagaccccgaatctgtggggcaacatgggcgtgttcagcggcgtgctgtacgagcgcgagcaggatggcgcgctggtctactccacccgcaacctgcccggctcgcgggtgttcctgaagttcaccatggccacgccgccgggtgagcctgcccacgaaggcctgggcaaggtgggcaagccgcagctggcgcagcatgccaaacagttcaaggccgccgccaaggccaccggcgtggatgacgcgtggctgcgcgcgatcgcccatgccgaaagcaacttcgatgcgctggcggtgtccagcaagggcgcacagggcgtgatgcagttgatgccggacaccgcgcaggagtacggggtgaatgatccgttctcgccgcagcagtcgatcgatggcggcgcgcgctacatgcgcgcgttgctgcgtcgctacaacggtgatcggccgctggcagcggccgcctacaacgccggcatcggcgcggtcacccgctacaagggcgtgccgccctatgccgaaaccctggcctacgtggacaaggtgatggccctgtacgcacgctaccgcgaggcgatgggcatccgtaccgaggtgccggcgcgctag

SEQ ID NO: 535064 - DNA, 1521 bp, Stenotrophomonas maltophilia
atgccccgcatcttccccctcgccgccctgctggtggccgcactggccagcacgccggcctccgcctcgatctcggtagcaccacagaagccgtcagtcaccgccgatgcgatgcaccaggcctatgccacgcgatgggatgaggcgatccagcagtcacgcagtggcaacacgctgggcgcactgatcgcgatggaacggctgatggaagatccgatgctggatgacttcgatgctgaacatcgcggccgcgccgctcaggtggccggctggaccgcgatggtgcagaagaagccggaccaggctcgccgctatctgcagcgcgcgcaggaggcactgccggacgatgcgcagatcctgctgaccttggtctcggtggaactgtccgagaaccaaccggcgcctgccaccaagcacctggtgcaggcgctgaagcatgccgatgcgccgttgccggtggaccaccacgcgatcaactacctgcagttccgcctgcgggaccagccgcagcagcgtatggaactgctgcaggcactgttcgacaacggctggaagagcggcggcctggaacccaccggactgtggctggcactggccacgctgcaggccgacaacggccgtggcgaggccatccccgcgaccctggcccgcatctccgcgcccgccgaaatcatccggctgcgcagtgacaagcgcttcgatccctatgtcgaccgcgccaacccgcgctttgatcccgtgcaggctgcacagaagcacctcgacgaactgcgggtttccggcctgctcgaccgggcgctggacgcgcgcatggccgagttcagcagcacgctgctgatgctggaccgcaacgaggaagtgctggcgctgaccgatggcatggccgctgcggccgccgaaggcgaggcgccttcggcggcagaggccgaatgggtggcatggctgctcaacagccggctcacggcgctgcgccggctgggtcgcaacgaggatgcgctggcggcagccaagctggccgcacgcatcggtgcactgggccccgatggtgccgagcaccagttcaacgtcggcttcgtgttcagttcgctgggccgcatgcaggatgccgccacggcagtgaatgacatgccgggcctggccggttacggcaaggcggcccaggcactgctgcagttcgttgccgcccgtgaacgtggcgatgccaaggccgaacaggccgcgcgtgcagcgatcctggcccagggcgatgacgcgcgcctgttccagcgcgagatgctgctggacgagggcaatctcgacggcgcagctgccgtgctgatcgaacagttgcgctcacccgttgaacgcggtgaaacgctggccagcctgcaggacatgcgcacctatccctcgctgcccggcgacgtgaagatcgatgcggcctggcgtgcgctgaagcagcgcgccgacgtgcaggccgaggttgcccgcctgggccgcatcgaacgctacgaactggtcagcacctccacctcgcgctga

SEQ ID NO: 535065 - DNA, 2082 bp, Stenotrophomonas maltophilia
atggcacggtggcaatggatggcggcaggcgtagcgttggcgaccgtagtggcactggccgcgacctggtgggagacgccgctgcatacgccggctgaaccggcaggcccggttccaacgccgctggcgtggaccgcgcagatcgagccgctggccggcgatggccacccgggtgaccgcgatggcgcgtccgcgcaggcgcgtttcgccgatccgtatgcgttgctgcgcagtgcagatggcagcatctacttcaccgatgccggcgacaacaaccggatccgccgccgcctgccggatggccgcatcgagaccgtggccgggcagggcgaggggcgcattgatggccctgcactgcaggccagtttcaatacgccctcgggcatcgccgccgacgcgcagggcaacctgtatgtggccgacaccggcaaccacgcgatccgccgtatcggcaccgatggccaggtgaccacgctggccggtggcgaacagggctacgccgatggccctgccgcgcaggcgcgcttcgatgcgccgatgggcatcgcggtggatgcgcagggccaggtctatgtggccgacaccttcaacgaccgcatccgggtgatcggtaccgatggcaacgtgcgtaccctggccggcggcgagcgcccgggactggccgatggcctgggcgccgcggcgcgcttcgataccccggtggcgctggccttcgatgcgcacggcgcgttgctggtggccgacctgttcaacaacgcggtgcgtcgggtcggtgccgacggcatggtcagcacgctgctgggcgatggcggcgtgatcaatgggccgctgtcgctggccaccacgcacgacggcgtgctgtacgtgggtgaccttgatggacgcatcgtgcaggtgacgccgcagggccaccagatcgcgctggtgggcaacggccgcctgccacgcctggcccgccccagtggtctggcgatggatgccgatggcagcgtgctggtcgccgattccgccagctatcgcctgcaccgcctgcgcccgctgccggtgggtgacctgccggcaccggcgctggtcgggcccgctgccgatgcagcattgccggacaccggtgggcgctggccattggcaccccaggatggctggcatgaagtggtcggcacgctgggcgaggtgcgcggcaacttcaagggcgagagccgccaccacctgcacggcggtttcgatgtgcgcggcgatgtcggccagaccgtgctggcgatcgccgatggcaagatcagcagcccggtagcggcgtggagcctgggtgggcaggccgagggcctggccgtggaccgtctcaagtacatccacatgcgggtcggccgcaccccgcgcgaccagccgttcgatgcgcgctggcaggcgctgtacgacgagcagggcaagctggagcggatgcgcgtgcgtcgcggcacgcgcatccacgtcggcgatcgcctgggcagcatcaacaaccaggcgcacgtgcacctggcggtgggcaccggcggcttcgaaaccaacgccgtggcgctgggtttccataactacgccgaccacttcgcaccgcgcatcaccgatgtggcgctgctggacgacaacgaccagccactggcggcgggcagcgacggcgtggtgatgctggcgcggcagggacgtggcgtgcagatcgtggtcgaggcctgggaccaggttgataacaacctgccgcggcgccggctgggcatgtaccaggtgggctaccagatcctcgatgctgccgggcagccgctgcagggctatgagcagccgcgctggaacatcgtgttcaaccgcatgccgccgcagaccgaagcggtgcgcgtggcctatgcaccggacagcggcatcaccgtgcatggcagtgcggtgacccgcttccgctacctcgccaccaacaccgtgcgtgatggcctgatggaaaccgggcgctggcagccggcggcattgccaccgggcgagtacaccgtgcgcgccagcgtgcgcgactacagcggcaacgaaggcgtgggcccgcgcgagatcagagtacggttgctgccatag

SEQ ID NO: 535066 - DNA, 408 bp, Stenotrophomonas maltophilia
atgcagcagtacctgcttctgatctacatcgagcctgccctgctgcaggccctgcccaccgaagaattcaacgcgctgatgcgcgactgcctcgcccacgccgacaaactgcaggcggaaggcacgctgctggccgcgcagaagctgcagccagtcgacaccgcgcagaccctgcgcgtgcgtgatggccacagccgtgtattggatggcccgttcgcggaaacccgcgagctgctggccggcttcaacctgatcgtcgcccgcgaccgcgacgaagccatgcgcatcgcccgcgatttcccgtgggcacgcttcggcagcatcgaggtgcggccgctggaagacatggacgccgagcgcgaacgctgcggcgccccggctgcggctatggcagcaaccgtactctga

SEQ ID NO: 535067 - DNA, 261 bp, Stenotrophomonas maltophilia
atgaccagcccgttgagtacggccacgcccgacagcgcgatgaagcccacgccggcagagatcgacaacggaatcccgcgcagagccagtgccagcacaccgccggtcagcgccagcggcacgccactgaacacaatggccgcatccttggccgagccgaaggccatgaatagcagagcgaagatcaacgccagtgtcaccggaaccaccacccccaggcgttggctggccgagatcagctgctcgaaggtgccgccgtag

SEQ ID NO: 535068 - DNA, 123 bp, Stenotrophomonas maltophilia
atgaaactcaagccactctccgccagcctcaaggtgtccggacagctcctgccaaaggacattgaaaccctgaaggagcagggtgttgcgagtgtgacctgccccctttctcagggccactag

SEQ ID NO: 535069 - DNA, 885 bp, Stenotrophomonas maltophilia
gtgagcctcaccttgcaggacaccgcgctgccgtcgcgggtgctgatcctcggcctgggctggagcggacgcgttctggccctgcacctgcaggcgcagggcgtgcgcgtggccggcacggtgcgcgccccctcggcgacgccggacgatggcctgctgcggcatccactgcgcagcgatatcccgccatcgcctgccctgctcgatgagatcgcacgggccgacgccgtgctgagcagcgtgccgccggatgccgagggcgacccggcactgcgccttctgctgccggcactgcagggcagcccggcactgcgctgggtcggctatctgtcgtccacgtcggtgtatgccgaccgcgccgggggttggatcaacgagcgcagtgaggctgatgccaccgaagtggccggcgtgcagcgtgtgcgcgccgaggcccagtggcgtgcccttgcggaagaacgtggtatcgcctcggcggtgttccgcctgccggggctgtatggtcctggccgcaacgccctgctgcagttggccgagggccgtgcccgccacgtgatccgcccgggcctggtgttcaaccgcctgcatgtgcaggacctggcaaccgtcatcaccgcagcgatgcggcgaacgacccagcaggggctgtacctgcccagcgacgacgccccggcaccgccgcaggatgtgctggccttcgccgcgcagctgggcggctttgcgctgccacctgccgtggcctgggacgaccctgcactgagcccgacgctgcgccgcttctacgagagcaacaagcgcatcgataatcgaggcacgcgtgaagcattgggctgggaaccgaggttccccagctaccgtgagggcctgcgcgacctgctccggtag

SEQ ID NO: 535070 - DNA, 594 bp, Stenotrophomonas maltophilia
atgaaattctcccgcgtggtcctgctgctggcactggccggcgcctccgccccggcgcgggccgacgactgccggttcgacgatcacgccggactgcaggcgatgacgcccgaggcgttcaaccgcgggcctggcgatggctgggacgcactgatcgagcgctcgggctgccagctggagatcgctgacctgttcgccgcctaccgccgacagtccaaggcggccgggcataccgagctgacctggcatgaggcgcagctacgcgccgacgcagggcagcgcgatcccgccagcgccttgatgcggctgacctacaggccccgcaacgctgatccggagggatggaacctgtacgtcgacgccaccattgcgtttctcgatgacgacctgccggcactgcgccgcattcgcgcgcgactggctgcactgccaccgccggcgggcagcgggctcaacgatgggtcggcgctgatgcaggccgtagatggcgcgcagagggcgccttggccgccacggttgaagatcgtcgatgccctcatccgctgcatgtaccagccctacgcgctggcgtccggatcgtgcccggaaccgtag

SEQ ID NO: 535071 - DNA, 804 bp, Stenotrophomonas maltophilia
atgactcgaaccaagaaagtccccggccgcaacgaaccgtgctcctgcaactccggcctgaaatacaagtactgctgcataggcaagcgcccgcaagagcgccgtgtccagctcaagactgcttgcaacgaatgtggcgagcagcacgagatagatctcacgccagatatcttcaatcatttggcgtcgacaaatctgccgcttcacaacttctgcaaggaccaagatctgttctacttcgggcatgcaacggtgctcgagcatctggaactcatggaggcgctgaacgcaggcacgctgacccgagagcgagtcatcgaagtctttcgaaaaaactccacagaagagcaggcgctgtcgctcatccaagaggccgcctgctggagcccatattttgcgcgccgtcacggtctcctaaaggaggccgtggaggttcactttcttgggaagtacggtgccgccatccccgcgctctttgcacagatcgaaggacttttgcgtgacatcgggggtttggctcctgcggaacaggtgaagccaaccatcccaagggagatttggaacgcccgcttgatgtttactgtggatgacgacgtacggtacttcaacgcattcatcactcgactcttctcaggcaatcagacgcaggatgagtttgggcggaactcggtcctgcatgggctcaataccggctatcagagcgaggacgcatccctcattcttgttctgtgcgtgttgaagatccggcatttcctctggctgcaacggcacacgcacgctctgatacgtggcgcagaggattga

SEQ ID NO: 535072 - DNA, 771 bp, Stenotrophomonas maltophilia
gtggacccggctgaatggaaattgattgttagtacagtgaccgatcgcatgaatgaccatgtccgcgcgtttgggacgccactggtctcagacgacggtcggatcgcctaccagcacggtagcggcaactatcttgaacgcgacagaaagatcgttctacttacctgcgaacacgttgttcggggcgaagcggttcgtttccggttcaatgggaaggacgcgggactggagccatcttcggagtgggtggccgattcgcatccggttgatgccgcgtttcagatcgtacctgccgcgtcatgggggtatcacgacaatgaggctcgcgcaatcgcgccctgtcgcatcgcacgcaagcatgatccgcactgccaagaagaattaatgttcttcagaggttacgcaggtgagaacgcccgctacgccttttccgtacaccaggtcaacgcgtctggctactgcacccaggaggtccaggagtcaggcgacgacgagcttttcgaactgttttgggagccgctccatacccagttcacgttagggacgttgtccgcgctgagatcggagacgcgatacgacaatgctgagggcttcagcggctcgcttgtctggaacacgcggtacctagaagtcacaggagccggtggcgtctggacaccggaggacgcggtcgtgacggggctacttcgtcggtgggaccagaagacgaaaacgctgctggcttggcgcgcagagcacctgcaggcgtggcttacaagcaagggcgtgtag

SEQ ID NO: 535073 - DNA, 717 bp, Stenotrophomonas maltophilia
atgaaagacctcgggggctttgagaagtaccaggcgaccatggccgactgggtgtcggccactatgagcgccaagggcaagcgcgtgcccgaccctgaagacttctcgccgcctgagctggagctcttcaatgaggtgttccgccgcttcaccgatatctctgaggcagtcgacaatattgagctttgcacgcgcttcgtgagcgcgcggaccccgcgcgcccgagacctaaagcttgacgcgtaccttaactatcacatctctttctatctccaagagatctacatcctaaaagagcggctcaagaagtacgcaaagaaggtaatgcgtctgcgtcgggatctgggtcatgcggtggagtcgaagagatatacaaagatcatcgatcttgttgagcagtccctgtcgtcaatcgtttcggctcggggctcgcatgttcacgatcgccccttcacagacgatgaaatgcgcatgctaggcatgtactcttttctcgcggtccacagcaaaggcgacactaagtggcgtgcgtacgcctgtgcagagtactcggatgtaaggcgggtgtgggtcaagcgcttggttgccaaccaagttgagcttaataagcttctggacgcattcttttccttcttgcacccagaagtctttgtaagtggtctggcaacgccgcctaacagtttgtccaagtcgacgctgcctcgcggcgcggcttaa

SEQ ID NO: 535074 - DNA, 813 bp, Stenotrophomonas maltophilia
atgatttcgcaagcactcatcaataagcttcagaaagaactcccttcgacctatcggtttgcaaaggatgcagatcatcctcttctgatggacgggctggatttgatggttgggggggaggggtgcctcacatccattgtgacagacaagaagaacagaagttatgagcaattgctcgctcagctttcgctcttgcgtctcgcgctcccagagaccgcaacaattgcgctggtaaccgacaacgaggactcccgagcttcgctttcgcgggaatatgaccgaatattcaatacgcaagaagttggtcagtcacttctgagatttattcgatcaaaggatgggccaagaaccaaaaagaaagacattcaggcgtcgaagagcaggcatcatcatatttattcaagattgatgcttgtgggtcggtcccgcgccaactcgttcaaggcagatggcagcgcccaacaactttcatcgcgaacacagggctcggacaagatcagtgcctacttttctgccacgcatctctcaaagagcaacgtaagaagacagattatatcaacatgctacagttcggtcgccaattacatagcgatggacaatggaaccccgtacgtttcaaaagatcgctacttccagatacttttgagtgacttcctgccgtattccaggttagacccggaaaagccaatgcgtgctttggcgttctctggcaacttgatagctgatgttcaagatcgggatgaggcggagcagttaattgatcgcgttatagcgctccttagtaagaacatgccgcgggagatcagtggatga

SEQ ID NO: 535075 - DNA, 198 bp, Stenotrophomonas maltophilia
atgggcgtggtggtgcttggcggcagcgcaacgatcccgcttgggctgggcctggtcctcactctggccaactgtgccggtgccctgtatctggcggactacctgctgcgcctcggggcggcaggcggtggcccgcactggttgatcatcttcttcagtacgccggtgctggccctgttgtattccattgcactctga

SEQ ID NO: 535076 - DNA, 750 bp, Stenotrophomonas maltophilia
atgaagaagcgtctgatcgtcaccggcctggcctgcctgatgctggtggcatgcgccaacccgaagaacaccgtgattccgcaggacgtggaccagttggccacgatcaagcccgagctggagaagcttacccctgaagaacagcagttggctgcagcctacatcgtgcgtgtgaccctgacgtcgaagatggccggcgtgttcggcggcaaggaaggccagggaattccagcgggcatgacgctgggcaaggccgtggaagagcagcgccgcttcgtcgaagagcgcaaggccgaggaagcgcgccaggccgcgttgaaggcggaacttgaagcgcgtcgcgaagcggcgatgaagccgctgcgcgaggcggtcaccgtcaccgtggtgtccaaggacatcgaagtgcagcgttcgcacggcatcaccaccgacgaactgctggtcgtggatttcgggtaccagaacaacaccggcaaggacatcgccggcgtgaagggctatgtgtcggtacgcgatctgttcggcgaggagatttctggattcgccatcaccaatgacgtgaccattccggctggccagagcgtgatctggcagggcagtcgctcggtgcgtttctcccagaccaagagcaatgaccgcaagctggccagcctggatgagagcaagtacacggtggtgtggacgccggaagccgtggtgttcgttgatggcagctcgctgacgttgccgcaggacgcggcgtcctga

SEQ ID NO: 535077 - DNA, 1299 bp, Stenotrophomonas maltophilia
atgctggccttggccagtctactgctggcgaccctggtcagtgtggccgtggtcggctggatgcctcggcccgcgccgccgccgatgcggctggatcaggccatgcaggtgttgcgtggggaacaggcgccagcgccgctgggcctgcatatggcaatgcaggatgtgccgccacagggtagcgccagcgactggcttacacagctggcggcgcttcagatgggcttgccggtcaaggatgtacgcctggtctggagcgggcagggcaaggcgcccgacgtgcaggtcatcgagggcggaacggtgctcgatgccacggcgcgggctggcgtgctggagacgcaggccgcggcgctcactgccatgcaatggccgccgttcgaactgggcgtgcgccgggccggtggcggttggcaggtggtcggtagcgatcacagcgatctggcggcctggcgacgccaggtggtgattgcactgttgggcggtgccgtcctgctggcgccgctggcagcgtgggcgtcggtacggctggggcgcccgttgcggcgcctggcccaagccagcgcacgtgtggacctgcaggccgatacgccgttgccggatgacggcccacgcgaagttcagatgctggcttccgcgatcagcaccggtcgcgatcgcttacgcgtacaggcacaggacatgacccacatgctggccgccgtagcacatgacctgcgcacgccactgaccggcctgcgcctacgcgccgagttcgcacctgcgccacaggcggcgcggatggtggcggacatcgaacgcatgaacacgatgatcgagcaggtgctggactacgcacgtggtgaactgcagccgttgcagatgcactcgctggatctggctgcgctgctggaggagtgcgtgcaggcagcgctgctgcgcggtgtcgaaatctccctccaggggccggacagtctgccctggcacggcgacgcgctgctgcttcggcgcgcggtcgagaatctcatcgataacgcccaccgctatgccgggaccgtggaactgcgggttgccgtggtggctcctgttgtacagctggacgtgatggaccgcggtccgggtattgtcgaagctgatcgtgaccgcctgctgcaaccattccagcgtagcgagagctcgcgtagccgcgccaccggtggcgccggactcggactggctgtggctgccaatgtggcaaggcgccacgcgggcgaactgcagctgctgcaccgtgagggcggtgggctgatcgcacgcctgctgctggcaagcactagctga

SEQ ID NO: 535078 - DNA, 426 bp, Stenotrophomonas maltophilia
atgaataacgccagcgaaggtctctctcctcagatggccctgcttctggttcagggcgtagaaggccaggagggagtcaccttggccttcgcccaaagcgcactggatagcctcgtggcggccggaacgatcatggaaagctacgtcaacgccgtcaaggcgaaactacgggtcccagacaattctagcgccgggaagatgcttattgccggtagtgaggatcaaaaaaaggaccacttgaagacctggtacggcaactatgcaattttgatctattcaagcatgaaggccggcagcctccgcaacagctttctgctcgacgcgagcagagtttacgatatcgtcaacaaggcgcaccacgacgctaacgcccggctaggtggcactacgcctcctcagggctcaggttcaaaattccagctttga

SEQ ID NO: 535079 - DNA, 252 bp, Stenotrophomonas maltophilia
atgttgctttgtgacgtcccccaagtcctttcagcagagggcgagctggactacgtggacctgattacgcgcgctggcctcgccaaagacctggtgggcaagatcaacggccactacctcctgcatgaggacgggtgccctagggaggtcggtgaggcgtgtacctgcggccttgtcgtggccttcgtagggccgtccgcggtggtcatggtggatagccactaccggcacaggaccgatccgatcaactag

SEQ ID NO: 535080 - DNA, 249 bp, Stenotrophomonas maltophilia
ttgagcactgaagagaaccccactcacgttgacgtgaatttggtcaaagagatatttgtcgccgctgcttcgcaggcgatcgcgctcaggcaggcggcctccgtaaaagatcaaattgcagcgcacaacgtagacatcaagtttggcgagatgctggagcaggctaaggccgccgccggaatctattcatcgcttgaggaaagcgttacgaaggaaagcactgactcgtactttagcagtactcagtag

SEQ ID NO: 535081 - DNA, 510 bp, Stenotrophomonas maltophilia
atgggcagttccgattggctagccgcccaagcagagctcgagaagaacaaccggctcaatggcggaaagccgcccggtgggtcggtttggcgtgcgctgctaactgcactggcgtggtccattggctctgttgtcgccttatctgcagctctcggcctcgccggcttccttctggctcggtatggctcagatgagtacgtgctggtgtgcgaagggacagtctccgcagagggtagggatgaagtgcccgcgaccatgtacgccgagatgcgcgagtttgggcagatcatccggctatggagcaaggatgcgggaacagtgcggatggagatccccaatgacttctacgacgcgggccagcttcgctccgccggcagtcttacgtccatttccacttacacgggcctctctggccacttttcgggcctgagcggcaccttagccatgcgtatgggaaaaggccgagagttcgaagggcagtgcgtgcgccgaggtccgccggccggttag

SEQ ID NO: 535082 - DNA, 624 bp, Stenotrophomonas maltophilia
atgtcgaccacttccactcacgacgagctcagaaagttctgcgaacgctcgattacaaagatgagcgacgccgatgcccttttgcatatcggacagttgatcgacatgtcgttcgacgcattctatggtcgcggtgccaggcgtgcactgaccctgctcgataccttctccaagcgcgagttgaccgaggcgcaaggcgcgctagtcgagtacttccgtgccaatgcgagagctgccctatcaaagatcgcggggcttcatgaattgatttcttgggagtcgcaggaacggcaggatgaaatgctagcgctctcacgtgctgtgagccacgacggattttcgtccctcgagaagattcgccagtgtcagattctgacgaactatgccaaccttctgagcgcagtgggcaggactatagacgctcttcccttttgggacgccgcactcagaatcgcacctcgatttgcgatggcccgaggcaaccgtggctgcggtctattccgatatttctggctgatggagaatccacgcgaccgcgccattcttgcactgcacgcctttgacggcctccaagccgcttgcagcgcagatgcaatccatgaatccgaggacccactagcatga

SEQ ID NO: 535083 - DNA, 804 bp, Stenotrophomonas maltophilia
atgtccaatcgacagccaaactcgtcccgctacgaactgaaggtggcgcagcatctgatcgaaagccagcgaaagctgactccgcgagtcaccgacatgctcctccgtcttctgaccatggctggaactgctccgccaaaagcgcaagagcaaatgggccaaggtatcggaagacggctgacaacaatgcttgaggcgaccaaagcggtcttctctctcatcccgccaagcaacaccagagtgacgcgagatgctttgaagaatgccaccataaatctccaagccttcctcatccataccgtaggcatcatggacaatatggcctggacctatgtctactggcacgggatggaacaggaggtccaccggaacgatgttgacctcttcaaggccaagatactggaaaggctcccgatcgggctcgcagaccatctaagcagtccggatctgacttcgtggcgggacacctacctaaaaccgtatagagactcgcttgcacatcgcataccgccgtacatccccgaaacccatacagcggcagaagcacgcaagctccaagagctggaacgcagcattcaagcttccacagaatcagcggattgggatagtgcacttaggcttcaagaggaactgggcgccatccggggacatggctacctaatggtctcttccttcgcgcccagcacaggccaagtcttactccatccccagatgctttccgacttcgaaaccatcttcgacgtactagaggcatttgtccggcatgtcgccactccgcctcggccacgcaagactcaggcgtga

SEQ ID NO: 535084 - DNA, 1464 bp, Stenotrophomonas maltophilia
atgatcagaaaggaagccccccctgtcgtagacccagcctcaccttggaaaggagacatcttcgaccggatacatgacggcaaagttctgtccaacttaattgcgaagagtgctgaccaagccctcaccatttctcttcaggcaccttggggaagcgggaagaccgtattcctccaacgcctcaaggaacatatccggaatgaattccaaattaaagccatttcagtcgacacatggaaatatgaccatcacggtgatccccttaccccaattcttgcgcagctccttgacgtaattgaggaacgggcaaaaaaagagcgccccaaaagcacgctccgaaaaaaactagaggcggctggctccgagctagcagctaccggtgccaagtacgtcttacccgcgctaagtgctacagctaaggtaaccgtacctggctatgccccgttggtggaaggcgtcgaatgcctagcggcgaatctcttggaaaggcagagagaattgatgaactctgaaccagccttcagatctgcgcttgaggcggctagggacgcaatcaccgctcgtaggccgacaggtccgatcagaccgattcttttcatcattgatgagctagaccgctgccgacctgactatgctattcaaactcttgagcgaattaagcaccatttcgatgtgccagggatcatattcatagttgcaacggaccacggaaatctccctgccgccgtgcaaacggtttacggcgcccacgtgaacggggaagaatacctccgaaagttctttgactttgaataccatctctccccagcatctcgagaagcggtgacaaaatacttactcagcagtgccaggcttggactagaaagcgagaggactttagaagaaatcgtcggccacccgtcggcctttaacatcaagcaactcaacgaagaacaggtcgaagagcttgacaggatcgagtacggggtcttctttaccgcgatgtcttcagtctttcagctctcccctcgcgatcaaattagagcattcaccttgatatatgcgttctacataacgcgcccaaagtcattcgtcacaattccgttccttgactgctttatcgcctgtcttagattcggatctccacaaaattacatccaactatcatcgacaggtgtaatctcgattccgggcgactattccaacgaccacaagaatgagctcaactgcctgagacctcagaactacaacgaagttctgaacctttttgttggaaacaaagccaaccacgtcaattcgttgcgcacagtggaaaagaagatcaaagaatccaatgcaggcgcaaaccttggcgtgctcgcagcagtcacttcgttggcacggtgcaatcaattgcgaaattttgattcctcagcctatatcgagtctgtgattcgcctgagcagatcattaaacagagaagatgagcttagccaacccagctag

SEQ ID NO: 535085 - DNA, 897 bp, Stenotrophomonas maltophilia
atgaccgccgtgatttccctgcccgatccttcgcagcgcgcttcgcgtggtccgcgcgtggccggaccggggctggacaggctgggcaggcgcctgcgccgccaggtcggccaggccatctccgacttcggcatgatcgaagcgggcgacaaggtcatggtctgcctgtccggcggcaaggacagctacaccctgctggacctgctgctgcagctgcagaagaaggcgccggtgccgttcgaactggtcgcggtgaacctggaccagaagcagcccggtttcccggagcatgtcctgccggagtacctggccgcgctgggtgtgccgtaccagatcatcgagcaggacacctattcggtggtcagccgggtcatcccggaaggccgcacgatgtgttcgctgtgctcgcggctgcgccggggggcgctgtacaaccacgccaaggcgcatggcttcacccggatcgcgctgggccatcattgcgacgacatggtggctacgttgttcatgaacctgttccaccatgccaggctggcggccatgccaccgaagctgctcagcgacgatggccagcacgtggtgatccgcccgctggcgtatgtgcgcgagcacgatatcgccgagtacgcgcaggcccgccgtttcccgatcattccctgcaccctgtgtggcagccaggaaaacctgcagcgtcggcaggttggcctgatgctcaagcagtgggaccaggaccatccgggccgcatcgaacagatcgcacgcgccatggccgatgtgcggccagcgcaactggccgatgccacgctgttcgatttcagggccctgggccgcagcgggcatgcggcgcatgccgatgcctggctggccgacgcagcccccgagacgcctgccgtttaa

SEQ ID NO: 535086 - DNA, 1809 bp, Stenotrophomonas maltophilia
atgaccccctccggcctgaatctgtggatcgccctggcactcgctgtggtcgtggccatcgccagcgtgcgccagctgcgtggaagcaccccgcatcgtggccgccgctggatcgtgatcgggctgcaggtcattgccgctgcattgctgtacgtctgcctgttccctccccgccatccgcaaccggccgcaggtctggtggtacttgccgctgacgccaacaagaccggcccgctaccggccagcgacagcccaccgctgctgctgccggaagcgagcgctgtgcccggcgcacagcgcgttcctgacctggccaccgcgctgcgccagcatccagccgccacgctcaccctggtcggtgccggcctggtcgcacgcgatcgcgatacggtcctgccacgcgacgtgcgttggcagccggcagcaccgccgcgcggttgggtcgcattgcagccaccggccgacgccgcgcccggcgcacgcttcgaggtgcaggcgcaggcgcgcggcgttgccggggcaaaggcggagctgctggacccggccgacagcgtggtcgaccgcacggatgttgccgaagacggccacgttcagttgagtggcatcacccgcgccgaaggccgcagcgtgttccagctgcgcctgcttgatgccgacggtcatgtggtggacagcgcgccggtgccgcagcagaccctgccggcggcaccgctgcgcctgatggtgcgtgccagcgcgccggggcccgaactgaagtacctgcgccgctgggccgccgatgccggcatccgtgtgcaggtgcaggcagataccggcgccggcgtgagcgtcggcgacggtgccttgccgctggatgcggcgtcactggcgcgcagcgatctgctgctgctggacgagcgcagcctggcggcattgagtgcaggccagctggccgccgtgcgccaggcgctgcatgagggactgggcgtgctggtacgcagtaccggcgcaccctcggccagcgcgcgccagcgcctgcacgatctgggcctgccggtgcagggcgatggcagcagccacgtcctcgaccttcgcggcgacggcgaaagcgtgatcctcgccgcacggcgtggcccactcgccgcaggtacgctgccaaccggctacggcgaagaggcggaccgcagctcgcacagcgcggccctgcccacgctggaagcagtggcgctgcaggcgccgggcagcaatgcgctgctgcatgatcgcgctggcagggctgtcggcggctggcgcggtaccggcaagggccgcatcggccagctacccatcaccgacagctggcgctgggtgctggccgggcgcgatgatcgccacggtgaactctggagcggtgtggttgccacactggcgcgagcacaggacagcagtgatgcgctgtggtcgccacagccgatcagctgggcgggcgaacggcaggcactgtgcggcgtgcaggcgccactgcaggtattcaacgcacgcggcgacggcacgccgctgatcgtcgatggcgcgacgtcagccctgcgctgcgccggctggtggccgcgtgaggcgggctggcagcgcctgcaccacggtgacacgaccgtctggcgctatgtgttcgaccctgccgatgcacctgcactgcatcggcaggcgatgatcgatgcgactacacgcgtactggcgaccagtgcaccggcgaacgcgtcggtgatgcagctcgtgccgggatcgcgctggccgtggtggctggcgttcgtgctctgcgcatcgctgctgtggtggctggagcggcggcgctga
